United States Patent Application Publication US 2026/0185093 A1 - sequence listing, part 3

SEQ ID NO: 285 - DNA, 20612 bp, unidentified
  misc_feature 1..20612: note = Fanzor polypeptide
  source 1..20612: mol_type = other DNA
taatcaatatcttattccataaacccctctttctctcacgtttatttccctctattaacagcctcggaattgcctataacgtctctctactattcctgtccaatactgcctagtctttacttacacttttctttacaattaaaaaacataagatgtaattggtgttttctcagttgttatccatcccataggggcaatttccccatctcatgctcataagattcggctaatccattctcttatgatctctcgcgcaattgaggcatattttttcgtcaaatttgaacatattgatccgcaaatcttatcttttcccttctcccattccattccccataatcacttctgaacttgtcgtaaaaatcagacataccccctttaaacacactaaaagtgaacattacgaatggaaatctcgggccggaaagtgaactgcttctcctccccatctctactcttccgggataagacttgtctctcgacccaatggcgcggaccagcaaccccgcgtcatttagaccgttcctacctcccccccccctcgtctcgagactggttcacgaagaaccgcctcacttactcagcaccgttatttctgatatgccgcgtcccccacctcacgctgtggcatccctgctccgatcgttcttccactctcatcacctctacccacctctcctctacctagccgatgcaacgcaattctggtcgcacttcttgtctgtctcgcgacgcacggcatgaattgttgatcgttgctgagactggacgatagttcgatcggtaactttctgttcattcctcttcccctccccccctgctcgggacgcttatgatgcgtctgtccgaatgcaagaatctacccatttatccttcacccagcctcttccactccgcgatagttcgccgtttcatcatcacccaccgtgcgcggcattataatcggattgaaaactgatccctcaacttcaacctcgtctagtgtcttgtagtgtaacaatcctgctatcgtaccgtgccgcttttttctttatactgcttaattttctgaattagtctgggtacaagcattgcttgttctaaatatccccttccatcaatcactactcttccgatatgttggcgatgctcgcctccgatttgtcggaacgatcctctggtcccctttccctgtctcgttctgctcgtcaaccccttctgtataccgctcccactacactgtgacctagtcggagagaaagcgcgacatagatccactccaggcgctcgctgccggcaggaagtcgaggggtgtgctaccaccagacacaaatacatcctcgctaactctacattcgtttccaccgcatcttctgccccgctgccccccggctccgagtgccggtccattcgattcgtgatgtcatctccccattgtgagtaacatctcacgcttggtattcgcctccaaacccatcccctccgttgggctcaagataacgtgggcgtgccctcgtccgacaatcccctctcgcaacctcgtctctcctgtcgctttcccccctttccttcttttgccgtcaagcagggatacaagcgtccgacgccagttcacaacccctccgctatttggatcgccatcctgtcaaggacccatcgcacgagggagacctctttggagaaacgaaacggtggtggagaatcggcgacgacgctgctcagcggccccgtaatccttagcgcgcacagcgatttggaattggagtgacaccgcatctccgtggtaagctcgttgttttggcagactatgattcgttctttctgcatcccccttgggggggggcgggaatgactcgatcccacgcagcccccacgtatgcctttacgcgtgtggtggactctgtccttccgcctcgcatcccctcctccaagttccggatcacacccaacctaacacgaagtgagattattctgaacacctattaagtattcttgaagacaggagtttcttcttcggcgacatcggcagaacaggtcgcatgatccagaagattgctatccgcatagaggtccctgcgcatacaaggcaatcgaccaaaaagaaacgtgaaaacatgtggttgaagaaactctctcgttcaccaagagattgataaatatattttgtacgtgcatatgctttttgaatgaacacaatgagaatcttacgcaagcttctaaacatacgagttattgtcatcatcgggatcgtggtcatggcgataatcttcactcacacactacagaaaaagaagaaggcagcaacatcaacagaatctgcaggtgggaagagcaatgtcgcttccaccagcccttccaaggagagcgaaacgtttgatgctgctcctatcaatgaggacaaagaaaaggaagttgttgtcgctgaaacaaatgatgttgatgttgatgttgatgttgatgttgatgatggcaaggaggaggattcaaaaattagatagtacaagtctgatttgagagtgtaaaagaaaaagtgatccattgttccattgttccattgttcatctatcatgtatctcatttccatcgaggggaacatcgggtgtggcaagatatccttgttgaatgagatcgagtctcgcgtgaccgccagcaacttcaaaattcgtgttgagtttgagcctgtggaagagtggacgaaggatttcacgggtgtttctggcgtggggtcgaagaacatgcttggcgagttttacaatgacaaggagcggaacgcgatgtcgttccagatgttcgtcctatacactcgcatgaaacaataccgccgtatcgccgaagacaacatgaataccgtaacggttattgagaggagcatggatacagatatgaacgttttcgcaatgatgaacctatcgcatgacgattgcgcatggcactcgtatgtcacgtggtacaatgaagcgcaaaaagccattgctttcccatgcacgaatgtctacctaaaatgcagcgctagcaagtgtctggaacgcatcggggtccgcaatagggacgctgaaatcggcgttaccctcgagtacctacaagatgtcgagaaaatccacgaacaatggttgttggattcgtctgacgtactcgtcgtggacacgaacgccgatggcgatgatgtgatcaaacgaacggccgacgcggtgtttgaaaaaatcaggaccatgtgccccattatcggggccggtgaagcttgatacatgattctcgagactcaactggcacagcatcccatgtacgcgaggaacaacatacaagaagattgcacagcacaacacaattgtgtccgtagaatgatatcccctgaaaccagatacaggtccgtgttcacttgaagatttgtaaaacgaaaaaagaaagaattgtccatgcttttattactccagtgtcttgcggttcatgtcgggttcgattgtcgagttgttctagattgacaccttgtaccgtggattggaaggctcggaacgcagattgtggctcgcgttacgcacactctgtccctgggtgttcataccgatgtgaaagccagcgttaaggaggttcacgtcgttcacatcgccctggcctgccgggttagcctgcgcccacttggtgttcgcagcgtcacggggcaatagatcctcgggtctcaaccgctcctgagggaaggttgaccccttgttcggatcgcttgagaagtaagatgagctctgtttggtcggtttggggggtaggtaatactcgttggaagcgggttcaagaggcatgaggtcgaatcgcttcatgtcggacgaggaaggagaaatacgagtcacgcttccatcctcatgttgctcgaacatttcctttgtggtacctgcaaccgggtattgctgcgcagattaaccgtcgtcggtgatcttgaggtggtgaacatagtagtaccaaacgagtccagcgagaattacagcagcaagtaatattaaaatgacacgaacctggtcactgttcatttttacacatattcttaaccagagaaaaaaaccttgtgaatcaaaagctgcattcactccaatacaatttaaagtcgtatgcgaagttggtccaatcttgaatcgataccccgcacaaggtcatccctcaaatttcgaaataaagtctccttatcctcgtccataatctgtacacgatgagcatcatatttatcgaaattatggtcggaatcagaagcacgcatctcttcttcttcaggaatctcgtcctcatggacatcaggaacaattgatacatctgttgtggaggagggtgcaactgttgcggaggaggttgcaactgttgcagaggagggtgcatctattgcagaggcgggtgcacctgttgagggggggggtccacatgttgctggggggggtgcaactgttgcaggggagggtgcatctgttgcggaggcgggtgcatctgttgcagaggagggtggatcaacataggtagccctccacacagggagcacgtccccgcaagaaagcttgaggcccatcagtgcgatgttggcggttgccgtgtcattctccctcagcccctcgagtatgtgcgtcccattacgaccgttcaggaatcggagcctcgtgacaacgtcagagatcaccgcgttattcttattcgcattcctagcgaacctcacacgatgcagcaacaccctgttctcaacatggcatagcttctgcacaccttctctcaacgcgtcctccaaacgcatgagagactcaagtgctgccgcgttggtaaccgcaacatcaaggtccgcaatcacgaccgacgtcttcccctggataacatcttttttgtggtgcgcgcgcagcacggtgaattcgacgttcttcacacacaagaggtgcaaatcggaggcgccgggaggatcgtagtacacgcgcacaaagtcgttgtccacggaaaattgcattcgctcctcctcatcgtcgcaatggtcgtcctcaatgcatcggcggttcttcgtagctgcatacatcatcatgttaattaaaaaaaaaaaaatttaacatcaaaacaaacgaattcacgaattgagaagcaaaccgccgaaccgacgcaaaaccaactcgtctctcctccgcaacgcaagcagacgtctctcctccctggcctttgcttcatcctgctccaacgcataccgctctagctcctccggcgtcatttcatgaccgacgtccgcggaggcacggtgcttctcgatgctgcgcatgtcattgaattgaggctttgtgcgcaggatggcctcggggtcgccttcgatcagcgaggatgtcgtgtgcgccagaacataatctgtgaaacccaacgcacatctctcgcttggcgcacacccatagtcgctgacgcgctcgacaccgagttccgaaaagccgaccgctgttcgtttagacaccagagacaccgcctggggacaatgcgtgacgctaagcgcatttttggcgtcgtcaatctgttggttgggtttctagggatcgtaattgcgcatccagtttgcgtagccttcgtcaatggcagggtccgtgatgcggcttttctcgaaacgagtgttgaagttcgcgagagaaaacttattggatgatccaggcttcctcttatcttgttgagattggttctgaatgaattcggatagctgctccttcatcaccacacggttggcctccgtcagggcctggaaggtagccgtcgcttcatccttgctcaaacgggagccgcacttgtcgggatgaagttggcgcgcaagcatcttgtagttagccttgacttgttcaggtaacagagaggatggtgtgtggggaaggttcaaaacgtcgtaaggatttaggcaagaccccacctcatcacctgcagcaactttattcgctaccatactgattgtttgatgatgataccacaaattacattggaatcattttaaaaaaacaaataaaaaaccgagtatttcttcactgagatacactcaacggaacatacaaatatttttgggacattcaggagattgacacaaggcatgtaaagacacaaaaattacataatgggcgttcctatagcggaattgtgattcctcggtgctgatatctcaggatagcgagtcgttccggaggctcgtactgaaggacgcaaacggattcacaagattctccactgcaaaagcagtcaaagcggagcgccacgccaacagagcggcggtaggctccactgcgggaagacttgggaccgcgacgtgaacgcttccaggaacattacaggttccgtggagtcgggggaccgcgacatagcgtcatgcaccaccgcgttgaagtccacgtacacgtgggagaaaagcgatgcagagattggggccaatgagacaacgttacaaatataatcagaaaacacggacatcaatgcgcggaacacaattcaaatagctgcaggggctttggaattgtccctggcttaaacgccactactagaatttatgccttgaaatattccgccgactgtgggaatttgtatgaaccagagaattggttgatggtgtaatgctgaaacacagagggtcaattatagtattaccattgaccctttgtgcatgtgttttatacccgtagcgtgctgcgtagcggcaggcccgcgcagcacgggaccgcaggtcccgaattaacaaaataggccgtgcgcctagcacagaataaaagaaagaaagaataatctcaagtgatgcagggagggtgccccataagggtgcccggaactagataaaaagaaaacgcttggtggtgtctaaagacaccttttttttgttgttttacatgaatggagtcttcactcccattctgatgatcttgaatcttctcttgatttgtaatgtacggtgtttttgttttcctgtttacaccaattttctttcatctacactcgacggaacatacagctagggacatttgaaaggcagacagcgtcgtctggcgcagagttcaaaacgagccccccgccttaaaaccctaaaccctaaaaaacaatgtgcgctgtggtgcaacctggaaccgagacgtgaacgctgccagaacattcttctgcttctgacgacgtggatggacgggaaagagcgaccggcggcattttgtgtgccctcctcatcacccatcccaaaaaccacagtttccggagaggcaaatgtgggcgctcaaccaaccgacccacctgggtcagttagtagcttacaattgttatcctttgggccagcttaaatgctgaaatacgggatgaagggcacgaaggattgggactttgatacaaaacctttagctgacctacccattgggttcaagggtcactggtaagggtgtcccataaattctgtctctgattgtacatgtacagtttttgaattttcaactcagaatttagagcctccggaacgactcgccagcctgagatatcagcgctgcggaatcacaaacgattggtttaccgaagaggcgactcggaatattttcgggcacctcttcttcaacttgttgaccccaaaagcaacgattagtatacagttgttctcaaataatttttggacactctgtataatttgaatgatatcccctgaaaccagatccatgtggattttctagaaagaaggcgtttcccacagttctctacggacattcaaaagaaaatgtagaaatgttctgtgacaagtacagagaaagctctaacgttgtttgtatcgacaaagcaggattttacgctggagaacacagcaaatatggacacagcaagatcggttctagattaactacgaagacaatgagtaacctccgtcgtgtgaagttcactttattactcgctatttcatctcaaggaatcatcaattattgaattatcaattattggagcacaattgtaaaaaagaagatttcattaaattctttaaaactttggtcatcccaaagaacaccacgatcgtcatggataatattcggtttcaccattcttcagaaataaaggatatatctgaatgcaaagggtggaagcttttgtacacacctccttattgcccaagagctaatgcgattgaacaaatatttggaagcatgaagagagactacagggtatcatgtccattgacgtcaacctgtaatttcgattacttcatgcaaatatgttgcgttctagaaatgtggaggtataaagacttgtcaaaatatatgattaatacgagagattgggttaggaatgttcgagagagcctgtctgcagatccagattacatcaaaacgttttcggggtacaatttgtgatggagaatgaggtcggcgagtcatcatcgttgttacatgaggctgaccaacatgatgacgttgcagaacttgttgattatgatggggaggaagacgaggagtgtgcaccagggctagcgatttgtgtggtcaagatgaaattgagtacctttattccccatgattggctccgtagaaagatagacacactggtactggacatgaacaagttgcttggagagggttatattttcgcaaatttccacattgctcgtctttttgagaatggtatagctgtccctcctgtaaatcgcaacttcttctaccggtgccttcttgcagtcagtaccaacaaatgtatgggatcgactcttggcgaagacttcgagaatagtcggcttctgttcgacctgttaagagagcaggggcaatccaaagttgacattcgggggagagtgaataaccagatcgttgcagacctgtctattctcatggccaccatggcctctaaccacctctggaccaaccttgagcggcgaataacaacgtacttgaagtggaagtacccaaagattgccaagcgcctgcggtcggacatcgtggctgcagtgatcaagtgccctacaaagaatatcgacgtcatcttcaagatgagccctcatacaaccaagctgccaatcaagctcccaacagctcgacttggctcggcaaagagcgcagttgctcttgcgaagaagagggtcggtaggaaggaaccagaaggatcccctttgcaagttaggttgactaaacttcaagcgaggcttgaaaggttgagcgaagcttggctctcctccaagaaccttagggtggacgaagataacgcgaaacgcttctctgcacgcgaagtggccttctgtctcaggggggttctccctttaccatccggaaagacttttgcttctcgggctcacatgacccttcctctgtaccacaagatattgatggagaccatcgcatctgagaacgataaacttcgcacattctcgttgttgccttacaaatctggattcactctgtcgcacattccgatttcgaaaatggcctttttctatatggtcaatgagtgccacttcgattcatgcaaggcagacgttgcttccaaaaaccatcaaggaatatgggagcgattcgcaaatctaaagatagtggagacattttctaggaagttcggctaccgcattgtgacagacggctttgcagtcaatatcttgatgaataagcctacatgtctaacatgttcgatgcctggagatgcgttctctacactggcgaatgagtatatgacaacagatgagggtggcattttatccttccgtgataatgtggtcgtggctgcagtagaccctggtgttactgatatcgtgacggtaacaggacttgacggaagtaccaattcgtatagctcggcgcaatattatcgcaagggtctgatcttcaaatctcagcgtcaaactgacgtttggaacctcgaaacggctgatatcttcggtgatgtcattccggatagagactctccgatgtctcaacagattggggcgtacgccagattctacatgggtgccgccccaattcttcttgcccatcgtgctttgagggggtaccgaaacctccgctttcgcaggtactgcaagaaacagaaactcattgttgagattgctgacttcgtagctcagagggagtagagcacgaaggtactcgtcgggtttggtgattgagggtctgggggcgacaccaatctctaggcggacttgtggccctctccaagctattcgtttcgagcttcgtagccgcgaaaacgttatcatggaggacgtcgatgagttcagaacatctcaacgatgcagctgctgtgagacccgactttgcaacatggatgcactcactcatcgtaagaagcaagacggtacttgggaatgtacggaaggacgcaagcggattcacaagattctccactgcaaaagcagtcaaagcggagcgccacgccaacagagcggcggtaggctccactgcgggaagacttgggaccgcgacgtgaacgcttccaggaacatcctgatgcttacactccaccaagtctttgggagagagagacctctcgcgtttcgccgagacgcgccgagaggttcctcgaaaaacccaccaacacctgaaactgatatggggacacagactgttgaacggtttaccacagagacgactcggaatatcttcgagaacctcttcaacctgctgcaccccccaacgttgcccaaacgcaacgatctgcagttttttcgagtataaaaaggtgtgtcccactttatttgagaacaactgtaaagtatgtgtcgtcactttacttcataacaattgtaatgcttacacaatacaatgtcggtcccctactaggatcaggcgcatacagcaatgtctatgcagccgagggtggaccatggaacaaagagcttgccatcaagcacattgtgtacgacactagaaacacctcccggaattgtaagcattactctgcctcctgcaagagaatcatccgagagctgacgcttcacgcgctcgtgcagtctgtgtacccggggacgcttgccacactgcgcaacgtcgtcaaccgcccttcggacgaacagaaactccggcaagacatcttcatcgtcatggatcgctacgagatggatcttagcaaatacggtgccattatgcgacatcaaaacccgccatgccacaacttgagtcatcgtgtggccaagaaggtcgtgcgttgcgtcctgaacctgcacgccgtcaaggtgttgcaccgagatatcaagccccataacatcttgctcaacatatcgtcggacttcgatgtcgttctgtgcgacttgggtatggcacggcagatgacggaggaccccggcgacgccatcatgtggaccgattacgttacctcgctttggtaccgggctcctgagattatggacatgttcgagcttgggctctatagcaagtcctgcgatgcgtggagtctcggatgcgtcctcttcgaaatcgccacaggcggcgatgtgctcttcattgggacctccgaagcgcacgtgctagtggagataattgaattgatcggggagccccccgagagtttcctgagaaggttcacgtaccgcactgtttattacgaggacgcgtgcaaagaggtagaagaagtgaaacggagcattctgtctcgcaggcgcgatgagaaacagattgatgggcggagcagcgcgcacacaccaaaactgtcgattcgactactgatcgagcagaagtgcaagtgggatgatgtggtggaacgcgaggccatttgctccctgatagaggacctcgtctcatgggatccggaacggcgaacggaagctctgagtttcaaaggcgaaaccttctctgccaaggaaggcgggggggatcccgtatcgcgtgtgatgtccatgctagtcagcgactccaaaagccaacgcatgttcgaggaaatatttgtgacccagaaaaaggctcgggaattggtgagcattgcgtgcatccaagtaaacgaaaatctacgtcgggcgtcggggttcaatgtggaggatgaggacactgggtactcgggaacagaagttgacgaggtttcattattcgagacgaaccctcccggaaacttgattcatcatggcgatgaaacggttaagtccgaaagagaatgatgaggagacacgggagacgatggaggagtttgaggatcatgaggagttttttttcagatgtcgtggaaagctcaggctcgggcttctgtttcctcgacgccgcttgcaacaattcctccttcactcgaatagcttcgcgaacaatgtcgctgtccatgtctgacgccctcatgatctccagagccacgtactgtgtggaaacgccgcggtgcagcttgtactcggatgtaatcgctcctgtttgtttgtctaccttcacggtcatcttgaaggccctgtagcaaggttcgggaccgcgtgccaatttagtcaagtgagtaaagtgcgtgctgacgatgttgatagcgttctcgaaagcgccgatcttggaggccgtagctacagcccccgctatgccctcgacaggatttgtgctgctgaatatctcgtcaatcacaacgagacacgtgagccctcttttcctggcctgttcaatagagagcacgcaccgcttggcgcggttcatctcggcctggaagagggactccccacggacgtggctgtcagggacgttgatgtggctgcacagcgctccgaaaggccgaagctgcatgcgcttgcaaggtacaaacgataatgtctgtgccattagcacagataacaatgtgctcttcattagagtgctcttgcctcccgcgttgggacccgtcaagatagcgtttcgactcaggggtgagacccacaaaagacaaggcggaacgttagccaataagtaaagggaataaggtgatcaaaaaagtaagactgtggtgatcccaaaaacaagagtgatagaggaatagagaataagaggaatgtttgtgagcgtaatggcggtggcgataatgcggtggcggttttttgtaggaaaaaacggtgaacacacacgcttctagtcgcgtaaggtgttgttgctggtttcatttaaaaaactttgttttgaagtgctgcgtcactctcgtttttattgaattctgtgattcgctgaaatctctcgggtcattgttgtcgtattgttggtgttatctcatttagtacatgtgactaacgtcatttaacgtattttcagttataaccgtccgcactttgaagattttggtttcaatgtatagcaccgatgttgtttgacatctatagagcagatccaaacgcagctatgcggatcccgtgtgcgggtgctctcgcgtgaacgcatcaaactgtctagttctattctttccagtttattggtcaaagagtgtcgatgaggttcgtgagtgaatctaacacttactttagattgagattccctccgttggcgactgggccggaaaagctgatataattggacaacaccgatagactccaccaccgacggggcttgggacaagagtctaggtggatgagttttaaagaattttaaggggagccctgttgatgcgaatagaatagtatttggtttacaaaggggtggcaagatgttgcattctgaacacaatgtcgagaaaggtgaggcaacaagaatccgctaagggacgtcaaaagaaaactgggacattgcttcgcgatcgtcagcgtagacaccctatcattaactaaaggccgtcataacatcccatgactcatcgacgtcataaccggcactttatcgaggcatcgcgagcatagcgccccgaaggggatctggtttgggccagtacagtggtttgtacgttacggcaattatttcatgattggtgtcggtaaaagtcccctaactccatttcaaagagttccccacgcgttaatggatatcttaaactaatgctagagaagtgcaatcacttggccagatcttgctaaatcccttgcatttttgcctacctggatggatgcaaacgagaactactgcaaaggattttcagggtttccaaagcgaaggatgatggtgaggtaacttgatgctgggtgatgattatgataataatgagtgacgagatcaggaagggttcatcggtttcataaaatcgatcgcagacttttttctcttctttggtgaacgtagccaaaggcgagatcgcatcttgttgtttgtcaacttcccaaggacccttagggaactatcataggttttttgtgcattataatgcggctctccgtaggaatctccacacattacgtacgcataatctcgctatcgggagtagcagatgtatgggcattctgatcgcctgggcttgggcccctgtcgtccctgtttttacgttcacttttacctactgctgacatccattttttatcccattccttgtattgtttataattgacctgatgcaccagggcgctttgataaggttattcgcgtgcgaaacacttccatccgagtgggttgacaatgcgaactacatttacaacaactactacacgcgatcgatcgcgtacattggattggtcatgagaccgtgtgcgcgccgattccggcccaacggcgtcttttgcgaacggatgagaccggacatgcccgactactgcccacaccaactaatatgcaagatattttcgggcaacaaacctactgtgtctggacctaccgtgttcgacaggttccggtcatcggatccctacaatgtgtaccaccccgagacgaagcggaaattcgtgcgcgacagctggaagaccaaagtcatgtggaacaaaaaatgtacggacgttttctccgactacaatacattgtgagacacgtggcttggatccgtcgcagacggcgacacaacctggcgaagaagacacgttgcgatcgctttgcaaggacgccttctgctctactagggatcttgtcaactcaacatctaacaatcattttgctccgagataagtacccatcaagaaggatgacaatatcagatgaattcctcgtccgaacgccgagatattcaagcaaacgtgcagcgtcatgatgttcaacatttcagttgtcatcgttatatgtcgcttttcactgtatcgctcgtcatcgtgcccaggcaaagagaggggtgatgaaccaatcgtgaattcaacacaaccatctttgcatgccaaaggataatcaggatgatcaatgggtatgcaatgcggatcagaacatcttgccaccacttaaaagtccgagacatcttacccgatctgatgcgaccttcaagtaaaaaacagctgtgtgtgcaatgaaaccgcgaacagtattggccgagacaaaatgatagctttccaacactgctacgccgatcccaaaacatcgcaaggtatcccgaagaatacccgcaccaccatgttcagattggtacgttcgctgctccatttcacgattgctcctccacacttgcccaactttgataccgcatccgacctctgatgagagcctgatgaatatgtttgttggtggattccttgacttggatctgattttcatattcgttgttgttcatggacatgctgctgttgcaactgtgtttgttgttgttgttgttgttgttgctccaaatgttttgttgttgttgcacattaaatgcacttcgttctctagttttttggtcagtttttcttggcgtcgtgtttctcaatacggttggggtactcttgttgctgttgctctttctgttgtagttgtggctctacagttcccgacttttgtgaatattgttgtcctcgatggattgcggatcattatatattttcgtacaggttacctgtgtctggactggaaccgcgggtaagttccatcatttttgtggggatagtgatgatactgtctgtgggacagtgaagtgaacatattatcatatgaaattaatgtacatcgccgtcagaaaaatggttgccgacttggtgtattgaaaacttccactcaaccaagtctttgggagttagcgacctctcgcgtttcgccgaggtgtgtcccactttatttgagaccaactatagtatcgttgtggtgttttgaaggtgctcgtacaacgccatgtactctatgaggaagcctgacgatatgtatgatggcctccccttccacgtatgcggcgtgccttttcgtaaagcacacgcgcctcctcgtgtttgccaagacttccgagacaccggcgtgcatcgcccacgtcggggtggcgccgcaaactgggcaccgttcgggctactagataaagacaaacaaatcttgattgcggcatttagagcttccggtttgccttctgtttttgcgtgcgtcgaatagcttcagaatggctggttccatatcagcaggttgttggactgaatggtggacaccgcggccccaatctttgaccctccacgaatacgttgtgcgaggacgtacatgcgtagccccagggtgttaacgacgtagtgcaagtgcatgggcgtggggaggtggaccggaagcctagcccttgccatcgcctccgcggcctttggcgtcactaggtaagcgtcgcatgcggaggggtgctgaagagcgtgtccagtgctgggaagctgaggtcctccgttgggggggatgggaggctgatgaacacgacatcggcgtccgcaggcgcctcctgtgtaatgcgcgtgagaagcgggcgaaggttctggtgaatagcgtgtcatcttccacgacgagcggaaccgccgtttctgtgtttgtgatggtgttgtgcgcctatgcgtgtgatgcggctctgtgtttcagagtattagaacttgtcgcaggttgattgcagggggcgtgaacgacctgaacttttgggagggtgttttgtttttcgagttgttcccgttttgtgcttgcatgtcgtagatgcgtttgagttgctctgttgtcatggtcgtcttcactcgtggtgttgtttgtgcttagggccctagccggtacaggagttgcacggacgctgcgcgtgttttgcgcacaggctgggcgtgcactacatcacttttgtatgatggccttctcccgggacagggaggataacgaagccctaccttgttgttgttggtgttgtgtttcctcgcgctgcatgatgttttcttttctagataagaacaaaaaatgtgaatggagaccaccgcgcgtgtgaaatgactggtcactatcgaactttacctggaaaataactaagcggaatatctcaacaaacaatgctccaaaatcagtcaaaatacgcacggatgcgtaaataaaatgtgcctcaatatcaaatacctatgatattcatattcgttttttttgtgttgatgtacatggcggcaatcgctgctataatttacttagcttttacacgccactccttcaaaaaggatctcgattcaataacaacgaattttgacgactgtaaggagtccgctgccaaagctcttgagctttctcgtctaaaagacattcaaaatgacattattaagaaggaatccgctaccaaagctcttgatagtacaaaatcccaatcaaaaggtggtcgtatgggtattgcatacaagatgaatagtagtgaaacacataaaataatgatcaatactcaggacataatcgatttggtgcagaaggaggggtgccaatcctccatgcaagagataatgggggcgattacaaatataggggaaattctcggtaaaaaaccacttccttatggtctggtgacctctgtgtccgtagaggaaattaatagtttgcaaggacagtttcccgcttcaatattgaacaaggttcatgatctggtcaaaattatcattgacggatcgtgtggaaaagatggcatggtcgacgctgacatgatgatgaccattatgaagaacgagttgcatcaatatgtgacgtcgctgatgcaaatgtaaaatatccaaatgacatcgtcggtatttcttacacaacgaataacgaactcacccgaagaatattgatcagtgcaaatggaattgctgatgcgatgacgaaggaggggtgccgaacctccatgaatgagattatgtcattgattaaacatttaggggagatacttggcgaagtaccactcccttgtgttctgtcgaagtccattttcgcacaagaaattggtaaagctttgggtggaaaggttcaggttgcagtaatcgagaaggttcaaaatatggtcaacactatcattgacggatcatgcgggaaagatggaatggtcaacgttgacactgtgatgaccattctaaagaacgtagtttcatctctgtgttaaaagtcaacggaccaatacaatgaaacatatatcagatggacatcgccgttagaaaattggcgttaagaatggtcgctgacttcggtgtattgaaaacttctgtgtttacgaacatcagtcgcactatcaaatgtccctagctgtatgtgttacacactccgtcgagtgtattcttcatctcttcttcatgccacctaatctcttcctttaattcaatgaagtgaacggagaactctaactttttcttgtacatcttcaatgcgacgatcgcaattgcgtacgctggcattacagctacttcgcactcgatcaatgtctgcatcatcgatgacgcagcacacttattgattcgtcttggcgtatttggtgaaattgcaaagcgtgaagcatggcgcctaagagatatagggttcgcgttcattgcgtctcaccacctttctttacaagttaaaaattgttttttttattacaccattaaatggcagagtagtatcacgcaaacgaccatcatccggcgatgatacctacggggctacaaagtccatgctccctattatgcttctagacggtaccaccacttcgtctgaaaagactggtgcgatcatgcggggacgcaccttcgtcactatcggacgtctccaagttgttgcgcgacctggctttcgctaattccagggaccaagacaacgaagatggtctctttatggaatggcgaccccccatatttccatgcgcgcatgcggcgctcctatggctctccttaaggaaatgatagctaccccttcgggagacgcaaccctcctaagcgacgccaacgatggttctaataaagcgaagcgtctagtgactattcacgacgccattgtaatcatgccgaggcagatatgctgtggcgtggaggttttacctccccagacgaggacgttgtggctctacaccgctctgcaatacttctccagttggctgatcgatattggctgacaagtcatctgctgcatcgctgccaacaacattgtaccgcatatacgcggctccagtgatcggcgcactaacccctttgctgttgtgatcgttccttacatcatgttgcgtttcagttcgatccgcatcggcctgaccgcatttttgaagatgatgtactcgattgtctctgcccagctgcgaaaccttagtggtgccggcaacacatatcgcagtacgtgtccatcggcgtctcgcttgtcttttacttccagggcgtgttctcaagcatgcaggtgtcgcgaatgcttcacggcgtgtgttcaggtgtggcgcagcgtgtttcagccatccgtctgttcgcccgaaataccatagaggcctgggagggcataggcgacgcatcctcgtgggcggatgccgctgcttgctggacaggaccccaattcgattggtgcgatcctgatgtgcttccgtgcgaacgtgcattggcgacaagtgtctcccagggacaactgatcaaccggtacggaggcgacctcgagttcttccagcggtccgtcatcggtagccgcgaggccatctcgtgcgtgttgaggcgcgcctacgtgatggacgcattgggggccgtcatgcgcatggtcgggtcctctctctcgcccccgttaattcttgcgttccccttctccagagctgaagatgaccggtctatgcaccccgtgtgaagggcgcggttcctaacgattggtcgttctcacgtctgaagcttggacactgcattattggagcaatcccactctcccgcttagttaattttctaaagaaacgattcaatagtgaccgaagattataattgggcacacgcgcggtgttcatcattcacattttttgttcttatccagaaaagaaaacatcatagcaacggcgagaaaggcactaacaaggtggggagtataaggtctccgcacaatcgcatacaaatttgacatgcgttacgatgatttgcacaggcccgcagtctgttgcgggcaaacacaaccaatcgctgcaagcgtcgcgtggcacctctctgtccaccatggcgcgctagcttcccaacgcccgctaaggcagcgataacaatcagggaccacaagagatgatagactgaccatacacaccgacagaggcaaactcaacgcattccctactgagctgcaaggacgcaatagcgtggacatcaactctaacatatccccgaaaagttcaggggtcattcatcacgccccgctgcaatgcaaacctctgcgacaagtcttctaatactctgaaacccagaggccgcactcagcacgcaaggcgtcacaacgactcacaacacatcagaaccggaggttctcgggctcgtcgtggaagatgacagcgtgggctttgcacgcagtggggaggatataacg

SEQ ID NO: 286 - DNA, 21020 bp, unidentified
  misc_feature 1..21020: note = Fanzor polypeptide
  source 1..21020: mol_type = other DNA
  variation 19435: note = n is any nucleotide
  variation 7202..7259: note = n is any nucleotide
ggtatgttaggcacaactcgggaccatacgtcaagctctcgcaatgggacggagtcaaaagcaaacgaccagggccgcatggtgagaatagttccaatcggcacagccttgagggcgctaggccgtttctacggatacgcgttgctttctcgcactgtgcctgaccgcccccaacaattcgtgggtcgatagtggcctcataagttgaaagttgacgttgtggcacattcccgtgttctgcacggggtctaaatcgggaaccccctttgcttgcagttctactactgtacgttcgtgcgatgctgtatgcactgctgtaatcgagatctgaggggctctcgactgagcacacaatccacgacgtaccttttgttttcgcaatctctgcccccctacccccacctcctgtcgatagacgatggcattgccccgtcttggatccctgctgttgccctacgggtatcgtgaccgctgggagcatcggcaggggagccggcttgcagctgaggcggcgggggtggaggctgtgggggctgccaggctgagatggaggagggaaaaaggcgagcggctgctgtactctctcctgtgttggcattattgtccttgagaggaagttaagctgttggttagtgtcaatggtgtcctcattcatacgcgggtcaagtggatgtcgtggtccagagcgccgagggagctaccgctttgttgagcgcctgcaggattaaggttcgagcagttgcgtcccttcctcttgtgtatatattttacagctagagggcaacaaaaatcgccaccgattagttggagctgaagcaatacagaagaagttactctctgcctttccgtcggggtcatctgttgctggtgcctcctcagtgggctgcgaagtaccgcgagaccggtgaaagcttctaaaaggctgtgccgtgcgggtgttcacagcaggctcgactcgactatgctgagacagcgctcctttggacaagtgggtgtctgtgcgcgcttttatttcaacagtgcgttattcctgttgtctgtcgctcttgtttgcagccatgcgtctatggaactatttgtccccttttcgtgttgcattgctatcgcatgtgtcacgcctagtcgcgcgtccacttcagcccctctccccgccttcgtttggtggttggtggcctctctctttttgacaaaagagtccggtaccatccggctccctgaacgccacaatatgccatttcgtcgttgttttgtttctcatccctgtggcatccgcccacttctcattcttctgctgcccccatccccatgttctcaccaccccgttcctgctgttgatggtagatgacggcgctgggtttggcgaaaagggtgttgctaatgcgggtatcgttagcgccacgggaagagcagaggagctggtcgctcaggaggcttaagaaggatgccgagggcaacgtcaaaaaggcttcatgtagggagaagcacctggaggtgaaaagtaccgtcatacttgggaatatattgcattttaaagtggcgacaccagcagcgttttctgcacatctctctgtagcagaagccgcagcaacagacacaggcgcgtaaatggcaacaatcctttgagagagacgaactgaaaacactttggctaccccacaaccgcttacaccctccccgaaatccccacatctttctccctgcctgttcaagttgcgaccgagagcaaaggggggctctgtgggacatgaggaggagtaggccgacgccgccgtcgccgtcgccgactccttgagcatggattaagggcaaattccgcaggagcggcaccaggaacagcgacgtcagctacagcacctgctcgaagaggagcttcagctgaaactgtttgtgcggcaacacgaggggcagcggctccgggagcagttgattgtgtttgagcaactgcagcggcaccggcagacacaggtgcgtgaagggaaaacatcatttgagagagggagagttagagacgaaatgaaaacgcgtcggctgtacatttttgttgagtcgtcatccaaaacgagactccacgaagttccaacattatcacgtcatttctgaaaccgctatcgtcgcggggttctaattgttcccttcgtgatcgcccgagtcgatggcgtactttttgttttgagtcacggagacatttccgacgggaaaatagacagttttaatggaatgtaggtttagaagtcgggggacactgcaaatgtgccaaagaaaatggccgaaccgattacaaggactacgtgttcgttagcacgggatagtgtttggtcaaatcatctacattctgaaatatgtcctgctcaggttgagaccgagggcggtgggagctcggttgaattgaggaggaggccgccggcagagcctcagctgcagtcggagagggcgaggttggggccggtgatgcccaagcagcgccagcgtaccagagggcggacgaagggcagcatgcaggagaagctctcgcggaggcccagtcaggagcgtggcctacgggagggcttgtaaaggtgggtttcgtgtgtactgaagtagccaggaggcatgattgtgtatcctgaagtagtccggcatgcttcacgcgcccggatacacggccaaaaactcgtggaggtatgttgtgtatcctgacgaaacctggcctctctccccgtggccggatacaaggcaaaagagtcgtgatgggaagttttgtggatcctgaaacaatctggcattgctccccgctcccggatacccgatatgaagcgcgcagttcttggtgagatgtgtttttgcacacaaccgttttgaagattaccccgcttccttccccggcaccgccccccccaacgctgccgtctgcagatccatagcccgttcgtgcggaggccgaggcagaagggcgctcggcaacaagagcgagagtagcatgatgtattggagactgcggcacttgcatgctgagcttgtgaggaggaacggatacacggcgaaccaaatgggggactttcactggacgccatggaagacgccgcaggtagcacgagtagagcggagacaattcgcgtgctatccgtcggcacccgctttggtagttgtggtgttttgtgtgatttgtgtgttttgttttcttgcagtaaaacgcaaggtagaccacatcgaccatcgacgggcggataccgcaagaacgattgtagctgttgatgttggcgcctgcgttgatgagcaccaccatgcctgttcagaatcctttgctcgcggccacattgagcggtgtaccggacacacctcccactttgaagaagttgataagagcttcgatgtccgcgccagccttgaccaacgccttggttacagcaaggtgcttaccacagactaaaggtgtagagtggtatgcccgtgctcggtcttggtcgaaatatcagcaccccattgcagaagaactcgtatcaaatgcaagtaacccctgtacgcggcgaacatgagtggggtccagtcattgtcaccacgtgcgcggctaatactggctgaccctgtcgagaggagattaatcgtaagctcgacggaaccactggatgccgcatggtgtagcttgctcagagcagatggtatgttgaggatgtgtgttcgaaaacacgctcgtccaaacaaagtttatggtcaacaagtgtttgatcgaggccgttatctcgaaaagccaccaaatgcttttagcctggtacaaaatgagagtgggaatggcacggtatggtaaagcgtcacacaactcagctgaagaatttcctgagcgagaccgcgagcccgctacataatggcgccggtggtagtagaagtctgtcccgtgaccgacaggaacagtatgtcgttccaggcgttttgcgatgattgacgcattgtgagtttgtgtctatgtgcgagcggggttttgtctaagtgacaatgagtctcttttgtggagagcggcttgttcaagcacacaggtcgattttagaagttattcaaatcacatccatccggcacgcagtacccgctacaccgctagcctgactcttgtcctcggtgggggccacgcgccttgaaacatccccggcctttcaccgctgccgtcggagcgtgatgaatcgccgacagcgggtgctgaaagacgccgcaaactaggccgcctttcaaaggcatatttcaccgttcacgacatgaaacacccccatcttcttcgtcccgctcgactcacagcgatggaacattacttgcactcgtcaggacacgaaccaacggatgcagggctggaatcgttccccgagctctttgcagctgttggaggtgatcgtaatcacactaagggggaactcttgtgctgatgtggacgtcaaatgatgcgctgggcgcggcgttggttacggtgggtgcggccacgatgtatttcatcaaacgatttggggaagatggctagcgatggccgcgttgcaaagttgttaccggataatggaggcaattgttgcgcgcgatttccccgaccagaagtttattaacaggagcttccgctcggcggccctgcagttttctggcgacaggcaggtcccggacaggctcgatccgtaaagactggttgatgcggtgatcgcaacccgtacgtgatgtctgctgtagtccatcttggcgcggatcgggccatgatggttcgggactggcagcgggggctgagaaacacatcccttcgtcggttggcagagagtcagttcgtggatgtggtccaggcgttggtactgaatttgtcggcaaaggagatggggacgacggactaatttggctgtgctcctaccgaacatgtggcctcggaggcatacctttggcaacgtttctgattggtagggaggggtgtatcgtgtcccccctcgaccgcagcggcaatcaagtatcgcagacgttgtggggaatgaagcagcctttccgcgatttcagtcgtagcgcgtgatagggagaattcggccaagcgtcggggggttcttctttggcgcaagcgtggtgtcaatggtgatgctggtgaagtccctccgccaggaatagtcggagtgttgcaagaatctggtaggatttgttaaaacgaaagtgtttcaattgactcaggagcagccgctgtctgtccaagtgagacaattcttcagaccgccgccagttgcgttcactgagggtctagaccgcactctgcgtcatgttgacgagggaaagggactactgaacattctcgcgataatctgaagacatgcgccgcaggaggaatgtgatgagaagggggaaatccccggtgtttttgtgtcccggccgatcgttgtacagagatcatacacagaaatgcgtagtacaagacacctaaaacgaacaggtgacgccagacgccaatagatgggacgtgaaacacacacaccgcgttgcaattgctattgctgtttccgtctgacaaaacacaactctgcaggctaaaaaaacggtcgatgaaacttttttgtgggatgacaaaacactcggacagcgaccatcgaacaattgtcctttcccgtcaaaatggtccggagaaccacgagaaagtggacgcacacggagcacattgcttttctctgcggcgtgcagatgtgggagaggaactgggccgtggcctcgctagtgccggccgacccgctttgtggtccaaacaagaacgtcctcaaaatcgacaaaggagagcgattgacggatagattttcgaggagaattgacatttacaccgtggaccgcacgaaccacacgtttttgccgattacacctccctcaatcatgcgtttacgaaggaaatacgacgaacccctgcttgtcctccaagacactcaagcatcctagcgctcagaaatttaccttttggtttcattaccacgccccgtctgtatctacgttcgctttctcatgcccttggtcaccaacttgacgggtttgaagcggtagatctcgcgtgaatcgctgactatgaagcctaagcccttcttgttcttgagcagcgtctccactttgcggcaggctttcgacgcggctatgacattaaaagaaagttgcgtctttccctccttgagccatcctaaaacccactgcccgttgtacgcggaatcagagctgtccttaactcttgtgtagaatatatcaggaaactcccccttctcgtttggcttcacaagattgtacgggaatttgacgccctcttggaaaaacttcttctggaaggttctaaacctcgtctgcaatacagaaagcgacatgggggccaaaacatgcggttgttggtatgcgattgttggtaaatgtcacaagttgacaaatggatgaacgggtgcggaagcgacagatcggaccgagccgctctctacatacgattggaagctcgcgtttctgaccgaaattcacgctaacatgttttctgaaatgcgtaagctgtcttctcaccacagtttcgccttggaagtggtgaaccatctcctcccaaacttcatccgagtaacacgtcttgctcttatccttccgcgcattgagaagagcaggaagaaatcctgcgtgacagcgaacagggagaaacgcaacacatgtatgaatgaaatgacgtttggtgctccgatataaaaaccttccattcttactttggccactttcctcctcttcctcgtcgcctgcgttgcctgtgaaacgggcggcaacgagattagacaaccaatacatcgccaagtgagaaaaaaaacaagagaaggcgcaacgtgcgtccaaaaaaaaaactttcatgcgtaccgtggccgctccccccgccttcttcgtcctcgtcgccctcctcctcttgatcgtctaccgcgttgcctgtgcaaagggcaagacaaccaactattattcgacaaccaatacatcgccaaaagagaaagttatgtcaaggaggggcgccaggtgcatccaagaaaaaattagtccatgcttaccgtggccgcattcctcccctgcgtccgcgtcggcttgctcctcttcttcatcacctgcgatggctgtgacaacggtggcaacgtggtcacgcaaccaacattttgccaaatgaggaagcatttcaagtcgcttccccccgcttctacgtccattgtgccctcctgcaatgtagagaactacccccccccccnnnnnnnnnnnnnnnnnnnnnnnnnnnnnnnnnnnnnnnnnnnnnnnnnnnnnnnnnnctgcaatgtagagaactcccccccccccctcgccaccatcacgcgtgtccccggtgccttctggagacgaagagctggcaggaacaatgcgtgtgtcttcgtcggtgcatggcacaaggaagggcggcaccgtggttggacaaccaacacatcgccaaatgagaaaaagtgctaagctctcaccggtcttccttgacacacgcctagcggtagtcagacgagtagcaccaacagcagtagcagcagcagcacgctttggcctctttgacggccctgttacacgaaacaacaaatcgaacaacacaggaacaaacactcagaagatgccaagccgtcttcgtttcttccccggtggccatcgcgtccttctttcaagttcccgagcgcgtaccgcactcacctacgtccccatccgctcctcctgtcatcttcccctgcaccctctttcgcgagcattccggtagtgaaggggtttcacctgcgtattgatgtgcaaacacctcgccaaatgagaagatatttcgcgtattgctgcgatttgttggtgagcaggtgaatcgcgccatgtgagacaacaaatccacacataccgaactttcgtgccttaccgtggccatttcccttgtctccagcgttacgcgagcaagcaactataggggtcaatgctgtcgtcgaccggccttgccacagcaatgatggagttgtcaccaggggctgaggctagcatggcgttggtcgccgaggcgcgccgctggatgtccttgatgcgatcggcgaattcgatcccgtcgcgcccggagaattggttgacggactgcagttggtccctgcaggttctgcaaatgtcgatctcgttcagtgcaatggtttttttggccatgaccgaaacgaaaaagcccttttctcttcgtccgatgcgtactcaaaccaaaagggttcttccgaccgttgctttttggcgggtccttggtccaaaagaaagccctggtacgccctgccttcctccgtgctctgtaagcgatcgcagcgctgttcgatctcatcgcaaagacttgtgtcaccaccgagcaccctggtgatggtttgggctgattgacgcctgaattccttcgcagcgttcgaaggcagtagccaaatgatttctacgagagttgaagcgtcgcaaataggggtgacagggcccttgtcgttgatcctgacgtattcaatgcgttcagaaagtggaatcgtactctgtgcattttgtccaggcctttccatgccatcccttttttccttttcaaggacacgtgtgagcatttttgcagcatattcggcagacgcctcgggacacagcatgcggttgacatcgataatggaccctttcccagtgttctcgtcgatgcgcacggaaccatggattcccacggtcctcagcgccttttccaacctagcagttttcgtttcagcgtgagcgacatggtccgataactgatgttgcgcctgtgcacgcagacactgacaaacgcgctcgacgtggtttctgagcgattgtttaaatgcctctcccgacgtgtcccgccacgtgtcccaacctttcccagatatgttgttcaatatatagtcacatacttcgctcggaacgacagatgtgattctgccgtgtacctgacgcttcgaaatttttggaccactgaaatcattgttgtaaagttaagcatgttgacaacttaaatgttttttacaataagaaaaaaatgactcgcccgatatctcctgaaatatacgatgcattcaaaaagtgcgacgcgcaatggatgcagaggcggcgaaaactggacacatcttcagtgttctacacgatcacaaagtgctgtactcgagagagaggagtttctcatgttttgaaaatggaagccgaagaatattcgtcgcaggcggtacacttggccagaaagaagcttccgatcggggctttcaaagaggtgaaccgttttttgcatcgagggccacatgaaccacgcatatttgccattgatggttcgaaggtgcatgtacacccgtctttcatcaaggctggttacaaaacacgaacaaacgacaagccagtgccgcgtcctgctaaaagacctctggtcatgctttcgtcgatggtcgatgtgagaacgaaatcatgtatagactttgagcttacgaaacacttcgacgaacgaagggcagctgtttcgatgctccgtagtgtgcggaaaagtgacacgctgttgtttgacaggggatattactccaaagacctactccgcagtgtccatgactccggtgcatttggcgtctggcgactcaggataatgcgttcaagggtactaggtctttctttaactcgcaccacacggaggtagcgtgtctcattcttggtgttagggtgcgcctcttgaaatatttcatcaaaggtaagacgtatgtctgcctgacgaacgatccgtccttatctcgacgagacatcaagactatgtacgcatggagatggagagtggaggaatccttcaagcgattgaaatcaaatctcaagctcgagaaagctcacgcaaaaacacccgctctttatatccaggaggtggaagccagggtgttgttagacacgatcactctgagaatgcaaagcagtacgaaggagtcgtcatatctgtatacccttgatacacacgtcacacacattctccgtaacgttaaaagagtctccggtcacacgagctacaggtttgtagcagagctacagtcaaaaaggccgtttggtcggattcattgcagaccaccggatgacaaacgtcacaccaatcacgccctcggacgttacacgcggtggaataccggaagcgaaagtttactcaaaagttcttgactacaaaacctcgcaccccgtctcacacttcatcatcatcaccatcatccttttcgtcatggtgagaccgtcttcggatggaaactcgcacaagaagaagaaacacaagaagatacatccgagagctcctccaaaggacgtcccgggatttctgcggacggtggggagtctctaccccaagggatacctcaccgagtcaggaaatctaccaaagaaatacaagggtacttattgttgccagctcttctccagagtcaagttcgggaaagaagtgtctcaaaagacaaggctgagaaccgtgagcgtcggatttcgggcagcaacgaccgatgagaaacgcgacacttttcagtccaagatcgatgaggcggtgtatcacctctctcgcgaacgagttctggcgtctctcttcgcgaactttgtgttcttggaacgtcttcaaaacggatcagcccttccagagcccgacagtgccttttacaggtcatgcttgtcatcatgcatcgaaagcagcggaggagggagtcgcaacgacgacttcgatcgtttttccgacacaacgggactgacaaggctcgtgcctcccagaaaactgaaccttaaccaacagcgagagcacgaggcacaacgcatggcaacggcaacgtcgacgcgtgcaacacaccacgcggaaaagaggagaatttcgatcacgaggtggtttctgtgcttgcggatatccaggggcgacctcgtgtacaagaagtatgctaccaagctatacgatctagcgaagaaaatcatcacggagttcgacggcacacccgagtacgcagaagacctccgacaaaaggcacaatcaatagaccctggcacggacatcgacaccatcctcgacttcgctcggtaagaaaaggagttctccgatcgtcaggatgggaagtgcgcgtcgacgatcaaacacctgtactggatgttcaacacgtacgtcgccgactccagacgcatgtacgaggagaccgtatcccgagctcattcgtatttccccggtgaagacaaggagtgcaggaacaagaggtacgaattcgtgaagaacgagctcggagaagagttcacctacgctccccccaaagacaccgccgttctacccatttgctcaacgggttcggtgttcatctacatcgacatgaagacgcttaagtcatgggggcttctgcactccaacgatgcttggtggtacaaggacgtcctccgaccgttctccaaagaggccaatatcaagtgtctcgcgaacaaagagaactccaggtacgcgtcaagcgagcatggatacctctcgagtttgctaggaagtggtccggacaagtgcccctggatgattggtgagagttttttgacggacggtgtgcagatcaagcttctgcttgtgacactggaacatggaagaaaagctttccccgggtccacccagctgaacgaggcggggtacaacaaacttccccgggctgacgtgcaactagaaagtctgctgagagagggaagaggagtgtacaatatatccagcctcttggattctccaagcatcagggaagacgttgtcgtgatgtccgcggacccgggacaggcgaaggtgatcaacgtttcttcggccacggccagaacttgggcgaggcaggaccctggtgttattcttaacagttcgacgtgtgtgttcggggatgactatcgtcgcgatactcttgcctcacgttcagacaagtacgagactttcaggcgcaaggaccagccttacggagtggctatcgatcgtctacgcaacgagaagaaaagaacttcctgcctcgcgacgttcatccggtactgtaaaagttggtgtgcaaacggtgcggcactgttgcttgagacgcttcaggaagcaaggaagttcttgcgttttgatcgattcagagctacgcagaagacactcgccaagatagcggacaagtacatgggacatgtaggagacccctgcagggtcatgttgttcggtaaagcgtcttttcgtgcgcagaaagggagggcatccgccccaaggaaagctttgatcagagagatggccagcaggggagtagtgttgatggtggaagagtacaacacttccaagaagtgcccggggtgtggggaggacacggtcgaggacaaagaacggagaatccggagttgcaaaaactttaagatcggatcaccggaagagtcctgtagacttcaccccctgacaccagagtttgaaatggatcgcgacgacgtagggtcgactaacatcggtatgcgtggtttcggcaaattgctgggtcaggagtggttttaaggatttttttcggattttcacttgcggatgatactttatagttggttttggttttcctaaagttgacaatagtgactgaaatcacggagaattccctccaccttcctcagaatatctttttgatttatcgaaggcctagccgtttttatcagagaagcgactccgacatgacctgtggaagcatccacgaccaggttgtccatgatttacgtttgagagatgaaagacattttttattggcagttttgtacgcgccagtgttgaaggcaaacgagtctgtcgcccccagcaacgcgtgtggcactggtatcggagcgtgctacaaacgtaaacccggtcgcggaatttaaatacccctccacattcccgtggcccgtacctcatcgagaaagctcgtggtaccatcttgctccaaggccgatggcccgtcgctactgctctgccgccgaaccccgcccaaatggcgcctattgtggaaaaatgctgccctggcgcccccgcttggcaacccgacaaaaaatggaacgattgccctcctgctagcacctggctactgttctgccacctagcgcacgagggcacaattgcctacaatttcgacgacccgaccatctgtgtcagggtactacccaaggccggcggggcgcacatataccaatgccacagaaactgccataaatcggcaagaacgatgttaacttacggacagaagcggtcaagaatgcgtttactccaaccgcgtccccaactcgcaactgggcgctacatcaccggcgtctcgatcgcttacttgctcttttcggcggttgtggtcgctttgcccccttcggagggtcagcatattcgatggtaacctccgctcctacctcgatgtctgcacacgctacgatagagcattcataccaccatccatactccacaccccccgccctctcgtaccaccatggcttcattcgtcctccacccccatgtattaccaatttagcattcggcgcgaacgagtggttgagtagtcgcaacaagctgatttccatgaacgctcgacaggcggggatcgtgccgcgcatggttttgctcggatcgatcacgagcgctcctagaccatccgcatgcatgatgtaacccatgcacgtatatccaccacctttcttttcgtaccccgcgggcacatctacatccgggagaactaccgtcaagagagtatcgccttcggcaaaagcgaccttggtgccgagacccttgcagtggattaggctattgatttccttgagcgcgtcgtgcgaaaatagatctttttccatcacgtcgtgtacctgattgatttgcaaagggaatcagcggcgtttgtttggatgacgcgcatcgtatgagggcactgctttctgcaacaacatgtgaagcaccgactacatgcgcttaccgttaaagcgggccgctgtaccggcggttgctgctgtgtgctgcgccgcaggtggtcacgtgcgggtgggctagccttcttcagttggtcgcgtagtttgtctctgtcttgctgtactctcgcgagtcgccgctccaacttttctgtgtctgccttcgcttgtgccgctgcattgatttccgcctgctgctctcgtctcttggcctcgagctgcatattcccgggacacacaaggtcaagtcaaaacagcgcgtgtgtgcgtgttgactaccgtctatatagaaatgaaaatgccatgtgtgacaacaccaactcacagttgcaagcttgcgtcgcagctcgtcgttctcctctttcgccttgtctgctgcctctctctccctttcacgcacaagcttctccgattcttcctttcttttcttctctgcttgtgcaaccctctctgcatcctgtgagaaatgcgaaaactacagcatgcggtagcggtcaaagggtagacgcgcgaatgggcagctgtcgtggtttttttgttgcgcagaggagtgcatctgttttcgatttaaaacagaatttacagcgcctcagctactgctgtacatacaaatcgggaacatgtggatcccacactccccacctcgcgtccctgaacgcttgctgcttcggctgctgatacgaggacacttagcctgctgatcccttgctccgctccggtcgctggctcaacatcgctcgccgccgccgatcctgcaccgggcgatgcgctggactccatagcggtcacccccgctgcaacgaatgctgctgctgcgacgtctactgctgttgcaggtgctcgtggctgagggacgactggtcgctctgctgtacctttagatggaccagccattccgttcttcttgtgctggccacagtgagtccgagcgaggccaggaaagccatagctggctgtctttctacactcttcgcactttttgagcaaattggtcataccctccgcgacgtggtcggcacagcacctcttcttgccatccgccttgaaaccatacgaagggtacttgttgcaacccgtgtgactacacttttgggaatgtatgaggtgaaacaccccttccttcgcctcatccttgcactgcttgcatttcccgtcgattctaccctgtgtgtctgcaatgaaagcgccgttgccatctgaagggaacacgtcaaagttgaaaaaaggggcaagcaggagagatgccacaccctttttcagatgttttgtacttctgctgtcgtggaaacaaaaatgcgagactcgcacgcgtcactgtgttgtagtacagctgacgtccagccagagctctagagcgccaatagcataccgccttgaagcttgacgtgtcgagggctccatctacagtcttctccagatgcggcccaacagcacaaacagtacacacagcagcgtgctctcggtcggagctcggttttggaaacgatctctcacctttccttgcatacacccctctccctcgtccgcaactacattttcgtggcatgttgtgagctgacctcgggtcgactgtgctcaggttccctccctctctcctccgccctactgctgtctactattggccccggggcacgctttttgtactattggcccatatgcggggatggggtgtactattggccctggggcacagtgataagtgtactattggcccgcgttttttcggacggaagatcaagcagcgcacctcgagttgcgcacaagagcagaggaaacacacacaacgccgccgtgcctctgctgctgctccgctgctgatctgttgctctgctgctctgctgccctgctccgctgctctgctgctctgctgctccgctgctgctctgctgctccgctgctgctctgctgctctgctgccctgctgctcggctgcccttctgccctgctgctgccgaagcgctgccgccgctgctgctactctactggtgtgctgctgccgaagcgctgccgccgctgctgctcctctactggtgtgttggtgtactggtgtgctggtgtactggtgtgctggcgtactgatgtgctgctgctgctgccgctgctgtgctgctgtgctgccaagcgctgccgcgttgcaggtgagctcgatgttgcacgagagagagccgtgatgcgcgtgaatgaagcaaggagtaaaaagggtgttgtctacagcgccgtttcgtctccgtgaaggaaaggagaagctgggccacaatacggtttgcttttcggcgcaattgaccagcaccggtaaggcacgagccgagctttcagccgttgtgctgtgcgagcgtcaaggttttgagtgtgtttgatttaaaaaactgcttcagcaacaaagacagccggtgcacactgctgcaacaagatgctagagttcaaactcggcatcaagagtaccatcgtctaccagccgcgccacacacttctgtcgcattcccttgtcgtgaggtacttccgtaccgatgctcgagtgtgccaaaaaagaatggccggccagtggacgaacgagtcaccgccgctcggcggccaagccctgctgatttgcaacacggtcacaattaacatcgcaacatcaatccagagcgccaaatcctctgcctgtaaaactatcgaaacgcttcacgttgtcatggcccatccgccgaagcctcgcccaccggcaccgccacgcacgtaatcgaaccactgacagccgtagtttaacgcctctggacagtaataaattaacccgtaagaaatgaacaaaaccatccaaaattggtaggtctcgttgaatccggagggtctatattgtcgaaagtaactacttccggacagttattgccgtacccaaatacgacactcatcaacaaacaacgattttctaaagcttaaacaaggttaggggttctcgcgaaaactaatcggggctgactttctttcgaaatctgccgctcctctcgctgactgtcgatattagtcgctatcatgctattgaggagagtacctccattttatgtacacttttctatcgatgtagcctgtgatgatcaaacttccatttaacgactgatgtcgatcctcgtggaaacccctgtggaggcccttaaagagcgattcatggggatcgttggttgcgcgatgtagagctcgttgtagttttttcgtagcgtgttgaatttgacgaccctgtacagcagtgttgtgatgtcggccttcttcttcctcttcttttttttcctcgtctttgattttgtggcggtggttgccatggtgaaggtgaattgtgaccgatgtggacgatcaacacactccagtgtttaccgataaaattgaaatcaaacgtcttttttgcaacattttatttctcgccaatcgaacgcacttctagaaaaagctcttgattgccgaatttagtacacttgtcattcactagttgacaacacccctgatcctttccgcgaaccaatctttgtcgagttcgtcgaaacaccccaccgactccaactattctttacatgatgtcaaggtgtcaatctctgactgaaaattgatacccgctccacccctttgaccactcgtctcaataggttccggacgtttcgcaggagctcgcggctgcacaggtgactggcactcagccagacgaggcagtggcggcatctgcatctgcgtaggccgtggtcgagacggtgacgcctgtgcaagagacggagcatgagcagcctgttccggccagagaggccttggtgaaggtgacggggcggtgcaggcagctggagaggccgatgcaggcgaagtgacgtcagtgtctagcgcgttggctgtggtagcacaagagccgggcgaagcacagcgactacagaaaagccgcggctcgcacgacatgctcgggcatgcaccagcagcaacggcactccagtgtttaccgataaaattgaaatcaaacgtcttttttctagaacattttaggatagtactgtctactatgcttttttgcaacattttatttctcgccaatcgaacgcacttctagaaaaagctcttgattgccgaattaagtacatttttcattcactagtcgacaacaccatattttttggagctaaatttacgcagtacgttttacacgaaacatttggatatgtgaggtgacgacccgacgatctgtgtcagagtgagggagcgcaacgaagccggtggcccaaaaacgcatccgccgacgccatcaggcaaatagctaaaacagatggcggccgagaagcaagagtccgagacactcacgcgacagcacaacgacaacacgctgtggcgcaacggcgtgctgatgaaaaagttttttttaaaggcgggcgacggcatcgtccgtagctacgggtggaagaaggcgcccgaagagcaataactactcccaagccccgccaggcccaagcgcaccaaggttgcgtagctcatcccccaagcccccatcacccccactcgttccagcgtggcggcgcaccccgaaaccagtgtgtccgacctggcacagctgaaacatgtggccaagcataccctccccgcagcctaccccgccccgccgatttcaaaaacgacacccgccccggttgaaaacaatgctagaatcgtgtgcagtcgttaccccaccccctccaccccctgttccccccgtgcacagtcgcctaaaagtgcgcgacatggtccgatgactggttgcgcctgtgcacgccgtcgctactgctctgccgcctagcgcctccccccagcccgctggaccccgccccaatggcgcctattgtggaaaaatgctgccctggcgcccccgcttggcaacccgacaaaagaatggaaagattcctctacccactactgctctgccatctagcgcccgcccaccccgctcatcagatgccagcaaccatggctagtttcggttcgcagtctatcatttcatcagggcaatcgtaaccccatgcacggtacttgcaataaatctgaaaccgggcgtcctccttgtccgcgtcgacggcacggaggtccgcttcaacctctctatgtgtcttttccggagtcttaggaagtttccagccacttggcttcgtcagtgtcatcgtcttgatctttcccacgctttcgacactaacacttcgaatattagcctgctccgaccgaatgtggatccatttgcgatcccatgggttgagatccggcagggacaccgaactttcagacgatgaaatgaagtccttaaaaaccctgtcgagaacctccgtaggttgagaaggttgtggttttttatatcctccccgcttgcgcttggacttgaccgatgtcgtcatctcgtgtgcgatgtggtcaggtcgcctggcccctctgatccattcttcataatcgtaccagtcgatgagccagaagtcaaatagttcaacatcctcgtctttcattgttgaccagcgaagtccgtctgcgtagctcgaaagaaggttccactgatgttgcgtcttgaatacggcgtcgaagcgagagtcccatgtgtctncttggacttgaccgatgtcgtcatctcgtgtgcgatgtggtcaggtcgcctggcccctctgatccattcttcataatcgtaccagtcgatgagccagaagtcaaatagttcaacatcctcgtctttcattgttgaccagcgaagtccgtctgcgtagctcgaaagaaggttccactgatgttgcgtcttgaatacggcgtcgaagcgagagtcccatgtgtcttgcgaaaaatacttcgcatcaggaaataacattctcataggtacgagatcgttgtggaggttttccagcgcgtttgttgcctcttcttcagttggtttccagttggtgatttgtgatgccatgttttttgtaggaagtgtgagacggaatgcgcgttttaaagttcataacttttgagtaaactttcgtttgctgacgtcggggctcgactcatcctcgacactgagagagatccgatgtgacgatgagatgctccagctcggatgcaaatgcgagcgtctttcggatcacatctttcgcgctcccctttttcgatgttgtgtcaacgcggatagtagaactatccatgctttcgatgaggtccatgtttgtttgtttagttgaactttgagaacatatttttgggagctaaatttacgcagtacgttttacacgaaacatttggatatgtgccgagaaactggcagaggaaaagtgtccaaagtgtaatagagtaggaacgctttgtgggtgggattagtgggttacatttggttgccaccgccccgaccatcccggctatcgctagaataaacctgtctttacgaagttgactttgaattgtttgtaccccatttttgtccggatacgtttgaatcttccgccaataaccaattccaaactattgatttcatctagcaactcgttagatacgtcttttttgctctcaaggtgccggcgagccagcattctcccgaccaagcgtattactacaaaaagaacgatcaaaacgccgaagacaatgccagattttttcaacatgatgctgtcccgtatttataaataaaaacattttattttaatatatccagtcattttgtgacctcggcacccgctgatcaacccgctgccaactggtgcactcctcctactgtgcccacccgccattttgtgacctcggcacggttgaaaacaatgctagaatcgtgtgcagtcgttaccccaccccctccaccccctgttccccccgtgcacagtcgcctaaaagtgcgcgacatggtccgatgactggtgctgcgcctgtgcacgccgtcgctactgctctgccgcctagcgcctccccctctgccccgtctgggctgttcgcgaggcctctttttgcgacgagcttgtgtgccacacacatgagaaatcaagtcaccgatgcctctgacagtctactctagggcagcatccgccacacatgttgtatttgcacttcatcgcagacagggagccacaaccacatgtccttcccgtgccctgagaggacggcgtactattcccgaccatactcctcttcagcgctctcttttcgcgtgagaccagaatgctacgagcact

SEQ ID NO: 287 - DNA, 21020 bp, unidentified
  variation 19432: note = n is any nucleotide
  misc_feature 1..21020: note = Fanzor polypeptide
  source 1..21020: mol_type = other DNA
  variation 7199..7256: note = n is any nucleotide
atgttaggcacaactcgggaccatacgtcaagctctcgcaatgggacggagtcaaaagcaaacgaccagggccgcatggtgagaatagttccaatcggcacagccttgagggcgctaggccgtttctacggatacgcgttgctttctcgcactgtgcctgaccgcccccaacaattcgtgggtcgatagtggcctcataagttgaaagttgacgttgtggcacattcccgtgttctgcacggggtctaaatcgggaaccccctttgcttgcagttctactactgtacgttcgtgcgatgctgtatgcactgctgtaatcgagatctgaggggctctcgactgagcacacaatccacgacgtaccttttgttttcgcaatctctgcccccctacccccacctcctgtcgatagacgatggcattgccccgtcttggatccctgctgttgccctacgggtatcgtgaccgctgggagcatcggcaggggagccggcttgcagctgaggcggcgggggtggaggctgtgggggctgccaggctgagatggaggagggaaaaaggcgagcggctgctgtactctctcctgtgttggcattattgtccttgagaggaagttaagctgttggttagtgtcaatggtgtcctcattcatacgcgggtcaagtggatgtcgtggtccagagcgccgagggagctaccgctttgttgagcgcctgcaggattaaggttcgagcagttgcgtcccttcctcttgtgtatatattttacagctagagggcaacaaaaatcgccaccgattagttggagctgaagcaatacagaagaagttactctctgcctttccgtcggggtcatctgttgctggtgcctcctcagtgggctgcgaagtaccgcgagaccggtgaaagcttctaaaaggctgtgccgtgcgggtgttcacagcaggctcgactcgactatgctgagacagcgctcctttggacaagtgggtgtctgtgcgcgcttttatttcaacagtgcgttattcctgttgtctgtcgctcttgtttgcagccatgcgtctatggaactatttgtccccttttcgtgttgcattgctatcgcatgtgtcacgcctagtcgcgcgtccacttcagcccctctccccgccttcgtttggtggttggtggcctctctctttttgacaaaagagtccggtaccatccggctccctgaacgccacaatatgccatttcgtcgttgttttgtttctcatccctgtggcatccgcccacttctcattcttctgctgcccccatccccatgttctcaccaccccgttcctgctgttgatggtagatgacggcgctgggtttggcgaaaagggtgttgctaatgcgggtatcgttagcgccacgggaagagcagaggagctggtcgctcaggaggcttaagaaggatgccgagggcaacgtcaaaaaggcttcatgtagggagaagcacctggaggtgaaaagtaccgtcatacttgggaatatattgcattttaaagtggcgacaccagcagcgttttctgcacatctctctgtagcagaagccgcagcaacagacacaggcgcgtaaatggcaacaatcctttgagagagacgaactgaaaacactttggctaccccacaaccgcttacaccctccccgaaatccccacatctttctccctgcctgttcaagttgcgaccgagagcaaaggggggctctgtgggacatgaggaggagtaggccgacgccgccgtcgccgtcgccgactccttgagcatggattaagggcaaattccgcaggagcggcaccaggaacagcgacgtcagctacagcacctgctcgaagaggagcttcagctgaaactgtttgtgcggcaacacgaggggcagcggctccgggagcagttgattgtgtttgagcaactgcagcggcaccggcagacacaggtgcgtgaagggaaaacatcatttgagagagggagagttagagacgaaatgaaaacgcgtcggctgtacatttttgttgagtcgtcatccaaaacgagactccacgaagttccaacattatcacgtcatttctgaaaccgctatcgtcgcggggttctaattgttcccttcgtgatcgcccgagtcgatggcgtactttttgttttgagtcacggagacatttccgacgggaaaatagacagttttaatggaatgtaggtttagaagtcgggggacactgcaaatgtgccaaagaaaatggccgaaccgattacaaggactacgtgttcgttagcacgggatagtgtttggtcaaatcatctacattctgaaatatgtcctgctcaggttgagaccgagggcggtgggagctcggttgaattgaggaggaggccgccggcagagcctcagctgcagtcggagagggcgaggttggggccggtgatgcccaagcagcgccagcgtaccagagggcggacgaagggcagcatgcaggagaagctctcgcggaggcccagtcaggagcgtggcctacgggagggcttgtaaaggtgggtttcgtgtgtactgaagtagccaggaggcatgattgtgtatcctgaagtagtccggcatgcttcacgcgcccggatacacggccaaaaactcgtggaggtatgttgtgtatcctgacgaaacctggcctctctccccgtggccggatacaaggcaaaagagtcgtgatgggaagttttgtggatcctgaaacaatctggcattgctccccgctcccggatacccgatatgaagcgcgcagttcttggtgagatgtgtttttgcacacaaccgttttgaagattaccccgcttccttccccggcaccgccccccccaacgctgccgtctgcagatccatagcccgttcgtgcggaggccgaggcagaagggcgctcggcaacaagagcgagagtagcatgatgtattggagactgcggcacttgcatgctgagcttgtgaggaggaacggatacacggcgaaccaaatgggggactttcactggacgccatggaagacgccgcaggtagcacgagtagagcggagacaattcgcgtgctatccgtcggcacccgctttggtagttgtggtgttttgtgtgatttgtgtgttttgttttcttgcagtaaaacgcaaggtagaccacatcgaccatcgacgggcggataccgcaagaacgattgtagctgttgatgttggcgcctgcgttgatgagcaccaccatgcctgttcagaatcctttgctcgcggccacattgagcggtgtaccggacacacctcccactttgaagaagttgataagagcttcgatgtccgcgccagccttgaccaacgccttggttacagcaaggtgcttaccacagactaaaggtgtagagtggtatgcccgtgctcggtcttggtcgaaatatcagcaccccattgcagaagaactcgtatcaaatgcaagtaacccctgtacgcggcgaacatgagtggggtccagtcattgtcaccacgtgcgcggctaatactggctgaccctgtcgagaggagattaatcgtaagctcgacggaaccactggatgccgcatggtgtagcttgctcagagcagatggtatgttgaggatgtgtgttcgaaaacacgctcgtccaaacaaagtttatggtcaacaagtgtttgatcgaggccgttatctcgaaaagccaccaaatgcttttagcctggtacaaaatgagagtgggaatggcacggtatggtaaagcgtcacacaactcagctgaagaatttcctgagcgagaccgcgagcccgctacataatggcgccggtggtagtagaagtctgtcccgtgaccgacaggaacagtatgtcgttccaggcgttttgcgatgattgacgcattgtgagtttgtgtctatgtgcgagcggggttttgtctaagtgacaatgagtctcttttgtggagagcggcttgttcaagcacacaggtcgattttagaagttattcaaatcacatccatccggcacgcagtacccgctacaccgctagcctgactcttgtcctcggtgggggccacgcgccttgaaacatccccggcctttcaccgctgccgtcggagcgtgatgaatcgccgacagcgggtgctgaaagacgccgcaaactaggccgcctttcaaaggcatatttcaccgttcacgacatgaaacacccccatcttcttcgtcccgctcgactcacagcgatggaacattacttgcactcgtcaggacacgaaccaacggatgcagggctggaatcgttccccgagctctttgcagctgttggaggtgatcgtaatcacactaagggggaactcttgtgctgatgtggacgtcaaatgatgcgctgggcgcggcgttggttacggtgggtgcggccacgatgtatttcatcaaacgatttggggaagatggctagcgatggccgcgttgcaaagttgttaccggataatggaggcaattgttgcgcgcgatttccccgaccagaagtttattaacaggagcttccgctcggcggccctgcagttttctggcgacaggcaggtcccggacaggctcgatccgtaaagactggttgatgcggtgatcgcaacccgtacgtgatgtctgctgtagtccatcttggcgcggatcgggccatgatggttcgggactggcagcgggggctgagaaacacatcccttcgtcggttggcagagagtcagttcgtggatgtggtccaggcgttggtactgaatttgtcggcaaaggagatggggacgacggactaatttggctgtgctcctaccgaacatgtggcctcggaggcatacctttggcaacgtttctgattggtagggaggggtgtatcgtgtcccccctcgaccgcagcggcaatcaagtatcgcagacgttgtggggaatgaagcagcctttccgcgatttcagtcgtagcgcgtgatagggagaattcggccaagcgtcggggggttcttctttggcgcaagcgtggtgtcaatggtgatgctggtgaagtccctccgccaggaatagtcggagtgttgcaagaatctggtaggatttgttaaaacgaaagtgtttcaattgactcaggagcagccgctgtctgtccaagtgagacaattcttcagaccgccgccagttgcgttcactgagggtctagaccgcactctgcgtcatgttgacgagggaaagggactactgaacattctcgcgataatctgaagacatgcgccgcaggaggaatgtgatgagaagggggaaatccccggtgtttttgtgtcccggccgatcgttgtacagagatcatacacagaaatgcgtagtacaagacacctaaaacgaacaggtgacgccagacgccaatagatgggacgtgaaacacacacaccgcgttgcaattgctattgctgtttccgtctgacaaaacacaactctgcaggctaaaaaaacggtcgatgaaacttttttgtgggatgacaaaacactcggacagcgaccatcgaacaattgtcctttcccgtcaaaatggtccggagaaccacgagaaagtggacgcacacggagcacattgcttttctctgcggcgtgcagatgtgggagaggaactgggccgtggcctcgctagtgccggccgacccgctttgtggtccaaacaagaacgtcctcaaaatcgacaaaggagagcgattgacggatagattttcgaggagaattgacatttacaccgtggaccgcacgaaccacacgtttttgccgattacacctccctcaatcatgcgtttacgaaggaaatacgacgaacccctgcttgtcctccaagacactcaagcatcctagcgctcagaaatttaccttttggtttcattaccacgccccgtctgtatctacgttcgctttctcatgcccttggtcaccaacttgacgggtttgaagcggtagatctcgcgtgaatcgctgactatgaagcctaagcccttcttgttcttgagcagcgtctccactttgcggcaggctttcgacgcggctatgacattaaaagaaagttgcgtctttccctccttgagccatcctaaaacccactgcccgttgtacgcggaatcagagctgtccttaactcttgtgtagaatatatcaggaaactcccccttctcgtttggcttcacaagattgtacgggaatttgacgccctcttggaaaaacttcttctggaaggttctaaacctcgtctgcaatacagaaagcgacatgggggccaaaacatgcggttgttggtatgcgattgttggtaaatgtcacaagttgacaaatggatgaacgggtgcggaagcgacagatcggaccgagccgctctctacatacgattggaagctcgcgtttctgaccgaaattcacgctaacatgttttctgaaatgcgtaagctgtcttctcaccacagtttcgccttggaagtggtgaaccatctcctcccaaacttcatccgagtaacacgtcttgctcttatccttccgcgcattgagaagagcaggaagaaatcctgcgtgacagcgaacagggagaaacgcaacacatgtatgaatgaaatgacgtttggtgctccgatataaaaaccttccattcttactttggccactttcctcctcttcctcgtcgcctgcgttgcctgtgaaacgggcggcaacgagattagacaaccaatacatcgccaagtgagaaaaaaaacaagagaaggcgcaacgtgcgtccaaaaaaaaaactttcatgcgtaccgtggccgctccccccgccttcttcgtcctcgtcgccctcctcctcttgatcgtctaccgcgttgcctgtgcaaagggcaagacaaccaactattattcgacaaccaatacatcgccaaaagagaaagttatgtcaaggaggggcgccaggtgcatccaagaaaaaattagtccatgcttaccgtggccgcattcctcccctgcgtccgcgtcggcttgctcctcttcttcatcacctgcgatggctgtgacaacggtggcaacgtggtcacgcaaccaacattttgccaaatgaggaagcatttcaagtcgcttccccccgcttctacgtccattgtgccctcctgcaatgtagagaactacccccccccccnnnnnnnnnnnnnnnnnnnnnnnnnnnnnnnnnnnnnnnnnnnnnnnnnnnnnnnnnnctgcaatgtagagaactcccccccccccctcgccaccatcacgcgtgtccccggtgccttctggagacgaagagctggcaggaacaatgcgtgtgtcttcgtcggtgcatggcacaaggaagggcggcaccgtggttggacaaccaacacatcgccaaatgagaaaaagtgctaagctctcaccggtcttccttgacacacgcctagcggtagtcagacgagtagcaccaacagcagtagcagcagcagcacgctttggcctctttgacggccctgttacacgaaacaacaaatcgaacaacacaggaacaaacactcagaagatgccaagccgtcttcgtttcttccccggtggccatcgcgtccttctttcaagttcccgagcgcgtaccgcactcacctacgtccccatccgctcctcctgtcatcttcccctgcaccctctttcgcgagcattccggtagtgaaggggtttcacctgcgtattgatgtgcaaacacctcgccaaatgagaagatatttcgcgtattgctgcgatttgttggtgagcaggtgaatcgcgccatgtgagacaacaaatccacacataccgaactttcgtgccttaccgtggccatttcccttgtctccagcgttacgcgagcaagcaactataggggtcaatgctgtcgtcgaccggccttgccacagcaatgatggagttgtcaccaggggctgaggctagcatggcgttggtcgccgaggcgcgccgctggatgtccttgatgcgatcggcgaattcgatcccgtcgcgcccggagaattggttgacggactgcagttggtccctgcaggttctgcaaatgtcgatctcgttcagtgcaatggtttttttggccatgaccgaaacgaaaaagcccttttctcttcgtccgatgcgtactcaaaccaaaagggttcttccgaccgttgctttttggcgggtccttggtccaaaagaaagccctggtacgccctgccttcctccgtgctctgtaagcgatcgcagcgctgttcgatctcatcgcaaagacttgtgtcaccaccgagcaccctggtgatggtttgggctgattgacgcctgaattccttcgcagcgttcgaaggcagtagccaaatgatttctacgagagttgaagcgtcgcaaataggggtgacagggcccttgtcgttgatcctgacgtattcaatgcgttcagaaagtggaatcgtactctgtgcattttgtccaggcctttccatgccatcccttttttccttttcaaggacacgtgtgagcatttttgcagcatattcggcagacgcctcgggacacagcatgcggttgacatcgataatggaccctttcccagtgttctcgtcgatgcgcacggaaccatggattcccacggtcctcagcgccttttccaacctagcagttttcgtttcagcgtgagcgacatggtccgataactgatgttgcgcctgtgcacgcagacactgacaaacgcgctcgacgtggtttctgagcgattgtttaaatgcctctcccgacgtgtcccgccacgtgtcccaacctttcccagatatgttgttcaatatatagtcacatacttcgctcggaacgacagatgtgattctgccgtgtacctgacgcttcgaaatttttggaccactgaaatcattgttgtaaagttaagcatgttgacaacttaaatgttttttacaataagaaaaaaatgactcgcccgatatctcctgaaatatacgatgcattcaaaaagtgcgacgcgcaatggatgcagaggcggcgaaaactggacacatcttcagtgttctacacgatcacaaagtgctgtactcgagagagaggagtttctcatgttttgaaaatggaagccgaagaatattcgtcgcaggcggtacacttggccagaaagaagcttccgatcggggctttcaaagaggtgaaccgttttttgcatcgagggccacatgaaccacgcatatttgccattgatggttcgaaggtgcatgtacacccgtctttcatcaaggctggttacaaaacacgaacaaacgacaagccagtgccgcgtcctgctaaaagacctctggtcatgctttcgtcgatggtcgatgtgagaacgaaatcatgtatagactttgagcttacgaaacacttcgacgaacgaagggcagctgtttcgatgctccgtagtgtgcggaaaagtgacacgctgttgtttgacaggggatattactccaaagacctactccgcagtgtccatgactccggtgcatttggcgtctggcgactcaggataatgcgttcaagggtactaggtctttctttaactcgcaccacacggaggtagcgtgtctcattcttggtgttagggtgcgcctcttgaaatatttcatcaaaggtaagacgtatgtctgcctgacgaacgatccgtccttatctcgacgagacatcaagactatgtacgcatggagatggagagtggaggaatccttcaagcgattgaaatcaaatctcaagctcgagaaagctcacgcaaaaacacccgctctttatatccaggaggtggaagccagggtgttgttagacacgatcactctgagaatgcaaagcagtacgaaggagtcgtcatatctgtatacccttgatacacacgtcacacacattctccgtaacgttaaaagagtctccggtcacacgagctacaggtttgtagcagagctacagtcaaaaaggccgtttggtcggattcattgcagaccaccggatgacaaacgtcacaccaatcacgccctcggacgttacacgcggtggaataccggaagcgaaagtttactcaaaagttcttgactacaaaacctcgcaccccgtctcacacttcatcatcatcaccatcatccttttcgtcatggtgagaccgtcttcggatggaaactcgcacaagaagaagaaacacaagaagatacatccgagagctcctccaaaggacgtcccgggatttctgcggacggtggggagtctctaccccaagggatacctcaccgagtcaggaaatctaccaaagaaatacaagggtacttattgttgccagctcttctccagagtcaagttcgggaaagaagtgtctcaaaagacaaggctgagaaccgtgagcgtcggatttcgggcagcaacgaccgatgagaaacgcgacacttttcagtccaagatcgatgaggcggtgtatcacctctctcgcgaacgagttctggcgtctctcttcgcgaactttgtgttcttggaacgtcttcaaaacggatcagcccttccagagcccgacagtgccttttacaggtcatgcttgtcatcatgcatcgaaagcagcggaggagggagtcgcaacgacgacttcgatcgtttttccgacacaacgggactgacaaggctcgtgcctcccagaaaactgaaccttaaccaacagcgagagcacgaggcacaacgcatggcaacggcaacgtcgacgcgtgcaacacaccacgcggaaaagaggagaatttcgatcacgaggtggtttctgtgcttgcggatatccaggggcgacctcgtgtacaagaagtatgctaccaagctatacgatctagcgaagaaaatcatcacggagttcgacggcacacccgagtacgcagaagacctccgacaaaaggcacaatcaatagaccctggcacggacatcgacaccatcctcgacttcgctcggtaagaaaaggagttctccgatcgtcaggatgggaagtgcgcgtcgacgatcaaacacctgtactggatgttcaacacgtacgtcgccgactccagacgcatgtacgaggagaccgtatcccgagctcattcgtatttccccggtgaagacaaggagtgcaggaacaagaggtacgaattcgtgaagaacgagctcggagaagagttcacctacgctccccccaaagacaccgccgttctacccatttgctcaacgggttcggtgttcatctacatcgacatgaagacgcttaagtcatgggggcttctgcactccaacgatgcttggtggtacaaggacgtcctccgaccgttctccaaagaggccaatatcaagtgtctcgcgaacaaagagaactccaggtacgcgtcaagcgagcatggatacctctcgagtttgctaggaagtggtccggacaagtgcccctggatgattggtgagagttttttgacggacggtgtgcagatcaagcttctgcttgtgacactggaacatggaagaaaagctttccccgggtccacccagctgaacgaggcggggtacaacaaacttccccgggctgacgtgcaactagaaagtctgctgagagagggaagaggagtgtacaatatatccagcctcttggattctccaagcatcagggaagacgttgtcgtgatgtccgcggacccgggacaggcgaaggtgatcaacgtttcttcggccacggccagaacttgggcgaggcaggaccctggtgttattcttaacagttcgacgtgtgtgttcggggatgactatcgtcgcgatactcttgcctcacgttcagacaagtacgagactttcaggcgcaaggaccagccttacggagtggctatcgatcgtctacgcaacgagaagaaaagaacttcctgcctcgcgacgttcatccggtactgtaaaagttggtgtgcaaacggtgcggcactgttgcttgagacgcttcaggaagcaaggaagttcttgcgttttgatcgattcagagctacgcagaagacactcgccaagatagcggacaagtacatgggacatgtaggagacccctgcagggtcatgttgttcggtaaagcgtcttttcgtgcgcagaaagggagggcatccgccccaaggaaagctttgatcagagagatggccagcaggggagtagtgttgatggtggaagagtacaacacttccaagaagtgcccggggtgtggggaggacacggtcgaggacaaagaacggagaatccggagttgcaaaaactttaagatcggatcaccggaagagtcctgtagacttcaccccctgacaccagagtttgaaatggatcgcgacgacgtagggtcgactaacatcggtatgcgtggtttcggcaaattgctgggtcaggagtggttttaaggatttttttcggattttcacttgcggatgatactttatagttggttttggttttcctaaagttgacaatagtgactgaaatcacggagaattccctccaccttcctcagaatatctttttgatttatcgaaggcctagccgtttttatcagagaagcgactccgacatgacctgtggaagcatccacgaccaggttgtccatgatttacgtttgagagatgaaagacattttttattggcagttttgtacgcgccagtgttgaaggcaaacgagtctgtcgcccccagcaacgcgtgtggcactggtatcggagcgtgctacaaacgtaaacccggtcgcggaatttaaatacccctccacattcccgtggcccgtacctcatcgagaaagctcgtggtaccatcttgctccaaggccgatggcccgtcgctactgctctgccgccgaaccccgcccaaatggcgcctattgtggaaaaatgctgccctggcgcccccgcttggcaacccgacaaaaaatggaacgattgccctcctgctagcacctggctactgttctgccacctagcgcacgagggcacaattgcctacaatttcgacgacccgaccatctgtgtcagggtactacccaaggccggcggggcgcacatataccaatgccacagaaactgccataaatcggcaagaacgatgttaacttacggacagaagcggtcaagaatgcgtttactccaaccgcgtccccaactcgcaactgggcgctacatcaccggcgtctcgatcgcttacttgctcttttcggcggttgtggtcgctttgcccccttcggagggtcagcatattcgatggtaacctccgctcctacctcgatgtctgcacacgctacgatagagcattcataccaccatccatactccacaccccccgccctctcgtaccaccatggcttcattcgtcctccacccccatgtattaccaatttagcattcggcgcgaacgagtggttgagtagtcgcaacaagctgatttccatgaacgctcgacaggcggggatcgtgccgcgcatggttttgctcggatcgatcacgagcgctcctagaccatccgcatgcatgatgtaacccatgcacgtatatccaccacctttcttttcgtaccccgcgggcacatctacatccgggagaactaccgtcaagagagtatcgccttcggcaaaagcgaccttggtgccgagacccttgcagtggattaggctattgatttccttgagcgcgtcgtgcgaaaatagatctttttccatcacgtcgtgtacctgattgatttgcaaagggaatcagcggcgtttgtttggatgacgcgcatcgtatgagggcactgctttctgcaacaacatgtgaagcaccgactacatgcgcttaccgttaaagcgggccgctgtaccggcggttgctgctgtgtgctgcgccgcaggtggtcacgtgcgggtgggctagccttcttcagttggtcgcgtagtttgtctctgtcttgctgtactctcgcgagtcgccgctccaacttttctgtgtctgccttcgcttgtgccgctgcattgatttccgcctgctgctctcgtctcttggcctcgagctgcatattcccgggacacacaaggtcaagtcaaaacagcgcgtgtgtgcgtgttgactaccgtctatatagaaatgaaaatgccatgtgtgacaacaccaactcacagttgcaagcttgcgtcgcagctcgtcgttctcctctttcgccttgtctgctgcctctctctccctttcacgcacaagcttctccgattcttcctttcttttcttctctgcttgtgcaaccctctctgcatcctgtgagaaatgcgaaaactacagcatgcggtagcggtcaaagggtagacgcgcgaatgggcagctgtcgtggtttttttgttgcgcagaggagtgcatctgttttcgatttaaaacagaatttacagcgcctcagctactgctgtacatacaaatcgggaacatgtggatcccacactccccacctcgcgtccctgaacgcttgctgcttcggctgctgatacgaggacacttagcctgctgatcccttgctccgctccggtcgctggctcaacatcgctcgccgccgccgatcctgcaccgggcgatgcgctggactccatagcggtcacccccgctgcaacgaatgctgctgctgcgacgtctactgctgttgcaggtgctcgtggctgagggacgactggtcgctctgctgtacctttagatggaccagccattccgttcttcttgtgctggccacagtgagtccgagcgaggccaggaaagccatagctggctgtctttctacactcttcgcactttttgagcaaattggtcataccctccgcgacgtggtcggcacagcacctcttcttgccatccgccttgaaaccatacgaagggtacttgttgcaacccgtgtgactacacttttgggaatgtatgaggtgaaacaccccttccttcgcctcatccttgcactgcttgcatttcccgtcgattctaccctgtgtgtctgcaatgaaagcgccgttgccatctgaagggaacacgtcaaagttgaaaaaaggggcaagcaggagagatgccacaccctttttcagatgttttgtacttctgctgtcgtggaaacaaaaatgcgagactcgcacgcgtcactgtgttgtagtacagctgacgtccagccagagctctagagcgccaatagcataccgccttgaagcttgacgtgtcgagggctccatctacagtcttctccagatgcggcccaacagcacaaacagtacacacagcagcgtgctctcggtcggagctcggttttggaaacgatctctcacctttccttgcatacacccctctccctcgtccgcaactacattttcgtggcatgttgtgagctgacctcgggtcgactgtgctcaggttccctccctctctcctccgccctactgctgtctactattggccccggggcacgctttttgtactattggcccatatgcggggatggggtgtactattggccctggggcacagtgataagtgtactattggcccgcgttttttcggacggaagatcaagcagcgcacctcgagttgcgcacaagagcagaggaaacacacacaacgccgccgtgcctctgctgctgctccgctgctgatctgttgctctgctgctctgctgccctgctccgctgctctgctgctctgctgctccgctgctgctctgctgctccgctgctgctctgctgctctgctgccctgctgctcggctgcccttctgccctgctgctgccgaagcgctgccgccgctgctgctactctactggtgtgctgctgccgaagcgctgccgccgctgctgctcctctactggtgtgttggtgtactggtgtgctggtgtactggtgtgctggcgtactgatgtgctgctgctgctgccgctgctgtgctgctgtgctgccaagcgctgccgcgttgcaggtgagctcgatgttgcacgagagagagccgtgatgcgcgtgaatgaagcaaggagtaaaaagggtgttgtctacagcgccgtttcgtctccgtgaaggaaaggagaagctgggccacaatacggtttgcttttcggcgcaattgaccagcaccggtaaggcacgagccgagctttcagccgttgtgctgtgcgagcgtcaaggttttgagtgtgtttgatttaaaaaactgcttcagcaacaaagacagccggtgcacactgctgcaacaagatgctagagttcaaactcggcatcaagagtaccatcgtctaccagccgcgccacacacttctgtcgcattcccttgtcgtgaggtacttccgtaccgatgctcgagtgtgccaaaaaagaatggccggccagtggacgaacgagtcaccgccgctcggcggccaagccctgctgatttgcaacacggtcacaattaacatcgcaacatcaatccagagcgccaaatcctctgcctgtaaaactatcgaaacgcttcacgttgtcatggcccatccgccgaagcctcgcccaccggcaccgccacgcacgtaatcgaaccactgacagccgtagtttaacgcctctggacagtaataaattaacccgtaagaaatgaacaaaaccatccaaaattggtaggtctcgttgaatccggagggtctatattgtcgaaagtaactacttccggacagttattgccgtacccaaatacgacactcatcaacaaacaacgattttctaaagcttaaacaaggttaggggttctcgcgaaaactaatcggggctgactttctttcgaaatctgccgctcctctcgctgactgtcgatattagtcgctatcatgctattgaggagagtacctccattttatgtacacttttctatcgatgtagcctgtgatgatcaaacttccatttaacgactgatgtcgatcctcgtggaaacccctgtggaggcccttaaagagcgattcatggggatcgttggttgcgcgatgtagagctcgttgtagttttttcgtagcgtgttgaatttgacgaccctgtacagcagtgttgtgatgtcggccttcttcttcctcttcttttttttcctcgtctttgattttgtggcggtggttgccatggtgaaggtgaattgtgaccgatgtggacgatcaacacactccagtgtttaccgataaaattgaaatcaaacgtcttttttgcaacattttatttctcgccaatcgaacgcacttctagaaaaagctcttgattgccgaatttagtacacttgtcattcactagttgacaacacccctgatcctttccgcgaaccaatctttgtcgagttcgtcgaaacaccccaccgactccaactattctttacatgatgtcaaggtgtcaatctctgactgaaaattgatacccgctccacccctttgaccactcgtctcaataggttccggacgtttcgcaggagctcgcggctgcacaggtgactggcactcagccagacgaggcagtggcggcatctgcatctgcgtaggccgtggtcgagacggtgacgcctgtgcaagagacggagcatgagcagcctgttccggccagagaggccttggtgaaggtgacggggcggtgcaggcagctggagaggccgatgcaggcgaagtgacgtcagtgtctagcgcgttggctgtggtagcacaagagccgggcgaagcacagcgactacagaaaagccgcggctcgcacgacatgctcgggcatgcaccagcagcaacggcactccagtgtttaccgataaaattgaaatcaaacgtcttttttctagaacattttaggatagtactgtctactatgcttttttgcaacattttatttctcgccaatcgaacgcacttctagaaaaagctcttgattgccgaattaagtacatttttcattcactagtcgacaacaccatattttttggagctaaatttacgcagtacgttttacacgaaacatttggatatgtgaggtgacgacccgacgatctgtgtcagagtgagggagcgcaacgaagccggtggcccaaaaacgcatccgccgacgccatcaggcaaatagctaaaacagatggcggccgagaagcaagagtccgagacactcacgcgacagcacaacgacaacacgctgtggcgcaacggcgtgctgatgaaaaagttttttttaaaggcgggcgacggcatcgtccgtagctacgggtggaagaaggcgcccgaagagcaataactactcccaagccccgccaggcccaagcgcaccaaggttgcgtagctcatcccccaagcccccatcacccccactcgttccagcgtggcggcgcaccccgaaaccagtgtgtccgacctggcacagctgaaacatgtggccaagcataccctccccgcagcctaccccgccccgccgatttcaaaaacgacacccgccccggttgaaaacaatgctagaatcgtgtgcagtcgttaccccaccccctccaccccctgttccccccgtgcacagtcgcctaaaagtgcgcgacatggtccgatgactggttgcgcctgtgcacgccgtcgctactgctctgccgcctagcgcctccccccagcccgctggaccccgccccaatggcgcctattgtggaaaaatgctgccctggcgcccccgcttggcaacccgacaaaagaatggaaagattcctctacccactactgctctgccatctagcgcccgcccaccccgctcatcagatgccagcaaccatggctagtttcggttcgcagtctatcatttcatcagggcaatcgtaaccccatgcacggtacttgcaataaatctgaaaccgggcgtcctccttgtccgcgtcgacggcacggaggtccgcttcaacctctctatgtgtcttttccggagtcttaggaagtttccagccacttggcttcgtcagtgtcatcgtcttgatctttcccacgctttcgacactaacacttcgaatattagcctgctccgaccgaatgtggatccatttgcgatcccatgggttgagatccggcagggacaccgaactttcagacgatgaaatgaagtccttaaaaaccctgtcgagaacctccgtaggttgagaaggttgtggttttttatatcctccccgcttgcgcttggacttgaccgatgtcgtcatctcgtgtgcgatgtggtcaggtcgcctggcccctctgatccattcttcataatcgtaccagtcgatgagccagaagtcaaatagttcaacatcctcgtctttcattgttgaccagcgaagtccgtctgcgtagctcgaaagaaggttccactgatgttgcgtcttgaatacggcgtcgaagcgagagtcccatgtgtctncttggacttgaccgatgtcgtcatctcgtgtgcgatgtggtcaggtcgcctggcccctctgatccattcttcataatcgtaccagtcgatgagccagaagtcaaatagttcaacatcctcgtctttcattgttgaccagcgaagtccgtctgcgtagctcgaaagaaggttccactgatgttgcgtcttgaatacggcgtcgaagcgagagtcccatgtgtcttgcgaaaaatacttcgcatcaggaaataacattctcataggtacgagatcgttgtggaggttttccagcgcgtttgttgcctcttcttcagttggtttccagttggtgatttgtgatgccatgttttttgtaggaagtgtgagacggaatgcgcgttttaaagttcataacttttgagtaaactttcgtttgctgacgtcggggctcgactcatcctcgacactgagagagatccgatgtgacgatgagatgctccagctcggatgcaaatgcgagcgtctttcggatcacatctttcgcgctcccctttttcgatgttgtgtcaacgcggatagtagaactatccatgctttcgatgaggtccatgtttgtttgtttagttgaactttgagaacatatttttgggagctaaatttacgcagtacgttttacacgaaacatttggatatgtgccgagaaactggcagaggaaaagtgtccaaagtgtaatagagtaggaacgctttgtgggtgggattagtgggttacatttggttgccaccgccccgaccatcccggctatcgctagaataaacctgtctttacgaagttgactttgaattgtttgtaccccatttttgtccggatacgtttgaatcttccgccaataaccaattccaaactattgatttcatctagcaactcgttagatacgtcttttttgctctcaaggtgccggcgagccagcattctcccgaccaagcgtattactacaaaaagaacgatcaaaacgccgaagacaatgccagattttttcaacatgatgctgtcccgtatttataaataaaaacattttattttaatatatccagtcattttgtgacctcggcacccgctgatcaacccgctgccaactggtgcactcctcctactgtgcccacccgccattttgtgacctcggcacggttgaaaacaatgctagaatcgtgtgcagtcgttaccccaccccctccaccccctgttccccccgtgcacagtcgcctaaaagtgcgcgacatggtccgatgactggtgctgcgcctgtgcacgccgtcgctactgctctgccgcctagcgcctccccctctgccccgtctgggctgttcgcgaggcctctttttgcgacgagcttgtgtgccacacacatgagaaatcaagtcaccgatgcctctgacagtctactctagggcagcatccgccacacatgttgtatttgcacttcatcgcagacagggagccacaaccacatgtccttcccgtgccctgagaggacggcgtactattcccgaccatactcctcttcagcgctctcttttcgcgtgagaccagaatgctacgagcactgtt

SEQ ID NO: 288 - DNA, 20737 bp, Ectocarpus sp.
  source 1..20737: mol_type = other DNA
  variation 1..6027: note = n is any nucleotide
  variation 19035: note = n is any nucleotide
nnnnnnnnnnnnnnnnnnnnnnnnnnnnnnnnnnnnnnnnnnnnnnnnnnnnnnnnnnnnnnnnnnnnnnnnnnnnnnnnnnnnnnnnnnnnnnnnnnnnnnnnnnnnnnnnnnnnnnnnnnnnnnnnnnnnnnnnnnnnnnnnnnnnnnnnnnnnnnnnnnnnnnnnnnnnnnnnnnnnnnnnnnnnnnnnnnnnnnnnnnnnnnnnnnnnnnnnnnnnnnnnnnnnnnnnnnnnnnnnnnnnnnnnnnnnnnnnnnnnnnnnnnnnnnnnnnnnnnnnnnnnnnnnnnnnnnnnnnnnnnnnnnnnnnnnnnnnnnnnnnnnnnnnnnnnnnnnnnnnnnnnnnnnnnnnnnnnnnnnnnnnnnnnnnnnnnnnnnnnnnnnnnnnnnnnnnnnnnnnnnnnnnnnnnnnnnnnnnnnnnnnnnnnnnnnnnnnnnnnnnnnnnnnnnnnnnnnnnnnnnnnnnnnnnnnnnnnnnnnnnnnnnnnnnnnnnnnnnnnnnnnnnnnnnnnnnnnnnnnnnnnnnnnnnnnnnnnnnnnnnnnnnnnnnnnnnnnnnnnnnnnnnnnnnnnnnnnnnnnnnnnnnnnnnnnnnnnnnnnnnnnnnnnnnnnnnnnnnnnnnnnnnnnnnnnnnnnnnnnnnnnnnnnnnnnnnnnnnnnnnnnnnnnnnnnnnnnnnnnnnnnnnnnnnnnnnnnnnnnnnnnnnnnnnnnnnnnnnnnnnnnnnnnnnnnnnnnnnnnnnnnnnnnnnnnnnnnnnnnnnnnnnnnnnnnnnnnnnnnnnnnnnnnnnnnnnnnnnnnnnnnnnnnnnnnnnnnnnnnnnnnnnnnnnnnnnnnnnnnnnnnnnnnnnnnnnnnnnnnnnnnnnnnnnnnnnnnnnnnnnnnnnnnnnnnnnnnnnnnnnnnnnnnnnnnnnnnnnnnnnnnnnnnnnnnnnnnnnnnnnnnnnnnnnnnnnnnnnnnnnnnnnnnnnnnnnnnnnnnnnnnnnnnnnnnnnnnnnnnnnnnnnnnnnnnnnnnnnnnnnnnnnnnnnnnnnnnnnnnnnnnnnnnnnnnnnnnnnnnnnnnnnnnnnnnnnnnnnnnnnnnnnnnnnnnnnnnnnnnnnnnnnnnnnnnnnnnnnnnnnnnnnnnnnnnnnnnnnnnnnnnnnnnnnnnnnnnnnnnnnnnnnnnnnnnnnnnnnnnnnnnnnnnnnnnnnnnnnnnnnnnnnnnnnnnnnnnnnnnnnnnnnnnnnnnnnnnnnnnnnnnnnnnnnnnnnnnnnnnnnnnnnnnnnnnnnnnnnnnnnnnnnnnnnnnnnnnnnnnnnnnnnnnnnnnnnnnnnnnnnnnnnnnnnnnnnnnnnnnnnnnnnnnnnnnnnnnnnnnnnnnnnnnnnnnnnnnnnnnnnnnnnnnnnnnnnnnnnnnnnnnnnnnnnnnnnnnnnnnnnnnnnnnnnnnnnnnnnnnnnnnnnnnnnnnnnnnnnnnnnnnnnnnnnnnnnnnnnnnnnnnnnnnnnnnnnnnnnnnnnnnnnnnnnnnnnnnnnnnnnnnnnnnnnnnnnnnnnnnnnnnnnnnnnnnnnnnnnnnnnnnnnnnnnnnnnnnnnnnnnnnnnnnnnnnnnnnnnnnnnnnnnnnnnnnnnnnnnnnnnnnnnnnnnnnnnnnnnnnnnnnnnnnnnnnnnnnnnnnnnnnnnnnnnnnnnnnnnnnnnnnnnnnnnnnnnnnnnnnnnnnnnnnnnnnnnnnnnnnnnnnnnnnnnnnnnnnnnnnnnnnnnnnnnnnnnnnnnnnnnnnnnnnnnnnnnnnnnnnnnnnnnnnnnnnnnnnnnnnnnnnnnnnnnnnnnnnnnnnnnnnnnnnnnnnnnnnnnnnnnnnnnnnnnnnnnnnnnnnnnnnnnnnnnnnnnnnnnnnnnnnnnnnnnnnnnnnnnnnnnnnnnnnnnnnnnnnnnnnnnnnnnnnnnnnnnnnnnnnnnnnnnnnnnnnnnnnnnnnnnnnnnnnnnnnnnnnnnnnnnnnnnnnnnnnnnnnnnnnnnnnnnnnnnnnnnnnnnnnnnnnnnnnnnnnnnnnnnnnnnnnnnnnnnnnnnnnnnnnnnnnnnnnnnnnnnnnnnnnnnnnnnnnnnnnnnnnnnnnnnnnnnnnnnnnnnnnnnnnnnnnnnnnnnnnnnnnnnnnnnnnnnnnnnnnnnnnnnnnnnnnnnnnnnnnnnnnnnnnnnnnnnnnnnnnnnnnnnnnnnnnnnnnnnnnnnnnnnnnnnnnnnnnnnnnnnnnnnnnnnnnnnnnnnnnnnnnnnnnnnnnnnnnnnnnnnnnnnnnnnnnnnnnnnnnnnnnnnnnnnnnnnnnnnnnnnnnnnnnnnnnnnnnnnnnnnnnnnnnnnnnnnnnnnnnnnnnnnnnnnnnnnnnnnnnnnnnnnnnnnnnnnnnnnnnnnnnnnnnnnnnnnnnnnnnnnnnnnnnnnnnnnnnnnnnnnnnnnnnnnnnnnnnnnnnnnnnnnnnnnnnnnnnnnnnnnnnnnnnnnnnnnnnnnnnnnnnnnnnnnnnnnnnnnnnnnnnnnnnnnnnnnnnnnnnnnnnnnnnnnnnnnnnnnnnnnnnnnnnnnnnnnnnnnnnnnnnnnnnnnnnnnnnnnnnnnnnnnnnnnnnnnnnnnnnnnnnnnnnnnnnnnnnnnnnnnnnnnnnnnnnnnnnnnnnnnnnnnnnnnnnnnnnnnnnnnnnnnnnnnnnnnnnnnnnnnnnnnnnnnnnnnnnnnnnnnnnnnnnnnnnnnnnnnnnnnnnnnnnnnnnnnnnnnnnnnnnnnnnnnnnnnnnnnnnnnnnnnnnnnnnnnnnnnnnnnnnnnnnnnnnnnnnnnnnnnnnnnnnnnnnnnnnnnnnnnnnnnnnnnnnnnnnnnnnnnnnnnnnnnnnnnnnnnnnnnnnnnnnnnnnnnnnnnnnnnnnnnnnnnnnnnnnnnnnnnnnnnnnnnnnnnnnnnnnnnnnnnnnnnnnnnnnnnnnnnnnnnnnnnnnnnnnnnnnnnnnnnnnnnnnnnnnnnnnnnnnnnnnnnnnnnnnnnnnnnnnnnnnnnnnnnnnnnnnnnnnnnnnnnnnnnnnnnnnnnnnnnnnnnnnnnnnnnnnnnnnnnnnnnnnnnnnnnnnnnnnnnnnnnnnnnnnnnnnnnnnnnnnnnnnnnnnnnnnnnnnnnnnnnnnnnnnnnnnnnnnnnnnnnnnnnnnnnnnnnnnnnnnnnnnnnnnnnnnnnnnnnnnnnnnnnnnnnnnnnnnnnnnnnnnnnnnnnnnnnnnnnnnnnnnnnnnnnnnnnnnnnnnnnnnnnnnnnnnnnnnnnnnnnnnnnnnnnnnnnnnnnnnnnnnnnnnnnnnnnnnnnnnnnnnnnnnnnnnnnnnnnnnnnnnnnnnnnnnnnnnnnnnnnnnnnnnnnnnnnnnnnnnnnnnnnnnnnnnnnnnnnnnnnnnnnnnnnnnnnnnnnnnnnnnnnnnnnnnnnnnnnnnnnnnnnnnnnnnnnnnnnnnnnnnnnnnnnnnnnnnnnnnnnnnnnnnnnnnnnnnnnnnnnnnnnnnnnnnnnnnnnnnnnnnnnnnnnnnnnnnnnnnnnnnnnnnnnnnnnnnnnnnnnnnnnnnnnnnnnnnnnnnnnnnnnnnnnnnnnnnnnnnnnnnnnnnnnnnnnnnnnnnnnnnnnnnnnnnnnnnnnnnnnnnnnnnnnnnnnnnnnnnnnnnnnnnnnnnnnnnnnnnnnnnnnnnnnnnnnnnnnnnnnnnnnnnnnnnnnnnnnnnnnnnnnnnnnnnnnnnnnnnnnnnnnnnnnnnnnnnnnnnnnnnnnnnnnnnnnnnnnnnnnnnnnnnnnnnnnnnnnnnnnnnnnnnnnnnnnnnnnnnnnnnnnnnnnnnnnnnnnnnnnnnnnnnnnnnnnnnnnnnnnnnnnnnnnnnnnnnnnnnnnnnnnnnnnnnnnnnnnnnnnnnnnnnnnnnnnnnnnnnnnnnnnnnnnnnnnnnnnnnnnnnnnnnnnnnnnnnnnnnnnnnnnnnnnnnnnnnnnnnnnnnnnnnnnnnnnnnnnnnnnnnnnnnnnnnnnnnnnnnnnnnnnnnnnnnnnnnnnnnnnnnnnnnnnnnnnnnnnnnnnnnnnnnnnnnnnnnnnnnnnnnnnnnnnnnnnnnnnnnnnnnnnnnnnnnnnnnnnnnnnnnnnnnnnnnnnnnnnnnnnnnnnnnnnnnnnnnnnnnnnnnnnnnnnnnnnnnnnnnnnnnnnnnnnnnnnnnnnnnnnnnnnnnnnnnnnnnnnnnnnnnnnnnnnnnnnnnnnnnnnnnnnnnnnnnnnnnnnnnnnnnnnnnnnnnnnnnnnnnnnnnnnnnnnnnnnnnnnnnnnnnnnnnnnnnnnnnnnnnnnnnnnnnnnnnnnnnnnnnnnnnnnnnnnnnnnnnnnnnnnnnnnnnnnnnnnnnnnnnnnnnnnnnnnnnnnnnnnnnnnnnnnnnnnnnnnnnnnnnnnnnnnnnnnnnnnnnnnnnnnnnnnnnnnnnnnnnnnnnnnnnnnnnnnnnnnnnnnnnnnnnnnnnnnnnnnnnnnnnnnnnnnnnnnnnnnnnnnnnnnnnnnnnnnnnnnnnnnnnnnnnnnnnnnnnnnnnnnnnnnnnnnnnnnnnnnnnnnnnnnnnnnnnnnnnnnnnnnnnnnnnnnnnnnnnnnnnnnnnnnnnnnnnnnnnnnnnnnnnnnnnnnnnnnnnnnnnnnnnnnnnnnnnnnnnnnnnnnnnnnnnnnnnnnnnnnnnnnnnnnnnnnnnnnnnnnnnnnnnnnnnnnnnnnnnnnnnnnnnnnnnnnnnnnnnnnnnnnnnnnnnnnnnnnnnnnnnnnnnnnnnnnnnnnnnnnnnnnnnnnnnnnnnnnnnnnnnnnnnnnnnnnnnnnnnnnnnnnnnnnnnnnnnnnnnnnnnnnnnnnnnnnnnnnnnnnnnnnnnnnnnnnnnnnnnnnnnnnnnnnnnnnnnnnnnnnnnnnnnnnnnnnnnnnnnnnnnnnnnnnnnnnnnnnnnnnnnnnnnnnnnnnnnnnnnnnnnnnnnnnnnnnnnnnnnnnnnnnnnnnnnnnnnnnnnnnnnnnnnnnnnnnnnnnnnnnnnnnnnnnnnnnnnnnnnnnnnnnnnnnnnnnnnnnnnnnnnnnnnnnnnnnnnnnnnnnnnnnnnnnnnnnnnnnnnnnnnnnnnnnnnnnnnnnnnnnnnnnnnnnnnnnnnnnnnnnnnnnnnnnnnnnnnnnnnnnnnnnnnnnnnnnnnnnnnnnnnnnnnnnnnnnnnnnnnnnnnnnnnnnnnnnnnnnnnnnnnnnnnnnnnnnnnnnnnnnnnnnnnnnnnnnnnnnnnnnnnnnnnnnnnnnnnnnnnnnnnnnnnnnnnnnnnnnnnnnnnnnnnnnnnnnnnnnnnnnnnnnnnnnnnnnnnnnnnnnnnnnnnnnnnnnnnnnnnnnnnnnnnnnnnnnnnnnnnnnnnnnnnnnnnnnnnnnnnnnnnnnnnnnnnnnnnnnnnnnnnnnnnnnnnnnnnnnnnnnnnnnnnnnnnnnnnnnnnnnnnnnnnnnnnnnnnnnnnnnnnnnnnnnnnnnnnnnnnnnnnnnnnnnnnnnnnnnnnnnnnnnnnnnnnnnnnnnnnnnnnnnnnnnnnnnnnnnnnnnnnnnnnnnnnnnnnnnnnnnnnnnnnnnnnnnnnnnnnnnnnnnnnnnnnnnnnnnnnnnnnnnnnnnnnnnnnnnnnnnnnnnnnnnnnnnnnnnnnnnnnnnnnnnnnnnnnnnnnnnnnnnnnnnnnnnnnnnnnnnnnnnnnnnnnnnnnnnnnnnnnnnnnnnnnnnnnnnnnnnnnnnnnnnnnnnnnnnnnnnnnnnnnnnnnnnnnnnnnnnnnnnnnnnnnnnnnnnnnnnnnnnnnnnnnnnnnnnnnnnnnnnnnnnnnnnnnnnnnnnnnnnnnnnnnnnnnnnnnnnnnnnnnnnnnnnnnnnnnnnnnnnnnnnnnnnnnnnnnnnnnnnnnnnnnnnnnnnnnnnnnnnnnnnnnnnnnnnnnnnnnnnnnnnnnnnnnnnnnnnnnnnnnnnnnnnnnnnnnnnnnnnnnnnnnnnnnnnnnnnnnnnnnnnnnnnnttcgcaccatgcatgtccgaatgacgtctccgatgcagcgggaaaataggctgtccacccccctttcaccgccatccgctgtcacctccacaccaatctgtcaagtcaatgcgcgtgcgacgagggtaaaaacgagcaaacacagatgaaaacatgtatttggaagaaataggtaagtgggagcgatgggacagagagagagagagagagagagagagagagagagagagagagatgtgcatgtacaacgttatatattcaagacttgttcgtaccatccatgcccgaacgacgtccccgatgcagcgggagaaggccacgacgattcgaagcaacgccaggatcgcacacgcgaacaggagcgttgaaagcaaagaagaggcggtgtctccggccccgcgaacacccccgcccgcggcatagtcgatggcgccgtcgagcagcccaaccgtgaacgttcgggtttcccactcctcggcggcgacaccttcctcctctacgccaagcttggagattcggggcccccattgctcgacggcgacaccttcctgctcgcacttctcgacggcgacacctgcctcctctacgtcatcggtcacctattgaagagttgtttgaaaaaaacgaagacaatgtgagggaaaatgcccgggctggctatcttccctaaaacaaagttgtacacgaatacacaacactctcttcatttcatttcgaggagacaggactcaccggaagcagttcctcgagtgatgcgagagcctcgaagtgcgcgtgtccgtcgaaaaagataggggcctccgcgttgtgcaccaggtcgttgaacgaaagaatctcgtccttgatgtcggagctgtgctcatcgaagacgtcgcggccgtgcgagttgctgacggtggcgtcgcgaatgcactgcagggcatccttgacatcacccgcgagctcgccattggtggcttcgatgatggcaggaatcggcactccgtcacggaccatcgatcgttggagcaaggagatggggccgcagctgttgctagagccactgttggacatggccacaaacatcttgccatccagagtgtaatatacacgttgcactctcttcgccgccgccgccgccgccgccgccgccgctgctgccgctgttgctgctgctgctgctgctgcccccgccggtgtctgcgcccgcgctcgtgtacgggaacgcctcttcgccttcgccctctctttcctctgcctgttcctcgtcttcgctgccatgcttcacctgacacatggacgtaacaaaagaggaggggttcagattacgacgacagatctgcaacagatcaatcttgctttggaaccatcctatcttcaggcataggagaaacagaaagcgatcaagtgtcgtggtctatcgcgcgccaaataaagattctggagggggttccgtgggtgcaagattcgggccggggtcccgtggatggaaatttcacagtggggcggtaggtggagtacaagtgtgggtgggggtgtcctatgtcatactccgtatatgattgtgcgtgggaacggagataacacacaacaaccctcttgcacaaaataagtcgcgcgacttatcgataagtcgcgcgacttcaaaatgacgtattggcccgaaaatgccacccagaggtcagaaatttaaaatctttatgcagtagatgttggcaaggggttttacttgagtttagtgtaggaatcgggcattttcatttatcttgtaggtaatgccgggactgtgagagggaatcgtccaaatcgatttataccatctgtacgatgatcctgtaccgtttgcgccgtggttcgtggtcgcgctggtcgaagaaaaagaagagggggatcagaggcagagagtctgttttgtcattgcgatgactttggtacacaacagcttacatctgtcggtagacaccagtacatttgctgtcttgcatcccgtctggagtacatattatatttcaagttcaccttcttctcgggagacggtgccattgctgtctaaaacgtcgacgtccgtctcctcatattcgctttcggtaaccgaatccgagacgccaggatccgtcttcgagtcttcgccgacggtaaccggatctgcgaacagcgatgaatttttttaggaaacgtcacatggtacacgaccggccctcttgtgtgtgctgaacagcagcgcctgcgtcaaagcaagcaccgatctggatgacgccagagccacccgaactgtattctttgtgcgggcgtcatctcaaatacaagatacgggcgtgcttcagggacccgggacgggcgacttacattatatgttcgtgtagtggattatgccatccttacgaaggctactgtggtagtactcatgtgtggttttgagctatgtaagtgcgcaagtgcttggccgtccatcggtcatttggatcttcggggtatctccggcagtagaatctttggccacgcgtcacgcgtcccgtgctgtctgtgttcccgagttccgaatgtgtcttgcgactgttgctcgcgtgcctcggcgtttgtgatacaccgtggtgcccactctcttccgttgcttgtgtctacgagggcgaccaatagtaaacgacttaaccatctcttcacattatcaaccgggacagccgtggttatccagcagcactcggctcggatcaaatcagcattataaagctaccgagccctcaccttccagtagttgaggatcttcatcatttgacgcgttggccgccatggatcttgatggaatgcggtggtctggagaaacgaggagtcagtgtaaggtgcaaggtggtgaaagcgtcgagatgagttaccagttagaggatcttcgtcgtttgacacgttggcccatgtagatcattgttgtaaacttaagcatgttggaaacttaaatgttttctatgataacatacaaaaatggctcgcccgatgtcacccgaaatatacgatgcattcagaaaatgcgaccaacaatggatacagagacggagaaaaatggatacatcttcgctgttcttcacgctcacgaggtgctgtgttcaaggtagaggtgttagccatgtccttaaaatggaagacgaggcttactcgtcgcaggcagtacactcggccaggaaaaagcttccgatcggggcctttaaagaggtgaatcggttcttacaccgaggaccacacgagccacgagtattcgccgtagatggatcgaaggtgcacgtgcacccctctttcatcaattctggttacaagacacgaacaaacgaccaaccagtatcgcgtcctgccaaaagacctctcgtcatgctctcttcgatggtagatgtcaaaaccaaagcgtgtatcgactttgagctcacgaagcatttcaatgaaagaagagcagcgacttcgatgctccgaagtgtacggaaaggtgacacgctgttgttcgatagaggatactattccaaagacttacttcgcagtgttcacgactctcatgcatttggcgtttggcggctcaagatagacgctttcaaaggcaccaggtctttctttaactcgtgtcgcacggaggccgcgtgccttattctcggtatcgaggcgcgtcttttgaaatattttatcgacggtaaaacatacgtttgcctcacgaacgacccgtcgctatctcgaagggatatcaagactatgtacgcctcgaggtggcgggtcgaagagtcgttcaaacgattaaaatcaaatctcaagctcgaaaaagctcacgcaaaaacaccggctttgtacatccaggaggtggaggccagagtgttgttagacacgatcactctgagaatgcaaagcagtacgaaggagtcgtcatatctctatactctcgacacgcatgtcacacacatccttcgtaacgtgaaaagagtctctagtcccacgagatacaagtttctacgagtagcagagctagagtcaaaaacgccgttcggtcggatgcactacagaccatcgggtgagaaacgtcttaccaatcatgtcctcggacgttacatgcggtggaataccgaaagcgaaagtttactcaaaagtttttgactgtgaaacctcgcatcccgtctcacaattcatcatcatctccatcatcctcttcatcatggtgagaccatcttcggatggaaactcgcacaagaagaagaaacacaagaagatacctccgagggcacctccaaagaacatcccgggctttctgcagacggtgaggggcctgtacccgaatcaatacctcacggcctcaggaaatctacccaaaagttgcaagggtacttactgctgccagctcttctcgagagtcaggttcggggagaaagtgtctcaaaaggagcggataagaaccgtgagcgtcggatttcgggcggcaacgaccgatgaggaacgcgacacatttcagtccaaggtcaatgatgcggtcgatcatctctcccgtgaacgagttctggcgtctctcttcgcaaactttgtgtttatggaacgtcttcaaaacgggtcagcccttccggagcccgacagggcttttttcaagtcgtgcttgtcatcatgcatcgaaagcagaggaggggggaatctcaacgccgacttcgaccgtttttccgagataacgggtttgacacgactcgtgcctcccaaaaaactgggccttgaccaacagcgagagcacgaggcacaacgcatggcaacggcaacgtcgacgcgtgcaacacaccacacggaaaagaggaggatttcgatcacgatgtgctttctgcgagggcggatatctcaaggagaccttgattacaagaagtacaagacgaagctctacaacctggcggagaagatcatcacaaacttcgacggcacacccgaagacacacaaaagcttcgaagaacgtcacgagcgttagacccttgacagacaccgacatcattatcgacttcgcacggagggagaaggacttctctgatcgagactgtggagacggcaaaatcgcaaaaacgatcaaacacctgtactggatgttcaacacctacgtcgccgagtcaagaagaatgtacgaggaggccgtgtcccgagcccacttgttcgctcccggtgaagacaaggcgtgcagaaagaagagggacgagttcgtgaagcacgagctgggcgagaagttcacctacgctccacccaaagacactgccgtgctacccatttgctcaacgggggcagtgttcatccacatcgacatgaagacgctcaagtcatgggggcttctgcactccaacgatgcttggtggtacaaggacgtcctccgacctttttccaaagaggcaaatatcaagtgtctcgtgaacaaggagaacgccaggtacgcgtcaagcgagcatggctacctctcgagtctgctaggaagtggtccggacaagtgcccctggatgattggcgagagtttcttgacggacggtgtacagatcaagcttctgcttgtgacactagaccacggaaggaaagctttttccgggtccagcgagctgaacgaggcggggtacaacaaactgccccgggctaacgctcagctagaaagcctcttgaaagagggaagaggggtgtacaacatatccagccttttggagtcgacaagcatcagggaagacgtcgtcgtgatgtccgcggacccgggccaggccaaggtgatcaacgtttcttcggctacggctagcacttgggcgaagcaagaccctggcgtcatcctcaaaacttcgacgtgtgtgttcggggacgattatcgtcgtgacactcttgcatcacgttcagacgagtacgagacgttcaggcgcaaggaccagccgtacggagtagccatcgatcgtcttagcaacgagaagaaaagaacttcctgcctcgcaacgttcatccagtactgcaaaagttggtgtgcaaatggtccggcgttattcctagagactttgcagacaggaaggaagttcatgaggtttgatcgtttcagagctacgcagaagacacttgccaagatagcggacaggtacatgggacacgtagaagacacttgcaggatcatgttgttcggtaaagcgtcttttcgtgcgcagaaagggagggcatctgccccaaggaaagctttgattagagagatggccagcagaggcgtggtgttgatggtgaaggagtacaatacttccaagaagtgcccggggtgtggagaggacacggtcgaggacaaagaacggagaatccggagttgcaaaaactttaagatcggatcaccggaagagtcctgtagacttcaccgcctgacaccagagtttgaaatggatcgcgacaacgtagggtcgactaacatcggtatgcgtggtttcggccaattgctcggtcaggtgtggttttaaggattttttccggattttcacttgcggatgatactttatagttggtttttctaaagttgacaatagtgatgtagatcaacggtggtggccagaagaggggtattgtagtgtcacaagcgtcgagatgagtagcgcagaacacgaggtcggtgcgttgatgcccatggttcattgctgcgcaattaaacatctgcacaagcacttaccactcgcgtcgacgcgctgaagctggtgctagttgcggtctcttgggtaggaggagagggggaggaatggagtggtgtggtggtcgaaagtgtgtgtggggaggcgggggtggatcatcggagttgcttcatatctgcactgtggccaacagccaatcagcgcatatcggaaaaagcaaataacgcattagactaaccgacatttatgttcttgattcgtgaacaatgtcccgttgcctgcacaaccacatcggaaaaagcaatcagtcgacaatgtttgcatcagccgatgcaaaggagcaacgcatactcagcacttgatttcacagatgaactgatttttcgcacgacgaacgaccgctgacgcaccgtgagccgctacagcgcagctgtggatcctgcacccgacagcagaaagcagtccccgcatgtacgtatatatatgtataccaaccttttcaacactccccttgtttttgtgctgttttcgatgctattccgtgtagacgtgcgtgcttttcaagtagtcttgcacagttcgagcacggttggcggtgtcgcaaaaacagttattcaggagggtttaccttgtcagtaacgcaaccaaccgcatgatgtatgccattacgtcgacagccaatgctaatggccatgaaccaaacgggtacacgtcttggaaaatgtacaaggagacatctgacgtacaggctgtcgtgaattaatttgagttggtgcccgtggtcgaaacaaatattcacaaaaaaaacgacagctgcgcaagcgtgtcaactgcttgtgaggaaaatctgggcatacccacgccgaagtctactttctctcgtacctaactcatcgccgaatgcatgcatactcacgaaacttcgcaggcgcatgcacacgacccgtacagcagtattgaaaaaaaaattaggtcaatccgatgatttggcgacattttattgcccttatttccaaaatatccgaagtggcaatcgaactcgggtcgggcatttctttgccgcgcagaacagcatcacacgccgccagcggcgctcacagcacgcaccgtggtcatacgaaccgaacgcaaaaaacccgaggtcaatcggagcacgtggtgtcgagaaaatgcccaaaaagctctctggctgaaaatgcctccatattgttttcgacagtcccgccacctgacagtcccgtgaccgtcgcgtgcctgcgtctgtgtcacacgctcgttctgcctcacacgacaacggaagcgagcggcgcagcagcgggatcggttaccagggtgcccgggggactctgtgcgacaggaaggtgtgtttgcgggtgtctgcgcgtgtagacgtgtgcacaggtagacgtgtgcgcgcgagatgtgtgtgctgcgcaccagctgccgcgccgcgcgcattctgggtttttggtcacgctcgtatgtgtcacacaactcgcccgcgcgctgcgtgaacgctggcaaatcgtccccgtaggtgtcccggtgccttcccgtgcaggaagttttattttagacgcgcctatcgtgcttgctgttttctcccccctgcgtgcgcacgtgacgtattgtacgtcgaataacacgggggtgtaaaattacaccccaccctcccctccccaaaaaaaacaaattatgtgggtttcacgcgtacccactgatcaaataatacggattggtgggtgtgggggtgttctgtctgtgtgtcggcagtaaatcacttgaaattagagacccccctggcgcgcgtaccacgtttaggcccgtatctcggccccaattatgggttgaccataaaaaaaatatacagcagtgcgcctgacctggcggaacaacacaccaaattacaagttaatcctcgaagatcctgaattttaaagctcgaaacaagctgtacagcagtgttcacgggtaaagtgtacgcataactctgcaccatttctagtgttcggccttgaaattttgcacgatggtgcccctgactcgtgcgcctgtgcacaaaaaatcagaaatgaaatcggagcatgtggaggcgctggcggccgatttcagtgctgtacagcagcagataacaccttacgctgccacagtcgcccctgtttttcttttttcgccttgatattttggcacgcttgccatctgttcacaggaccaccgttgtgtgtgtttatggtggaagatatgtacagctgcgcaagcgtgtcaaccgtttttataagggacataattattattaatttgcaaatcacactcacgtgtccatctacgaacttctgttattcattttcacacacatcacacacacgccgtctttctgaacttggtaaagcttgtctcgccttcatctttaaaaaacgtattctcggacctaaaccacttctcgccgtcccggagctgaccaactttgcgctttttcaccaaatcacgaaacatgagttttccatcccccccgtacttgtgtagagacgtgcgaatgtcatctatgaacaccatcctcgctgcgttaagtctcttgccgtatggatggttaaccttctccgacgctccccccgtgcaagccgagtcaactacgccacctagcacgacgttgcctattgtgtgggcagctgtgtttgcagaggcagctgcatagctactccttaacgtggcactcgacacctggagataggagctaaagtcgtcgatattactgctattgacttggcccgaattcagggcgtgtgtggcccaaaacgtacggcacacatggggagagaagttttcaattcctagccagtacgccccaatctttttgaaacgcgaccgagtgtcgtttggggtccacccttcccccttcgaattgacaaacagcctcctgttgccgtcgcgcatgtctacgtcgcagaagcggtggcccacacaggctacaaaatgtatcatcatgctttggtctgctgacatttcaaagtgactaacgggaagagccccactcgacgctgaggcggtagccgtcttccaagttcggtccttgaaagtgtgcctgaagtgggtgccgtccggaacaagagcgaactcgttcatcgttgcctcccgcatgacctgggacctctgaaaacagttgcttagcgcgagtaagacgcagagattggctacgtcggagtatagcacacccttattcttagcgtgctcgtacaggagctcggcctcctgattggaaattttaagaaacgcggaggggtgttccatgctaaccccgagttcctcaccgatcaggctcttcagggggtgccaaacgccgaaacagacgcctttgagcatgtcgtacatcatctccaccgccttggggtccgtgggatccaacatacgcccgccatccaccttcttgttgaggccggcggggtccaggttggtgctgacggtgtttgccattttgagccttttcctcgttttccaaagctggctgtcgaagtgcgccatgatctccgtcagtttcgccgacactagcgtcgaagagcgttgggccgccctgcggtgtgttgcaagcagccttcgccgcgacgcctgctctctctccatacgtcaaatgtatggaacccaacacggagccgtccatgcggccgacagagtccacgggtcgctgtcggattatgtccagactcccaaccacaggtccgcactcgatcccatactttgttttttcggtgtacgcccgaaacagtgtagctatcctctcggcgtcacccggggccgagcgggttgccttaaaaagaccgtacgcgtctcctacgtggaacccctcaatgtacttgtcttggcacgcccgctccaacattatgtaggctatgtttctgtgcggtacgtttatcgcacgaaacacgcccctccagtctgtctcccagccgcggatagcgccgtccaagtggcagggggggcaaagccacctctcctcgagcacgcgacgctccatcacgttcaggggcaagacgaccgattcgaaagctgtggggcgcccgatgatgacggtcgcgaaccacataagcccgattgcagaagaacatgacgcatacacactcgaagagctggtctcccctcgcttcccagatattgtggcaaaatctcgctgcaggaagaaccgctgcctcgaatcgtcgtcgtcgaaatccatgttcatgaactgtagtatactcttcgatttgtccacagagtacgggagcccgtgaaacaccgaactagccgagccgacccgttggagtcttgtgagggcttctcggcgctgctctagttgcgtcctgccctcgggcgtcgcgcggtcgatgtctctgtagtggtggctcgccttgttcagtttgattcgattttcgagtaggctcgggaagagctgggcgtagacgtgaaaaccgatcagggtcaggttgtctctcagagactcttgccacgcgagcttctcggtttgaggtaaccgatcgtatgaagtgccactaaaatttctggcgccgtagaactgccgcacctggccgtcggtgggttcaagaaatatttttctgggtgagacgggacacttgaagctgctggtggtctccttggtcgcgcgcttgacctcgtttgcgttgaaattcggttttttcagggtggtgatttgtttcttcaccttcgagatacttgaaactttaatgcgcttgggtgcggtagaaacaggagccatggttgaggtcgggggagtgagcttggatggggcatgaagccacacaaaagttgttcgttcagaatgcaggggggccacgcgtacgagaccgattttgcacgaggggtgtaggggttgttcaaggtgtgttcacagacagatttgttggttttaatttactctcgtgaagcgcactaccgacctcactttcctcgaatctgcgccaaaccaaaccatggctgagatgtggcacgaacacttcctgtcggacattatcggtgaaataacacttcacgaccggcgcacctgtttgttggatgaagggcagttcattgatcgcttgatccgatacaatgctgttgaagactacaacatatgcatcgaaaagcaggagattatttgggcggtgatagtatactatgaagcgtatgatgtcgctggttggatggatgccaagggatacactgcaacaggggacagttatgaagacgctgcgtcgtgtgtcccctacgacgcagccaggtgggaccagtggttgcgatcccgtttgatgctgcctccttcttcaagtcttccggaaaatcacgtagagaatgtcgcctgcgggatggtcagtatggggtacattaaaatccccctgaattcgggttatccgacctacgtctggttgctcgatggacacacgcaggacgatttttgcgagccgtacagttgcatacagttcttcactgagcatttccactcgggaaactacaccgaattgtggtcttttacgctgatagaagagtgtctcgagtttcatctagacgaatgtatgcgggctggtacagctatctacatggtccgggcgttatcggaacgttctcctgtggtcgcgcaacagtacattggaaaggttctcgctaagttgctggggaaaatatatcgaaagacagggccaggaagcagctggcggcaactaggattcagtgtgcgttccgggtgtatagtagcacgaagagagtgaatgtcctccggtcgcaccctgacaatctcttttccgagttcagtgtgttgaggaagaggaagctcgaaatagacacggtttggggccgtagtgcagtgaatcgggtggtgttcatacgcatacgcgtgcttatgtgctggggtgacgtttgctgggcggcggtaaacacgcatgcgcgtgcttatgcgctggggtgacgtttgctgggcggcggtaaacatgctggttcgactgaaatgaaaaaaaaaacactccatacattttcaaaaaaatggcgccgcactgggatcctagccaactgctcaggaaaaggggcaatgcatcgccacgagtacgagtttgctttcaatatttggccaacgtcaccactagacacagaagagtcatatcgggacatcacgggtttttttctcggccccgtctggtcaccgggtcgttgtttttgtgatcgcccgtagggcacaaatgtgtgcggtgtgaggaatacatgcctcgtgtccgagttcagcctgggcacactgctggcacgatgcgcgggggtcagcagcaacccgtacacacatcacacatacatacagagtacgcacgcacgcacgcacgcacgtgaaaaaaatcgtgttaatgaccgcggggacgccacaatacgttggaggtgctgatgaaggttatcaccagcagcaacacaccnaaaaaaaacgaggtcaaacggagcccgtagcggcgaggaaccgccgttttggtattccccccgcatctccgccgaaacggcaaatttgtttttccggaactggaagtttgcgctctgcacgaattttgcctctcacatcccacatcccacctccctctttctccccctcgacacagctcggacatcgtaatccacggcagcgtagcgtaacaggacttagctgagaggcatctggagagctgtgaggaagcgaggtatgcggtgttgtctctctttccgctctcgggcacgttctcagtttgtttcaaccatggcaggcggtggggcgtaccacgtcgcgcatttgagagcttagctggcgaccgcgcgctcatgaaacgcccccgcggcgcgcgagaccggtcgctttcgcctcctatgatgtgtatgtggctttgtgcgcgcctcctctttatgttttgagcggcgctgtgatgttgagttgatcgcttttgcctgactgtattttcgtagtctgctacgcaaaataacacccccaaatgttcgaatttggtttttttggcgccaaaacactcccacttcatgcaaatacagacttaggtacccgtacccaccccctacatcccaaataatgcatgtgggtggtttgggggtgcacgcagctttggatttaacctgagaccagcgctgacagcagactttcagctgtttacagcagtaccccggcccaaaagtctagacatttggctgcacagctccccgccaccttcgaatctgaggatgaaactttgcacgaggctccccctcgccgatgcgcattcgaagagttttttttatcgaaatcggagcacttctcgatttttagagcccccaacagtgtactctcagcagcactatgtacgcgtttcgctgcctcactacgcccaacacgtgtgtctcgcccccaaactcggtgggcatgcgtattggggccacagctgtccatggctgccccagtggtcaccatctgcgcgcacgtttgttgatgcatgtctacccacccccttgcccgcactgccaggcaccgcccagcactgccgtgtattacccgccattgctatcaccaccccctccctccccattcgcattttttgagctaacctgtcacactttcaacatctagtctagtgctggtgccacgatacaacagccttcattgcatccggccccctgacgacaccaccaggcaccgccccagcaccgccgtgtattacccgcgatcgcgtatcatgcccccccccccctctcttttcgcattttttaactcgcctacggcaggtgccgcacgagacgcaaacgagagaggcgaggagttcctgaatcgtgtttcatgcagcttttgcaggggcgttgaatcggaacgtgtatcggcaactttttcgtagttgatacgccccgtagtttttcttgtgcagtccaataggaaggttagagggggtgttgaatcggacagtgtatcggacaggttttggtgccgatacatcctatagggatcgaatcggcaacgaatcggcgcatagtgttttcaagacattgtatctgattcgagtccgattcgggaggtcgcaattccgtttatacagcaggtatctctaccagatctacgaaatggaggaagctggcgggtctcattctacgcaggcgtgcatggcacatgcgggga

SEQ ID NO: 289 - DNA, 2541 bp, unidentified
  source 1..2541: mol_type = other DNA
  misc_feature 1..2541: note = Fanzor polypeptide
agccaataacaatttgaaggtgttgttgggtacatgcactccccgattccttcctactatcacttttcatttcgctctgccaagcgaactcgtccagtctacagtctacggctcctttacatcccgaaagcacaagcgctgtgtcggggaagggtgcgccaggcaagcgcaagcgtcaaccctttaaagacgtggaaagcgacacaaacggcactgaagtcgcatgcacggacaaggggacgaggatggcctcgatgaggacgacgttgattatgaggacgcccaaccaggaacgacactccccggcaagatgcccgacgtcgccgagcggatgaaggacagcaagaaccacagcttcgtaactgtgaagatgtcgctaggttccttcttgacaagcgaggggaagctgttgctgtcgtttgaaagcatcctcgtggacttgaacattggattgctagatgcctacgcgctactgaacatccacatgctacggttgtgtggcgaaggactccccattcctcgatttgagcagaacttcgttcgccagtgcttgacagccgtgatgatcaacgacggcaacgtgcgcatcgatcccgaatttcagcgatccttggagctttacaactcattgagggaccctactgcgcctcgcggacgccgcaccggtatcaagagcggacggcaacagtgcgcagcgcggggaattgtgaccgctatcgagaatgccctcgaaatgaattacttcggcgattcaacatggcgctacgggtccagtacggtgtagacagaaacacagcttacacattggtggcacgcattatagccccagagttcgagcggacaccacctggcatcactgatcgtcagcgcctcgacaacatagtcaaagagtggcgtggagaggtccctagacgtcggagcgggcttgacgactacatggcccactcgctggtgcctctgacatatcgattcctgcaaattctcgagaaacataacgatgaatttgagcaacgagttgctaaagctcgagtggcaggggcgtctgattttgaagtgaggctgatccaggctgaagttatgaagacgttcactatcctaccgactaagcaagggtttggcattagtcaccttacgatggattcgattgggctccaggaactattagtccgcaacaatattgctgtccctccgtacgggccgaagtggaatgaggtgagagccgtttgctggagacggttctttcgcaatgacacggtggagagactacagagtctggtcatcgtcggcttgcacgagagatctcgacggacggcaagtcggcgagtgtcaaagtccgcaagccgaagcgtgaacctaccaggcccaatgcaaaatacttccaagctgccgagtttgactccagatgggggttggacccggggaaatgcaacctcttagtcgccacaaaccaggatgacgagacggttgtgtgctctggtaaaagtatcgtgaagatgcctacattaccaagagcagccagaagcatttgagatggatacggaatcgtccagacattgaagctgtatttgagagtatgccgacgaagaggagcatgatgctagagcggtggtgggagtacgtcacatttatgacgcagcacttgtacctcctgatgacgttcatgcagcacaaaccgtaccgtcgcaatcgacttcgcaggtgcttcttcaaaaagaagaagctacgtgagctctgccggcaacttgcgcgtcccggaaagcgagttgttgtcgggtgtggcaactggagtaactgcgatccaaatggagcaatcaaagggccgccatcgacacccgtgaaacagtttgcactggagttgtcgaagacgccgaactgttcgatcatctttattgacgagttccggaccagcaaagtgcacttcgagtgccaacgagagctgtccaagcagtttccgtatcgaaaggccgccgcccacgtacgcgcagtccaccaaagaagggcagcgtacccggtttacagtgtactccaatgcagaaacaatggttgttatggtatgaccgtgaacagggacgtggacgcttcgaagaatatgctgcacctgctcgattgcgaactcaacggcgagcctcgtccagtcgcctacacacgtcaagcgaacatataactttgcatttctagtgttgccatgtgcctatctggagttgcatgacgatagccggctcaggcattagccctttcggactctgtagactaagtacctataggacgcccttcgggggataatgggttaaggaaagcgtggtgacacaaagagaaccaaaataaagagttcggctgcaagcagccgatgctggagtagtagtctacggcctggagaaagaacacgtcgcatggaggtattgtatctcttggcaaacgccaattaattgttagctcgacccgttctctcttgggtgacggtaagcatgagccgtgtcgtggggaattacatgaccacgaaggaggagtacctgacgcagaactacgagggtgcgtcgacgc

SEQ ID NO: 290 - DNA, 21128 bp, unidentified
  variation 14833..18163: note = n is a, c, g, or t
  source 1..21128: mol_type = other DNA
  misc_feature 1..21128: note = Fanzor polypeptide
  variation 13981..14030: note = n is a, c, g, or t
  variation 8533..8582: note = n is a, c, g, or t
gctggtagattgagctggccatggacggagatgatgacgtgttcatccaggagagtgagagcactaggagcacgatctgtccggtcacgcagatggagatggtggagccgctcaggaagtacgtgactgtttactggtgctggtggcgatatggatatttaacaatggtgtgcagtccgagatgtggccactcgtactcgaaacagggtatccagtcgcacttgcagcacagcaagaagtgcccagtcgcaggtatgcgtcgatggattgaggattgctgtgagttatgtatgaagtgctgacgactgtgtgcaggctgcccccagaaattggcgttcaacaacttggaacgcgatgtcgagatggaggtcattatttcgcgcatccaacacacttcagagcagcagcggtcgcaggctgcggccccggtggatcagggtgatgacgatgaggaagaggaatatgtcgtcgagtaacgttaccgctcggcacgtagtacaagcggtttctcaagcagcgttcgacaaccttttcggtatttgattgcattttggaaactcgatatcgacttttatttttgctgctctaacagcacattcgctatgcgcgcactattacccccgtagcaccctcgatgagtgttgcatgaatttacgtgatgttagcttagcatcaatggtattgcttcacaatgcgattgtattggtgaagctggattgctcctctgtcagtgaggagttggcttctgtgtgctgagcagggaatgagccgttgagcctcaaaacccaggcgaaaagtcttcttgcgagctgttcaacattgctgtaaaaaagtcaaactgcccggatgaagtctgtcgaagccccaatttgaaaatatcgactatcaccgcggctgaataatgccgagtgaccaactgtaagaatgtcagcttcgaaggcagagcagcttgaaggaacccttctcaaggccgctgcctccttgtactatatcccgcttcccgtctatcattaatgctttcggtgattattttttcgggtgactcagtagagttgcttgttgcttttactgagacggcgccgtcctaaaaatcatctcaggcgttgagtacgcctggtgacattagcgcacatgctatcggtaagccgagcaacgataccgctcggctagacccgagcggtatcattgtccatttcccctaaagagctcatgtatcagtatagcgacggaaattttgaataggctccatggcaaaaaaacaacaactaaccactaaaatgtctaccccttgaagtctgccttttaccttccatcttcacgatctgcaccacatcagtgtgggggtttcagcagtttgcgcttgctcttctcttcggtggtcggtcgttaaagcagcaggcgaggagaatgtggtccctcctccatccggagaaattccacttgcccagtcctccaccagcgagctcgtccccacccgcccccagtatgttgtcgcgctcgcaagtgtgccaacagcggaaagcatcgctctcgccaccattcggatgtacattgcatcacgacgcgtcataccgatgcctacagaactcaaagtacgctgcccaagaaacgccgtccgcgactaacgacacccccgcagcacgatcgactccatcgtccacgcccaccccaaacaagacgagtcgaagtcaggtaaaccctatcggtggacccccatgcgtttcgtggtggaaatgctgaaacgaggtcttagcatcacacaaaaccaatcgctcaaggaatcgcaaagcttatgggggtcgatcgtcgagtattggccgcatggagcaggacatactgtgtagactacaaactacaattgtagactactggttttctcgcgacgaagctgcacctcagaagctcattgatttgctcgacggcgcagagacctcaatagatatcgctctgttcatcttgacgcatcctgaaccgacagacgctatcatccgggcctcccagcgtgctatcgttgatcgggcacaagtctccgagaaaagctcagctatgatgatcgaaaacggggtcaacgtatttcacgcaaaggccccaaactcatgcactggaagatggtctgttgccttgcaaaacaactggaaaggtgagatacccgcggtactgttcatctgtagcccacacacacacaggacagggttctgcaacttgagcttttgcgcttttgcacaatcgccacaataaacggagctgttctgcgtggcggcttggagcttcggccgagtggctggctcaagagtttgtctgcagtgagaacgagagagaaatgtagaggagatgaaggtgctccgaggttttcgggatcccgagttttggatcacccggtgctacactgctttcgtccggaccggtaagaaggacatcaaggccatctgcgaggagcaccccggctggaatcgacggacggtcgcgcattactacgccatgtacgaaaatggagagagtttgcagccaaggtgtggcattgtggcaccggtcgagcattctgaaggcgcgtgcagaaggctgcaccattcgcatgatcgtcgacgagcgaagcgcgctccaaaagaaaaaaaacatgacttgggtacgcaagtgcggggatccaggtcgagactggacgcgtggccagcttcatggtccacaacaagtggaccatcgtcaacggcgagttcatgttagaaggcacgggcaactacagcgcggttgcgttcgatagagcccgccatgcacagacctttgagacgcgcacgggtcaggcgcaccttgattcgatcaagcgcgagttcgagcagctctgggaagaaggacgggtgcttcaatgggcctcgaggcgtactgcttgcttcatgtacttgggggaggacgaggacgtttatgtgtaggatatggttgaacgtgcaagccagtaagtaactttgttggtgcccactttgacttgggcttacattggccgtgcaggagtgccatcgtagttacaataggagctcgaggatcatgatgagtcctctcagtccttaccagccaaaaaaggcaaactgcacctagcgcattgagctggcaacggcagccccatcgacggcggctccagctacaacgggatctccgtcacttgactcgtcccttcagtccactgctgcttcttcgtcgctcgacaatttgatcgcgtctgctggatcgggtttgttcattgatccgagttcagtagtggtaaacggcgagctgctaccagcgagatcaagtcgacgtaccgcaactgggtggggcctcgcgccgtctcccccgacgccgcgtgctaccgtgaagcactcatcatggacgcatgcccgaccaacttcgaccagaacgaggttaccaacacgtgctgggccgagtgcccgatcgcctacccggtcgagtgcggcatggaatgcatccgtcagaacgatgactgtgcgatggaggtgctcaacaaggtcggtgctgttgctagcacgtctagtcatcgctaccgttggtgcgtctcagaaactgtggcagctttcaaagggtgcgacgcgcgcattcgactgcgctaacatgatgatcggtacgatgagatccatcatccgttacgtgcgtaacatcaagaccacgggcccgcgggcctcgacggacaagattttcaacatcttgcaccagtcgaacaacatcgtgacggacctgccgatggccatttacatttgcatgggttgggacttgccgaggcctcttgatgtctcgggtcgtgtgcttacgacgatgaactggatcttgctaaacgccatcgggtacaaggacgacctcgtgtctagctggagcaagttcaaggctttcttgatcggcgccaacttcacggaggccgccaacaagatcaacgagacggagatcgggacgctgagtgacgccctgaaggccaaccccacctgcggctacgacttgcgagtgatgacggaccgcacgtgacgaggaaacgcagcataatgcgggtcaagatgagaacgtgatacttgccctcatgctgtccacgtcgtgcacacggacggatgctgagtctgtcggtgttgatgcactttcagtcgtcgaccgtaatcgcttccagtttttgagggacgcgaacatttttcttgagtcagggaagaagctagtgttttacctggtgcgtcttcgttatcgagctccgattctccggcagaacgaccagtcggaagtgaaacaattgatgcagagcatgatctggtattcgatcaccggcgcgaagatcgacggtggcaagttgcacgatgccgagtggaccaagaagctggttttcttgaatcctgccaacgaaacactgtcgcagctgtgggaaagtggagagagaagcaccagctcggagcacgaacgttttgcacttattggctggcctgcttccgccgacatagtgaacgcagtcgcattgtttggagaagtgtcctgtgtgcctgtcattcttgcacagtgctacaacgctccgaatgcttctcagcgccgaacttgatgaaaatggatgccatttcgctcaaactctcaaaatcttcgagaagagcaatgcatctgttgagtttgtacccctttgccgggagctaggtgctgccatcgttgacttgggtgacactacactgatccaggcgtttttcaagaagtatgttgcccagctgaaagacaaggacagacagttatttctccaatggcttccagctctcgtgcgcgcatttggatgggcatacgttagtgctgccacactgaatgccatcgacgtgcaatcaactgaaattcgctcggatcgagctttggaactcgcaaacacacggttacctgtcgattggaacagatacagaacggatcaggttttggatcaggtttttagatactccaggatagacttcaggatgtgaacatgggagttggtgcatgtgctgctgctaatgcgggtcggtggtaggtctcagtttgcagcaggcaatggcagacacaagtgctcagtcaccggcgcgaggtggagtgcgcgttattgggtcacaggaacgaggtgctgggtcgctgaaacgacgagctgagtcgctggggcgaggtgctgagcaagagccactggagcaagagtcactgtcaccgaagcaagacgacgagggagatgctaagttgccaaagaagcatcgtcaagagcgcacgacgtgctactttcaaggttacaagtacacgcgttcatggacttcatcaaagaaggccgtgtatcgttgttcgacattccgacgcacaaagtgcaaggggactatggaattccgcatctcgacaatgggctactccaatgcgcgaccgcatacatgccaggtcgcgcaggttgctagtggactgtccgatgtcaacgaggatatgaaggccatggcagacagcttggctattgctgacgtcgctcgaccggttagagaaatatggcaggagctgcgcagcatcttctacggcaatgacaacaatgtcatgcttgggttgtctgagtcacaagtggtcaaccgcgtttacagagcaagatctcttcactacagtggcaacgtgcacggatcggtggagattccaccactctcgcttgcactcaatgagtcggtgtcatttttccaatttcactttgtttcagcaaaccgccacgatgtgaacagtccaacacgtttgctagggtgggctcatccagcgctggtgaacttgtttcgctaccacaacgtgtcgctctttatcgatggcacctttcggtgcgttccacgcaattttcagcaatatgtggttttcatggttcatgactgtgcgtcaggcctgtacatccccgtgttttatatcctaagtacatcgcgcagtgctgatgcatattgggatatgatgcactttattctccaagctactgaccagcaactaagtccagccgaagtcgtatgcgactttgaatcggctttagtggaagcggtgcaaacccagttccgtgacgccattgtcttgggttgtctattccacctgaagcaggcgctgcggcgtgcgatgaagcggtatgctatacctgatgcagaatgcagtatagcgatgacaagaggcgtcatcgatatgttgacagtggccaatccggatcaagtgaagtcgcatgggattgcttgggctcagacggaaatcaagcaacgctgtgagaagcaaggaactgcgtactcaaacgcaaagaggcaggagttttgggtgtactttaagcgtacttggattgacggatactcggtggggctttggaacgtgtacggtcttgataatgagcttgttgcgcgcacgaataacccgctcgagcgcttcaatcgcattctcaacacgcgcttccccactccacacccttccatggccacgttcgtgaccgtgatcaagcaactttcagccgagtacgttcagcagctgggtgatatacctcgtgaccgtagcaagcgcgtaacgcgagagaccattgagctgcccattgccatcgatctacccaaggcgttcgaggatgcgaccacatttgacactgattctgcgccagcgtcggcagctacgacttcagatggcgatgcgccactgcatcatgaaggtgcctgccagcacggtgctgctgctgtagtgttgtagtagtctagctatctatcaactagctagtcgctttgcattaatttgccaatgccctttgcctgcagtcatgagtgtgttcttcacgtgttgccttcaaatcggccggcccgatccaaaacctgatccgttctgtatctgttccaaattcaaatctaccttttcaatcgtcgctgactttttgaaggtgtcaccgatgagcacgagattcctggggttaaggctctacctagtggacacatcgttcgagttcaagtcggtactcttggggactcgccatttcgcgcctcagtatgggggaccagatggcggaatacgcggaccactttaccggtggattggtgacgtcctggggggggctttggtttgagtcgccataaccttttcggggctacaacagtgatgtcaaatggatgatgagggacggtctaaagttgtagcgggagtagtgcgtgccgcacttcatgcatgcggcaaccaatactgttttcggcatcgtcggtgacaacagctcgtccaagaacccagccatgaccgacatccttcgacgcatcatcaaaacgatgtacaaaacgcagcacgtcgaaggaatgggcactctattaagcgagttatgcagcgttatgaacccggagggtgtgcatccacgctagctcttaaacttccgcacgcatcgattcctgggcctcacgcgcgtcgtccgacgcattcttctactctgggatccattggtgcaatggtacgaggagcgggccacaaaagcccgacgtgagaacgtgatgccgccggagtccttcccactagctcgggaaaagatggaactcattcaggtgctctcactgctggagccgatctcgaaactaaatcagattggacaggccgagtcgggggaccaatgcaacgtgcttcttggactctacaagctccgaatatccttgttggacatcaccacagccttgaaggactgaagacggagaatcggttcttccgaccggatgagctgtacgatctcgcatcgacaacccgttcgctacttcacaaagggtttcgtcgggttttcttccggcggtacaccgatcgtgataccatgaacgtctgctcctttgcctttgagatgcaactatttcttcaccccaacttcaagcatccatatggagcgctgataaaggtgttaccaaggtcaatatacaggcaggtgcctccaagcaggtagctgaccgacactacacgaagattcgacgcattatcattgacagcggctgacgccgagccgacgtcgactgatatcgttgccccaccgtcagctactgggttatcagaggacttcgtggagctcttcacggagacagcgaacgaggtggcaccaccacatagactgcggtgcacgagcaacgcatcgacgatgagctcgaccgctggctgacaacgcctacttcgcttcaagcgattcaacccggtgcgtttgactcagttctgagcttctggaagcgccagcaagagctggacaacttcctgcttcttcccttggttgcgcgcgtgctgttctcaatgccctcatcatcggcccaaattgaactcgactttgggatggcaggcaggatggcgacccccaccgcagctcgatggcgccttacaacgtggacatggccacatttctgagatagatttgaatttggaacagatacggaacggatcaggttttggatcgggccggccgatttgaaggcaacacgtgaagaacacactcatgacagcaggcaaagggcattggcaaattaatgcaaagctactagctagttgatagatagctagactactacaacactacagcagcagcaccgtgctggcaggcaccttnnnnnnnnnnnnnnnnnnnnnnnnnnnnnnnnnnnnnnnnnnnnnnnnnnctttgaccaataaaacgagattttgtttgccaataaaaaaagcaatttgcagagcgaaccaagttctcgccctagctcggttcgaatgaaaagtaagcgaaccaagcccccccccctccggttcaggtaaaaaagaaaagaaaagaagggtgaaaccgtggttccagttcagttcgtcctaggggtgggaaattcacgaagtgtaggaaagtgtaatagacttgcgaggagagctgctggtctttctactcagtccacaaatggaaagttctgtccgtgcagctctctcaagtctaacctaaagctctacactgccagtcatactgtacaccactcgtacaattgcctctctcacattgatggtcgcacgctcttcaattgttttcgtgaacccagcagccgcagtcaacggcaattcgaagatgtcgttgggtacgccccgaggcttcactgctccagcaagttctcacttttcctttcgcaccgtcaagcgcagtcactggtctccaacctccatcgcctgttagtagcgttgtatcaagccctatgtcggggaagggtgcgccaggaaagcgcaagcgcaagtgacacccatttgatgacgggaagagcgatagaaatggcactgaaggcgcatgcccgaactcggagggcgatgatgacctcgatgaggatgacgtagattatgaggacgcccaaccagtaacgacacgtccaagcaagaggcctgacgtcgcggagcgcatgaagggcaacaagaataccagcctcgtatatgtgaagatgtcactaggttccttcttgacaggcgaggagaaactgttgctgtcattcgatggcattctcgtggacttgagcattggattgttaaatgcctacgcgctgctgaacatccacatgatacggtgtgtgacaaaggacttcccattcctcgatttgagcagaacttcgtttgccaatgcttgacagacgtaatgtttaacgacagcaacgtgcacatagacgctgaactacatatatcgttggagctatacaatttgttgagaggctctaacgcttctcacgggcgtcgcgctggtatcaagaacgggtggcaacaggcgcagctcgggagatgatgaccgctatccagcatgcactcaaaaatgagtttccttcgccggtttaataaggtgctgcgggtatggtgtagacagaagcactggtagcacacattattgccccagagttcgagcggactacaccagacattcctgatcgtcagcgcctcgacaacgtagtcaacgagtggcgtggagaagtccctcagcgtcggagtgagctggtcaacttcacgtggtgcttctgacttatcgactcctgcaaatgattgaggagcgtaacgacagagttgagcaaagcgtttgcgctgtttaagcgacaggggcgtctgattttgaagttagactaatccaagctgaagttatgaagacgttcactgttctaccaacaaagcaaggatttggaattagtcacctcacgatagatttgattggtttccgggaactattagtccgcaacgacattgctgttcctctgtacagatcgaagtggaatgaggtgagatacatttattggagacggttcttccgtattgacaaagtggagactatagagtttggtcatctcagattcacacgagagatctcgacggacggcaagtcggtgaacatcaagattcggaagcccgaacgtgggccttccgagcccaatgcaaatgacctccaagctgccgacattggctctagatgggggttggatgcgagtaaatgcaacctcttggtcaccacaaaccaggacgacgaaacggttgtgtgctctggcaaagagtatcgcgaagacgcttgcattacgaagagcagccagaagcatttgagatggatacgggatcgtccggacactggagctgcctttgcgagcatgccgacgaagaggagcatgttgctaaagcggtggcgggagtacgtctcatttatgacgcagcacctgcatctgctagtgacccccatgcagcacaaatcgtaccgtcgccatcgacttcgaaggagcttcgttaaaaagaagaagctatgtgagctctaccagaaacttgtatgtcacggagagcgaatttttatcgtcattgacaaccggagtaacggcgatccaaatggagcgatcaaagggaagccatcggcactcgtgcagaaattggcgctggagttgtcaaagacgtcgaactgtacggtcatcattattgccgagttccggatcagcaaagtgcactttggttaccaacaagaactgtccaagcaatacccgtatcgaaaggccgctgtccacgtacgcgcagtccacgaaagacgagccacgtacccagtttacggcttactccatttcagaaacaaaggttgttctggtatgagtgtgaacagggacgtgaatgcttcgaagaatatgctgcgcctgctcgattgtgaactcaacgagactcgcccagtcacctacacgcatcaagcaaacagatagataacaatacatttctagtgtcgctgtgtgcctatctaggggtgaggaagattacattgtgatagccggctcagaaattagcccttttggactctgtaggctacgtacctataggacacccttaggagaataaagggttaaacaaaggctcaatgaagcctggttgatttctgcatgaaatatttttcaaaacggtgatgcccctcctgtggatgaatatacttgtctttccgacagatagctcagcacgattgttgtctgctcgctttgcaggccattttgaccaattttaacacgtaaagccttaattgtgtccaattaaaatggttaaatgtaggtttgacattctgacaccttccgacaaatatgtgtctgaagtatttccaaaatatcaatatcttcatgcaaacaacaactgtaaaacgtatttttcaaatataccagccattcgtacaatgaggagtggccctaatgtaggaacactgaagaggatgaggtcgttggttggatgtccaccgttggtgtacactttaccagaagagtaacgtagccatggatcgtgcgtgatgcgtggcacatgcacaggacgcaaggaacaccggttcaacgtgagtagaaaagtgcttggcgcttacctggtacggtactactcgcagcttaaagcgctagttcctgcagtgccgatcatcatcctgcttagtatctgcgggcatctcgtcaactgcattgcttgagtggtctgtagctggcggctccacctgctcaagaccaagaacaaactcaagacaacgtgcacatgttgccgagaagatggccaccttttggctgtgattgatgggcttatcgcctcgaacaaggtcatggctgcatcgtcgaggcggtactactaaataataagggtccacacgcaacaacggaagaaggacaactgcaagagccatcagatcaagaaccaaatcccaagcacagaaaaaagctgcgaacctgtcggccacatggcttgcgtggtacaagaggataccacgcgtgtgggactcaaccgatagaagtcggagtgtcgccacgtggtcgcctccatgaagctctccctcgacgatagcttcgtcgtgaatgtcacagcggaagaattcaagaaccaagtcctcaacaccggccgcgcggaaattggactgctggagtttctaaagctagcggcgtcaacgaagggagccgggagtatcctgcgtgcgctgcacccgctgcatatgtccggtatattggacgagcaaatcatggtctacaggcaccaactcgtcataggcagcaccgaagaccctgcacatatcgacgcgcaagacatgctcggcattgtaggtcatgtgtgagaacggtgaagttaattcattccaatatatgtattcattcgacataacatcgctgcttaacaagacaacatattcatgtgtacacatccacgcgcgcaggtcacctaatcaaagcgtaggctgcacaccgcacgatcgcaccgcgctcactcacccaccacatgcacagatcctcagcaatactgcacggttcaaagcactgatcccgacccaatcttgatcataaacaccggccaaaacgtggctgttgacgaagctagtattgcgtgtcgttcgcaatacgctcgccatattatagttttctatccccaaaaccagacagggaaatatcacttcaagctgtatgcttgttgctgctcgacatcatggtatgtcgtgagtttcaaattgcactgtgcaagtgaacaaatagaccgtttggacggcgtggttccaagtccagaggtattacagcttgttgatctgacagcgaagtcctttgaaatttgttcccacgtaattgaagttgtggagtctttgaaaggatctaatcgcgttgtcaataccgataatatctacacctcctgcctgctactagaatcactaaggtcgattggcatgtatggtcgtggtacagtgcgcacatccagcaaacacttcccccacttcacaatgatccgaaaagctgatggaaagcctagaggctacatgaaacaaggcgtgtgcttagagtaacatatcgtagcggccagttggatagatggctctattgtgaatacagtctctaatgttgacgcctactcttcctctacggtatatcgtcgcataaaggaggaacatgttgcgtttaacgtcccggcctgcctcggtgaatacaacgcggggatgcagggagtcaaccgtcatgatcagcttcgcggtcggatttcgcttgccgatggtcactcatttcagaagtggcataaaaaattagcaatggctatgattgatatcgcgagatgtaatgcgtatgtatgcgataacttggcacgtgatacaagcgagatggatgttgcacagcctcgcaataatgcaagggcaagcgcccgtgacggtcaccgggcgtttgtcattccacttgtgcgagaattattcaatggagattggaagaagtccattgacagtgatgacgtaattgtgtacacttcgaacacaaaacccatgaccactgctgccaatttgaccagaaatacgaatgagttagaaacgccagcacatacatgtgtagcaaacgaatcgtggcttgtgttacaaggaaggagtcgggcaatgcacaaacggactgtttgtaaattcgagggcagggatgccacccagaaaacggattactgcgagacacatcgagttgcactctacaagcgtacctatcctatcgaccacagaaacccgcacctgtgtcagcagcaagattggacgtgctggcaaaagtatcatttgttctacttgccaaaacaggtctatacagttgannnnnnnnnnnnnnnnnnnnnnnnnnnnnnnnnnnnnnnnnnnnnnnnnntcggcaacacagcaatagtaatagaccaacgcgataggagggtgtcttgtaccagtgttgagcctttcccataaatcgaacctcctcatccgtaaaattaacacaggacagagcgcgaccttcaagctctccaagtctgtcctgaataccccgttgtttttgcgcgcggcgggcgcgggccttgccgttcgttctcgaggtgctgctcccgttccagcaaactttcattggctctttgggtacggcgcttcttgctgcggtcttcagtgtcggccattgccttcccacgttgttattggtcgtcagccctctacaaaacaaacagttggataaaacctacatcatacgccgccatgctaccccgactacaccaatttgaatacgctcccatcagtatagtcactacaatttatccatacagtcatgctctgtagtagcaaaatccccatctatgctgcccgagcgtcaagtacccaaatcgattcaccggtaaaactatcccgtcgcattatggtttttgaggcattttgctcgatggttcgcgatagggttaacacgctgatggcgcatttcttgaagcctgtcggcggcagtaccgacagcacaaactgcgtgtcgtggtcggtccaacggcactggcgaattccagttcaacgtgcttcgtgtcggcccactgcttcgtgcagctcggacagtgcgtgtgttgctgatgtccttgcagcatatgtgactcgcaatcccttcctcatcaacatggcttgcgcaccttgcagggcagagccgccgtctttccccgagctcannnnnnnnnnnnnnnnnnnnnnnnnnnnnnnnnnnnnnnnnnnnnnnnnnnnnnnnnnnnnnnnnnnnnnnnnnnnnnnnnnnnnnnnnnnnnnnnnnnnnnnnnnnnnnnnnnnnnnnnnnnnnnnnnnnnnnnnnnnnnnnnnnnnnnnnnnnnnnnnnnnnnnnnnnnnnnnnnnnnnnnnnnnnnnnnnnnnnnnnnnnnnnnnnnnnnnnnnnnnnnnnnnnnnnnnnnnnnnnnnnnnnnnnnnnnnnnnnnnnnnnnnnnnnnnnnnnnnnnnnnnnnnnnnnnnnnnnnnnnnnnnnnnnnnnnnnnnnnnnnnnnnnnnnnnnnnnnnnnnnnnnnnnnnnnnnnnnnnnnnnnnnnnnnnnnnnnnnnnnnnnnnnnnnnnnnnnnnnnnnnnnnnnnnnnnnnnnnnnnnnnnnnnnnnnnnnnnnnnnnnnnnnnnnnnnnnnnnnnnnnnnnnnnnnnnnnnnnnnnnnnnnnnnnnnnnnnnnnnnnnnnnnnnnnnnnnnnnnnnnnnnnnnnnnnnnnnnnnnnnnnnnnnnnnnnnnnnnnnnnnnnnnnnnnnnnnnnnnnnnnnnnnnnnnnnnnnnnnnnnnnnnnnnnnnnnnnnnnnnnnnnnnnnnnnnnnnnnnnnnnnnnnnnnnnnnnnnnnnnnnnnnnnnnnnnnnnnnnnnnnnnnnnnnnnnnnnnnnnnnnnnnnnnnnnnnnnnnnnnnnnnnnnnnnnnnnnnnnnnnnnnnnnnnnnnnnnnnnnnnnnnnnnnnnnnnnnnnnnnnnnnnnnnnnnnnnnnnnnnnnnnnnnnnnnnnnnnnnnnnnnnnnnnnnnnnnnnnnnnnnnnnnnnnnnnnnnnnnnnnnnnnnnnnnnnnnnnnnnnnnnnnnnnnnnnnnnnnnnnnnnnnnnnnnnnnnnnnnnnnnnnnnnnnnnnnnnnnnnnnnnnnnnnnnnnnnnnnnnnnnnnnnnnnnnnnnnnnnnnnnnnnnnnnnnnnnnnnnnnnnnnnnnnnnnnnnnnnnnnnnnnnnnnnnnnnnnnnnnnnnnnnnnnnnnnnnnnnnnnnnnnnnnnnnnnnnnnnnnnnnnnnnnnnnnnnnnnnnnnnnnnnnnnnnnnnnnnnnnnnnnnnnnnnnnnnnnnnnnnnnnnnnnnnnnnnnnnnnnnnnnnnnnnnnnnnnnnnnnnnnnnnnnnnnnnnnnnnnnnnnnnnnnnnnnnnnnnnnnnnnnnnnnnnnnnnnnnnnnnnnnnnnnnnnnnnnnnnnnnnnnnnnnnnnnnnnnnnnnnnnnnnnnnnnnnnnnnnnnnnnnnnnnnnnnnnnnnnnnnnnnnnnnnnnnnnnnnnnnnnnnnnnnnnnnnnnnnnnnnnnnnnnnnnnnnnnnnnnnnnnnnnnnnnnnnnnnnnnnnnnnnnnnnnnnnnnnnnnnnnnnnnnnnnnnnnnnnnnnnnnnnnnnnnnnnnnnnnnnnnnnnnnnnnnnnnnnnnnnnnnnnnnnnnnnnnnnnnnnnnnnnnnnnnnnnnnnnnnnnnnnnnnnnnnnnnnnnnnnnnnnnnnnnnnnnnnnnnnnnnnnnnnnnnnnnnnnnnnnnnnnnnnnnnnnnnnnnnnnnnnnnnnnnnnnnnnnnnnnnnnnnnnnnnnnnnnnnnnnnnnnnnnnnnnnnnnnnnnnnnnnnnnnnnnnnnnnnnnnnnnnnnnnnnnnnnnnnnnnnnnnnnnnnnnnnnnnnnnnnnnnnnnnnnnnnnnnnnnnnnnnnnnnnnnnnnnnnnnnnnnnnnnnnnnnnnnnnnnnnnnnnnnnnnnnnnnnnnnnnnnnnnnnnnnnnnnnnnnnnnnnnnnnnnnnnnnnnnnnnnnnnnnnnnnnnnnnnnnnnnnnnnnnnnnnnnnnnnnnnnnnnnnnnnnnnnnnnnnnnnnnnnnnnnnnnnnnnnnnnnnnnnnnnnnnnnnnnnnnnnnnnnnnnnnnnnnnnnnnnnnnnnnnnnnnnnnnnnnnnnnnnnnnnnnnnnnnnnnnnnnnnnnnnnnnnnnnnnnnnnnnnnnnnnnnnnnnnnnnnnnnnnnnnnnnnnnnnnnnnnnnnnnnnnnnnnnnnnnnnnnnnnnnnnnnnnnnnnnnnnnnnnnnnnnnnnnnnnnnnnnnnnnnnnnnnnnnnnnnnnnnnnnnnnnnnnnnnnnnnnnnnnnnnnnnnnnnnnnnnnnnnnnnnnnnnnnnnnnnnnnnnnnnnnnnnnnnnnnnnnnnnnnnnnnnnnnnnnnnnnnnnnnnnnnnnnnnnnnnnnnnnnnnnnnnnnnnnnnnnnnnnnnnnnnnnnnnnnnnnnnnnnnnnnnnnnnnnnnnnnnnnnnnnnnnnnnnnnnnnnnnnnnnnnnnnnnnnnnnnnnnnnnnnnnnnnnnnnnnnnnnnnnnnnnnnnnnnnnnnnnnnnnnnnnnnnnnnnnnnnnnnnnnnnnnnnnnnnnnnnnnnnnnnnnnnnnnnnnnnnnnnnnnnnnnnnnnnnnnnnnnnnnnnnnnnnnnnnnnnnnnnnnnnnnnnnnnnnnnnnnnnnnnnnnnnnnnnnnnnnnnnnnnnnnnnnnnnnnnnnnnnnnnnnnnnnnnnnnnnnnnnnnnnnnnnnnnnnnnnnnnnnnnnnnnnnnnnnnnnnnnnnnnnnnnnnnnnnnnnnnnnnnnnnnnnnnnnnnnnnnnnnnnnnnnnnnnnnnnnnnnnnnnnnnnnnnnnnnnnnnnnnnnnnnnnnnnnnnnnnnnnnnnnnnnnnnnnnnnnnnnnnnnnnnnnnnnnnnnnnnnnnnnnnnnnnnnnnnnnnnnnnnnnnnnnnnnnnnnnnnnnnnnnnnnnnnnnnnnnnnnnnnnnnnnnnnnnnnnnnnnnnnnnnnnnnnnnnnnnnnnnnnnnnnnnnnnnnnnnnnnnnnnnnnnnnnnnnnnnnnnnnnnnnnnnnnnnnnnnnnnnnnnnnnnnnnnnnnnnnnnnnnnnnnnnnnnnnnnnnnnnnnnnnnnnnnnnnnnnnnnnnnnnnnnnnnnnnnnnnnnnnnnnnnnnnnnnnnnnnnnnnnnnnnnnnnnnnnnnnnnnnnnnnnnnnnnnnnnnnnnnnnnnnnnnnnnnnnnnnnnnnnnnnnnnnnnnnnnnnnnnnnnnnnnnnnnnnnnnnnnnnnnnnnnnnnnnnnnnnnnnnnnnnnnnnnnnnnnnnnnnnnnnnnnnnnnnnnnnnnnnnnnnnnnnnnnnnnnnnnnnnnnnnnnnnnnnnnnnnnnnnnnnnnnnnnnnnnnnnnnnnnnnnnnnnnnnnnnnnnnnnnnnnnnnnnnnnnnnnnnnnnnnnnnnnnnnnnnnnnnnnnnnnnnnnnnnnnnnnnnnnnnnnnncaacctggacgtcgtcaaactcgccgcctttagtctccttcaagatgtcgaggaaggaatggtcgttggcgccgtactcccagcagatcacaccggccagcaccatcgcagcagcaacgtacgacagcacctcaatgacacgtccgttgtcggcgctgaaggacgaagcgatattcacgaccaccgagaagagcaggaggaaagggcccgtgacaacgacggggccgctgaggttgaccaccgcctccttggtcatgatgttcggatgcgcggcgatagccacgaggaagtctccgatgctgtagcagatgtcgaaagtgatgatggtgtgtaagcggccccacttctcgtcggccaggtagacaccgaagagcggcgtaatgtagcagatcgatgtccatgtgctcttcaaggctctggcggacacgaggctccagccgatcttctgcatgaagttcttgaggccttggttgataccgtagtagctcaggcgctcggacagctccatcatgaggatgaagacgcagacttggaacagcacgctcttgtacttgcgcgggcgagcgtccaagacgctagcgtatgcgccgctgggcgagtcgagggccggggacttgatcttcgacgtggtgttcggcctgaatcacgacgtcgctcaactccctgaattcacaatgaagaactattataaatgttatgaaatgaagcaagccagcttaaacttacttacatctactggcgcgagctctttctgttctgcatacgcgattcgacagctcgacgcgtaggctttctcttgcggttcgagcggcgtgcacttccaatactgtcgcgcatcacaccactagcgacaggagaaacgtcgactggcgagggcgtcggagtcggctgagttggaaggtccgtcaaatcgggaatgaggtctccttcacccagcaccactgtatcagcgctacttactatagaatccaggctagacatgccctcctccagccgcatatcaccatcactatccggatctaaatcatcttctgcaacatctgtcagaaatgtggtgctggcaatatctcctatgagtacagagtccgtgccatccacatgaatactgccgtctgtttctggatccgagctctctgcgcgcgaggatcttcacagctatccgtgtgagtgcttggtaaaacacggtctgcagctgtgcgtctgcgacgtggccgaacaaactggcgacggcgactatcagcaccagggcatggtaggcctgcatggatgcaggcagccacaatgtggcagcacatgccacgcattcaactgtagacacacgtaaatgccctgctgcgagtgtcgactacccatcccccttctggcatcccttcagtttgcatccgacgtgcattcatggatttgatggagcgcatcagctcctttcgctcatcggctgtctacgtaccggctctttgattgacgacgtaaagatccgcggataagtcgccgaccggagggatgcgccgtacgaatagccaaccacgactgttcataaatcgataaagctcgagcaatcggtcggaagcggcagcgaccgtgtcaaatggcacgtctcggttcagaaaagcgagccgggcaccgttaagattgtcgaccaactctcggggtgtagccaggccttccggacactgcaacttcagtgttcaatgatattgctccaaagggttatttgaagcggcatatccaccaggtgtgtagaacgcctgccagcgggaaaaccgggtcgagtttacccaaaaccttttcacatgatctgtgagtttacgtactgaagaaccgagacgaaacctgtcccgtcgctccaaaacgcaggcctttacagaaggaaatgcatcttgagtcgcataatgcatgtcgtacaaatccgcaaacacaactcgcgtatcttccgtgctcacacggaatttgcgagcatgtttccacacattctgcgtcacgtgaaaccagcacatcaaaatggttgtgcctggaagctcggccgaacaggcgttgaactgcgctttgcaagcatctggcatcatgaactgcggcgaaaatggtgcattacacgcatccaaacacacgcgcttcatgaagctgatgctccatccgacgtcaattgcgcgctcttgagatgtgcaaaagtaagcgagtaaaaagaactggccgcaccgatctgagtatccaaaggcaaacacgttgtagccgttgaccgccatactgtgggtgctgtcaacatgaaaaatcgtagtgcaatccgaccgattctgcactgcaatgtagtcacggacgagacgtggacacgtcatgccaacacgataaaaagaatcctcagatccgtttccgagatgtgagacgctgctcgcggtacctggcagatcactttgttgcgcgtcacacagtatcatcatgtcgcgctctggcagcgactgtagatctagctgatcgtacagattcccatcgcaaagctgaatcatcggcgccatggaatctcgtgggttaccccgcctccaggttttgacaaaatcagtcacttgagtgtctttcggagcaggatctgtgatcacacctgcctcgaccatggcgctgagagttgtaaacaacttggtggctgttattttgactccactactttagcttctcgataataaacgtcttcattgcaggggaaatcttgccctccgttggagttggcgggtcgtttctgtgcatgacatgctcgacttgctgaaacacctcacaggtgctagaggacagacagatcttcaacttgtaccgacacggacatgatgccgtctctgtcgatgtagcgtcgtcgtcgggggcagtgagtctggcacgacaccgctgagaccggcacagtaccatttgagaccgcatttgatgaatgcagcaagctagatcgaagtccttatcaaatatatgatccacagtacaccccact

SEQ ID NO: 291 - DNA, 8019 bp, unidentified
  misc_feature 1..8019: note = Fanzor polypeptide
  variation 1527..1793: note = n is any nucleotide
  source 1..8019: mol_type = other DNA
ctagctctcgtagagtttgcgctgaagaaagctcacgcacggtgctctggccacgccgatgcattcgtatcttcgggtaagatcatcacacttttaaagcttgcgctggcgtgtggaaaccctcaaatatttgccggtctatcaaccatactgaacaagatcgatggcaatcttctccacacagtgattaatgcgctctcgaaatacgtcaatgactcgagtttacctgaacagcgtgctacgctggcctcacttgcagcgagacgtcgtgaatggctattcgctgagatcgaagacacgaagcaaccactggacttgacgaagcgcgagatctaggcaatgctagccgacaacacaatcggctccgcgaagtacttttcaatcgtcgctgactttttgaaggtgtcatcgatgagcacgagattcctggggttaaggctctacctagtggacacatcgttcgagttcaagtcggtactcttggggactcgccatttcgcgcctcagtatgggggaccagatggcggaatacgaggaccactttaccggtggattggtgacgtcctggggggggggctttggtttgagtcgccataaccttttcggggctacaagcgacgaggcagtgatgtcaaatggatgatgagggacggtctaaagttgtagcgggagtggtgcgtgccgcacttcatgcatgcggcaaccaatactgttttcggcatcgtcggtgacaacagctcgtccaagaacccagccatgaccgacatccttcgacgcatcaccaaaacgatgtacaaaacgcagcacgtcgaaggaaagggcactctattaagcgagttatgcagcgttatgaacccggagggtgtgcatccacgctagctcttaaacttccgcacgcatcgattcctgggactcacgcgcgtcgtccgacgcattcttctactctgggatccattggtgcaatggtacgaggagcgggccacaaaagcccgacgtgagaacgtgatgccgccggagtccttcccactagctcgggaaaagatggaactcattcaggtgctctcactgctggagccgatctcgaaactaaatcagattggacaggccgagtcggggggaccaatgcaacgtgcttcttggactctacaagctccgaatatccttgttggacatcaccacagccttgaaggactgaagacggagaatcggttcttccgaccggatgagctgtacaatctcgcatcgacaacccgttcgctacttcacaaagggtttcgtcgggttttcttccggcggtacaccgatcgtgataccatgaacgtctgctcctttgcctttaagatgcaactatttcttcaccccaacttcaagcatccatatggagcgctgacaactatttcttcaccccaacttcaagcatccatatggagcgctgataaaggtgttaccaaggtcaatatacaggcaggtaggtagctgaccgacactacacgaagattcgacgcattatcattgacagcgtccgcnnnnnnnnnnnnnnnnnnnnnnnnnnnnnnnnnnnnnnnnnnnnnnnnnnnnnnnnnnnnnnnnnnnnnnnnnnnnnnnnnnnnnnnnnnnnnnnnnnnnnnnnnnnnnnnnnnnnnnnnnnnnnnnnnnnnnnnnnnnnnnnnnnnnnnnnnnnnnnnnnnnnnnnnnnnnnnnnnnnnnnnnnnnnnnnnnnnnnnnnnnnnnnnnnnnnnnnnnnnnnnnnnnnnnnnnnnnnnnnnnnnnnnnnnnnnnnnnnnnnnnnnnnntcctgcttcttcccttggttgcgcgcgtgctgttctcaatgccctcatcatcggcccaaattgaacgcgactttgggatggcaggcaggatggtgacccccaccgcagctcgatggcgccttacaacgtggacatggccacatttctgagctgcagcagaacttacgtgggtatcacccagtacccaaagttgtcgtcgagcacagcaaaggatcaagtaccgtcaaacgccatggtgagcatggagcgagagttggacgacgagttcggatcgttgatgaacaaaggcatcgagttgggactctccgacgacgaaaacgacggtattaccgaaatgtagcgggagcgggctggggcggacgaaaacgtgagagaacgggagcacgtgtggaagtggaaacgggctatagctgccgtggtagagttctagccatgcatgtgcacgaaatgagtgtctttacttttcatcaacacgttctgaccgttgttggtgttagcttcgctatgcagcttatgtaaatagtattttgttttcacctatgctttcgtgctggtcgtttgattactagcaactctgtaacacgcattgcagcgcgtacacggatcgcctcctgtgtttcaagctagattcgctcgatttgggatcgatctcgcagtattcgcgaccgtgggcacacaggcgggttgctggaccgggtggcagctgctgaaacccgcgtagttggtgtcctggctgccgctgcttcttttctgcggtttgctccagcggctcgtgataatgcggtggtggagcctcgcgtgcttgcagttgcttctgtagggcccatcgctgctcctgttgaggaagttggcgtcggcgcgaacgttgggacgatggccgtggacttgtcttgacttgatacagatattcacatcggtgttcttgaggacatcactgtattatgctggtcctgtggtacgaactcggagtgccatcagttcacggggttttgtctcggcagtcttcttggccaccacgatggctgggcgaaaccgttcgcctgggtggttgttagccctctcttgctcctgatcctgacgcatgcgaatcgcgatgtcgtgttgatctagcccgccgttgatcagctctactacgcgaacctctgtacgagcggttgttgcctcttgcactacttcaaatttgcaaatgtcgtggcgctcttacgcagcacgcttgtgctcctcctctaccaggttgtgttgcttgaccctggaagactgcaatgtgactcgcaaaacgcctggtgaggagatcaaaagagatcatctttgaccaataaaacgagatcttgtttgccaataaaaaaagcaatttgcagagcgaaccaagttctcgccctagctcggttcgaatgaaaagtaagcgaaccaagcccccccccccctccggttcaggtaaaaaagaaaagaagggtgaaaccgtggttccagttcagttcgtcctaggggtgggaaattcacgaagtgtaggaaagtgtaatagacttgcgaggagagctgctggtctttctactcagtccacaaatggaaagttctgtccgtgcagctctctcaagtctaacctaaagctctacactgccagtcatactgtacaccactcgtacaattgcctctctcacattgatggtcgcacgctcttcaattgttttcgtgaacccagcagccgcagtcaacggcaattcgaagatgtcgttgggtacgccccgaggcttcactgctccagcaagttctcacttttcctttcgcaccgtcaagcgcagtcactggtctccaacctccatcgcctgttagtagcgttgtatcaagccctatgtcggggaagggtgcgccaggaaagcgcaagcgcaagtgacacccatttgatgacgggaagagcgatagaaatggcactgaaggcgcatgcccgaactcggagggcgatgatgacctcgatgaggatgacgtagattatgaggacgcccaaccagtaacgacacgtccaagcaagaggcctgacgtcgcggagcgcatgaagggcaacaagaataccagcctcgtatatgtgaagatgtcactaggttccttcttgacaggcgaggagaaactgttgctgtcattcgatggcattctcgtagacttgagcattggattgttaaatgcctacgcgctgctgaacatccacatgatacggtgtgtgacaaaggacttcccattcctcgatttgagcagaacttcgtttgccaatgcttgacagacgtaatgtttaacgacagcaacgtgcacatagacgctgaactacatatatcgttggagctatacaatttgttgagaggctctaacgcttctcacgggcgtcgcgctggtatcaagaacgggtggcaacaggcgcagctcgggagatgatgaccgctatccagcatgcactcaaaaatgagtttccttcgccggtttaataaggtgctgcgggtatggtgtagacagaagcactggtagcacacattattgccccagagtttgagcggactccacccgacattcctgatcgtcagcgcctcgacaacgtagtcaacgagtggcgtggagaagtccctcagcgtcggagtgagctggtcaacttcacggcccaccgactggtgcttctgacttatcgactcctgcaaatgattgaggagcgtaacgacagagttgagcaaagcgtttgcgctgtttaagtgacaggggcgtctgattttgaagttagactaatccaagctgaagttatgaagacgttcactgttctaccaacaaagcaaggatttggaattagtcacctcacgatagatttgattggttaccgggaactattagtccgcaacgacattgctgttcctccgtacagatcgaagtggaatgaggtgagatacatttattggagacggttcttccgtattgacaaagtggagactatagagtttggtcatctcagattcacacgagagatctcgacggacggcaagtcggtgaacatcaagattcggaagcccgaacgtgggccttccgagcccaatgcaaatgacctccaagctgccgacattggctctagatgggggttggatgcgagtaaatgcaacctcttggtcaccacaaaccaggacgacgaaacggttgtgtgctctggcaaagagtatcgcgaagacgcttacattacgaagagcagccagaagcaattgagatggatacgggatcgtccggacactggagctgcctttgcgagcatgccgacgaagaggagcatgttgctaaagcggtggcgggagtacgtcccatttatgacgcagcacctgcatctgctagtgacccccatgcagcacaaatcgtacagtcgccatcgacttcgaaggagcttctttaaaaagaagaagctatgtgagctctaccagaaacttgtatgtcacggagagcgaatttttatcgtcattgacaaccggagtaacggcgatccaaatggagcgatcaaagggaagccatcggcactcgtgcagaaattggcgctggagttgtcaaagacgtcgaactgtacggtcatcattattgccgagttccggatcagcaaagtgcactttggttaccaacaagaactgtccaagcaatacccgtatcgaaaggccgctgtccacgtacgcgcagtccacgaaagacgagccacgtacccagtttacggcttactccatttcagaaacaaaggttgttctggtatgagtgtgaacagggacgtgaatgcttcgaagaatatgctgcgcctgctcgattgtgaactcaacgagactcgcccagtcacctacacgcatcaagcaaacagatagataacaatacctttctagtgtcgctgtgtgcctatctaggggtgaggaagattacattgtgatagccggctcagaaattagcccttttggactctgtaggctacgtacctataggacacccttaggagaataatgggttaaacaaaggctcaatgaagcctggttgatttctgcatgaaatatttttcaaaacggtgatgtcctcctgtggatgaatatacttgtctttccgacagatagctcagcacgattgttgtctgctcgctttgcagaccattttgaccaattttaacacgtaaagccttaattgtgtccaattaaaatggttaaatgtaggtttgacattctgacaccttccgacaaatatgtgtctgaagtatttccaaaatatcaatatcttcatgcaaacaacaactgtaaaacgtatttttcaaatataccagccattcgtacaatgaggagtggccctaatgtaggaacactgaagaggatgaggtcgttggttggatgtccaccgttggtgtacactttaccagaagagtaacgtagccatggatcgtgcgtgatgcgtgggacataagcaaaataaacaaaggctgtgcttatgtcttcaatatgccacgggaagaccgcaaggtagcctgagtgctgtgcagctggaataaagagatcgcgcctcacgttgtggacgtcgcgacgctggaccatccgacgcgggagcggcttgaacgcttgcaggagctcctgtttagcacatgcacaggacgcaaggaacaccggttcaacgtgagtagaaaagtgcttggcgcttacctggtacggtactactcgcagcttaaagcgctagttcctgcagtgccgatcatcatcctgcttagtatctgcgggcatctcgtcaactgcattgcttgagtggtctgtagctggcggctccacctgctcaagaccaagaacaaactcaagacaaggcgcacacgttgccgagaagatggccaccttttggctgtgattgatgggcttatcgcctcgaacaaggtcatggctgcatcgtcgaggcggtactactaaataataagggtccacacgcaacaacggaagaaggacaactgcaagagccatcagatcaagaaccaaatcccaagcacagaaaaaagctgcgaacctgtcggccacatggcttgcgtggtacaagaggataccacgcgtgtgggactcaaccgatagaagtcggagtgtcgccacgtggtcgcctccatgaagctctccctcgacgatggcttcgttgtgaatgtcacagcggaagaattcaagaaccaagtcctcaacaccggccgcgcggaaattggactgctggagtttctaaagctagcggcgtcaacgaagggagccgggagtatcctgcgtgcgctgcacccgctgcatattccggtatattggacgagcaaatcatggtctacaggcaccaactcgtcataggaagcaccgaagaccctgcacatatcgacgcgcaagacatgctcggcattgtaggttatgtgtgagaacggtgaagttaattcattccaatatatgtattcattcgacataacatcgctgcttaacaagacaacatattcatgtgtacacatccacgcgcgcaggtcacctaatcaaagcgtaggctgcacaccgcacgatcgcaccgcgctcactcacccaccacatgcacagatcctcagcaatactgcacggtttaaagcactgatcccgacccaatcttgatcataaacaccggccaaaacgtggctgttgacgaagctagtattgcgtgtcgttcgcaatacgctcgccatattatagtgttctatccccaaaaccagacagggaaatatcacttcaagctgtatgcttgttgctgctcgacatcatggtatgtcgtgagtttcaaattgcactgtgcaagtgaacaaatagaccgtttggacggcgtggttccaagtccagaggtattacagcttgttgatctgacagcgaagtcctttgaaatttgttcccacgtaattgaagttgtggagtctttgaaaggatctaatcgcgttgtcaataccgataatatctacacctcctgcctgctactagaatcactaaggtcgattggcatgtatggtcgtggtacagtgctcacatccagcaaacacttcccccacttcacaatgatccgaaaagctgatggaaagcctagaggctacatgaaacatggcgtgtgcttagagtaacatatcgtagcggccagttggatagatggctctattgtgaatacagtctctaatgttgacgcctcctcttcctctacggtatatcgtcgcataaaggaggaacatgttgcg

SEQ ID NO: 292 - DNA, 18862 bp, unidentified
  source 1..18862: mol_type = other DNA
  misc_feature 1..18862: note = Fanzor polypeptide
ctatcggtggacccccatgcgtttcgtggtggaaatgctgaaacgaggtcttagcatcacacaaacccaatcgctcaaggacatcgcaaagattatgggggtcgaccgtcgagtatttggccgcatggagcaggacatactgagtagactacaaactacagttgtagactactggttttctcgcgacgaagctgcacctcagaagctcattgatttgctcgacggcgcagagacctcagtagatatcgctatgttcatcttgacgcatcctgaaccgacagacgctatcatccgggcctcccagcgtgctatcgttgatcgggcacaagtctccgagaaaagctcagctatgatgatcgaaaacggggtcaacgtatttcacgcaaaggccccaaactcatgcactggaagatggtctgttgccttgcaaaacaactggaaaggtgagatacccgcggtactgttcatctgtagcccacatacacacacaggacagggttctgcaacttgagcttttgcgcttttgcacaatcgccacaataaacggagctgttctgcgtggcggcttggagcttcggccgagtggctggctcaagagtttgtctgcagtgagaacgagagagaaatgtagaggagatgaaggtgctccgaggttttcgggatcccgagttttggagttttggatcgcccggtgctacactgctttcgtccggaccggtaagaaggacatcaaggccatctgcgaggagcacccgggctggaatcgacggacggtcgcgcattactacgccatgtacgaaaatggagagagtttgcagcccaggtgtggcattgtggcaccggtcgagcattctgaaggcgcgtgcagaaggctgcaccattcgcatgatcgtcgacgagcgaagcgcgctccaaaagaaaaaaaacatgacttgggtacgcaagtgcggggatcccggtcaagactggacgcgtggccagcttcatggtccacaacaagtggaccatcgtcaacggcgagttcatgttagaaggcacgggcaactacagcgcggttgcgttcgatagagcccgccatgcacagacctttgagacgcgcacgggtcaggcgcaccttgattcgatcaagcgcgagttcgagcagctctgggaagaaggacgggtgcttcaatgggcctcgaggcgtactgcttgcttcatgtacttgggggaggacgaggatgaaacgaaaatgtacccccccccggggagagcaggacgaggacgaggacgtttatgtgtaggatatggttgaacgtgcaagccagtaagtaactttgttggtgcccactttgacttgggcttacattggccgtgcaggagtgccatcgtagttacaatagagctcgaggatcatgatgagtcctctcagtccttaccagccaaaaaaggcaaactgcacctagcgcattgagctggcaacggcagccccatcgacggcggctccagctacaacgggatctccgtcacttgactcgtcccttcagtccactgttgcttcttcgtcgctcgacaatttgatcgcgtctgctggatcgggttcgttcattgatccgagttcagtagtggtaaacggcgagctgctaccagcgagatcaagtcgacgtaccgcaactgggtggggcctcgcgccgtctcccccgacgccgcgtgctaccgtgaagcactcatcatggacgcatgcccgaccaacttcgaccagaacgaggttaccaacacgtgctgggccgagtgcccgatcgcctacccggtcgagtgcggcatggaatgcatccgtcagaacgatgactgtgctatggaggtgcttaacaaggtcggtgctgttgctagcacgtctagtcatcgctaccgttggtgcgtctcagaaactgtggcagctttcaaagggtgcgacgcgcgcattcgactgcgctaacatgatgatcggtacgatgagatccatcatccgttacgtgcgtaacatcaagaccacggacccgcaggcctcgacggacaaaattctcaacatcctgtaccagtcgaacaacatcgtgacggacctgccgatggccatttacatttgcatgggctgggacttgccgaggcctctcgatgtctcgggtcgtgtgcttacgacgatgaactggatcttgctaaacgccatcgggtacaaggacgacctcgtgtctagctggagcaagttcaaggctttcttgatcggcgccaacttcacggaggccgccaacaagatcaacgagacggagatcaggacgctgagtgacgccctgaaggccaactccacctgcggctacgacttgcgagtgatgacggaccgcacgtgacgaggaaacgcagcataatgcgggtcaagatgagaacgtgatacttgccctcatgctgtccacatcgtgcacacggacggatgctgagtctgtcggtgttgatgcactttcagtcgtcgaccgtaatcgcttccagtttttgagggacgcgaacatttttcttgagtcagggaagaagctggtgttttacctggtgcgtcttcgttatcgagctccgattctccggcagaacgaccagtcggaagtgaaacaattgatgcagagcatgatctggtattcgatcaccggcgcgaagatcgacggtggcaagttgcacgatgccgagtggaccaagaagctggatttcttgaatcctgccaacgaaacactgtcgcagctgtgggaaagtggagagagaagcaccagctcggagcacgaacgttttgcacttattggctggcctgcttccgccgacataatgaacgcagtcgcattgtttggaaaagtgtcctgtgtgcctgtaattcttgcacagtgctacaacgctccgaatgcttctcagcgccgaacttgatgaaaatggatgccatttcgctcaaactctcaaaatcttcgagaagagcaatgcatctgttgagtttgtacccctttgccgggagctaggtactgccatcgttgacttgggtgacactacactgatccaggcgtttttcaagaagtatgttgcccagctgaaagacaaggacagacagttatttctccaatggcttccagctctcgtgcgcgcatttggatgggcatacgttagtgctgccacactgaatgccatcgacgtgcaatcaactgaaattcgctcggatcgagctttggaactcgcaaacacactccatgacaacgatgctgcacttctagctctcgtagagtttgcgctgaagaaagctcacgcacggtgctctggccacgccgatgcattcgtatcttcgggtaagatcatcacacttttaaagcttgcgctggcgtgtggaaaccctcaaatatttgccggtctatcaaccatactgaacaagatcgatggcaatcttctccacacagtgattaatgcgctctcgaaatacgtcaatgactcgagtttacctgaacaacgtgctacgctggcctcacttgcagcgagacgtcgtgaatggctattcgctgagatcgaagacacgaagcaaccactggacttgacgaagcgcgagatctaggcaatgctagccgacaacacaatcggctccgcgaagtacttttcaatcgtcgctgactttttgaaggtgtcaccgatgagcacgagattcctggggttaaggctctacctagtggacacatcgttcgagttcaagtcggtactcttggggactcgccatttcgcgcctcagtatgggggaccagatggcggaatacgcggaccactttaccggtggattggtgacgtcctgggggggggggggggggggctttggtttgagtcgccataaccttttcggggctacaacagtgatgtcaaatggatgatgagggacggtctaaagttgtagcgggagtagtgcgtgccgcacttcatgcatgcggcaaccaatactgttttcggcatcgtcggtgacaacagctcgtccaagaacccagccatgaccgacatccttcggcgcatcatcaaaacgatgtacaaaacgcagcacgtcgaaggaaagggcactctattaagcgagttatgcagcgttatggacccggagggtgtgcatccacgctagctcttaaacttccgcacgcatcgattcctgggactcacgcgcgtcgtccgacgcattcttctactctgggatccattggtgcaatggtacgaggagcgggccacaaaagcccgacgtgagaacgtgatgccgccggagtccttcccactagctcgggaaaagatggaatgctctcactgctggagccgatctcgaaactaaatcagattggacaggccgagtcggggggaccaatgcaacgtgcttcttggactctacaagctccgaatatccttgttggacatcaccacagccttgaaggactgaagacggagaatcggttcttccgaccggatgagctgtacgatctcgcatcgacaacccgttcgctacttcacaaagggtttcgtcgggttttcttccggcggtacaccgatcgtgataccatgaacgtctgctcctttgcctttgagatgcaactatttcttcaccccaacttcaagcatccatatggagcgctgataaaggtgttaccaaggtcaatatacaggcaggtgcctcccagcaggtagctgaccgacactacacgaagattcgacgcattatcattgacagcgtccgcagcatcatgacagcggctgacgccgagccgacgtcgactgatatcgttgccccaccgccagctactgggttatcagaggacttcgtggagctcttcacggagacagcgaacgaggtggcaccaccacatagactgcggtgcacgagcaacgcatcgacgatgagctcgaccgctggctgacaacgcctacttcgcttcaagcgattcaacccggtgcgtttgactcagttctgagcttctggaagcgccagcaagagctgggcaacttcctgcttcttcccttggttgcgcgcgtgctgttctcaatgccctcatcatcggcccaaattgaacgcgactttgggatggcaggcaggatggtgacccccaccgcagctcgatggcgccttacaacgtggacatggccacatttctgagctgcagcagaacttacgtgggtatcacccagtacccaaagttgtcgtcgagcacagcaaaggatcaagtaccgtcaaacgccatggtgagcatggagcgagagttggacgacgagttcggatcgttgatgaacaaaggcatcgagttgggactctccgacgacgaaaacgacggtattaccgaaatgtagcgggagcgggctggggcggacgaaaacgtgagagaacgggagcacgtgtggaagtggaaacgggctatagctgccgtggtagagttctagccatgcatgtgcacgaaatgagtgtctttacttttcatcaacacgttctgaccgtgtttggtgttagcttcgctatgcagcatatgtaaatagtatttcgctttcaccttgctttcgtgctggtcgtttgattactagcaactctgtaacacgcattgcagcgcgtacacggatcgcctcctgtgtttcaagctagattcgctcgatttgagatcgatctcgcagtattcgcgaccgtgggcacacaggcgggttgctggaccgggtggaagctgctgaaacccgcgtagttggtgtcctggctgccgctgcttcttttctgcggtttgctccagcggctcgtgataatgcggtggtggagcctcgcgtgcttgcagttgcttctgtagggcccatcgctgctcctgttgaggaagttggcgtcggcgcgaacgttgggacgatggccgtggacttgtctcgacttgatacagatattcacatcggtgttcttgaggacatcactgtattatgctggtcctgtggtacgaactcagagtgccatcagttcacggggttttgtctcggcagtcttcttggccaccacgatggctgggcgaaaccgttcgcctgggtggttgttagccctctcttgctcctgatcctgacgcatgcgaatcgcgatgtcgtgttgatctagcccgccgttgatcagctctactacgcgaacctctgtacgagcggttgttgcctcttgcactacttcaaatttgcaaatgtcgtggcgctcttacgcagcacgcttgtgctcctcctctaccaggttgtgttgcttgaccctggaagactgcaatgtgacttgcaaaacgcctggtgaggagatcaaaagagatcatctttgaccaataaaacgagatcttgtttgccaataaaaaaagcaatttgcagagcgaaccaagttctcgccctagctcggttcgaatgaaaagtaagcgaaccaagcccccccccccccccccctccggttcaggtaaaaaagaaaagaaaagaagggtgaaaccgtggttccagttcagttcgtcccaggggtgggaaattcacgaagtgtaggaaagtgtaatagacttgcgaggagagctgctggtctttctactcagtccacaaatggaaagttctgtccgtgcagctctctcaagtctaacctaaagctctacactgccagtcatactgtacaccactcgtacaattgcctctctcacattgatggtcgcacgctcttcaattgttttcgtgaacccagcagccgcagtcaacggcaattcgaagatgtcgttgggtacgccccgaggcttcactgctccagcaagttctcacttttcctttcgcaccgtcaagcgcagtcactgtctccaacctccatcgcctgttagtagcgttgtatcaagccctatgtcggggaagggtgcgccaggaaagcgcaagcgcaagtgacacccatttgatgacgggaagagcgatagaaatggcactgaaggtgcatgcccgaactcggagggcgatgatgacctcgatgaggatgacgtagattatgaggacgcccaaccagtaacgacacgtccaagcaagaggcctgacgtcgcggagtgcatgaagggcaacaagaataccagcctcgtatatgtgaagatgtcactaggttccttcttgacaggcgaggagaaactgttgctgtcattcgatggcattctcgtagacttgagcattggattgttaaatgcctacgcgctgctgaacatccacatgatgcggtgtgtgacaaaggacttcccattcctcgatttgagcagaacttcgtttgccaatgcttgacagacgtaatgtttaacgacagcaacgtgcacatagacgctgaactacatatatcgttggagctatacaatttgttgagaggctctaacgcttctcacgggcgtcgcgctggtatcaagaacgggtggcaacaggcgcagctcgggagatgatgaccgctatccagcatgcactcaaaaatgagtttccttcgccggtttaataaggtgctgcgggtatggtgtagacagaagcactggtagcacacattattgccccagagttcgagcggactccacccgacattcctgatcgtcagcgcctcgacaacgtagtcaacgagtggcgtggagaagtccctcagcgtcggagtgagctggtcaacttcacggcccaccgactggtgcttctgacttatcgactcctgcaaatgattgaggagcgtaacgacagagttgagcaaagcgtttgcgctgtttaagtgacaggggcgtctgattttgaagttagactaatccaagctgaagttatgaagacgttcactgttctaccaacaaagctaggatttggaattagtcacctcacgatagatttgattggtttccgggaactattagtccgcaacgacattgctgttcctccgtacagatcgaagtggaatgaggtgagatacatttattggagacggttcttccgtattgacaaagtggagactatagagtttggtcatcgcagattcacacgagagatctcggcggacggcaagtcggtgaacatcaagattcggaagcccgaacgtgggccttccgagcccaatgcaaatgacctccaagctgccgacattggctctagatgggggttggatgcgagtaaatgcaacctattggtcaccacaaaccaggacgacgaaacggttgtgtgctctggcaaagagtatcgcgaagacgcttacattacgaagagcagcaagaagcatttgagatggatacgggatcgtccgggcactggagctgcttttgcgagcatgccgacgaagaggagcatgttgctaaagcggtggcgggagtacgtcccatttatgacgcagcacctgcatctgctagtgacccccgtgcagcacaaatcgtaccgtcgccatcgacttcgaaggagcttctttaaaaagaagaagctatgtgagctctaccagaaacttgtatgtcacggagagcgaatttttatcgtcattgacaaccggagtaacggcgatccaaatggagcgatcaaagggaagccatcggcactcgtgcagaaattggcgctggagttgtcaaagacgtcgaactgtacggtcatcattattgccgagttccggatcagcaaagtgcactttggttaccaacaagaactgtccaagcaatacccgtatcgaaaggccgctgtccacgtacgcgcagtccacgaaagacgagccacgtacccagtttacggcttactccatttcagaaacaaaggttgttctggtatgagtgtgaacagggacgtgaatgcttcgaagaatatgctgcgcctgctcgattgtgaactcaacgagactcgcccagtcacctacacgcatcaagcaaacagatagataacaatacatttctagtgtcgctgtgtgcctatctaggggtgaggaagattacattgtgatagctggctcagaaattagcccttttggactctgtaggctacgtacctataggacacccttaggagaataatgggttaaagaaaggctcaatgaagcctggttgatttctgcatgaaatatttttcaaaacggtgatgtcctcctgtggatgaatatacttgtctttccgacagatagctcagcacgattgttgtctgctcgctttgcaggccattttgaccaattttaacacgtaaagccttaattgtgtccaattaaaatggttaaatgtaggtttgacattctgacaccttccgacaaatatgtgtctgaagtatttccaaaatatcaatatcttcatgcaaacaacaactgtaaaacgtatttttcaaatataccagccattcgtacaatgaggagtggccctaatgtaggaacactgaagaagatgaggtcgttggttggatgtccaccgttggtgtacactttaccagaagagtaacgtagccatggatcgtgcgtgatgcgtgggacataagcaaaataaacaaaggctgtgcttatgtcttcaatatgccacgggaagaccgcaaggtagcctgagtgctgtgcagctggaataaagagatcgcgcctcacgttgtggacgtcgcgacgctggaccatccgacgcgggagcggcttgaacgcttgcaggagctcctgtttagcacatgcacaggacgcaaggaacaccggttcaacgtgagtagaaaagtgcttagcgcttacctggtacggtactactcgcagcttaaagcgctagttcctgcagtgccgatcatcatcctgcttagtatctgcgggcatatcgtcaactgcattgcttgagtggtctgtagctggcggctccacctgctcaagaccaagaacaaactcaagacaaggcgcacacgttgccgagaagatggccaccttttggctgtgagtgatgggcttatcgcctcgaacaaggtcatggctgcatcgtcgaggcggtactactaaataataagggtccacacgcaacaacggaagaaggacaactgcaagagccatcagatcaagaaccaaatcccaagcacagaaaaaagctgcgaacctgtcggccacatggcttgcgtggtacaagaggataccacgcgtgtgggactcaaccgatagaagtcggagtgtcgccacgtggtcgcctccatgaagctctccctcgacgatagcttcgttatgaatgtcacagcggaagaattcaaaaaccaagtcctcaacaccagccgcgcggaaattggactgctggagtttctaaagctagcggcgtcaacgaagggagccgggagtatcctgcgtgcgctgcacccgctgcatacgtccggtatattggacgagcaaatcatggtctacaggcaccaactcgtcataggaagcaccgaagaccctgcacatatcgacgcgcaagacatgctcggcattgtaggtcatgtgtgagaacggtgaagttaattcattccaatatatgtattcattcgacataacatcgctgcttaacaagacaacatattcatgtgtacacatccacgcgcgcaggtcacctaatcaaagcgtaggctgcacaccgcacgatcgcaccgcgctcactcacccaccacatgcacagatcctcagcaatactgcacggttcaaagcactgatcccgacccaatcttgatcataaataccggccaaaacgtggctgttgacgaagctagtattgcgtgtcgttcgcaatacgctcgccatattatagttttctatccccaaaaccagacagggaaatatcacttcaagctgtatgcttgttgctgctcgacatcatggtatgtcgtgagtttcaaattgcactgtgcaagtgaacaaatagaccgtttggacggcgtggttccaagtccagaggtattacagcttgttgatctgacagcgaagtcctttgaaatttgttcccacgtaattgcagttgtggagtctttgaaaggatctaatcgcgttgtcaataccgataatatctacacctcctgcctgctactagaatcactaaggtcgattggcatgtatggtcgtggtacagtgcgcacatccagcaaacacttcccccacttcacaatgatccgaaaagctgatggaaagcctagaggctacatgaaacaaggcgtgtgcttagagtaacatatcgtagcggccagttggatagatggctctattgtgaatacagtctctaatgttgacgcctcctcttcctctacggtatatcgtcgcataaaggaggaacatgttgcgtttaacgtcccggcctgcctcggtgaatacaacgcggggatgcagggagtcaaccgtcatgatcagcttcgcggtcggatttcgcttgccgatggtcactcatttcagaagtggcataaaaaattagcaatggctatgattgatatcacgagatgtaatgcgtatgtatgcgataacttggcacgtgatacaagcgagatggatgttgcacagcctcgcaataatgcaagggcaagcgcccgtgacgatcaccgggcgtttgtcattccacttgtgcgagaattattcaatggagattggaagaagtgcattgacagtgatgacgtaattgtgtacacttcgaacacaaaacccatgaccactgctgccaatttgaccagaaatacgaatgagttagaaacgccagcacatacatgtgtagcaaaagaatcgtggattgtgttacaaggaaggagtcgggcaatgcgcaaatgcattgtttgtaagttcgagggcagggatgccacccagaaaacggattactgcgagacgcatcgagttgcactctgcaagcgtacctatcctactgaccacagaaaaccgcacttgtgtcagcagcaaaattggacgtgctggcaaaagtatcatttgttctacttgccaaaacaggtctatacagttgacggaaatctgagaaggtcgtctccaatttgtaaagcccagtgttcgttcttgaaggagcgtcgagaccaagataatactgaagagatcagcaaccacgactagcattcggctcatatatggtactgaaggtaaaagtaggcactcaatacattgtgtgcacttgaactacgactgaaaaccatccagttacttgtactcacagcatcctccctccttgtacattgaccagtgcaatgtgcgccgctttggtgcctttcgtctaattatagagctcatgcatggtgctgcatgttaccctcagcaccaatgtctcgatgctccctctctaggcggctccagaacctcgatgtcacgtagaattctgtcgccgggcccgtgatgtcgagatcgccttgcggtgaacccgaggcgttccacgagctgtcgctgtcgctagttcgcccctgcaacgggcgccgtctgaaattctgtgtccttgctgcctttcgccttgtagggttgcgccatcatctcgttctgtcggtgtctagcgtatggctgctgcatcgggcgccgttgtgccgcacatgtggatgatgtagcacaataatgtcgggataggcgccaagcgttatgttcttgttggtgtcgacgcgagtaacttgagagacacaatagcatgggcgcgccgtgtctgatcaggatttagatcccacgttgtgattggcagtcaacgctgacattttcctagagaggcgcaaaaattgttgatcaaaagtcggtgccgtatcttaacttcactataggctagattagtctgctaccttcttttggaaaaatatcttcatgtatcattctggtatcgatagggttaaaccactagtgctacgcgaaggctggaataggatacagataatccgatctacactagtgacaataaagaaacgtaagtacgactctgttgcaagcccacagcattcatctagagaacgggtgtagctctaaagtcatcgaagttcttggcgtcgaagtaagctttattgccttcgaactccgtgacacggcacgcttgcagagccactgttttgtattggtgcctcgtggctacagcgtcaacaaatccccccccccggagtgtgcagcacacctcgcttttggtgctatcaatcatcaaacaactgatctaatcgttctctggtctgtcgaccatcatcgccattgagtacctcatcgccaaatgcaaaacccttcgggtcggcaacacagcaatagtaatagaccaacgcgataggagggtgtcttgtaccagtgttgagcctttcccataaatcgaacctcctcatccgtaaaattaacacaggacagagcgcgaccttcaagctctccaagtctatcctgaataccccgttgtttttgcgcgcggcgggcgcgggccttgccgttcgttctcgaggtgctgctcccgttcctgcaaactttcattggctctttgggtacggcgcttcttgctgcggtcttcagtgtcggccattgccttcccacgttgttattggtcgtcagccctctacaaaacaaactgttggataaagcctaaatcatacggcgccatgctcccccgactacaccaatttgaatgcgctcccattagtatagtcactacaaattatccatacaatcatgtagcaaaatccccatctatgctgcccgagtgtccagtacccaaatcgattcaccggtaaaactatcccgtcgcattgagatttttgaggcattttgctcgatggttcgcgaaagggttaacacgctgatggcgcatttcttgaagcctgtcggcggcagtaccgacagcacaaactgcgtgtcgtggtcggtccaacggcactggcgaattccagttcaacgtgcttcgtgtcggcccactgcttcgtgcagctcggacagtgcgtgtgttgctgatgtccttgcagcatatgtgactcgcaatccgttcctcatcaacaagctcatcaacatggcttgtgcacattgcagggcagagccgccgtctttccccgcgctcactccgaaaaaaacaggccagtgcccaggagagccatcaacagggcggaaggagacgcagccagttcgcgcagttccagacgcagaagaaccccacgccacagcagcgttcgaggtctcctgctgtgagccgcatttgcctgccggcgccaacgttcgggctcagttgcgagcgctgaacgtacgactccttcgcgccattgcgaagaccctcgaggccaccatgccaccaacagacagcatgaagacccgcgcccgcgccgtgagctccgacaatgccaagcccacgatcgtgctcaacctgccgggcgtccgcctcgccgtgctcacgagcgcctacgactcgctcgtgcacctcgacgtcaccctcagctcggccgcgtcgctcttgctcgccacctatgtcgcccgcgtactggcctggaacgtcctcgcgttcgtgctcacgctcctggtgcagggggcggcgttcgggctcatcagcttttacaccttcatgggctgcgccatgctgtccatgaatgcctcacgcaacgcggcctccgttcaaaactactacatcgccaagccggtgactgctacagcctccacgctcccattgctccgcgttgacggcgggtttattgcgtccaagtccacccatgtcgacaagacagacgatgcggccgcttccaagagaaaggagcggcaggccccggctgcccgacgtcgtgtgctggcgcacctgaacaagaatcgcctcctggtcaatgtggtgcccggtgacatgcgccgccgcgtcgacatgaacctaggcgaagcgaacattcgtgtgggcaaggcgttcgtgcaggcggtgccggcaagcgcaaaccccgcgacgtctacgtcatgcgcgtggactgcggtgcccagtcggccggccaggagaagcacatgaaccccgtggtcatgtgggacgtgactgcaacctttgacgagttcaagcaactcgagcgcgagctgaagaaggaggtcaaggcgaaaaaggcgtcgcgcggagtgaaagtgccgcacgtgtcgagcggcgctgtgcttttcgtgcagcctgagctcacggaccatgtgctcaacgcccgccgcgcccgcctgcagacgttcatcgacatcgtgcgctcggacccagtgctttccacgatggggtgcttgcgcaagttctgccaggcctactaggctgcccagccccaatgcactctccgaccgaaggagagactgcaacacgggagagaaggtcgggtgctgccgcgctcgtgtgaagaatgaattcgtcgagccagtggctaccaagggagaagaggagatggagcttccatgtatgtgagagtgagtgaatgagacggacgctgtgggccgttgccgggccgccgcagcggaggcagcaacatcccgacggccgacggcgttcgtctgttcaaattataaacgcagttcgaccagcacggcggcgactctgaaggaggaggcgaggcccattgcgaggtcacaaagaggaataaaaagctgtaaatattattttggtgttgtgtagagatgcttggtgtcgatacggttgccgccgggatttgtctgagtccaacgtgtgagcggcggacttacagttccgtgaaaatccgaatcgttatcacttgatttttgtatgaaacgcgattggccgaaagctcgtcactccatttctgcaatcagcaagtcgactgtacatgcgcaagcaggtcgtcgatgcaccagcagaggacgccgcaggaagcttgacacgcggtcggagagcggccggaacgagtcgccgaagaggagcaacagacgttgctgcggtcgcagcgatggcgaggcgactgtggaccttggcgtcgctcgtcattgtcgccacctggctgggtttactgaatggtgcagcagctgcaatggacgcaggcgccgagccccaactgaggagagccacgcaacatgaggagagcgtggatttgcgcggcttgatgcccattctggacggcacctactcgaacacgaccggtgactacgactaccactgtacggtgcaatgtgagagctagtgaggtgagattggtgctgatggcatggactcatgttggacagacgggagctacggctacaacgatgatgagggcagctccgacggaagcagcggctcgaagacggtgatcatcggcgtcagcattggcgtgggcctcgtgcttgtcacactatgcttgacgtggaaagcctgtaaggagtgctgcacgagctcgagccggcggtcgcgccaccgcgccttcatcgaacgatcgtgagtctttttgaacgttggggatcaagtgagatcggggatttatatctttccggtgtcgtggcatttttgtagaaatgctggatggagatgcgagatctgctaccacacaaacgagttttcgcagaccgactgcgtgttgtgcggtactacggctgaaggtttgaaaaagctggaatttgtttttcatggtttacctgtgatctgatgtgctggattcgtggattgcagagctaaagatgatcagaagtcgacagaaagatgcgagtgcttccatactgagcgctccccaaggtgaaatcagccagcgttcggcctcaaactatctcctcatgtcctctcctcgtgctgcctggattcgaggtctgaacgctcttcctagtgaagatttgacggaccgtcagttaattgcacgcgaacggcatcagtggaagcgctgtattggagggcaacatgtgcgctgggtaaggggtgaaaagtttcggatccgataatgatctgtatagctaatgttatgcactctgggtcttacaggtaaacgttccttttgaagctctccaagtgagtaaggctttatgcagcgtcattattagagagcgtgactttcaggaatgggaaatacaacaccctccacaggtgcctgggtcctcgaggatgtctgtttcctctgtcatcttttcggacagcagtgggaaacaactttcttggctcaccccaggaactgcattcgtgcgagatgactcacactcgggaagccgaactgtgcgctggcgcttagccgaggaattttcaacttcatcacgaccatactccaaaacgatcatggtaagccagtcggtcgggtaagccttatcactcttgtctaatgtttttgtgcgcggttctcttagcgagtatcgaccttgccattttccgagaaagcacagtggttctaccagtattcgctcaagctctgctcgtccattgtcgatggctaccatactatacgtacgttagctgtggctgtgattttcaggttgctcaactgacgaaagctgcaggcattcatcgtgacagggtgttgaagcagtcaatgactctctttatgtctgcaccggatgcaactctacatcgccgactacgcgtcgattttatggatgaggttggcgtcgatggtggtggcattttgcgggagtggctgcatcttgtttgcagccagctttttgcggaatctctggggctgttcacactaaccagctcagcagcgcaccagggatactggattaatcgaactgcgacggggaaatgcacgaagcagctgcaggtatgtccaaagcattgcctctttgctcatcacaaattgttttaactgtggttgatgctcataataacagatgtacgtcttcttcggaaagctattggggaaggctttgcttgaaggcctacttctaaacgtgcggctttccgtccctttgctgaagcacattctcggcgtgccactcaagctctcagacctatatctgctcgatgaaacggtgcattccagtatgatgtggatcctcgaaaacgataacacaaatgctctcggcttgaacttcacggtggatggcgcagaacttattccaaatggcgccgatgtcattcttcacgatggaaacaaacagctttacgttgcaaaagtggcacagtactatctgtttgacagtgttcgagcggaaatttcgagcatcatggagggtctgcgcagtgtcatcagcgattcagttcttcacgtatttgatttcaaggaacttgacatactcttctctggattacctcaaatcgatgtcaatgactggagacagcacacagatattcgattctacgaacaaagtagtcacgagtttgaattggttgcctggttttgggaaattctagagtcgttcacgcaagatcaacgcggaagattgctgcagtacgtcactggttccagcggcgttcctgtcgaaggctttaaggtatatttttcggcttcactacgttaagtgaatttggttctgaccttcaatatacagggtctgactggtatggatggcgagatccaacttttcacaatccagcttgggaaggatatttcaaccgtgtacaccgtactaccgcatgcaagtacgtgcttgaacaggtgagtgcatattttgaaccgtgtttctgcaagccgctttgttgaccactgccttgctggttcaggctggatctaccactctatccttctaaggcagagctagagaggattttgtcaatggtacgtgctttggcatcgtgcgtttgggttacattgaactaacgcagaccttatgattgtggtgccaacggtaggtaatagagatggacgtcacgggatttagtagtcgatgagtggtaattttgctaattattcggaattgccaagtccacgctggcgttgtctatcgtttcggtggtttctacctctccaccagtttcaccttcaggcaagaactcctttagcactcccaacgatgcttcgttctcctttcgtgatgcaattactaacggcgttgtgccgtttgagtcgggtttgcgtgggtcagcgcaatggtgcagcagtattcgaatcgtcgccaaacggcttgaagtcgacacttcttctcgtcgca

SEQ ID NO: 293 - DNA, 18678 bp, unidentified
  source 1..18678: mol_type = other DNA
  variation 6232: note = n is any nucleotide
  misc_feature 1..18678: note = Fanzor polypeptide
ctgcacctcagaagctcattgatttgctcgacggcgcagagacctcagtagatatcgctatgttcatcttgacgcatcctgaaccgacagacgctatcatccgggcctcccagcgtgctatcgttgatcgggcacaagtctccgagaaaagctcagctatgatgatcgaaaacggggtcaacgtatttcacgcaaaggccccaaactcatgcactggaagatggtctgttgccttgcaaaacaactggaaaggtgagatacccgcggtactgttcatctgtagcccacatacacacacaggacagggttctgcaacttgagcttttgcgcttttgcacaatcgccacaataaacggagctgttctgcgtggcggcttggagcttcggccgagtggctggctcaagagtttgtctgcagtgagaacgagagagaaatgtagaggagatgaaggtgctccgaggttttcgggatcccgagttttggagttttggatcgcccggtgctacactgctttcgtccggaccggtaagaaggacatcaaggccatctgcgaggagcacccgggctggaatcgacggacggtcgcgcattactacgccatgtacgaaaatggagagagtttgcagcccaggtgtggcattgtggcaccggtcgagcattctgaaggcgcgtgcagaaggctgcaccattcgcatgatcgtcgacgagcgaagcgcgctccaaaagaaaaaaacatgacttgggtacgcaagtgcggggatcccggtcaagactggacgcgtggccagcttcatggtccacaacaagtggaccatcgtcaacggcgagttcattttacaaggcacgggcaactacagcgcggttgcgttcgatggagcccgccacgcagagacctttgagacgcgcacgggtcaggcgcaccttgattcgatcaagcgcgagttcgagcagctctgggaagaaggacgggtgcttcaatgggcctcgaggcgtactgcttgcttcatgtacttgggggaggacgaggatgaaacgaaaatgtacccccccccggggagagcaggacgaggacgaggacgtttatgtgtaggatatggttgaacgtgcaagccagtaagtaactttgttggtgcccactttgacttgggcttacattggccgtgcaggagtgccatcgtagttacaatagagctcgaggatcatgatgagtcctctcagtccttaccagccaaaaaaggcaaactgcacctagcgcattgagctggcaacggcagccccatcgacggcggctccagctacaacgggatctccgtcacttgactcgtcccttcagtccactgttgcttcttcgtcgctcgacaatttgatcgcgtctgctggatcgggttcgttcattgatccgagttcagtagtggtaaacggcgagctgctaccagcgagatcaagtcgacgtaccgcaactgggtggggcctcgcgccgtctcccccgacgccgcgtgctaccgtgaagcactcatcatggacgcatgcccgaccaacttcgaccagaacgaggttaccaacacgtgctgggccgagtgcccgatcgcctacccggtcgagtgcggcatggaatgcatccgtcagaacgatgactgtgctatggaggtgcttaacaaggtcggtgctgttgctagcacgtctagtcatcgctaccgttggtgcgtctcagaaactgtggcagctttcaaagggtgcgacgcgcgcattcgactgcgctaacatgatgatcggtacgatgagatccatcatccgttacgtgcgtaacatcaagaccacggacccgcaggcctcgacggacaagattctcaacatcctgtaccagtcgaacaacatcgtgacggacctgccgatggccatttacatttgcatgggctgggacttgccgaggcctctcgatgtctcgggtcgtgtgcttacgacgatgaactggatcttgctaaacgccatcgggtacaaggacgacctcgtgtctagctggagcaagttcaaggctttcttgatcggcgccaacttcacggaggccgccaacaagatcaacgagacggagatcaggacgctgagtgacgccctgaaggccaactccacctgcggctacgacttgcgagtgatgacggaccgcacgtgacgaggaaacgcagcataatgcgggtcaagatgagaacgtgatacttgccctcatgctgtccacatcgtgcacacggacggatgctgagtctgtcggtgttgatgcactttcagtcgtcgaccgtaatcgcttccagtttttgagggacgcgaacatttttcttgagtcagggaagaagctggtgttttacctggtgcgtcttcgttatcgagctccgattctccggcagaacgaccagtcggaagtgaaacaattgatgcagagcatgatctggtattcgatcaccggcgcgaagatcgacggtggcaagttgcacgatgccgagtggaccaagaagctggatttcttgaatcctgccaacgaaacactgtcgcagctgtgggaaagtggagagagaagcaccagctcggagcacgaacgttttgcacttattggctggcctgcttccgccgacataatgaacgcagtcgcattgtttggaaaagtgtcctgtgtgcctgtaattcttgcacagtgctacaacgctccgaatgcttctcagcgccgaacttgatgaaaatggatgccatttcgctcaaactctcaaaatcttcgagaagagcaatgcatctgttgagtttgtacccctttgccgggagctaggtactgccatcgttgacttgggtgacactacactgatccaggcgtttttcaagaagtatgttgcccagctgaaagacaaggacagacagttatttctccaatggcttccagctctcgtgcgcgcatttggatgggcatacgttagtgctgccacactgaatgccatcgacgtgcaatcaactgaaattcgctcggatcgagctttggaactcgcaaacacactccatgacaacgatgctgcacttctagctctcgtagcgtttgcgctgaagaaagctcacgcacggtgctctggccacgccgatgcattcgtatcttcgggtaagatcatcacacttttaaagcttgcgctggcgtgtggaaaccctcaaatatttgccggtctatcaaccatactgaacaagatcgatggcaatcttctccacacagtgattaatgcgctctcgaaatacgtcaatgactcgagtttacctgaacaacgtgctacgctggcctcacttgcagcgagacgtcgtgaatggctattcgctgagatcgaagacacgaagcaaccactggacttgacgaagcgcgagatctaggcaatgctagccgacaacacaatcggctccgcgaagtacttttcaatcgtcgctgactttttgaaggtgtcaccgatgagcacgagattcctggggttaaggctctacctagtggacacatcgttcgagttcaagtcagtactcttggggactcgccatttcgcgcctcagtatgggggaccagatggcggaatacgcggaccactttaccggtggattggtgacgtcctgggggggggggggggggggggctttggtttgagtcgccataaccttttcggggctacaacagtgatgtcaaatggatgatgagggacggtctaaagttgtagcgggagtagtgcgtgccgcacttcatgcatgcggcaaccaatactgttttcggcatcgtcggtgacaacagctcgtccaagaacccagccatgaccgacatccttcgacgcatcatcaaaacgatgtacaaaacgcagcacgtcgaaggaaagggcactctattaagcgagttatgcagcgttatgaacccggagggtgtgcatccacgctagctcttaaacttccgcacgcatcgattcctgggactcacgcgcgtcgtccgacgcattcttctactctgggatccattggtgcaatggtacgaggagcgggccacaaaagcccgacgtgagaacgtgatgccgccggagtccttcccactagctcgggaaaagatggaatgctctcactgctggagccgatctcgaaactaaatcagattggacaggccgagtcggggggaccaatgcaacgtgcttcttggactctacaagctccgaatatccttgttggacatcaccacagccttgaaggactgaagacggagaatcggttcttccgaccggatgagctgtacgatctcgcatcgacaacccgttcgctacttcacaaagggtttcgtcgggttttcttccggcggtacaccgatcgtgataccatgaacgtctgctcctttgcctttgagatgcaactatttcttcaccccaacttcaagcatccatatggagcgctgataaaggtgttaccaaggtcaatatacaggcaggtgcctcccagcaggtagctgaccgacactacacgaagattcgacgcattatcattgacagcgtccgcagcatcatgacagcggctgacgccgagccgacgtcgactgatatcgttgccccaccgccagctactgggttatcagaggacttcgtggagctcttcacggagacagcgaacgaggtggcaccaccacatagactgcggtgcacgagcaacgcatcgacgatgagctcgaccgctggctgacaacgcctacttcgcttcaagcgattcaacccggtgcgtttgactcagttctgagcttctggaagcgccagcaagagctgggcaacttcctgcttcttcccttggttgcgcgcgtgctgttctcaatgccctcatcatcggcccaaattgaacgcgactttgggatggcaggcaggatggtgacccccaccgcagctcgatggcgccttacaacgtggacatggccacatttctgagctgcagcagaacttacgtgggtatcacccagtacccaaagttgtcgtcgagcacagcaaaggatcaagtaccgtcaaacgccatggtgagcatggagcgagagttggacgacgagttcggatcgttgatgaacaaaggcatcgagttgggactctccgacgacgaaaacgacggtattaccgaaatgtagcgggagcgggctggggcggacgaaaacgtgagagaacgggagcacgtgtggaagtggaaacgggctatagctgccgtggtagagttctagccatgcatgtgcacgaaatgagtgtctttacttttcatcaacacgttctgaccgtgtttggtgttagcttcgctatgcagcatatgtaaatagtatttcgctttcacctatgctttcgtgctggtcgtttgattactagcaactctgtaacacgcattgcagcgcgtacacggatcgcctcctgtgtttcaagctagattcgctcgatttgagatcgatctcgcagtattcgcgaccgtgggcacacaggcgggttgctggaccgggtggaagctgctgaaacccgcgtagttggtgtcctggctgccgctgcttcttttctgcggtttgctccagcggctcgtgataatgcggtggtggagcctcgcgtgcttgcagttgcttctgtagggcccatcgctgcacctgttgaggaagttggcgtcggcgcgaacgttgggacgatggccgtggacttgtctcgacttgatacagatattcacatcggtgttcttgaggacatcactgtattatgctggtcctgtggtacgaactcagagtgccatcagttcacggggttttgtctcggcagtcttcttgaccaccacgatggctgggcgaaaccgttcgcctgggtggttgttagccctctcttgctcctgatcctgacgcatgcgaatcgcgatgtcgtgttgatctagcccgccgttgatcagctctactacgcgaacctctgtacgagcggttgttgcctcttgcactacttcaaatttgcaaatgtcgtggcgctcttacgcagcacgcttgtgctcctcctctaccaggttgtgttgcttgaccctggaagactgcaatgtgacttgcaaaacgcctggtgaggagatcaaaagagatcatctttgaccaataaaacgagatcttgtttgccaataaaaaaagcaatttgcagagcgaaccaagttctcgccctagctcggttcgaatgaaaagtaagcgaaccaagcccccccccccccccnccccccctccggttcaggtaaaaaagaaaagaaaagaagggtgaaaccgtggttccagttcagttcgtcccaggggtgggaaattcacgaagtgtaggaaagtgtaatagacttgcgaggagagctgctggtctttctactcagtccacaaatggaaagttctgtccgtgcagctctctcaagtctaacctaaagctctacactgccagtcatactgtacaccactcgtacaattgcctctctcacattgatggtcgcacgctcttcaattgttttcgtgaacccagcagccgcagtcaacggcaattcgaagatgtcgttgggtacgccccgaggcttcactgctccagcaagttctcacttttcctttcgcaccgtcaagcgcagtcactgtctccaacctccatcgcctgttagtagcgttgtatcaagccctatgtcggggaagggtgcgccaggaaagcgcaagcgcaagtgacacccatttgatgacgggaagagcgatagaaatggcactgaaggtgcatgcccgaactcggagggcgatgatgacctcgatgaggatgacgtagattatgaggacgcccaaccagtaacgacacgtccaagcaagaggcctgacgtcgcggagtgcatgaagggcaacaagaataccagcctcgtatatgtgaagatgtcactaggttccttcttgacaggcgaggagaaactgttgctgtcattcgatggcattctcgtagacttgagcattggattgttaaatgcctacgcgctgctgaacatccacatgatgcggtgtgtgacaaaggacttcccattcctcgatttgagcagaacttcgtttgccaatgcttgacagacgtaatgtttaacgacagcaacgtgcacatagacgctgaactacatatatcgttggagctatacaatttgttgagaggctctaacgcttctcacgggcgtcgcgctggtatcaagaacgggtggcaacaggcgcagctcgggagatgatgaccgctatccagcatgcactcaaaaatgagtttccttcgccggtttaataaggtgctgcgggtatggtgtagacagaagcactggtagcacacattattgccccagagttcgagcggactccacccgacattcctgatcgtcagcgcctcgacaacgtagtcaacgagtggcgtggagaagtccctcagcgtcggagtgagctggtcaacttcacggcccaccgactggtgcttctgacttatcgactcctgcaaatgattgaggagcgtaacgacagagttgagcaaagcgtttgcgctgtttaagtgacaggggcgtctgattttgaagttagactaatccaagctgaagttatgaagacgttcactgttctaccaacaaagctaggatttggaattagtcacctcacgatagatttgattagtttccgggaactattagtccgcaacgacattgctgttcctccgtacagatcgaagtggaatgaggtgagatacatttattggagacggttcttccgtattgacaaagtggagactatagagtttggtcatcgcagattcacacgagagatctcggcggacggcaagtcggtgaacatcaagattcggaagcccgaacgtgggccttccgagcccaatgcaaatgacctccaagctgccgacattggctctagatgggggttggatgcgagtaaatgcaacctattggtcaccacaaaccaggacgacgaaacggttgtgtgctctggcaaagagtatcgcgaagacgcttacattacgaagagcagccagaagcatttgagatggatacgggatcgtccgggcactggagctgcttttgcgagcatgccgacgaagaggagcatgttgctaaagcggtggcgggagtacgtcccatttatgacgcagcacctgcatctgctagtgacccccgtgcagcacaaatcgtaccgtcgccatcgacttcgaaggagcttctttaaaaagaagaagctatgtgagctctaccagaaacttgtatgtcacggagagcgaatttttatcgtcattgacaaccggagtaacggcgatccaaatggagcgatcaaagggaagccatcggcactcgtgcagaaattggcgctggagttgtcaaagacgtcgaactgtacggtcatcattattgccgagttccggatcagcaaagtgcactttggttaccaacaagaactgtccaagcaatacccgtatcgaaaggccgctgtccacgtacgcgcagtccacgaaagacgagccacgtacccagtttacggcttactccatttcagaaacaaaggttgttctggtatgagtgtgaacagggacgtgaatgcttcgaagaatatgctgcgcctgctcgattgtgaactcaacgagactcgcccagtcacctacacgcatcaagcaaacagatagataacaatacatttctagtgtcgctgtgtgcctatctaggggtgaggaagattacattgtgatagctggctcagaaattagcccttttggactctgtaggctacgtacctataggacacccttaggagaataatgggttaaagaaaggctcaatgaagcctggttgatttctgcatgaaatatttttcaaaacggtgatgtcctcctgtggatgaatatacttgtctttccgacagatagctcagcacgattgttgtctgctcgctttgcaggccattttgaccaattttaacacgtaaagccttaattgtgtccaattaaaatggttaaatgtaggtttgacattctgacaccttccgacaaatatgtgtctgaagtatttccaaaatatcaatatcttcatgcaaacaacaactgtaaaacgtatttttcaaatataccagccattcgtacaatgaggagtggccctaatgtaggaacactgaagaagatgaggtcgttggttggatgtccaccgttggtgtacactttaccagaagagtaacgtagccatggatcgtgcgtgatgcgtgggacataagcaaaataaacaaaggctgtgcttatgtcttcaatatgccacgggaagaccgcaaggtagcctgagtgctgtgcagctggaataaagagatcgcgcctcacgttgtggacgtcgcgacgctggaccatccgacgcgggagcggcttgaacgcttgcaggagctcctgtttagcacatgcacaggacgcaaggaacaccggttcaacgtgagtagaaaagtgcttggcgcttacctggtacggtactactcgcagcttaaagcgctagttcctgcagtgccgatcatcatcctgcttagtatctgcgggcatatcgtcaactgcattgcttgagtggtctgtagctggcggctccacctgctcaagaccaagaacaaactcaagacaaggcgcacacgttgccgagaagatggccaccttttggctgtgagtgatgggcttatcgcctcgaacaaggtcatggctgcatcgtcgaggcggtactactaaataataagggtccacacgcaacaacggaagaaggacaactgcaagagccatcagatcaagaaccaaatcccaagcacagaaaaaagctgcgaacctgtcggccacatggcttgcgtggtacaagaggataccacgcgtgtgggactcaaccgatagaagtcggagtgtcgccacgtggtcgcctccatgaagctctccctcgacgatagcttcgttatgaatgtcacagcggaagaattcaaaaaccaagtcctcaacaccagccgcgcggaaattggactgctggagtttctaaagctagcggcgtcaacgaagggagccgggagtatcctgcgtgcgctgcacccgctgcatacgtccggtatattggacgagcaaatcatggtctacaggcaccaactcgtcataggaagcaccgaagaccctgcacatatcgacgcgcaagacatgctcggcattgtaggtcatgtgtgagaacggtgaagttaattcattccaatatatgtattcattcgacataacatcgctgcttaacaagacaacatattcatgtgtacacatccacgcgcgcaggtcacctaatcaaagcgtaggctgcacaccgcacgatcgcaccgcgctcactcacccaccacatgcacagatcctcagcaatactgcacggttcaaagcactgatcccgacccaatcttgatcataaataccggccaaaacgtggctgttgacgaagctagtattgcgtgtcgttcgcaatacgctcgccatattatagttttctatccccaaaaccagacagggaaatatcacttcaagctgtatgcttgttgctgctcgacatcatggtatgtcgtgagtttcaaattgcactgtgcaagtgaacaaatagaccgtttggacggcgtggttccaagtccagaggtattacagcttgttgatctgacagcgaagtcctttgaaatttgttcccacgtaattgaagttgtggagtctttgaaaggatctaatcgcgttgtcaataccgataatttctacacctcgtgcctgctactagaatcgctaagatcgattggtctgtatggtcgtggtacagtgcgcacatccagcaaacacttcccccatttcacaatgatccgaaaagctgatggaaagcctagaggctacatgaaacaaggcgtgtgcttagagtaacatatcgtagcggccagttggatagatggctctattgtgaatacagtctctaatgttgacgcctcctcttcctctacggtatatcgtcgcataaaggaggaacatgttgcgtttaacgtcccggcctgcctcggtgaatacaacgcggggatgcagggagtcaaccgtcatgatcagcttcgcggtcggatttcgcttgccgatggtcactcatttcagaagtggcataaaaaattagcaatggctatgattgatatcacgagatgtaatgcgtatgtatgcgataacttggcacgtgatacaagcgagatggatgttgcacagcctcgcaataatgcaagggcaagcgcccgtgacggtcaccgggcgtttgtcattccacttgtgcgagaattattcaatggagattggaagaagtgcattgacagtgatgacgtaattgtgtacacttcgaacacaaaacccatgaccactgctgccaatttgaccagaaatacgaatgagttagaaacgccagcacatacatgtgtagcaaaagagtcgtggcttgtgttacaaggaaggagtcgggcaatgcacaaatggactgtatgtaagttcgagggcagggatgacacccagaaaacggattattgcgagacgcatcgagttgcactctgcaagcgtacctatcctactgaccacagaaaaccgcacttgtgtcagcagcaaaattggacgtgctggcaaaagtatcatttgttctacttgccaaaacaggtctatacagttgacggaaatctgagaaggtcgtctccaatttgtaaagcccagtgttcgttcttgaaggagcgtcgagaccaagataatactgaagagatcagcaaccacgactagcattcggctcatatatagtactgaaggtaaaagtaggcactcaatacattgtgtgcacttgaactacgactgaaaaccagccagttacttgtactcacagcatcctccctccttgtacattgaccagtgcaatgtgcgccgctttggtgcctttcgtctaattatagagctcatgcatggtgctgcatgttaccctcagcaccaatgtctcgatgctccctctctaggcggctccagaacctcgatgtcacgtagaattctgtcgccgggcccgtgatgtcgagatcgccttgcggtgaacccgaggcgttccacgagctgtcgctgtcgctagttcgcccctgcaacgggcgccgtctgaaattctgtgtccttgctgcctttcgccttgtagggttgcgccatcatctcgttctgtcggtgtctagcgtatggctgctgcatcgggcgccgttgtgccgcacatgtggatgatgtagcacaataatgtcgggataggcgccaagcgttatgttcttgttggtgtcgacgcgagtaacttgagagacacaatagcatgggcgcgccgtgtctgatcaggatttagatcccacgttgtgattggcagtcaacgctgacattttcctagagaggcgcaaaaattgttgatcaaaagtcggtgccgtatcttaacttcactataggctagattagtctgctaccttcttttggaaaaatatcttcatgtatcattctggtatcgatagggttaaaccactagtgctacgcgaaggctggaataggatacagataatccgatctacactagtgacaataaagaaacgtaagtacgactctgttgcaagcccacagcattcatctagagaacgggtgtagctctaaagtcatcgaagttcttggcgtcgaagtaagctttattgccttcgaactccgtgacacggcacgcttgcagagccactgttttgtattggtgcctcgtggctacagcgtcaacaaatccccccccccggagtgtgcagcacacctcgcttttggtgctatcaatcatcaaacaactgatctaatcgttctctggtctgtcgaccatcatcgccattgagtacctcatcgccaaatgcaaaacccttcgggtcggcaacacagcaatagtaatagaccaacgcgataggagggtgtcttgtaccagtgttgagcctttcccataaatcgaacctcctcatccgtaaaattaacacaggacagagcgcgaccttcaagctctccaagtctatcctgaataccccgttgtttttgcgcgcggcgggcgcgggccttgccgttcgctctcgaggtgctgctcccgttcctgcaaactttcattggctctttgggtacggcgcttcttgctgcggtcttcagtgtcggccattgccttcccacgttgttattggtcgtcagccctctacaaaacaaactgttggataaagcctaaatcatacggcgccatgctcccccgactacaccaatttgaatgcgctcccattagtatagtcactacaaattatccatacaatcatgtagcaaaatccccatctatgctgcccgagtgtccagtacccaaatcgattcaccggtaaaactatcccgtcgcattgagatttttgaggcattttgctcgatggttcgcgaaagggttagcacgctgatggcgcatttcttgaagcctgtcggcggcagtaccgacagcacaaactgcgtgtcgtggtcggtccaacggcactggcgaattccagttcaacgtgcttcgtgtcggcccactgcttcgtgcagctcggacagtgcgtgtgttgctgatgtccttgcagcatatgtgactcgcaatccgttcctcatcaacaagctcatcaacatggcttgtgcacattgcagggcagagccgccgtctttccccgcgctcactccgaaaaaaacaggccagtgcccaggagagccatcaacagggcggaaggagacgcagccagttcgcgcagttccagacgcagaagaaccccacgccacagcagcgttcgaggtctcctgctgtgagccgcatttgcctgccggcgccaacgttcgggctcagttgcgagcgctgaacgtacgactccttcgcgccattgcgaagaccctcgaggccaccatgccaccaacagacagcatgaagacccgcgcccgcgccgtgagctccgacaatgccaagcccacgatcgtgctcaacctgccgggcgtccgcctcgccgtgctcacgagcgcctacgactcgctcgtgcacctcgacgtcaccctcagctcggccgcgtcgctcttgctcgccacctatgtcgcctgcgtactggcctggaacgtcctcgcgttcgtgctcacgctcctggtgcagggggcggcgttcgggctcatcagcttttacaccttcatgggctgcgccatgctgtccatgaatgcctcacgcaacgcggcctccgttcaaaactactacatcgccaagccggtggctgctacagcctccacgctcccattgctccgcgttgacggcgggtttatcgcgtccaagtccacccatgtcgacaagacagacgatgcggccgcttccaagagaaaggagcggcaggccccggctgcccgacgtcgtgtgctggcgcacctgaacaagaatcgcctcctggtcaatgtggtgcccggtgacatgcgccgccgcgtcgacatgaacctaggcgaagcgaacattcgtgtgggcaaggcgttcgtgcaggcggtgccggcaagcgcaaaccccgcgacgtctacgtcatgcgcgtggactgcggtgcccagtcggccggccaggagaagcacatgaaccccgtggtcatgtgggacgtgactgcaacctttgacgagttcaagcaactcgagcgcgagctgaagaaggaggtcaaggcgaaaaaggcgtcgcgcggagtgaaagtgccgcacgtgtcgagcggcgctgtgcttttcgtgcagcctgagctcacggaccatgtgctcaacgcccgccgcgcccgcctgcagacgttcatcgacatcgtgcgctcggacccagtgctttccacgatggggtgcttgcgcaagttctgccaggcctactaggctgcccagccccaatgcactctccgaccgaaggagagactgcaacacgggagagaaggtcgggtgctgccgcgctcgtgtgaagaatgaattcgtcgagccagtggctaccaagggagaagaggagatggagcttccatgtatgtgagagtgagtgaatgagacggacgctgtgggccgttgccgggccgccgcagcggaggcagcaacatcccgacggccgacggcgttcgtctgttcaaattataaacgcagttcgaccagcacggcggcgactctgaaggaggaggcgaggcccattgcgaggtcacaaagaggaataaaaagctgtaaatattattttggtgttgtgtagagatgcttggtgtcgatacggttgccgccgggatttgtctgagtccaacgtgtgagcggcggacttacagttccgtgaaaatccgaatcgttatcacttgatttttgtatgaaacgcgattggccgaaagctcgtcactccatttctgcaatcagcaagtcgactgtacatgcgcaagcaggtcgtcgatgcaccagcagaggacgccgcaggaagcttgacacgcggtcggagagcggccggaacgagtcgccgaagaggagcaacagacgttgctgcggtcgcagcgatggcgaggcgactgtggaccttggcgtcgctcgtcattgtcgccacctggctgggtttactgaatggtgcagcagctgcaatggacgcaggcgccgagccccaactgaggagagccacgcaacatgaggagagcgtggatttgcgcggcttgatgcccattctggacggcacctactcgaacacgaccggtgactacgactaccactgtacggtgcaatgtgagagctagtgaggtgagattggtgctgatggcatggactcatgttggacagacgggagctacggctacaacgatgatgagggcagctccgacggaagcagcggctcgaagacggtgatcatcggcgtcagcattggcgtgggcctcgtgcttgtcacactatgcttgacgtggaaagcctgtaaggagtgctgcacgagctcgagccggcggtcgcgccaccgcgccttcatcgaacgatcgtgagtctttttgaacgttggggatcaagtgagatcggggatttatatctttccggtgtcgtggcatttttgtagaaatgctggatggagatgcgagatctgctaccacacaaacgagttttcgcagaccgactgcgtgttgtgcggtactacggctgaaggtttgaaaaagctggaatttgtttttcatggtttacctgtgatctgatgtgctggattcgtggattgcagagctaaagatgatcagaagtcgacagaaagatgcgagtgcttccatactgagcgctccccaaggtgaaatcagccagcgttcggcctcaaactatctcctcatgtcctctcctcgtgctgcctggattcgaggtctgaacgctcttcctagtgaagatttgacggaccgtcagttaattgcacgcgaacggcatcagtggaagcgctgtattggagggcaacatgtgcgctgggtaaggggtgaaaagtttcggatccgataatgatctgtatagctaatgttatgcactctgggtcttacaggtaaacgttccttttgaagctctccaagtgagtaaggctttatgcagcgtcattattagagagcgtgactttcaggaatgggaaatacaacaccctccacaggtgcctgggtcctcgaggatgtctgtttcctctgtcatcttttcggacagcagtgggaaacaactttcttggctcaccccaggaactgcattcgtgcgagatgactcacactcgggaagccgaactgtgcgctggcgcttagccgaggaattttcaacttcatcacgaccatactccaaaacgatcatggtaagccagtcggtcgggtaagccttatcactcttgtctaatgtttttgtgcgcggttctcttagcgagtatcgaccttgccattttccgagaaagcacagtggttctaccagtattcgctcaagctctgctcgtccattgtcgatggctaccatactatacgtacgttagctgtggctgtgattttcaggttgctcaactgacgaaagctgcaggcattcatcgtgacagggtgttgaagcagtcaatgactctctttatgtctgcaccggatgcaactctacatcgccgactacgcgtcgattttatggatgaggttggcgtcgatggtggtggcattttgcgggagtggctgcatcttgtttgcagccagctttttgcggaatctctggggctgttcacactaaccagctcagcagcgcaccagggatactggattaatcgaactgcgacggggaaatgcacgaagcagctgcaggtatgtccaaagcattgcctctttgctcatcacaaattgttttaactgtggttgatgctcataataacagatgtacgtcttcttcggaaagctattggggaaggctttgcttgaaggcctacttctaaacgtgcggctttccgtccctttgctgaagcacattctcggcgtgccactcaagctctcagacctatatctgctcgatgaaacggtgcattccagtatgatgtggatcctcgaaaacgataacacaaatgctctcggcttgaacttcacggtggatggcgcagaacttattccaaatggcgccgatgtcattcttcacgatggaaacaaacagctttacgttgcaaaagtggcacagtactatctgtttgacagtgttcgagcggaaatttcgagcatcatggagggtctgcgcagtgtcatcagcgattcagttcttcacgtatttgatttcaaggaacttgacatactcttctctggattacctcaaatcgatgtcaatgactggagacagcacacagatattcgattctacgaacaaagtagtcacgagtttgaattggttgcctggttttgggaaattctagagtcgttcacgcaagatcaacgcggaagattgctgcagtacgtcactggttccagcggcgttcctgtcgaaggctttaaggtatatttttcggcttcactacgttaagtgaatttggttctgaccttcaatatacagggtctgactggtatggatggcgagatccaacttttcacaatccagcttgggaaggatatttcaaccgtgtacaccgtactaccgcatgcaagtacgtgcttgaacaggtgagtgcatattttgaaccgtgtttctgcaagccgctttgttgaccactgccttgctggttcaggctggatctaccactctatccttctaaggcagagctagagaggattttgtcaatggtacgtgctttggcatcgtgcgtttgggttacattgaactaacgcagaccttatgattgtggtgccaacggtaggtaatagagatggacgtcacgggatttagtagtcgatgagtggtaattttgctaattattcggaattgccaagtccacgctggcgttgtctatcgtttcggtggtttctacctctccaccagtttcaccttcaggcaagaactcctttagcactcccaacgatgcttcgttctcctttcgtgatgcaattactaacggcgttgtgccgtttgagtcgggtttgcgtgggtcagcgcaatggtgcagcagtattcgaatcgtcgccaaacggcttgaagtcgacacttcttctcgtcgca

SEQ ID NO: 294 - DNA, 8645 bp, unidentified
  misc_feature 1..8645: note = Fanzor polypeptide
  source 1..8645: mol_type = other DNA
  variation 4173..4182: note = n is any nucleotide
caacaagatcaacgagacggagatcgggacgctgagcgacgccctgaaggccaaccccacctgcggctacgacttgcgagtgatgacggaccgcacgtgacgaggaaacgcagcataatgcgggtcaagatgagaacgtgatacttgccctcatgctgtccacatcgtgcacacggacggatgctgagtctgtcggtgttgatgcactttcagtcgtcgaccgtaatcgcttccagtttttgagggacgcgaacatttttcttgagtcagggaagaagctggtgttttacctggtgcgtcttcgttatcgagctccgattctccggcagaacgaccagtcggaagtgaaacaattgatgcagagcatgatctggtattcgatcaccggcgcgaagatcgacggtggcaagttgcacgatgccgagtggaccaagaagctggatttcttgaatcctgccaacgaaacactgtcgcagctgtgggaaagtggagagagaagcaccagctcggagcacgaacgttttgcacttattggctggcctgcttccgccgacataatgaacgcagtcgcattgtttggagaagtgtcctgtgtgcctgtaattcttgcacagtgctacaacgctccgaatgcttctcagcgccgaacttgatgaaaatggatgccatttcgctcaaactctcaaaatcttcgagaagagcaatgcatctgttgagtttgtacccctttgccgggagctaggtgctgccatcgttgacttgggtgacactacactgatccaggcgtttttcaagaagtatgttgcccagctgaaagacaaggacagacagttatttctccaatggcttccagctctcgtgcgcgcatttggatgggcatacgttagtgctgccacactgaatgccatcgacgtgcaatcaactgaaattcgctcggatcgagctttggaactcgcaaacacactccatgacaacgatgctgcacttctagctctcgtagagtttgcgctgaagaaagctcacgcacggtgctctggccacgccgatgcattcgtatcttcgggtaagatcatcacacttttaaagcttgcgctggcgtgtggaaaccctcaaatatttgccggtctatcaaccatactgaacaagatcgatggcaatcttctccacacagtgattaatgcgctctcgaaatacgtcaatgactcgagtttacctgaacagcgtgctacgctggcctcacttgcagcgagacgtcgtgaatggctattcgctgagatcgaagacacgaagcaaccactggacttgacgaagcgcgagatctaggcaatgctagccgacaacacaatcggctccgcgaagtacttttcaatcgtcgctgactttttgaaggtgtcatcgatgagcacgagattcctggggttaaggctctacctagtggacacatcgttcgagttcaagtcggtactcttggggactcgccatttcgcgcctcagtatgggggaccagatggcggaatacgcggaccactttaccggtggattggtgacgtcctggggggggggctttggtttgagtcgccataaccttttcggggctacaacagtgatgtcaaatggatgatgagggacggtctaaagttgtagcgggagtggtgcgtgccgcacttcatgcatgcggcaaccaatactgttttcggcatcgtcggtgacaacagctcgtccaagaacccagccatgaccgacatccttcgacgcatcaccaaaacgatgtacaaaacgcagcacgtcgaaggaatgggcactctattaagcgagttatgcagcgttatgaacccggagggtgtgcatccacgctagctcttaaacttccgcacgcatcgattcctgggactcacgcgcgtcgtccgacgcattcttctactctgggatccattggtgcaatggtacgaggagcgggccacaaaagcccgacgtgagaacgtgatgccgccggagtccttcccactagctcgggaaaagatggaactcattcaggtgctctcactgctggagccgatctcgaaactaaatcagattggacaggccgagtcggggggaccaatgcaacgtgcttcttggactctacaagctccgaatatccttgttggacatcaccacagccttgaaggactgaagacggagaatcggttcttccgaccggatgagctgtacgatctcgcatcgacaacccgttcgctacttcacaaagggtttcgtcgggttttcttccggcggtacaccgatcgtgataccatgaacgtctgctcctttgcctttgagatgcaactatttcttcaccccaacttcaagcatccatatggagcgctgataaaggtgttaccaaggtcaatatacaggcaggtgcctcccagcaggtagctgaccgacactacacgaagattcgacgcattatcattgacagcgtccgcagcatcatgacagcggctgacgccgagccgacgtcgactgatatcgttgccccaccgccagctactgggttatcagaggacttcgtggagctcttcacggagacagcgaacgaggtggcaccaccacatagactgcggtgcacgagcaacgcatcgacgatgagctcgaccgctggctgacaacgcctacttcgcttcaagcgattcaacccaatgcgttttactcagttctgagcttctggaagcgccagcaagagctggacatcttcctgcttcttcccttggttgcgcgcgtgctgttctcaatgccctcatcatcggccctcatcatcggcccaaattgaacgcgactttgggatggcaggcaggatggtgacccccaccgcagctcgatggcgccttacaacgtggacatggccacatttctgagctgcagcagaacttacgtgggtatcacccagtacccaaagttgtcgtcgagcacagcaaaggatcaagtaccgtcaaacgccatggtgagcatggagcgagagttggacgacgagttcggatcgttgatgaacaaaggcatcgagttgggactctccgacgacgaaaacgacggtattaccgaaatgtagcgggagcgggctggggcggacgaaaacgtgagagaacgggagcacgtgtggaagtggaaacgggctatagctgccgtggtagagttctagccatgcatgtgcacgaaatgagtgtctttacttttcatcaacacgttctgaccgttgttggtgttagcttcgctatgcagcttatgtaaatagtattttgttttcacctatgctttcgtgctggtcgtttgattactagcaactctgtaacacgcattgcagcgcgtacacggatcgcctcctgtgtttcaagctagattcgctcgatttgggatcgatctcgcagtattcgcgaccgtgggcacacaggcgggttgctggaccgggtggcagctgctgaaacccgcgtagttggtgtcctggctgccgctgcttcttttctgcggtttgctccagcggctcgtgataatgcggtggtggagcctcgcgtgcttgcagttgcttctgtagggcccatcgctgctcctgttgaggaagttggcgtcggcgcgaacgttgggacgatggccgtggacttgtcttgacttgatacagatattcacatcggtgttcttgaggacatcactgtattatgctggtcctgtggtacgaactcggagtgccatcagttcacggggttttgtctcggcagtcttcttggccaccacgatggctgggcgaaaccgttcgcctgggtggttgttagccctctcttgctcctgatcctgacgcacgcgaatcgcgatgtcgtgttgatctagcccgccgttgatcagctctactacgcgaacctctgtacgagcggttgttgcctcttgcactacttcaaatttgcaaatgtcgtggcgctcttacgcagcacgcttgtgctcctcctctaccaggttgtgttgcttgaccctggaagactgcaatgtgactcgcaaaacgcctggtgaggagatcaaaagagatcatctttgaccaataaaacgagatcttgtttgccaataaaaaaagcaatttgcagagcgaaccaagttctcgccctagctcggttcgaatgaaaagtaagcgaaccaagccccccccccccnnnnnnnnnnccctccggttcaggtaaaaaaagaaaagaaaagaagggtgaaaccgtggttccagttcagttcgtcctaggggtgggaaattcacgaagtgtaggaaagtgtaatagacttgcgaggagagctgctggtctttctactcagtccacaaatggaaagttctgtccgtgcagctctctcaagtctaacctaaagctctacactgccagtcatactgtacaccactcgtacaattgcctctctcacattgatggtcgcacgctcttcaattgttttcgtgaacccagcagccgcagtcaacggcaattcgaagatgtcgttgggtacgccccgaggcttcactgctccagcaagttctcacttttcctttcgcaccgtcaagcgcagtcactggtctccaacctccatcgcctgttagcagcgttgtatcaagccctatgtcggggaagggtgcgccaggaaagcgcaagcgcaagtgacacccatttgatgacgggaagagcgatagaaatggcactgaaggcgcatgcccgaactcggagggcgatgatgacctcgatgaggatgacgtagattatgaggacgcccaaccagtaacgacacgtccaagcaagaggcctgacgtcgcggagcgcatgaagggcaacaagaataccagcctcgtatatgtgaagatgtcactaggttccttcttgacaggcgaggagaaactgttgctgtcattcgatggcattctcgtagacttgagcattggattgttaaatgcctacgcgctgctgaacatccacatgatacggtgtgtgacaaaggacttcccattcctcgatttgagcagaacttcgtttgccaatgcttgacagacgtaatgtttaacgacagcaacgtgcacatagacgctgaactacatatatcgttggagctatacaatttgttgagaggctctaacgcttctcacgggcgtcgcgctggtatcaagaacgggtggcaacaggcgcagctcgggagatgatgaccgctatccagcatgcactcaaaaatgagtttccttcgccggtttaataaggtgctgcgggtatggtgtagacagaagcactggtagcacacattattgccccagagttcgagcggactacacccgacatccctgatcgtcagcgcctcgacaacgtagtcaacgagtggcgtggagaagtccctcagcgtcggagtgagctggtcaacttcacggcccaccgactggtgcttctgacttatcgactcctgcaaatgattgaggagcgtaacgacagagttgagcaaagcgtttgcgctgtttaagtgacaggggcgtctgatttgaagttagactaatccaagctgaagttatgaagacgttcactgttctaccaacaaagcaaggatttggaattagtcacctcacgatagatttgattggtttccgggaactattagtccgcaacgacattgctgttcctccgtacagatcgaagtggaatgaggtgagatacatttattggagacggttcttccgtattgacaaagtggagactatagagtttggtcatctcagattcacacgagagatctcgacggacggcaagtcggtgaacatcaagattcggaagcccgaacgtgggccttccgagcccaatgcaaatgacctccaagctgccgacattggctctagatgggggttggatgcgagtaaatgcaacctcttggtcaccacaaaccaggacgacgaaacggttgtgtgctctggcaaagagtatcgcgaagacgcttacattacgaagagcagccagaagcaattgagatggatacgggatcgtccggacactggagctgcctttgcgagcatgccgacgaagaggagcatgttgctaaagcggtggcgggagtacgtcccatttatgacgcagcacctgcatctgctagtgacccccatgcagcacaaatcgtacagtcgccatcgacttcgaaggagcttctttaaaaagaagaacctatgtgagctctaccagaaacttgtatgtcacggagagcgaatttttatcgtcattgacaaccggagtaacggcgatccaaatggagcgatcaaagggaagccatcggcactcgtgcagaaattggcgctggagttgtcaaagacgtcgaactgtacggtcatcattattgccgagttccggatcagcaaagtgcactttggttaccaacaagaactgtccaagcaatacccgtatcgaaaggccgctgtccacgtacgcgcagtccacgaaagacgagccacgtacccagtttacggcttactccatttcagaaacaaaggttgttctggtatgagtgtgaacagggacgtgaatgcttcgaagaatatgctgcgcctgctcgattgtgaactcaacgagactcgcccagtcacctacacgcatcaagcaaacagatagataacaatacctttctagtgtcgctgtgtgcctatctaggggtgaggaagattacattgtgatagccggctcagaaattagcccttttggactctgtaggctacgtacctataggacacccttaggagaataatgggttaaacaaaggctcaatgaagcctggttgatttctgcatgaaatatttttcaaaacggtgatgtcctcctgtggatgaatatacttgtctttccgacagatagctcagcacgattgttgtctgctcgctttgcagaccattttgaccaattttaacacgtaaagccttaattgtgtccaattaaaatggttaaatgtaggtttgacattctgacaccttccgacaaatatgtgtctgaagtatttccaaaatatcaatatcttcatgcaaacaacaactgtaaaacgtatttttcaaatataccagccattcgtacaatgaggagtggccctaatgtaggaacactgaagaagatgaggtcgttggttggatgtccaccgttggtgtacactttaccagaagagtaacgtagccatagatcgtgcgtgatgcgtgggacataagcaaaataaacaaaggctgtgcttatgtcttcaatatgccacgggaagaccgcaaggtagcctgagtgctgtgcagctggaataaagagatcgcgcctcacgttgtggacgtcgcgacgctggaccatctgacgcgggagcggcttgaacgcttgcaggagctcctgtttagcacatgcacaggacgcaaggaacaccggttcaacgtgagtagaaaagtgcttggcgcttacctggtacggtactactcgcagcttaaagcgctagttcctgcagtgccgatcatcatcctgcttagtatctgcgggcatctcgtcaactgcattgcttgagtggtctgtagctggcggctccacctgctcaagaccaagaacaaactcaagacaaggcgcacacgttgccgagaagatggccaccttttggctgtgattgatgggcttgtcgcctcgaacaaggtcatggctgcatcgtcgaggcggtactactaaataataagggtccacacgcaacaacggaagaaggacaactgcaagagccatcagatcaagaaccaaatcgcaagcacagaaaaaagctgcgaacctgtcggccacatggcttgcgtggtacaagaggataccacgcgtgtgggactcaaccgatagaagtcggagtgtcgccacgtggtcgcctccatgaagctctccctcgacgatggcttcgttgtgaatgtcacagcggaagaattcaagaaccaagtcctcaacaccggccgcgcggaaattggactgctggagtttctaaagctagcggcgtcaacgaagggagccgggagtatcctgtgtgcgctgcacccgctgcatattccggtatattggacgagcaaatcatggtctacaggcaccaactcgtcataggaagcaccgaagaccctgcacatatcgacgcgcaagacatgctcggcattgtaggttatgtgtgagaacggtgaagttaattcattccaatatatgtattcattcgacataacatcgctgcttaacaagacaacatattcatgtgtacacatccacgcgcgcaggtcacctaatcaaagcgtaggctgcacaccgcacgatcgcaccgcgctcactcacccaccacatgcacagatcctcagcaatactgcacggttcaaagcactgatcccgacccaatcttgatcataaacaccggccaaaacgtggctgttgacgaagctagtattgcgtgtcgttcgcaatacgctcgccatattatagtgttctatccccaaaaccagacagggaaatatcacttcaagctgtatgcttgttgctgctcgacatcatggtatgtcgtgagtttcaaattgcactgtgcaagtgaacaaatagaccgtttggacggcgtggttccaagtccagaggtattacagcttgttgatctgacagcgaagtcct

SEQ ID NO: 295 - DNA, 9137 bp, unidentified
  misc_feature 1..9137: note = Fanzor polypeptide
  source 1..9137: mol_type = other DNA
ctgcttcttcccttggttgcgcgcgtgctgttctcaatgccctcatcatcggcccaaattgaacgcgactttgggatggcaggcaggatggtgacccccaccgcagctcgatggcgccttacaacgtggacatggccacatttctgagctgcagcagaacttacgtgggtatcacccagtacccaaagttgtcgtcgagcacagcaaaggatcaagtaccgtcaaacgccatggtgagcatggagcgagagttggacgacgagttcggatcgttgatgaacaaaggcatcgagttgggactctccgacgacgaaaacgacggtattaccgaaatgtagcgggagcgggctggggcggacgaaaacgtgagagaacgggagcacgtgtggaagtggaaacgggctatagctgccgtggtagagtgctagccatgcatgtgcatgaaatgagtgtctttgcttttcatcaacacgttctgaccgttgttggtgttagcttcgctatgcagcttatgtaaatagtattttgttttcacctatgctttcgtgctggtcgtttgattactagcaactctgtaacacgcattgcagcgcgtacacggatcgcctcctgtgtttcaagctagattcgctcgatttgggatcgatctcgcagtattcgcgaccgtgggcacacaggcgggttgctggaccgggtggcagctgctgaaacccgcgtagttggtgtcctggctgccgctgcttcttttctgcggtttgctccagcggctcgtgataatgcggtggtggagcctcgcgtgcttgcagttgcttctgtagggcccatcgctgctcctgttgaggaagttggcgtcggcgcgaacgttgggacgatggccgtggacttgtcttgacttgatacagatattcacatcggtgttcttgaggacatcactgtattatgctggtcctgtggtacgaactcggagtgccatcagttcacggggttttgtctcggcagtcttcttggccaccacgatggctgggcgaaaccgttcgcctgggtggttgttagccctctcttgctcctgatcctgacgcacgcgaatcgcgatgtcgtgttgatctagcccgccgttgatcagctctactacgcgaacctctgtacgagcggttgttgcctcttgcactacttcaaatttgcaaatgtcgtggcgctcttacgcagcacgcttgtgctcctcctctaccaggttgtgttgcttgaccctggaagactgcaatgtgactcgcaaaacgcctggtgaggagatcaaaagagatcatctttgaccaataaaacgagatcttgtttgccaataaaaaaagcaatctgcagagcgagccaagttctcgccctagctcggttcgaatgaaaagtaagcgaaccaagcccccccccccctccggttcaggtaaaaaagaaaagaagggtgaaaccgtggttccagttcagttcgtcccaggggtgggaaattcacgaagtgtaggaaagtgtaatagacttgcgaggagagctgctggtctttctactcagtccacaaatggaaagttctgtccgtgcagctctctcaagtctaacctaaagctctacactgccagtcatactgtacaccactcgtacaattgcctctctcacattgatggtcgcacgctcttcaattgttttcgtgaacccagcagccgcagtcaacggcaattcgaagatgtcgttgggtacgccccgaggcttcactgctccagcaagttctcacttttcctttcgcaccgtcaagcgcagtcactggtctccaacctccatcgcctgttagtagcgttgtatcaagccctatgtcggggaagggtgcgccaggaaagcgcaagcgcaagtgacacccatttgatgacgggaagagcgatagaaatggcactgaaggcgcatgcccgaactcggagggcgatgatgacctcgatgaggatgacgtagattatgaggacgcccaaccagtaacgacacgtccaagcaagaggcctgacgtcgcggagcgcatgaagggcaacaagaataccagcctcgtatatgtgaagatgtcactaggttccttcttgacaggcgaggagaaactgttgctgtcattcgatggcattctcgtagacttgagcattggattgttaaatgcctacgcgctgctgaacatccacatgatacggtgtgtgacaaaggacttcccattcctcgatttgagcagaacttcgtttgccaatgcttgacagacgtaatgtttaacgacagcaacgtgcacatagacgctgaactacatatatcgttggagctatacaatttgttgagaggctctaacgcttctcacgggcgtcgcgctggtatcaagaacgggtggcaacaggcgcagctcgggagatgatgaccgctatccagcatgcactcaaaaatgagtttccttcgccggtttaataaggtgctgcgggtatggtgtagacagaagcactggtagcacacattattgccccagagtttgagcggactccacccgacattcctgatcgtcagcgcctcgacaacgtagtcaacgagtggcgtggagaagtccctcagcgtcggagtgagctggtcaacttcacggcccaccgactggtgcttctgacttatcgactcctgcaaatgattgaggagcgtaacgacagagttgagcaaagcgtttgcgctgtttaagtgacaggggcgtctgatttgaagttagactaatccaagctgaagttatgaagacgttcactgttctaccaacaaagcaaggatttggaattagtcacctcacgatagatttgattggtttccgggaactattagtccgcaacgacattgctgttcctccgtacagatcgaagtggaatgaggtgagatacatttattggagacggttcttccgtattgacaaagtggagactatagagtttggtcatctcagattcacacgagagatctcgacggacggcaagtcggtgaacatcaagattcggaagcccgaacgtgggccttccgagcccaatgcaaatgacctccaagctgccgacattggctctagatgggggttggatgcgagtaaatgcaacctcttggtcaccacaaaccaggacgacgaaacggttgtgtgctctggcaaagagtatcgcgaagacgcttacattacgaagagcagccagaagcaattgagatggatacgggatcgtccggacactggagctgcctttgcgagcatgccgacgaagaggagcatgttgctaaagcggtggcgggagtacgtcccatttatgacgcagcacctgcatctgctagtgacccccatgcagcacaaatcgtacagtcgccatcgacttcgaaggagcttctttaaaaagaagaacctatgtgagctctaccagaaacttgtatgtcacggagagcgaatttttatcgtcattgacaaccggagtaacggcgatccaaatggagcgatcaaagggaagccatcggcactcgtgcagaaattggcgctggagttgtcaaagacgtcgaactgtacggtcatcattattgccgagttccggatcagcaaagtgcactttggttaccaacaagaactgtccaagcaatacccgtatcgaaaggccgctgtccacgtacgcgcagtccacgaaagacgagccacgtacccagtttacggcttactccatttcagaaacaaaggttgttctggtatgagtgtgaacagggacgtgaatgcttcgaagaatatgctgcgcctgctcgattgtgaactcaacgagactcgcccagtcacctacacgcatcaagcaaacagatagataacaatacctttctagtgtcgctgtgtgcctatctaggggtgaggaagattacattgtgatagccggctcagaaattagcccttttggactctgtaggctacgtatctataggacacccttaggagaataatgggttaaacaaaggctcaatgaagcctggttgatttctgcatgaaatatttttcaaaacggtgatgtcctcctgtggatgaatatacttgtctttccgacagatagctcagcacgattgttgtctgctcgctttgcagaccattttgaccaattttaacacgtaaagccttaattgtgtccaattaaaatggttaaatgtaggtttgacattctgacaccttccgacaaatatgtgtctgaagtatttccaaaatatcaatatcttcatgcaaacaacaactgtaaaacgtatttttcaaatataccagccattcgtacaatgaggagtggccctaatgtaggaacactgaagaggatgaggtcgttggttggatgtccaccgttggtgtacactttaccagaagagtaacgtagccatggatcgtgcgtgatgcgtgggacataagcaaaataaacaaaggctgtgcttatgtcttcaatatgccacgggaagaccgcaaggtagcctgagtgctgtgcagctggaataaagagatcgcgcctcacgttgtggacgtcgcgacgctggaccatccgacgcgggagcggcttgaacgcttgcaggagctcctgtttagcacatgcacaggacgcaaggaacaccggttcaacgtgagtagaaaagtgcttggcgcttacctggtacggtactactcgcagcttaaagcgctagttcctgcagtgccgatcatcatcctgcttagtatctgcgggcatctcgtcaactgcattgcttgagtggtctgtagctggcggctccacctgctcaagaccaagaacaaactcaagacaaggcgcacacgttgccgagaagatggccaccttttggctgtgattgatgggcttatcgcctcgaacaaggtcatggctgcatcgtcgaggcggtactactaaataataagggtccacacgcaacaacggaagaaggacaactgcaagagccatcagatcaagaaccaaatcgcaagcacagaaaaaagctgcgaacctgtcggccacatggcttgcgtggtacaagaggataccacgcgtgtgggactcaaccgatagaagtcggagtgtcgccacgtggtcgcctccatgaagctctccctcgacgatggcttcgttgtgaatgtcacagcggaagaattcaagaaccaagtcctcaacaccggccgcgcggaaattggactgctggagtttctaaagctagcggcgtcaacgaagggagccgggagtatcctgcgtgcgctgcacccgctgcatattccggtatattggacgagcaaatcatggtctacaggcaccaactcgtcataggaagcaccgaagaccctgcacatatcgacgcgcaagacatgctcggcattgtaggtcatgtgtgagaacggtgaagttaattcattccaatatatgtattcattcgacataacatcgctgcttaacaagacaacatattcatgtgtacacatccacgcgcgcaggtcacctaatcaaagcgtaggctgcacaccgcacgatcgcaccgcgctcactcacccaccacatgcacagatcctcagcaatactgcacggttcaaagcactgatcccgacccaatcttgatcataaacaccggccaaaacgtggctgttgacgaagctagtattgcgtgtcgttcgcaatacgctcgccatattatagtgttctatccccaaaaccagacagggaaatatcacttcaagctgtatgcttgttgctgctcgacatcatggtatgtcgtgagtttcaaattgcactgtgcaagtgaacaaatagaccgtttggacggcgtggttccaagtccagaggtattacagcttgttgatctgacagcgaagtcctttgaaatttgttcccacgtaattgaagttgtggagtctttgaaaggatctaatcgcgttgtcaataccgataatatctacacctcctgcctgctactagaatcactaaggtcgattggcatgtatggtcgtggtacagtgctcacatccagcaaacacttcccccacttcacaatgatccgaaaagctgatggaaagcctagaggctacatgaaacaaggcgtgtgcttagagtaacatattgtagcggccagttggatagattgctctattgtgaatacagtctctaatgttgacgcctcctcttcctctacggtatatcgtcgcataaaggaggaacatgttgcgtttaacgtcccgacctgcctcggtgaatacaacgcggggatgcagggagtcaaccgtcatgatcagcttcgcggtcggatttcgcttgccgatggtcactcatttcagaagtggcataaaaaattagcaatggctatgattgatatcacgaggtgtagtgcgtatgcatgcgataacttggcacgtgatacaagcgagatggatgttgcacagcctcgcaataatgcaagggcaagcgcccgtgacggtcaccgggcgtttgtcattccacttgtgcgagaattattcaatggagattggaagaagtccattgacagtgatgacgtaattgtgtacacttcgaacacaaaacccatgaccactgctgccaatttgaccagaaatacgaatgagttagaaacgccagcacatacatgtgtagcaaaagagtcgtggcttgtgttacaaggaaggagtcgggcaatgcacaaatggactgtttgtaaattcgagggcagggatgacacccagaaaacggattactgcgagacacatcgagttgcactctacaagcgtacctatcctatcgaccacagaaacccgcacctgtgtcagcagcaaaattggacgtgctggcaaaagtatcatttgttctacttgccaaaacaggtctatacagttgacggaaatctgagaaggtcgtctccaatttgtaaagcccagtgttcgttcttgaaggagcgtcgagaccaggataatactgaagagatcagcaaccacgactatcattcggctcatatatagtactgaaggtaaaagtagacactcaatacattgtgtgcacttgaactacgactgaaaaccagccagttacttgtactcacagcatcctccctccttgtacattgaccagtgcaatgtgcgccgctttgttgcctttcgtctaattatagagcacatgcatggtgctgcatgttaccctcagcaccaatgtctcgatgctccctctctaggcggctccagcacctcgatgtcacgtagaattctgtcgccgggcccgtgatgtcgagatcgccttgcggtgaacccgaggcgttccacgggctgtcgctgtcgctagttcgcccctgcaacgggcgccgtctgaaattctgcgtccttgctgcctttcgccttgtagggctgcgccatcatctcgttctgtcggtgtctagcgtgtggctgctgcatcgggcgccgttgtgccgcacatgtgcatgatgtagcacaataatgtcgggataggagccaagcgttacgttcttgttggtgtcggcgcgagtaacttgagagacacaatagcatgagcgcgccgtgtctgatcaggatttagatcccacgctgtgattggcagtcaacgctgacattttcctagagaggcgcaaaaattgttgatcaaaagtcggtgccgtatcttaacttcactataggctagattagtctgctaccttcttttggaaaaatatcttcatgtatcattctggtatcgatagggttaaaccactagtgctacgcgaaggctggaataggatacagataatccgagctacactagtgacaataaagaaacgtaagtacaactctattgcaagcccacagcattcatctagagaacgagtgtagctctaacgtcatcgaagttcttggcgtcgaagtaagctttattgccttcgaactccgtgacacggcacgcttgcagagccactattttgtattggtgcctcgtggttacagcgtcaaccccccccccccccccccggagtgtgcagcacacctcgcttttggtgctatcaatcatcaaacaactgatctaatcgttctctggtctgtcgaccatcatcgccattgagtacctcatcgccaaatgcaaaacccttcgggtcggcaacacagcaatagtaatagaccaacgcgataggagggtgtcttgtaccagtgttgagcctttcccataaatcgaacctcctcatccgtaaaattaacacaggacagagcgcgaccttcaagctctccaagtctatcctgaataccccgttgtttttgcgcgcggcgggcgcgggccttgccgttcgttctcgaggtgctgctcccgttccagcaaactttcattggctctttgggtacggcgcttcttgctgcggtcttcagtgtcggccattgccttcccacgttgttattggtcgtcagccctctacaaaacaaactgttggataaagcctaaatcatacggcgccatgctcccccgactgcaccaatttgaatgcgctcccatcagtatagtcactacaaattatccatacaatcatgctctgtagtagcaaaatccccatctatgctgcccgagcgtcaagtacccaaatcgattcaccggtaaaactatcccgtcgcattaagatttttgaggcattttgctcgatggttcgcgaaagggttaacgcgccgaaggcgcatttcttgcagcctgtcggcgtcagtgccgacagcacaaactgcgtgtcgtggtcggtccaacggcactggtgaattccagttcaacgtgcttcgtgtcggcccactgcttcgtgcagctcggacagtgcgtgtgttgctgatgtccttgcagcatatgtgactcgcaatccgttcctcatcaacaagctcatcaacatggcttgtgcaccttgcagggcagagccgccgtctttctccgagctcaatccagaacattcaggccagtgccaagagagtcatcaacagggcggaaggagacgcagccagttcgcgcaactccagacgacgcagaagaaccccacgccacagcagcgttccaggtctcctgctatgagccgcatttgcctgccggcgccaacgttcgggctcagttgcgagcgctgaacgtacgactccttcgcgccat

SEQ ID NO: 296 - DNA, 11690 bp, unidentified
  source 1..11690: mol_type = other DNA
  misc_feature 1..11690: note = Fanzor polypeptide
cttgatcggcgccaacttcacggaggccgccaacaagatcaacgagacggagatcaggacgctgagtgacgccctgaaggccaactccacctgcggctacgacttgcgagtgatgacggaccgcacgtgacgaggaaacgcagcataatgcgggtcaagatgagaacgtgatacttgccctcatgctgtccacatcgtgcacacggacggatgctgagtctgtcggtgttgatgcactttcagtcgtcgaccgtaatcgcttccagtttttgagggacgcgaacatttttcttgagtcagggaagaagctggtgttttacctggtgcgtcttcgttatcgagctccgattctccggcagaacgaccagtcggaagtgaaacaattgatgcagagcatgatctggtattcgatcaccggcgcgaagatcgacggtggcaagttgcacgatgccgagtggaccaagaagctggatttcttgaatcctgccaacgaaacactgtcgcagctgtgggaaagtggagagagaagcaccagctcggagcacgaacgttttgcacttattggctggcctgcttccgccgacataatgaacgcagtcgcattgtttggagaagtgtcctgtgtgcctgtaattcttgcacagtgctacaacgctccgaatgcttctcagcgccgaacttgatgaaaatggatgccatttcgctcaaactctcaaaatcttcgagaagagcaatgcatctgttgagtttgtacccctttgccgggagctaggtgctgccatcgttgacttgggtgacactacactgatccaggcgtttttcaagaagtatgttgcccagctgaaagacaaggacagacagttatttctccaatggcttccagctctcgtgcgcgcatttggatgggcatacgttagtgctgccacactgaatgccatcgacgtgcaatcaactgaaattcgctcggatcgagctttggaactcgcaaacacactccatgacaacgatgctgcacttctagctctcgtagcgtttgcgctgaagaaagctcacgcacggtgctctggccacgccgatgcattcgtatcttcgggtaagatcatcacacttttaaagcttgcgctggcgtgtggaaaccctcaaatatttgccggtctatcaaccatactgaacaagatcgatggcaatcttctccacacagtgattaatgcgctctcgaaatacgtcaatgactcgagtttacctgaacaacgtgctacgctggcctcacttgcagcgagacgtcgtgaatggctattcgctgagatcgaagacacgaagcaaccactggacttgacgaagcgcgagatctaggcaatgctagccgacaacacaatcggctccgcgaagtacttttcaatcgtcgctgactttttgaaggtgtcaccgatgagcacgagattcctggggttaaggctctacctagtggacacatcgttcgagttcaagtcagtactcttggggactcgccatttcgcgcctcagtatgggggaccagatggcggaatacgcggaccactttaccggtggattggtgacgtcctgggggggggggggctttggtttgagtcgccataaccttttcggggctacaacagtgatgtcaaatggatgatgagggacggtctaaagttgtagcgggagtagtgcgtgccgcacttcatgcatgcggcaaccaatactgttttcggcatcgtcggtgacaacagctcgtccaagaacccagccatgaccgacatccttcggcgcatcatcaaaacgatgtacaaaacgcagcacgtcgaaggaaagggcactctattaagcgagttatgcagcgttatgaacccggagggtgtgcatccacgctagctcttaaacttccgcacgcatcgattcctgggactcacgcgcgtcgtccgacgcattcttctactctgggatccattggtgcaatggtacgaggagcgggccacaaaagcccgacgtgagaacgtgatgccgccggagtccttcccactagctcgggaaaagatggaatgctctcactgctggagccgatctcgaaactaaatcagattggacaggccgagtcggggggaccaatgcaacgtgcttcttggactctacaagctccgaatatccttgttggacatcaccacagccttgaaggactgaagacggagaatcggttcttccgaccggatgagctgtacgatctcgcatcgacaacccgttcgctacttcacaaagggtttcgtcgggttttcttccggcggtacaccgatcgtgataccatgaacgtctgctcctttgcctttgagatgcaactatttcttcaccccaacttcaagcatccatatggagcgctgataaaggtgttaccaaggtcaatatacaggcaggtgcctcccagcaggtagctgaccgacactacacgaagattcgacgcattatcattgacagcgtccgcagcatcatgacagcggctgacgccgagccgacgtcgactgatatcgttgccccaccgccagctactgggttatcagaggacttcgtggagctcttcacggagacagcgaacgaggtggcaccaccacatagactgcggtgcacgagcaacgcatcgacgatgagctcgaccgctggctgacaacgcctacttcgcttcaagcgattcaacccggtgcgtttgactcagttctgagcttctggaagcgccagcaagagctgggcaacttcctgcttcttcccttggttgcgcgcgtgctgttctcaatgccctcatcatcggcccaaattgaacgcgactttgggatggcaggcaggatggtgacccccaccgcagctcgatggcgccttacaacgtggacatggccacatttctgagctgcagcagaacttacgtgggtatcacccagtacccaaagttgtcgtcgagcacagcaaaggatcaagtaccgtcaaacgccatggtgagcatggagcgagagttggacgacgagttcggatcgttgatgaacaaaggcatcgagttgggactctccgacgacgaaaacgacggtattaccgaaatgtagcgggagcgggctggggcggacgaaaacgtgagagaacgggagcacgtgtggaagtggaaacgggctatagctgccgtggtagagttctagccatgcatgtgcacgaaatgagtgtctttacttttcatcaacacgttctgaccgtgtttggtgttagcttcgctatgcagcatatgtaaatagtatttcgctttcacctatgctttcgtgctggtcgtttgattactagcaactctgtaacacgcattgcagcgcgtacacggatcgcctcctgtgtttcaagctagattcgctcgatttgagatcgatctcgcagtattcgcgaccgtgggcacacaggcgggttgctggaccgggtggaagctgctgaaacccgcgtagttggtgtcctggctgccgctgcttcttttctgcggtttgctccagcggctcgtgataatgcggtggtggagcctcgcgtgcttgcagttgcttctgtagggcccatcgctgcacctgttgaggaagttggcgtcggcgcgaacgttgggacgatggccgtggacttgtctcgacttgatacagatattcacatcggtgttcttgaggacatcactgtattatgctggtcctgtggtacgaactcagagtgccatcagttcacggggttttgtctcggcagtcttcttgaccaccacgatggctgggcgaaaccgttcgcctgggtggttgttagccctctcttgctcctgatcctgacgcatgcgaatcgcgatgtcgtgttgatctagcccgccgttgatcagctctactacgcgaacctctgtacgagcggttgttgcctcttgcactacttcaaatttgcaaatgtcgtggcgctcttacgcagcacgcttgtgctcctcctctaccaggttgtgttgcttgaccctggaagactgcaatgtgacttgcaaaacgcctggtgaggagatcaaaagagatcatctttgaccaataaaacgagatcttgtttgccaataaaaaaagcaatttgcagagcgaaccaagttctcgccctagctcggttcgaatgaaaagtaagcgaaccaagcccccccccccccccccctccggttcaggtaaaaaagaaaagaaaagaagggtgaaaccgtggttccagttcagttcgtcccaggggtgggaaattcacgaagtgtaggaaagtgtaatagacttgcgaggagagctgctggtctttctactcagtccacaaatggaaagttctgtccgtgcagctctctcaagtctaacctaaagctctacactgccagtcatactgtacaccactcgtacaattgcctctctcacattgatggtcgcacgctcttcaattgttttcgtgaacccagcagccgcagtcaacggcaattcgaagatgtcgttgggtacgccccgaggcttcactgctccagcaagttctcacttttcctttcgcaccgtcaagcgcagtcactggtctccaacctccatcgcctgttagtagcgttgtatcaagccctatgtcggggaagggtgcgccaggaaagcgcaagcgcaagtgacacccatttgatgacgggaagagcgatagaaatggcactgaaggtgcatgcccgaactcggagggcgatgatgacctcgatgaggatgacgtagattatgaggacgcccaaccagtaacgacacgtccaagcaagaggcctgacgtcgcggagtgcatgaagggcaacaagaataccagcctcgtatatgtgaagatgtcactaggttccttcttgacaggcgaggagaaactgttgctgtcattcgatggcattctcgtagacttgagcattggattgttaaatgcctacgcgctgctgaacatccacatgatacggtgtgtgacaaaggacttcccattcctcgatttgagcagaacttcgtttgccaatgcttgacagacgtaatgtttaacgacagcaacgtgcacatagacgctgaactacatatatcgttggagctatacaatttgttgagaggctctaacgcttctcacgggcgtcgcgctggtatcaagaacgggtggcaacaggcgcagctcgggagatgatgaccgctatccagcatgcactcaaaaatgagtttccttcgccggtttaataaggtgctgcgggtatggtgtagacagaagcactggtagcacacattattgccccagagttcgagcggactccacccgacattcctgatcgtcagcgcctcgacaacgtagtcaacgagtggcgtggagaagtccctcagcgtcggagtgagctggtcaacttcacggcccaccgactggtgcttctgacttatcgactcctgcaaatgattgaggagcgtaacgacagagttgagcaaagcgtttgcgctgtttaagtgacaggggcgtctgattttgaagttagactaatccaagctgaagttatgaagacgttcactgttctaccaacaaagctaggatttggaattagtcacctcacgatagatttgattggtttccgggaactattagtccgcaacgacattgctgttcctccgtacagatcgaagtggaatgaggtgagatacatttattggagacggttcttccgtattgacaaagtggagactatagagtttggtcatcgcagattcacacgagagatctcggcggacggcaagtcggtgaacatcaagattcggaagcccgaacgtgggccttccgagcccaatgcaaatgacctccaagctgccgacattggctctagatgggggttggatgcgagtaaatgcaacctattggtcaccacaaaccaggacgacgaaacggttgtgtgctctggcaaagagtatcgcgaagacgcttacattacgaagagcagcaagaagcatttgagatggatacgggatcgtccgggcactggagctgcttttgcgagcatgccgacgaagaggagcatgttgctaaagcggtggcgggagtacgtcccatttatgacgcagcacctgcatctgctagtgacccccgtgcagcacaaatcgtaccgtcgccatcgacttcgaaggagcttctttaaaaagaagaagctatgtgagctctaccagaaacttgtatgtcacggagagcgaatttttatcgtcattgacaaccggagtaacggcgatccaaatggagcgatcaaagggaagccatcggcactcgtgcagaaattggcgctggagttgtcaaagacgtcgaactgtacggtcatcattattgccgagttccggatcagcaaagtgcactttggttaccaacaagaactgtccaagcaatacccgtatcgaaaggccgctgtccacgtacgcgcagtccacgaaagacgagccacgtacccagtttacggcttactccatttcagaaacaaaggttgttctggtatgagtgtgaacagggacgtgaatgcttcgaagaatatgctgcgcctgctcgattgtgaactcaactagactcgcccagtcacctacacgcatcaagcaaacagatagataacaatacatttctagtgtcgctgtgtgcctatctaggggtgaggaagattacattgtgatagccggctcagaaattagcccttttggactctgtaggctacgtacctataggacacccttaggagaataatgggttaaagaaaggctcaatgaagcctggttgatttctgcatgaaatatttttcaaaacggtgatgtcctcctgtggatgaatatacttgtctttccgacagatagctcagcacgattgttgtctgctcgctttgcaggccattttgaccaattttaacacgtaaagccttaattgtgtccaattaaaatggttaaatgtaggtttgacattctgacaccttccgacaaatatgtgtctgaagtatttccaaaatatcaatatcttcatgcaaacaacaactgtaaaacgtatttttcaaatataccagccattcgtacaatgaggagtggccctaatgtaggaacactgaagaagatgaggtcgttggttgggtgtccaccgttggtgtccactttaccagaagagtaacgtagccatggatcgtgcgtgatgcgtgggacataagcaaaataaacaaaggctgtgcttatgtcttcaatatgccacgggaagaccgcaaggtagcctgagtgctgtgcagctggaataaagagatcgcgcctcacgttgtggacgtcgcgacgctggaccatccgacgcgggagcggcttgaacgcttgcaggagctcctgtttagcacatgcacaggacgcaaggaacaccggttcaacgtgagtagaaaagtgcttggcgcttacctggtacggtactactcgcagcttaaagcgctagttcctgcagtgccgatcatcatcctgcttagtatctgcgggcatatcgtcaactgcattgcttgagtggtctgtagctggcggctccacctgctcaagaccaagaacaaactcaagacaaggcgcacacgttgccgagaagatggccaccttttggctgtgagtgatgggcttatcgcctcgaacaaggtcatggctgcatcgtcgaggcggtactactaaataataagggtccacacgcaacaacggaagaaggacaactgcaagagccatcagatcaagaaccaaatcccaagcacagaaaaaagctgcgaacctgtcggccacatggcttgcgtggtacaagaggataccacgcgtgtgggactcaaccgatagaagtcggagtgtcgccacgtggtcgcctccatgaagctctccctcgacgatagcttcgttgtgaatatcacagcggaagaattcaagaaccaagtcctcaacaccggccgcgcggaaattggactgctggagtttctaaagctagcggcgtcaacgaagggagccgggagtatcctgcgtgcgctgcacccgctgcatatgtccggtatattggacgagcaaatcatggtctacaggcaccaactcgtcataggaagcaccgaagaccctgcacatatcgacgcgcaagacatgctcggcattgtaggtcatgtgtgagaacggtgaagttaattcattccaatatatgtattcattcgacataacatcgctgcttaacaagacaacatattcatgtgtacacatccacgcgcgcaggtcacctaatcaaagcgtaggctgcacaccgcacgatcgcaccgcgctcactcacccaccacatgcacagatcctcagcaatactgcacggttcaaagcactgatcccgacccaatcttgatcataaataccggccaaaacgtggctgttgacgaagctagtattgcgtgtcgttcgcaatacgctcgccatattatagttttctatccccaaaaccagacagggaaatatcacttcaagctgtatgcttgttgctgctcgacatcatggtatgtcgtgagtttcaaattgcactgtgcaagtgaacaaatagaccgtttggacggcgtggttccaagtccagaggtattacagcttgttgatctgacagcgaagtcctttgaaatttgttcccacgtaattgaagttgtggagtctttgaaaggatctaatcgcgttgtcaataccgataatatctacacctcctgcctgctactagaatcactaaggtcgattggcatgtatggtcgtggtacagtgcgcacatccagcaaacacttcccccacttcacaatgatccgaaaagctgatggaaagcctagaggctacatgaaacaaggcgtgtgcttagagtaacatatcgtagcggccagttggatagatggctctattgtgaatacagtctctaatgttgacgcctcctcttcctctacggtatatcgtcgcataaaggaggaacgtgttgcgtttaaagccccgacctgcatcggtgaatacaacgcggggatgcagggagtcgaccatcatgatcagcttcgcggtcggttttcgctagccgatggtcactcatttcagaagtggcataaaaaattagcaatggctatgattgatatcacgagatgtaatgcgtatgtatgcgataacttggcacgtgatacaagcgagatggatgttgcacagcctcgcaataatgcaagggcaagcgcccgtgacggtcaccgggcgtttgtcattccacttgtgcgagaattattcaatggagattggaagaagtgcattgacagtgatgacgtaattgtgtacacttcgaacacaaaacccatgaccactgctgccaatttgaccagaaatacgaatgagttagaaacgccagcacatacatgtgtagcaaaagagtcgtagcttgtgttacaaggaaggagtcgggcaatgcacaaatggactgtatgtaagttcgagggcagggatgacacccagaaaacggattattgcgagacgcatcgagttgcactctgcaagcgtacctatcctactgaccacagaaaaccgcacttgtgtcagcagcaaaattggacgtgctggcaaaagtatcatttgttctacttgccaaaacaggtctatacagttgacggaaatctgagaaggtcgtctccaatttgtaaagcccagtgttcgttcttgaaggagcgtcgagaccaagataatactgaagagatcagcaaccacgactagcattcggctcatatatggtactgaaggtaaaagtaggcactcaatacattgtgtgcacttgaactacgactgaaaatcaaccagttacttggactcacgacatcctccctccttgtacattgaccagtgcaatgtgcgccgctttggtgcctttcgtctaattatagagctcatgcatggtgctgcatgttaccctcagcaccaatgtctcgatgctccctctctaggcggctccagaacctcgatgtcacgtagaattctgtcgccgggcccgtgatgtcgagatcgccttgcggtgaacccgaggcgttccacgagctgtcgctgtcgctagttcgcccctgcaacgggcgccgtctgaaattctgtgtccttgctgcctttcgccttgtagggttgcgccatcatctcgttctgtcggtgtctagcgtatggctgctgcatcgggcgccgttgtgccgcacatgtgcatgatgtagcacaataatgtcgggataggcgccaagcgttacgttcttgttggtgtcggcgcgagtaacttgagagacacaatagcatgggcgcgccgtgtctgatcaggatttagatcccacgttgtgattggcagtcaacgctgacattttcctagagaggcgcaaaaattgttgatcaaaagtcggtgccgtatcttaacttcactataggctagattagtctgctaccttcttttggaaaaatatcttcatgtatcattctggtatcgatagggttaaaccactagtgctacgcgaaggctggaataggatacagataatccgatctacactagtgacaataaagaaacgtaagtacgactctgttgcaagcccacagcattcatctagagaacgggtgtagctctaaagtcatcgaagttcttggcgtcgaagtaagctttattgccttcgaactccgtgacacggcacgcttgcagagccactgttttgtattggtgcctcgtggctacagcgtcaacaaatccccccccccggagtgtgcagcacacctcgcttttggtgctatcaatcatcaaacaactgatctaatcgttctctggtctgtcgaccatcatcgccattgagtacctcatcgccaaatgcaaaacccttcgggtcggcaacacagcaatagtaatagaccaacgcgataggagggtgtcttgtaccagtgttgagcctttcccataaatcgaacctcctcatccgtaaaattaacacaggacagagcgcgaccttcaagctctccaagtctatcctgaataccccgttgtttttgcgcgcggcgggcgcgggccttgccgttcgctctcgaggtgctgctcccgttcctgcaaactttcattggctctttgggtacggcgcttcttgctgcggtcttcagtgtcggccattgccttcccacgttgttattggtcgtcagccctctacaaaacaaactgttggataaagcctaaatcatacggcgccatgctcccccgactacaccaatttgaatgcgctcccattagtatagtcactacaaattatccatacaatcatgtagcaaaatccccatctatgctgcccgagtgtccagtacccaaatcgattcaccggtaaaactatcccgtcgcattgagatttttgaggcattttgctcgatggttcgcgaaagggttaacacgctgatggcgcatttcttgaagcctgtcggcggcagtaccgacagcacaaactgcgtgtcgtggtcggtccaacggcactggcgaattccagttcaacgtgcttcgtgtcggcccactgcttcgtgcagctcggacagtgcgtgtgttgctgatgtccttgcagcatatgtgactcgcaatccgttcctcatcaacaagctcatcaacatggcttgtgcacattgcagggcagagccgccgtctttccc

SEQ ID NO: 297 - DNA, 21005 bp, Chlamydomonas sp.
  source 1..21005: mol_type = other DNA
gtgtaaaggggacttagttccacttgtcactgaattttgtagtagatacaaggatacaatcaatgctgggaaaattttagtatcagttgacgaatgtgggtttagtgagcgtctcaagccacattatgggtattcccctgtaggaaaacctgttatcgttaaaactattggtgggtgggtacaccatagtttgttgatggcagttttttcagatggtaggaaggagttcgttgtaccgtacactccagaaagcggtttcattttagtattccgtcgagtgtaaagtgactccaaattaattactccaaatgtcgctgatgtgcgggggactctaccgtgagctagacaccaccgaccagtggtcgcgacaacattatgtcgcactccggtgtggccgtacacaatgagacgtttcatttaagtgttccgtcgagtgtagttgtacatgtctcattttcacatgcggtaagtgcaacccacgagtttgatttgttctctattttcaccgaatgaacaatcgcacgtgatcttcgcaacagtgcacgccctaaccatatcatcgtattcatcctctccccaaggatacaaggattgccgcatccacacgcccggtatgtcggacgcgactagcaagtcaccgttccgtatgtcccctccctgtacacacactagcacccccccttgccagcagagttcacactgacccgccctagtagagagtcttttccaggcaggcgcgcgatcacggtgcccacctgaaattccctccctccgtcgttcgtatgcactgtactcacaacgccgaagacgcgcgggtcccgagcgcgacaacaaagcgtcaccaatggcagagcctcgtccacgtcgaggaggtcctcgcacccgtcgaggtcgcagtacgcgccggtggccaccaccacagcgccaggccgcaaagcaagaagatcctccccctccgccacccggcaccgatgctagcctgtgaagttaagcactccggggctgaaggaccccgttagacgcgtggacaccccatcttctgacaggaagaccaagtctttggaggcgacatcaccaaagacagcccacgacgaggggcccgggaacgagagcgctccgcctagacgcgttaggtccgcattaagttcgagcgtgtacttgttactctgggctgctcggtatccgcacacgcggttcatgacgttgatctctccctcgctggcagtctgtgcacctgcaccgatcgcgagggagagagcacctcccgccgtcgcgccggcgccgatggccactccccctttggcacctacactcgatgcggagcctatcgccacggcatcctcgacgttccccgcgccaacgtctgcggcgcatcccacgagagtattcgccctgccggagacaattgtcgcgccagcgagagctcccacgaccgtcgtcgcgccaccgcccaccagcgaggtcgccgacgagtacccgatgacgcagttgtaagaggaggctaggcgtaaggaggactcgccccctacgaccacattgtatgagcccgtgcgtgaatacaacgccacctggtaccccaagaaggagttcatgatgcctacggattgtggcgctgcgttgtaaccgaccgacagagactgattctgagtcgtcgcgatccccccccccttcgattggtcctcgcccgtgagattcgcgttaccggaagaagatatagacatttattggaaaccactataatgattatgcagaatttgtcatactcggccatacgattttgttaaattctgcaagcacgtgtaccattttattaacactagcttgaatttgtttggtgtctcccccatcattgatgatgtatgtgttgacgcgcccgataatgtaatggactaacaattctgccatgttgtcagaacacaacgattggtaatcgaccttgatgaatttttcatcattcaatatcaattcgaggccattatcggtaaatgtgactgtaaaaaccttgccgtatgtttctgcgattttttttagatgttgttccataagtttcttcaagtagtcggacacgcaatgaggatgtgtttgcgcagccatgttttattacacatctgtcatacattttagaccaattttaattgggtgtacgcgcaaagtacactcgacggaacacttaaatgattgacctacattcggcggaacagtacaatgaaacatgtatcagatggaaataaatgtacaacatcgccgttagaaatttggcgttaagaatggtcactgacttgggatttcgtacatggtgtccaaaacttatttgagaaaaactgtattcatgagcttcagcgcctccacggcctcggcctcgaggtaggaaatcgggtacttcgtgacgcactgtgcatggttggtcatcctcttcggattggttgagggcgccgccttcttgggaagaatcttctccggatgtgtttgagcccctaagccaggatgcggtgtttcgatgaatctgaagacgcccatgtagattggtttgttccctgcacaaaatatggtttgccacatcatggacgcgacgttgctgtacatgctcatccggacgagcaccacttcgaagtcgccggtgattagcatgttgtacacatgcgggtcgcatatgtggttcgggacgaagaccgtgtactccttgccccccttgatgatgtacacactcaacgcgtggatgccttgctggctgtagatggagaggatcgatctcgtggcgaaaagtatgtcgttcacgtaaggattcattgatgcaatttacaattctcacttgagaatatccatcatttatacaagttttgtgtgtttgcatgaattgaatcacccaaatagtgacacgcctggcaccgggtcgccgtagtagttggaagggtgcgccgcaattacaaacatacgttgttgcaccccccccttgctgattgtattgttgctgtacacgtgtctgacgatctcaaggtctccgctatcggctatctcaaaaccgtaagagactgtaacgttgttgttgctgaacccgcgctcgatatgaaaccctcctcctcctacacgccaccgagaaggtcgcgtaacaccgtcgccgtccgtgtactgctgaatccaacgcaaagaccgctccgattgattgccgctacttgacccgacgactatccctgcaccgctaatgtcgttatctacgtatgcaggtactgtagggtccagaggatgcgcgagcttgatgagcttgtcttgaacgactagctcgacggaggtgatggtctctataccgccccgcacgtagacgttcccattcacggtgatgctgttcgatccgaccgtaataacgtccggcgtcccgaaggcgccgatggagacggtagacgagagcgactggatctccaggttggagtcgctcacgaaacgcatcttcccttccgcgatggcgcccacgagcgggtctttgttgtcatgtgtctgctggtttgggagcgatcccatgaggaggtaggatgccgctgggtcctcaggcatggttgtggtggcactgtcgcggaagaaccagagggagctgcgcgccactagggacatgttttataaaggttctcgcaaatattccgagtagcctctttggtaaacagttcaacccccaacgttgcccaaaagcaacgatctgcagttttttcgagtataaaaggtgtgtctgtcccccaacataagagtctgattatgtccaacaacatccagaatctcgctgataacggagtatttgtcgtcaaacccgattggataacagaaacaatcagggaccaattgcgcgaagagtttatccagacttgccgcgagtttccagagtttgaaaaacccaaggatgacgtgcacgttctgggtggattttcggcactcggtaatccggcgtcgtttcacaacccgtttgtgaggaaactaagagaatctgttatgtggacagtcgcaacgattctgaaaccactcgccaatggaagaaatctggagcagattatggacaggatgatgttcagaacccgagggaaggttgtcgcaagcgaaagttggcacagggacgaagctcctgaagccgccgatgaagatgacgtttttggagggtggatcaatctcgacgatacggatcaccatttttcgtgcatcccaggatctcacaagggcgtttcaaagcattcggggtttggaaaagagaaagtggtggacagtgctaacaagcagaagatccgggtcccaccaggccacatcattatatttttcgagcggattctacacgaagtgaacaggtcaaatgttccgccaaaagggatcgttcgtttgtttctgggttggcgtctcaccaatagcacgcggagtctctacgatttgaaggacattttcatgaaccaagctgttccaaaactgaagtcggatcagacgcccgcgatgtattcgatttatcacagaaatgtgtgggtcgacgcactcgagagtttttcggcaaccttcaaagagaattgtatcgtcaaagacaatctcaaaggcagagacgtcaaaatcgtcccgatgcacatgaagtcgctgagaagcattggcgtccccatgtacaaagagtacacgtcaagagagtgtctcttatacgttccgggaaagcgatgggatttggaagttccgtgctcagagacttctagggtcgataccctcgggttttaatcatcgttgacgcgccggtacatgaccgtcttgcttacgatgagtgagtgcaaccatgttgcaaagtcgggcctcacagcagctgcatcgttgagatgttctgaactcatcgacgtcctccatgataacgttttcgcggctacgaagctcgaaacgaatagcttggagagggccacaagtccgcctagagattggtgtcgcccccagacctttccaatcaccaaacccgatgggcaagaagaattggcgcggcacccatgtagaatctggcgtacgccccaatctgttgtcttgagacaacggacctgtatctggtttcaggggatatcattcaaattatactgtatacttgcgaatgtaagccacatgacagtgtacagtcgacggaatactaaaatgaaaccgcctcgtgtacggcacaccttacggtgtaacctaatggtgtagcaacccacggggcagtggaacaccaatacgattttgaatcaacaaattgcaggatgttaacgagaatatcatggttcttttttagatcacggctctccatcctgcagactccgtatcgttcttttgtcggtactttcgagagtgtccattgaaggaccagccgcacttaagcgatcgcctcttccccagtaccgtggcccaaaagaacacggggtctttgttgatgtgcaatgcgtcatgtaaggaggtttctttgctggacgggtcattttataggaccatccactcatacaatatatgattgtcaccgccttataccgtttttttgatgtttcattttagtattccgtcgagtgtagtagataaacacagattgaaataaatgtcaactcaatgcacaaccaaccgcaagaggcgttgtcaactcaatgcacaaccaacctcaagaggcgttgttgcatttttcaaaagtactcaaaatttacgattatcaaccaaaacattgttgcagatgtaatactttggtgtgaatcgaaaagaatgtgaatttgtaagcaaactttttgagacgaacaaggatttgttgaaattgtttttattgtttttacacaaccgtcaacattgtgagcgcattgattcttcagacatgcacgcccatgaaatgattggagagcacagctcggaagagcatgcggtagtccgggactgcagagacgatcatgaaaatgaacaataacatgtccgcgaaggcccgtatcccccggatgcccacgtcgcggtagcggagacttctgtttctctgcaaagacgacgctaccatgataccgacagttgcggatagaaggacggatagggcatagtcgtatacgagcagcttcacgagcgtcgtgctgaacacgttcacaaaggttccggttttctcgatactggtaacgtagttggagaagacaacgaggagaatgataaagcaacttgtcaacacgacgtttatcacgaccgcaatgatcacgaggtattgcaggtctggtggggttttgtttgactcgatgagcgcgtcgtctaggtacatttttttgacgaactgcatttggaatatcctctccgcgatgtacacggatatccatatgatcatgagttgcaacaatttgaaaagggatagtataatcacgctagatttgtccattgtctcttctttacgtagagtgtaagtgtatttactctggttgtacacttgttttcaaaaataaaatgaatattatttaagaaaactattcaatgtcaggcattcgtggtgaagacattgacgacgaacatgggcaacacaacattcctccaagcgtatggggccccccattatggaaatctatacactacgttgccctggggtacccagcaaacccacgcctgaggagagacgggtctgcaaaacgttcttcgaccagatcttggaacacttgatcccgtgccacgtgtgcagagagaactaccacaggcatcttgtagagctccgaggtgcgtggagtgacgaaaaaaggttctcttcccctgatggtttgtttgattggacggtcgcgctgcacaaccttgtgaaccgagacaccagtaaacccattcagaattctgctgagatgcgtcgccatctcattcatgcgggcgctaactcatgtcctccgaaccaacgccgtcgttcaggcggaaacaatgattattacaacaacaacaacaacaacaacaacaaccattggttggccatatttgctttcttgaccggcgttggcgtcgccatttccgttatgttgttaatattgagatctcagagaatcaggtttccgggagtcacgagaacacgaggtcgatgagcgtgaacatgaacatgctccctatcgccaccgccacggttacaatgcctagagaaagcggtgttgcggcttgattgttatgcgaaagacctgacggagaaagaccaaatggcgtaatagatccgtgtacgtcaaatagtggtagtggtttcactatgaatatgaggatcatggccaacatgaagaagactgacgcatagataacgcgtgctggcatgatcggtggcattgtaggtagtgcttgttggagagacattgatattttttcttattgaccttttttacatttttttcaagcaaaaataaatggtaacggtttttttgtgatgccaattaaaagatgttgttgagggagcaccccgaataccagtctctacggggtctgaagaccggccatagccgtttgatattttccacgttcggagacatcgatttagacagcccttgccttactggattcaatgtgagcggcggctcgaaagcggaggcaaacatcaccggattcatgcgcaggtgctcgcacttcattttcgacaacttctcaaacaagcagtacccggacttcctcagcggttccttaaacttaagaatgacaaaggttccgcgccccaaccatgtgaggcagatgttattcgggatgctcatccagcataacatgatggcgatgcacaagaaggcgtacgcgggcgtcctgggaatagacaagcggaagctctctggaacagacatcctgaagaggtacttcgcgttggtgggtggctctgcgttcatacaggtggcgaggatgggcgagtacaagactttgaacaagaacattgtgttgaaatgtaagaacgggagcttccggtacgtgtacgagttgctgtcggacaacacgcagctcatagacgcgttggtacaggacaagtatctggagaatctcttgggcatccagaacgtgtactccatggccatttacagattggtcatgcggcggcttctagacccctcaggaactgacaagtgcattagggacttcatcgatacggtcgccctctcgggcgtgtattatatagacgagaccgtgtacaacaacgttgtggccgagccgttcgatccctcaaaccagatgcacagcttcctgataatgaacgaactggtcacgggggggcattattttgaccactgtcgaggtaacttctcgaacttttatgaaagttacagcgccatgtactacctaagcgcgcttgcctctaacggggtccttccggcaaccatcagggcgctgaagaagcgtatggaggcagtcacgatccacgcgatcgccgtgtctctcgactttacaggggacacggcgggcgttgaatgcgcaaaagttaagacgacttaccaaaaggcgcggtccgtcaggatttatgaggacaccaaggaacgcatccagctcctgaccaacttcgactcgatcttccgcctcttcttcgggcatgtgtacgacgggctcgctgtcctcgaggtgaagctaacgactccgttgaacccggtgttgaaggcgtaccaaaacaagaccatccggtacgacatcatcaaagacttgggaataaaaaacagttacactcagaccggtcaataatgttacagtatattgaatcaattccaattctctatgtacaacttggacagacggtcgattgttgtacacatgtacacattgctgcaaagtttgaggagagtggctatacttgcgaatgtaagccacatgacagtctcgaggtggatctcaaaccccactaaaaaagtgtacaaacggaataaacctacaaaatcggatgtggtcatagagttcttaaaggcgtcattaaaaatagatccattcgcatctcttgctggtcttcgtcatacagctagggacatttgatattgggacaccttatattttggggattctgaaaagttgaccaattcaagatttgtaaccgatcttgtcaatacagatactgtcttcaggtgattgacacaaaaaattcaaggcatctaaagacactgaatttacatgttcaaagtaccctgaaaagtcaaactgatggctaacatcgtgcgcatcaataatccttttcaaagcgttactgtaatcaaatatatctgctacatctggaattgttgggcacatgcagcgatattttcgcttgagcaaactaaagacattctcaatagcgttaaactctggactgtaaggaggtacaaagagtggtcgtattcctacagaatcgaacatagaaatcgtctcctttgaatgatggaactggatattgtcaaggacagcgactgtaccccgctgtacatgtaactcagatacaaactgtacaaagtcgactttcttgcaattgtgatcaaggatcttgtaatgaacgatacctttagcagaaacagcagcaattagtgtcaatttggacattcgcaatgtcctagaaatttggatatttaaacgtttgccgcgttgacagtaccctctgcgacaagtgtcaccaatgtaaaaacccgcctcatcgatgcttaacaaatccgatgtcggaacggctaaatactccttccaaaaacggtcgacagaagatttgtggtcagtcttgtgccgaactgttttgtatgcgcgcttgcgggtgtaaccaagtttgcgtgtgtagcgtccacaagtttttggagacatcttgacagaggacagagaagtcacaccctctgcaagctgagacattgtcaagatgggattggagtcaatcagttgttttatagcagccttgatatcttctgtaatgacactcacccttttcttccgatgatgttttatattggctttggtgacccaatgttggagtgatgattttgatactttgtacagcaaactaactttcctcaaactacgattatagtatttgtagtgaacaaccgcgcggtttctaatctctgcatcaatcatgataacgtaggaaatggtataaggaaatgtgggtgcaatattatatcaccagaagaaaaagaatactcaccccctcttaatgggggtagtgcaagacaaaggagatgacgatattaacatcagcgtcgtcaagaagacgcttaattctctgtgcatggatgtatcgaggcatcagatctcctcaaggatacaaagcatggtactcttaatcaaccacgcagttgcagaggcatacttattcgcaaactttcatatcacaagatgcctcgatgatggagactttgacgtcaagcagttgccacacctggatcggaacttttattacaggtgcctccttgcggtatcgacctccaatgttcgaaaggatactctgggccagagcttcaatgataccatggtttctttcgacgccctaagacctgcaggatacgtgaaggtggacgttcgtccttggggacaagtaatcgcagacgtctcaatacaaatggcgacgatggcgtgcaacagcgtctgggcaaacgtggacagggtcgttatcaagtacctgcgacatccctctctgaagaaacatttcaagaagattgtcaaagcggtggtccagtacccagaatcgaaaatcgacacaatcatcccagagggcctcgtgcatgcgatccacatcaaagaggttgtcagtcacttgagggctctctttccgctgccaagagggaagcagttcaacactagagcgcacctgacaatgcgattgttccatcacgtgcttacagagttgggagaggtcggacgagtggatccgaaagataaaaaaacaagaaaaagtcacccccgtctgttcagtatccttcctcgcaagaacggcttcacaatttcgtacgtcccgatatcttccatgcctttcatgaagcttctcagcatgggtgattcgccactcgagagcgtctctggcgatggacgttacgagaaccatacaatgctgtggcgaaagtactttaatgtccaaggtcttgagacgaaaagggtttcgctttgacaaccgaatcctcagcgacggtaaaggggtatccgtccaaatgaagcagaagggtaaagaagaggtcgttgaagaaggagaaaacgcaggctatccaaaggacgcaaatatcgtagagtgcaaggacgcagtgggtgcgctgcgtgtcggagtagaccctggaatgacagatatcgtcacggtagcatcttctgcaggtcgcatcgagtctttcagctcggctcgctttagcaaagttgctgggtacaatacaagcaagcgtcgcacctacaaatggaatgacgagactcaagacctcgtgaagtccattccatcgcctaatacgagcaacatgtccgacctgcaggaccatgtcagagcttatctcaaagcgctcccgatcctcctacaacacagagccaacaaaggctaccgatctatgcgattctttcgatacgttggtaaacagaagacgattgaaaaggtatgcgatgtgattgcaccaagggcacagacgaccgttgttggcttcggcaactggtccaaccaagggtatggtatcagtcgttcatgttctgggcccatcaaagagatcaggaggtgcctctcacgtcgtaagaatgttttgttcaaaaacgtcgacgaacgcaacacttcttgtaaatgtcacggctgcttccagaggcttgtcaacatgaaggcagacagcgtagtctggcgcggagtttgcaaagagtccccaatcgacgggtctataactgttgagaagcagaagatggtggtgaagaacgtcaaggtccacaaagtactgcactgtagagacagtgtcaaaagcgcatcatccaatgtgcgctgtggtgcaacctggaaccgagacgtgaacgctgccaagaaccttcttctgcttctgacaacgtagatggacgggagagagcgacctgaggcattctgtgttccctcgcctccccccaaaaccacagtttccatcgaggcgagtgtgagcgctaaaccgaccgacccacctgggtttgtcagcagcttgccttgttatcctttgggccagcttaaatgctgaaatacagagatgaacggcaaaaatatgtactcgcctttagctgatctacccattgggttcaagggtcaccggtagggtgtcccacaaattgcgtctccgactgtaaggtaaaggatgctttcggatttgaggtatcaaaagagttgagagcggggtcttcaaatctagagggccgaccaagaagtggttgtctaacatccaggactgccttgaggacctgaaggacaacagtccaaagcgcacatctctagtgtcgtatgacgcttacgtgactgtaatggtcaaccattgggattctcgatggggggagatgtccaagtcgcgatggggcgcgcagcgcctgcgtctctacggtggcaagaaacgtgtcttatcacgcttcttcaacgaggtccaggcggatgtcggtgagaggaaaacaattgtcgtcgcatacggttctgctaagtttgcccctggtggcaagggtgaactttctgtccctacaacgagcgcgttcaaggcgtttagcgaccgtttcaaggggcgagttgccgtcattgacgaattccgtaccacaaagatctggcacaaggacagcaccaccgtcctccagagtgtgcagtccgaaaaagaagggcgcgcggttcgaggcttgctatggtgcagttccaccatggagaacagcaagttgtttgtaaaccgtgacctaaatgcagccattaacatccacaattgctttacaatgtacccaatccgccccggaattcttgcgaggccaaagaaatattgcaaactggaagttgtggtaggacgcaaaattgattacaagctgacaggttctttacagaacgcagtgtcgagctaagtgtagaagataaacacatacaagaggattttgggggactcgggatattatgtaacataattcccttgtccgagtgtagatacacggtacaatcgatacctcgaggccacagaggacgagggctacgccaagctggtcaacatcgctcccatcccaacagtcaagcacgccttcatcacgatagacaccgacggcctaatgggcgtcctcaaggacgtgggtctcatccagagtctcgaaaagacgctgacgaacaaggagcactgggagtcggtcttcgatgtggaaaacatccgttctactgggaaaggtgtgtttacatgcaccatacagctatggacatttgatattgggacaccttatattttggggattctgaaaagttgaccaattgacaagatcggttacaaatcttgaattggtaaacttttcagaatccccaaaatataaggtgtcccaatatacagatactgtcttcaggtgattgacacaaaaaattcaaggcatctaaagacactgaatttacatgttcaaagtaccctgaaaagtcaaactgatggctaacatcgtgcgcatcaataatccttttcaaagcgttactgtaatcaaatatatctgctacatctggaattattgggcacatgcagcgatattttcgcttgagcaaactaaagacattctcaatagcgttaaactctggactgtaaggaggtacaaagagtggtcgtattcctacagaatcgaacatagaaatcgtctcctttgaatgatggaactggatattgtcaaggacagcgactgtaccccgctgtacatgtaactcagatacaaactgtacaaagtcgactttcttgcaattgtgatcaaggatcttgtaatgaacgatacctttagcagaaaacgcagcaattagtgtcaatttggacattcgcaatgtcctagaaatttggatatttaaacgtttgccgcgttgacagtaccctctgcgacaagtgtcaccaatgtaaaaacccgcctcatcgatgcttaacaaatccgatgtcggaacggctaaatactccttccaaaaacggtcgacagaagatttgtggccagtcttgtgccgaactgttttgtatgcgcgcttgcgggtgtaaccaagtttgcgtgtgtagcgtccacaagtttttggagacatcttgacagaggacagagaagtcacaccctctgcaagctgagacattgtcaagatgggattggagtcaatcagttgttttatagcagccttgatatcttctgtaatgacactcacccttttcttccgatgatgttttatattggctttggtgacccaacgttggagtgatgattttgatactttgtacagcaaactaactttcctcaaactacgattatagtatttgtagtgaacaaccgcgcggtttctaatctctgcatcaatcatgataacgtaggaaatggtataaggaaatgtgggtgcaatattatatcaccagaagaaaaagaatactcaccccctcttaatggggtagtgcaagacaaaggagatgacgatattaacatcagcgtcgtcaagaagacgcttaattctctgtgcatggatgtatcgaggcatcagatctcctcaaggatacaaagcatggtactcttaatcaaccacgcagttgcaggcatacctagtgttctcgcaacatttcactattttatttttcgcaaacttttaatcacaacgatgccttcgatgatggagaactttgaccgaatcaagcagtttgccacaaccctgtatcggaacttttaattacaggtgcctcccttgcggtatccgatcgaaactcgtccaatgttcgcaaggatactctgggtcccagagcacttttgcaatgataacattgtttgctttcccgaccccctaagaccctgctccaagaatacgtgaaggttggacttcgtcctttggggagaacaagtaatccaaactgcgcaagacgtctcaatacaaattggcgacgatgcgtgcaacagagcttctgggcccaaacttggacagggtcgtttcaagtaccctgtaccccatgcgctgaacacatttcccctctctggaagaaacatttcaatagagattgtcaagcgtggtcccagtaccccataatcgaaaatcgacaacgactcccgccacggccacaagtcctcacccggttgttcctcgtgcatgcatgcgatccaacattcaaagaggtttgtcagttcactttgaggacatgagtgcactcttcttttttttttttccttttactatccgctgccaagaggaagcagttcaacactatagcgcacctgaacaatgcgattgtttccatcaacggtgcttacagcgtttgggagaggtcggacgagtttatctatccgaaagattaaaaaacaagacacaaaatcacccccgtcctgttcattatccttccctcccatgaaacgcctttttacaattttcgtacgtccgatatctttccatgccctttctccctgaaaagcttttcttcagcatgggtttcatcgccacttccgagagcgttctctgggatggaacgttaacgagaaccataacaatgctggtggcgaaagtacttttaattttaatattccaaggtcttggaacaaaaaggttctctcattttgggaacaaaccgatccctcagcgacggtaaagggtatcgtgtccaaatgaagcagaagggtacagaaagaggtcgtttttgaagaaggaataaaacgcaggctatagctaaatccaaggaccgcaaatatcgtaagtgcaggacgcagtgggtgccgctgcgttgtccggagtagacctgggaaatgacagaaataaaaaatcggtcccaaaaaatcgtcaaacacggtagcaatctacacaatctgttttcttcttgcaggtcgcattcgagttctttccagtcttatttagctcggctcgctttagaattaagcgaagttggcctgggtacaatacagccaaaaaagcgtcgcaccttagcaaattggaatgaccgtagaaacactccaagaaccacctccgtgaagaagtccattccatcgcctaatagagcaaaaaccatgtgccgacccccacccccctgcaggaccatgtcagagcttttatctcaaagcgctccctccccccagcgctcttactccaaccgtatccacttcctcgctgccaacacaagatccaacagccgaacaattctactcatacctccataacattttaaccgaatctcactaaaaaaaatctaattgcaatttcttttcgtataataaaaaacataaaaactccccccccgtttggttcccccccgccgccgccgtacccgcttcccccgccgccggctgaggtctttcgctgactgtgttatttttcttctggcctgtccctggaatgtgaaaaggtattatggatgcgcatgttgattgcaaaaaaccaaggagaagcaagggcacagacgaggagagagcacggagagaaccgtgttggctttcggcacctggtccaccacaggtaaatggtatcaagtccgtttcatgttctgctggtgctggttgtttctgggcccatcaaagagatcagggagggtgcactctcaccgttcgtatagaagaatgttttttgttttcaaaacaaggagtcccgacgaacgcaaacaattcttgtaaaaatgtcgtccccaaaatgtcacgggtcatccaacggcttgccttcccagaagctttgttcaaccattaagtcgacacagaagcgtagtcccctggccgtcggagtggagttgcaaagattccccaaattcgacgggtcctatactgtttgacagaataagccaaagattggtggtgaagaacgtcaggttccaaaattactttactactactgccactgtagagaacagtgtcaaacagcgcatcatccaagtgcgctgctggtgcaaaaggttggtgcaaccggcaaaacaaacctggaaaaccgatacgtgaacgaacagcttccaatcagaggagaaaccttcttctgcttctgacacacccccacgtgggatggacgggaaagagcgactgaggcattcctgattccgtgttccctcgtcgctcgcctccccccccccaaaacacaacagtttttcccatccgaggcggtggtgatgagcgtaaaaaaaaaaataaaaaccaaaatgagcgctaaaaattaaaaattaagcgctaaaaaaaaaaaaactaaacaaccaaaaaaaacaaaaaaacccgaccgggcctaaaaaccctcccacccccaccccccctttcccccccccccctcccccgcccccttcgttcccccccctcccgccccgacattccctcccccacccccccaatcccccccctcccatcccccaacctgggtttggtcaaccatgagcttgccccttgttatcatatccttttttttttgggccagcttaaaaaaaaatgctggtaataatacagagaaacgcaaaaaaatatgtactacttactctactgcactaatatgttctttaatgcgtaactgtacttttttatgtgttactatgtacttaactgtacgttacttaaacattgtaactaatatgtacttactttttctatcaactattactccttttcttacttctttcgttatgtctatcaatgtactatacttcactttcattacttcttactctctgccgtcggcacctttttaggctgatctcccccattgggttcaagggcaccggtagggtgttcccacccccccccacccccccccccccccccccccccccccccccccccccccccccccccccccccccccccccccccccccccccccccccccccccccaccccccccccccccccccccccccccccccccccccccccccccccccccccccccccccccccccccccccccccccccccaccacccccccccccccccacccccccaccccaaccccaaaaaataaaaaaacaaaaacaaaattgtcttgcgtcctcccgactgtatctaggacaacttggttctaattaaatgtttcttttcctgtttccctaaagttttttttcaagtaaatgttaggccattacaagcaaacatttattaaagaataagaaataactatccaatcacgtcatcaacaaaaaaaaaaaaacaatgactaaatgactttctaatcttcgatgtttataaaacaaatgtatctaaattatagcgttgcccaaaaaccccgaacttgtgaaaaataagacgcatatattaatctgtaatcgatataaatggtctcgttttccaaaaaataccagtatttgggaatcgagattattgatgttttaacgataattatagtcgttgggataatcagaaattttaaaacgccgataattatagttgttgggataatcaagaaattttaaaaacactaacttaatattttttaccttttgcgcaccatgttcgtttgttgtgtaaggactacaacccacgccgaagaacctgaaaaagtttgcccacacccctcacaaacatgtccctcgttgccacatgagaacttcctggcagaacatgggaagattcccatattcgcgccccaatacgtcgtcgtccatctccctgccacacgtcggttaggttttcgagaacagagctctcgcaaactcatcatctgcccttcgacgtaagatttgagtgcccgcctgcgaggtggatggtagttaacgcacgtaacatacttgttcacaaaatttaatcgaataattaaatacgaccgacaagtgcttcctctaacaacaatttgccgatatctttttgcaacaacttttggcaaacaagaaacacaccacctttgggtcgtttttttgaagaatttttgttttgcgaatcacttcctcaaacgtcccctgaaataccactcttgaaactaaaccactcgtgggggggaatgaatctttggttttgtggtttcaatattattgcgccaaaccgtcatgaaaacatgaaggaacttcctttgaagccataataccaaatcctcatcccttgcaatcagtgaattcctgcaaataatcggtattgatacgcactcctccccgccccggccaatcatcaccatcacatacacgagtttttgggggagaaggtacagtgaccccgttgtcaggatggttctctgatcgacaaatcacgaacacaataaatcagtcccccccctctgacactctctaccccatatcgtttattctctctccttctcttttcgcaccccataaaaatctcctaccctcccacctcctccttctaacgtccgaacagtgctgtgacaacaccacctttattatatattctttttacctcccacccgcatgaaagtatgaaggaacccgcgaacggcaccatataatatcacacgtgtggggaaagatttagacaaatatgtctcgcccaaccaagcccccctaacgtatgaccccactcctccgtctaaggaaaaacatccgcaatacgtcctcgcctacagctccccgggcccactttcgaggggacgcaggatatcctctcctttcgatgaatccgctaagcactggcatatcctccctcaacgcctttttgtgtgtcgtccaagtcctattcgcagcaagccatcattttttattcgatttcccccggtcacgcaagaccagaagatttatccctctacatttcgcaaacttgcacgctttttcttttttttctttttccgcgcatccctctgccaattccctgccacggcaacatggcgcaatctccaacgacacactggatattcagaaaccgctccccctctgcacagcaaccacagaaatctcttcgtgttcttctcaagagcatctgcgaaccttgcccttttttttcaagctggaagatccatcatcatcggctaacctttggcccttttcaagcctgaagaaatcatcttctaagtcaaaaaaaaacctttgttgccttttttttttttttttgttttttcccaactttcaaagcatacggctaaccttacaccttttttttttttttcccacaacctaacattccaaggcatcggccttaaccgttaaatggggacctttttctccaaactgtcaacaagaatagctacccaacagaagcagttcccttgtttaaaaaaagtcgcgagagtaggtgtgctggtaagatttagtttttttttttttgcagcgtgtggtaagccctgacaattaagggtttgtcattgctttggtctctttgggcgtggtttgcaaaacagccattttcgagggttgaagaaaagattccgcatttcgtagacgtatctatgatcaggaaaccttgacactaactaaatacaactaccggaactttgacattttgcatgtagtgtacagtgaattacttttcattcaattttaacattcccgtcatgttttttttatgcttcaaaatacaactcgaatgatttttttcaacagagatttttaccacacaacatatattttggggaggtgaaaaaggggctctggcgcacccgcttgtgtgaataataaatcaatcagccgataatacagacgcctcatcgacatgtttagaggatgcggagcactcacaacaacaacccaacctccatgcgtcaaacaaaccattttattttatcatgcccacctccccaatgcgacagcgcccagaatgccatgacccccagcacacccccgccgtgcctgaatggcacagagacgcaagtcggcaagctcaatttaccatccaattttattccactagactcattccactaaacccccctccccccattccactacccacaccacagctaacccccgcaataacaaactctgaaaaccccacccactaaagaccgactaacctaaccctagactaactaccaaccccacccattcccaaccgtaccccatcactaccccgcctaacaacccgcccccctctcaccgccggtgcctccctctccctccccgctccctccccccttccccccccaaca

SEQ ID NO: 298 - DNA, 21278 bp, unidentified
  source 1..21278: mol_type = other DNA
  misc_feature 1..21278: note = Fanzor polypeptide
aaaatggaatggaactgatgtgtcaaaacatgttccaaaccacgcaacggggatttggtcatggaataccttcccagccaaagcaggtagaaccaaaatggcatgggatgattctgcccccacatacccctgcacccttttgttggtgtctttgtttgccccacttctgaactgctccctgtgctcctgatgggtgccacatgccatcatgaagatttaggcctaggatttcctcttggggttgttccgcagtcgggctcgtaaggctcaacttgggcaccgcaacttgcccaactgaaaacgtttccttcatgtggaaaatagtatatggtgaaggggaaaaaatggcttttgtacagcttaagaagcgaaatcaagaacttttgaagaaacatagaagtggcgacagccatcatcaagaagcactgaccgcttgactggacttatctaacagcaccatgggtaattggaatcagggtggcgtggaaaagactgcactggtgagggcatacaaagagtcggaacaaaggggatcctggttcaacaacttcagatgcatgcatggtgggggatgaacgcgattccatgacagctcttcgaaaaccgtgcgctagaagctaagaccgaactgaatgcaaagggaagctgacaatacaccctgtcagaccaagtggacgatagccgtctacatcccgtactaacagaacaccgatggcaatgttacatgtgtgtcttgtttttgaaaagacggttcctgctcgcgggaagcgggtcttccaagtgtttcttgccattaaactggcagagtggtaggggcagtggacagatatttcccctaattggtgagtactgaacatgaaaagaggttgcgcataccctgtcaggaagccaggtacacaaaagatggcggtggtccctgtcaaagaattgaagaagtcctgtctcccttttctgcgtgcaactacgatggtcgaccgtcccgtcaaccactacaacgcactcgtgaatggcagtacagtcaaggtggatgcctttacaggtttgtgtccgtgacgttcaccgcgaggtggagatcaaacctaacttccattgtagtttcaagcagaagaactcgtccgacagggcgccttcgtcacaacacatacgtgggatcgtagatctgcgcttttgtctttttcgaattggtttgggatgatgagtttggaatatcgtttttagcgcctaataatggtggcacgccatgccttgttggatcctttttttttagcatatttcgcaagtgatgacttttctcaagataataatttaatttgtaatctgtttggttgtaatgttctcgcatacgttgcgtataagcagcttgccatacactaaaacaccggtcagttagccttggggggggccttggcacaaatccaacgctccacaagagaatgttaatcattgcttccttcctatttttgctgaagatggacgatgaggtttttggatctcatacggggggtccccgcacttgaatcccgcccagtatcattaaacacacacggtttttgtggatatccaactggggtcgactctgtgactgttccacaatattatgttttacaccctactccaagaacttcacgcaccgtgttcatctatgatctggaaagacaaattcctgcaccagcctgcatttaatgaacatttggttttcatggtccgagttgttttcttcttattacagtcgatcatccatcctacaagttgttcctcaacattaaagtgggacacccgttgttataaatcatgccaactgcagatcgttgcttttttgggtaaccattgggtgggtggcagcaggtttcgttgaagaagaggtttctcgaagatttccgagtacctcttttggtaacacctttcaagttcaagccgcgaatgtcgcagagtggatcccccttttcaaaaaacaatccgaagacctcgtttccacaatacagtcgacggaatgtacatgtgactgtcatgtgttattcacaactagcggtatttttttaatgataacgactcctgcctggcaacaacggtcagtggcctcaaaatggcactttggcagcacgctgacgaccggcaagcctcacacacgcacggcggggggtcttaagcaacacgcatgttactccaaacgaaagcgtggtgtaatcaagcaaagagccgggaaaatggaaaacgtttgggggggtgcatgagctcacctacgtgcgaggagattagcttcgtaatagcatggatcaatacaaatatacaactgcaaaacgaaaaaccataacagccaaagcagcttcagattgccctttttttcccctgagcggaagataacccgaaatagccttacgtaatcgtcccataatcaattttggaaatcctgttaattccacgcgcattttcgcccgtgtacgtctttgtttcttaatctctacaatctttctcaataaagaaacaatcagagcacagcattactgggtctggaactacccaattttggcattttttggcatctcagataataggtgattgtcgttccgtcaaacgtgaaccatcgtcttttcacacgttttcgattgtaacgcggccttgaagtagacaaatgtctctgtgtacaggtcgagttaattgttctaaacatttattttgttggcgtacatcctcattaaactcgaataccaaaccgtccatgttaaaataaatttttttttggccattcccaacgtacttgctgaaactgttgaaacaacgacaatacatgcttgttatccaacgcttcccttgaagttatccattgtttcttctgttttacacagagagatagacaaaaactatgtacgtccctgactcgcctttaagctgtcatctctaacccattcttgggtgcaaggcaccgggtggggtgtcccaaacaaatcgcgttcgaacctgtaaacgtgagcgatgcagcaaatgtccatccctttttgcatgtgcaatgcaatcgcaattggcaccaaatgtttgtgtgcatgaggggcggacaaaaacaaaacccgactgttatgaactttgatgcaacacttgtccagatgccaattgcccaattttgacgagaaccactcgtacttaccaattaagtctgctatatcattcgcaatcagcgtccaattgtgtagctcgccttcggatgatcacaactacatgtcgcacgacttgcggatcatgatcaagcagaaagattgatgaacaacacatgcatgtgcctgtcaattgttgcctgcaacacgtcattccctcaaaagtttggcatctggtgaccggtgcatgaaattgcaaagaggattgccaactcatggttttaatgcttgttccgaataggtagatagaactcaatagataggaatgtggcacgcacgtgacatatcatcacgactacaacaccatggtgtgcgcatccctcaagactaaacgcgcaccagagaagacaggagggtggccttctccacttattttcccccccttgtcgacttcctccaaatcgatctgagccggtacccagggtacgagggactgccgattcctcccagaaacatgatttacgtgacctcttaaacgctcggacccgggatcgctcttctgctcctcaaaataatcgcaagcgctgcactgcatgggaattgattgggtctaggacgaccctctcattgtgccgctacaagctgactctgttgtttgttgatgatacaaacctcggtattgtcttgttagacaacaccactcacaccactcggtccctggtggtcgcgaacaacattaggttacaccacaaggtgtgccgtacacgaagcggtttcatttaagtattccgtcaactgtaagagcgtttcatgcaagcagtccctcgtcacgtaaatcgatagcaacatgcatcctggcatccatcaagaactgttggcccaggagacacacatgctcgcatctggtcttggggcacaatcccacctgtgtggaaataccgctgatgacaccctcatacatgtgctccgagtgagggagcttcggatctggaggataaactgcattcttgtaccccaaggctgtatgtaatacctccagcgtcatgtagctgagtgtagagcccgtgtcatacatcatggaaatctgaactggtgcaatggctcagcagcctcacacataatgggatccgccttgacaattacggggaacacaaaatgcggttcaaccccccgtaaaaccgaccagatgacattgcgtcatggggaaccagctcatcagtaactgacaggtagtgcaaattaaacagtgttttgctggcagagtaaactaccgatcgctcacagaacacggagcacatcacatcgtccatggcagcctggtatgggtttctggacaccgtcgccctccctggcatctcgaagtcttcatacacttccataatttcaagctcccttaccagctctgtcaggggaattattacgccgtcgagacgcgacaggccaaggtgcttatccagtaccaaactccggcacgccagaaggctgtcaagtgcgcccaacacgctgtctggcagagtgtcatagtgtgacgacgagcagttcctcctctagggaaccgttacactcgcaacttcaaagctgggaaagctaactgggcactctgtacggtccttgagggtcgatgatgatgatgatgcattgatgcgatttcattattcttcttcaagtcatctgacttgttttacacacgcaaacggcgggaaactgtcgcatccacaccgtccgttcgtccgtccattcatgacacacggatgcggtggcggattctcgtccctcatcgtctcgtagtcctcgaatgaagtgtaaacaaccattcttcagtataaacaaccatcagcacagcacacttcacaaacgaatgagttcctttgacgaaatcaatgaagatgtattggagatcattctagccaatgcgatttcgaacgaatgccacctccaacaagtggctctcgttagcaaacagtggagatgcgtcatctggaggtacgatcgccggtaatcatcttccctagcgcataattcgcacaccacccatcgatgcgcacgtacacgaccttattagctcgcgatgtgcaccaaagccaatataaaacatcatccttagaaaagttcgagcgtcatacctagtgttatgtcatatatagcgtgtcctatcacaatatcgttcgcttcgtctctaattcttgtctacagtcagagacagaatttgtgggacacccttaccggtgacccttgaacccaattgattgggtaggtcagctaaaggttttgtatcaaggtcccaatccttcgtgtccttcatcccgtatttcagcatttaagctggcccagaggataacaattgtaagctgctaactgacccaggtgggtcggttggttgagcgcccacatttgcctctccggaagctggggttttaggggggggggcgagggaacacagaatacatacggtcgctccacgttatcagaagcagaagaaggttcagcagagttcacgtctaggttccaggttgcactatagccacattggatgcgcttttgacactgttgtgacagtgcagtacttagtggaccttgacgttatttaccaccatcttctgcttctcaaacgttttagccccttctcctttgtctgacactacttcttcttctcatggtgatacaatattgcactcacgtttccttatacccataatcaacttttcaaaataaaaggtgtcccacaatcaaatgtccctagctgtatgctcgacgcgcatgtcaaagcatgttggaagccttgtccatgttagcatggttggtttcgacaagtgtgatcatcacatggattgccatgacaaaaaaccagaagttacctcaaatttgtgcaggcatcatgtggactataacaataacgatgttgattagcttctgctcatcattttaaaagaatcatgaagtaatgggcgttcctgcctcccggccgaattccaggggaacacaatgagcgtttgtatgacatggaagaacacatcaaaccaatcctggatgcactacattctgcaatttgttgattcaaaatcgtattggtgttccactgccccgtggattacgtgcttgagaagccaagtcccagacaggatccctcgaaagccgggtgttataaggacggattccacatccaatacccggatatcgtcacatgtccagatttttagcttttcagaaatttactatagtggactatagtcttaccatgggcagctttacctttacctttagctgcctaagacttgattttatgcccataaaagatacagatacaggggccattcaagtaccttcaagtggtactccaggtacctttagggcctatgactcttttatgggcattaaatcaagccttatattaggcagctaaaggaaaataactagtattttgtgtcaatatatcatgtatgagggtgtggaagccattatttttatctattactaaaacagtgtattggttgtaaattatatcggatacagataaaggtgttggatttgtcttgttaatctctttgattagcattgatgtcttaataattacgttaattttatccccagtgtttttatttaatactttttgagcttgctatctcctactggtttcggtatacgatgttaacgtcatttttctttccctttgcataatgcgagagatttcatgaactcatcaatcagcgaattctagacgtattagaagcataatagcttcgtcccgctttggttatcatttatctttccctcattacaacataacacgctacaaacgaagaaccacggtcttttgggaccgtgtcgccaccacactccccctgaggaaatccccagggtatgtgaaaatctgccactctcggcgctttttgcgctatcttttctaacacccagcgctagtgtacaacatccacaaccagcaccacattctggacccatctgatgcatggggcttctcaggaaatactccatccagacactcgcacgtcccttgtccgcagtcgtcatacaacagagcccatccgcattttacgaggtgtttcgaagtctccactctccgctcccgcctactgtttttgtcacaatctaccatgtaattaatgtgcctctaaaccatgctatagtacagatgtgtaccactttttcctatttttttttttttgttttttcgcacctctcttttttttctttagtgtttttttggtttgtcatttttttttctttttttttttttctttgtactacaactgtttttttttttttttattctctttttttttttttttttatcttcttacaccttttttctttgttgtttgattttctttttttttttttggctttctctcatctcttttttctttattttttttttttgtttttatttcttttttacacaactttttttttttgttttttttcttttttttcttttttttttttttttttttttcccttttttgtttttttcctttttttttttttttttttgttttttttttttttgtccgccccttaatgaagcatagtgacggtctgtaatgtgaccaaatgtggcccgatcatcgaaaatgagaatcgtcgggccttttatcatgtccaacgatcgattgtaccgccagcactaaatgggcgttcctgcctcccggacgatttttttaaatttctaatcaggatttagagcctcctgaacgactcgctagcttgagacatcagcaccaaggaatcacaattccgctccataccatgtttcgcagccagtcaaaatcgtccgggaggcaggaacgcccattactacacaggatttgggtgatggggggcttacacataccatgtttagcagccactcactacgtttacactcgtttttagaggaacggcgaccactctcatcaaggacggcggcatctgtgtcgagtcgagtcacagagttacagagtcacagagtcacatggcgacatctcgcatcacggaggcacgtgtgtagagtcacagagtcacatggcgacatctcgcatcacggcggaacgtgtgtcaagtcacagagcgaccgacctctcgcacctggcggcggaacctgtgtgtgtcaatacctcgatactgtaagatatcactcacagattacggaaaacccggtaaagtaatcgcaaacggtgatcacatgccaagcagaggtctgctagacaatagatatcgtatatcgataggggattcgcggagtatcattatcgataattacagtaacgcattgaaaaggcatctgatcattcttgcagatggcgtcagatcgtgagaaaattgaagctagtcttcccaaccatgtggatgtgttcacctacgatcagcatgacaaaatcatcgggctcaacgaaaacggacttatcggattttcccagaacctcaggaacgtcaaccatgtgttaatcggcatctgcaccatgtttgaatatgaccgcactcgtgcgggagatgacaacagagactcaaggcaggattgctgctctgatcactgaagaggtggatagggttgaggaggagactgtgtaaatgagttaacaatgtgttcggtgcgttattgttgaataaaaaagtttcatttatacagctagggacatttgattgtgggacaccttttattttggggatttgaccaattcaagctttgtaaccgatcttgtcaatacagatactgtcttcaggagattgatacaaaacattcaaggcctgtacagacacagaagttacatgatcaaagtagcctgacaagtcaacgtgttggcttacatcgtgcgcatcaataatcattttcaaagcgttcctgtaatcaaataattctgctacatctggaattattgggcacgcgcagcgatattttcgcttgagcaaactgaacacattctcaatagcgttgaactctggactgtaaggaggtacaaagagcgggcgtattcctacagaatcgaacgcagagatcgtctcctttgaatgatggaactggatattgtcaaggacagcgacagtaccctgctttacatgtaactctgatacaaactgtacaaagtcgactttcttgcaattgtgatcaaggatcttgtaatgaacgatacctttgacagaaacggcagcgattagcgtcaatttggacattcgcaatgtccgagaaatttggatatttaaacgtttgccgcgttggcaataccctctgcgacaagtgtcaccgatgtaaaaacccgcctcatcaatgcttatcaaatccgatgtcggaaaggccagatactctttacaaaaactttcgacagaagatttgtggtcattcttgtgtcgaacagttttgtatgcgcgcttgcgtgtgtagccaagtctgcgtgtgtagcgtccaaacgtttttggagacatcttgatagaggacagagacgtcacaccctctgcaagctgagacattgtcaagaatggattggagtcgatcagtttttttatagcaaccttgatatcttcggtaatgacgctcgcccgtttcttccgatgatgttttatattggctttggtgacccaacgttggagtgacgattttgatactttgtacaactgactaactttcctcaagctacgattatagtatttgtagtgaacaaccgcgcgatgtcttacctctgcatcaatcatgataacgtgcgcgtattagggtataaggaaattgtccgttagtatggtatcactaaaataataatcactccctctcgatgggggtggtgacaaacaacggagatgacgacgatctggacatcatggtggtcaagaagacgcttaattatttgttcatggatgtatcgaggcagcagatctgctcaaggatccaaagcatggtactcgtaatcaaccacgcagttgcataggcatacttattcgcaaattttcacataaccagatgcctagatgatggagactttgatgtcaagcagttgccgcacctggatcgaaacttttattacaggtgcatccttgctgtctcgacatccaacgttcgaaaggatacgctgggacaaagcttgaaggatagcatggttgctttcgacgctctcaggcctgcaggctacttaaaggtggatgtttgtcaatggggacaggtaatcgcagacgtctcaatacaaatggcgacgatggcatgcaacagcgtctgggcaaacgtggacagggttgtaatcaagtacctgcgcttgaaacatccctcgttgaagaaacatttcaataagattgtcaaggcagtggtccagtatcctgactcggatatcgacaaaatcatcccagcgagtctcgtgcatgcgaatctcatcaaagacgttgtcagacgcctgagagatctcttgccgctgccaagggggaagcagttcaacactcgagcgcacctgacaatgagactgtttcatcacgtgcttacagagttgggagcggatctaaaagagaaaacaacaaaaaaacgcccccgtctgttcagtatccttccacgcaagagcggcttcaccatttcttacgtccctatatcgtccatgacactcatgaagcttctcagcatgggcgattcgccgctcgagagcgtccgtggcgatggacgtcacgagaatcattccatgttgtggagaaagtacttcaatgtccaaggacttgagacgaaagggtctcgttttgacaaccgaatcctcagcgacggcaaaggggtctccgtccaaatgaagcatcaggtgggtaaagatatcgctggagaaggaggaggagataatgcggggtatcccaaagacgcaagtatcgaagactgccaggacgcttctttgcgccagggtgcgctgcgtgtcggtatcgacccgggtatgacagatatcgtcactatagcatcttctgacggtcgagtcgagtctttcagctctgcccgctttagcgaagcagctgggtacaataccagcaatcgtcgcacaaacaaatggaatgccgatacgcaagacctcgtgaagtccattccatcgccgactatgagcagtatgcacgacatgcaggaccatgtcagaggttacctcagcgcgctcccgaccctccttcaacaccgagccaacagaggttaccgatcgatgcgattcttcgatatgtgggcaaacagaagacgattgaaaaggtatgcgatttgattgctccaaaagcacagaagaaaacgattgaagaaaaggtatgcgatgtgatgctccaaaagcaaagaagaccgtgttgttggcttcggcaactggtccaaccagggctatggcatcagtcgtttgtgttctggaccagtgaaagagatcaggaagtgcctttcacgtcgtcagaatgttctgttcaaaaacgtcgacgaacgcaacacttcttgtacttgccacggctgcttccagaagctcgtcaacatgaaggcagacagcgtcgtctggcgcagagttcaaaacgagccctccgccctcatcgacggggctcctacaacaacaacaacaacaacgtttgagaagcagaagacggtggtgaagaacgttaaggtccacaaagtactgcactgtcgcaacagtgtcaaaagcgcatcatccaatgtgcgctgtggtgcaacctggaaccgagacgtgaacgctgccaagaaccttcttctgcttctgacgacgtggatggacgggaaagagcgaccagcggcattttgtgtgccctcctcatcgcccaccccaaaaaccacagtttccggagaggcaaatgtgggcgctcaaccaaccgacccacctgggtcagttagcagcttacaattgttatcctctgggccagcttaaatgctgaaatacgggatgaaggacacgaaggattgggaccttgatacaaaacctttagctgacctacccaatcaattgggttcaagggtcaccggtaagggtgtcccacaaattctgtctctgactgtaacatgttacattgtgcaaaatagaatagttgtacattgaatgtacagaggacagcaaattcaatatgattcgaatggtgttgttccgccatggataatagcaagttggagcaccgtgccaaagctgatgcagacttaagctatatactgactaaagccgctagggaaggacatgtggatgtctgcaaggttctgatggatcctgagttcgcgagcgaggagcatagtgccaaggcagatgcatacgacagtcgtgcactgagtgccgccgctcgtgaaggacatgtggatgtatgcaagtttctgatgaatccggaattcgcgggcgaggagcaccgtgccaaagctgatgcagacttaagctatgcactgactaatgccgctatggaaggacatgtggatgtctgcaaggttctgatggatcctgagttcgcgagcgaggagcacagtgccaaggcagatgcatacgacagtcgtgcactgagtgccgccgctaatggaggctatctggatgtctgcaaggttctgatgaatcctgagttcgcgggcgagaagcaccgtgccaaggcagatgacgaaatcagcgaggcactgtgtgcagccgctaatcaaggacatgtggatgtctgcaaggttctgatgaatcctgagttcgcgggcgagaagcaccgtgccaaggcagatgacaacgaaagccatgcactgagggaaggtgctacggaaggacatgtggatgtctgcaaggttctgatgaatcctgagttcgcgggcgaggagcaccgtgccaaggcagatgacaacgaaagccatgcactatgtgacgccgcttctgaaagatatgtggatgtatgcaaggttctgatgaatcctgagttcgcgggcgaggagcaccgtgccaaggcagatgacaacgaaagccatgcactgaggttagcctttattagtggccatctcgatgtctgcaaggttctgatgaatcctgagttcgcgggcaaggatcaccgtgcatcgtcatccgtgcttggaagggatattatgatgtttacatacagctagggacatttgattgtgggacaccttttattttggggattctgaaaagttgacgtacatttattatgggtataaagaaacgtgggtgcaatattatatcaccatgagaaaaagaagtagtgtcagacaaaggagaaggggctaaaacgtttgagaagcagaagatggtggtgaataacgtcaaggtccacaaagtactgcactgtcgcaacagtgtcaaaagcgcatccaatgtggctatagtgcaacctggaacctagacgtgaacgctgccaagaaccttcttctgcttctgacaacgtggagcgaccggatgtattctgtgttccctcgcctccccctaaaaccccagtttccagagaggcgagtgtgagcgctaaaccgaccgacccacctgggtttgtcagcagcttgccttgttatcctttgggccagcttaaatgctgaaatacagagatgaagggcaaaaatatgtgctcgcctttagctgatctacccattgggttcaaggatcaccggtagggtgtcccacaaattgcgtctccgactgtaaaacaattgaacttgaaccagtacccatgtgtcaccgctcttgaccccaatacattgtttgctcatacaatcaccctgaaatcacaacgtcattctcacatggcggcttaaagcagcctcctgctcgattgttttctgaaggggaagcgcaggcggtttcattttaatattctgttgactttatcgcaagtcagaagaagaatccctctacaccaagtggaatcaccatgctaattgtaacctgactcattagaaaacggtggtatgatgatgaaaatgtgtcaagctgtctccttggtggattggatgtgacggcctcgtccctcgcacgccacggcggcgtcatcgaaaacaattacttaacttcttcaggtactccttcttcgtcttcagaatcatttcacacacaaacaacctcctaaaatcatgaacgcttgtacacaaatcatcaactctggctacacccaaggcgtgctcgcgagctgcgtcgctgcagctaccaccgctccagccaccacaactgcccccaccataactgcccctgcgatcaggtagcctgccctaaccactgcagccgactcgatcgcgcttccgaagacgtatggcaactctttcaggacgttcctgaactgctggatcgggggaaatggaatgaaggccggcattcgactaacatacaggtgtcggtggagccttacagtagttctcaaataaagtgggacacaccttatatacagactgcagatcgttgcttttgggcaacgttgaggggtgcagcaggttgaagagttcctgcctcccggccgatttttttaaatttctaatcaggaacgcccattctgtgtcaatacctcgatactgtaagatattatcactcacagatgacggaaaacacggtaaagtaatcgcaaacgacgatcacatgtcaagcagaggtctgctagacaatagatatcgtatatcgatagggaactcgcgggccccacggagtggggtaggggaattgagctgcagaactaagtgtgtcaaggcatcaatcaatcatcacacgcaaaacggtggaaaactgtcgcatccacaccgtccgtccgtccgtccattcatgacacacggtggtggatcatcatcgcaaactcatcgtctgtctcgtagaagtggtgtaaacgcgcgcacatgacaaccaatgtcgtattccagttcgtggcgtctacagccttgcttgcggcaccgagttcgtgccgttgttgagcgagagaaggaacgagagaaatatggcaaggctaccaaagcatggaacgcaatatcgaagcgatgcgatattccccgaaaggaatgtgccggtgattgttgaggcagggtcttacgcaaccgcatgtactcgaacgaaagccgtgtgtatcaagcaggcttggaaatggaaaaacgttggggggtgcatgagctcacctacgtgcgaggagatttagcttcgtaatagcatggatcgatacagaatatacaactgcacgaaaaacataacagcaagcagctccagaatgcccttttcctgagcggaagatacccgaatagccttacgtaatcgtccatgtattcccacgtgtttgccgtgtacgtcttttctatctctacaatcttcttcaatcgagaagcattctggtcgtactcaattttggcaccagataataggtggattgtcgtgccgtcaaacgtgaacatagtcttattcatcacgttcgatgtactcatgaagtagaatgtctctttgtacaggtcgagtatttctaaacatttcttggcgtcatcctcattatcgaataccaccgttccatgtaaaataatttttttgccattccacgtactgcctgaaactgtgaaacacgcatacatgcttgtatccaacttcttgaagttatccattgtttctgttttacacagaagagatagggtgcgcaaagcaatatactagacatagtcttgattttttatacttaatgggcgttcctgcctcccggccgattttttaaaatttctaatcaggatttagagcctcctgaacgactcgctagcttgagacatcagcacaaaggaatcacaaattcgctccataccatgtttcgcaaccagtcaaaatcggctgggaggcaggaacgcccattacttgtgaaaaataaacatggtatcattctcatcagacagggttcgatttctaccccaggatacagagatggagagtcttttcagatgtgttcatgtgaacacatgtaaaatagggattgatgtgagcctccggcattgtgtacaacaatcgaccgtctgtccaagttgtatatagagaattggaattgattcaatatactgtaacattattgaccggtctgactgtaacttgtgttgacattgttttaatttatcacttaatgtcaaaaaacaacatgcaggatccggacatcatgcatggttctatcagctttcaaaaggctacggggtcgactggacctgatgacatttacatcaccgacgacataagggccgtgtttgaagctgtagcacttggcataatcaggatgtcattcaagtattcggatggagctcggtgcaatcctccagctggcctttctgtgggaaaaaaagggtttggggtgggcaggtactagttcagcagatcattgacactgattttgataccaggtgttacgacgtgtccattcaagagtcctacacaatcaagctcggcaacgaggatctttacaatattgtgccgcagatgcagagctatgtcaagccctcgccagcaggttcgctcaccaaggcaagggcattagctgctgcggctgccgctgctgctgcacacgtagaagcacttgccattgctgttactgcagacgatgccattgctgttactgcagaagatgcaattgctgttggttatctacagtgagcttgttcctaccgaactcagtctcaagcttattcactcaagcagcttcgtgtacggcacacctaacggtgcatgcacaacaccgagacgcgacattggaaatgtagtgtaaacacaagcagggttgagtgactaattgctcatcatcatcggaagagacacgcgtggcttatgacgcctactctaaggacagcagacgccaacatattccctagacgcttcgagagcagacctacgacttggcttgcttgcgagtttcacaaagttctatcgagattctgagaccggagatcgcagaaacgcattcaataggtggttttgaatcttttgccggagtggtggtacactacagtacatggcccagagattgagattgcgtaacacacgacttaagaaacaatcatcagaatttttaaacaatgattgacaattctcaactacttatctgcatatctaccttcgctattatttacatgactcgactgaagatagagcttgagactgagctcgctcgaaagaaggcagatgctgctcgagtgaatagtatggagattgagcttgagaatgctcgagtgaatattatggagattgagattgagaatgctcggctgaagattgagcttgagaatgagcgcgctcgaaagaaggcagatgctgctcgagtgaatagtatggagattgagcttgagcttgagactgagcgcgcagaagcgcttgagaagcaactgaggtacgatctgtcaagcatgactatcgagcaatggaattccctgaacgataatgacaggcgtctcaatgaggatctttgcaaacaacacggaatcaccctccccaacatgcaagagtcgtcctacccagattcaaacgagtgtaaacaacgcaaaatccatacagattattacagccatacaaactcgaatctctctctgtcgaattcattgtcggggccattcattaatattcagtgcacggatgcggtggcggattctcgtccctcatcgcctcgcctcgtatcgtacgaagtgtcatgattaccaaagcattcgataccaagacggggtcagcaataatttcgatcatattcggtctcgggttggctgcactgttcagacagagttgcaagggggaccggtgtatcactacactcaacaactgaggacatacacccgccttctactactactgcttgcaagttgcattattgagtataaaaacatcatgcatcatgattgggataagtaatcaaacatgaacgatcactcagcgatcacgatcactcctcattaccttcgtcgtcgttgcatcaaacgaacaccattaaaagatgttggcactgtcgactacgatgcaaagcttcaaaaggagattgaatccatccatgaccatttcatgcacaagaaagaagtacttgaactcagaatattaaaattggagcaggacagcgaacagcaaatcaaattcgcaacccagcggaacactattgccaaaatggaaggcaaagttgatttggtgcaggtcgctgaaaactatcgtcgtgttgaagcgatcgaggatgagtgctgggcttcgaaagtcaccttgaaagcgcctgtacaagtcgaggaggtgtcgtcacacggggtcgcccctccttgaagcacaagtcgtcgatccagagccacacgttcatttgtgaaatgataaaccgcgcgaagaaaggaaaaaacgcccgcaaccatcacaaacgtgaccctcgctcatgtgatcatgaacggattcgttctcgccaatacagtcaacggaagcttcgtgtacggcacaccttgcgtgaatccatgtccgtacgagctttacatttgaagagaaaatggaaattcaagcttacaaataatgaacatgtcaggaaatacactcggacaattacttttctgtcaagtgagctcttagttcctctggaatcggcacgcccctctccgtgaggactctgacgcaggtcaggctgtgcatagccatgccctgcatggccctgagtgtaacggggttaattttaaaccatttcattatattccctatagagtctgtgttgacatgcattataactagggttagtattgacatggcgccatattttttgtatagttcttgctgatctgtatctacgtatgacatcacatatgtcttgggaagatagcaacatattggggtttctgctcaactcataccagtcccatggtttatctgggttggtttgtataatctcccacgtgatattggggttttcgctcattccaccccaattccacggtttgtctgggttggtttcgataatatccatcgttatgacagggtttttgctgatccagttccagttccatggtttatctggattgacttcgatcatttcccacgtgatgtagggttttctgctgatataataccagtcccatggtatatctggattggcttgtataatatcccatgtgatactggggtttttactgatcaaaaaccagtcccatggtttatctgggttggcttgtataatctcccatgtgatactggggtttttactgataaaaaaccagtcccatggtttatctgggttggtttgtataatatctagtgtgatgttcgggtgtgaactcaatccaccccattcccacggtttgtctgggtttgtaatgacaatatcccatttaatgcatgggtttctgctgatccaataccaattccacggtttgtcggggttggcttcgatcatttcccacgtgatgtagggttttctgctgatataataccagtcccatggtttatctgggttggcttgtataatctcccatgtgatgttggggtttatgctcaacccaccccaatcccaaggtttactgggggttgtaatgacaatatcaatcgttattgtagggtttctgctgatataataccagtcccatggtttatctgggttggcttgtataatctcccatgtgatgttggggtttctgctgaaccatttccaatcccatggtttgttgggattggattcgatgatatcccatgtgatattggggtttgagctcaataaactccaataccacttgtgttccatacatttgacccgtctcgagatgtggttatttatttccactgaaatcattattaatagtaataactaaataatagatagtaatagatagatagtaatagatagatagtaatagatagtaatatatccacaagtatctttatgctccgatttgtacctgattttaaaagattgtggtgatttagcagaacccgtccgtacattcaaaatccatgaattcggtgaaaataaacggcatgcacacactcgacggaatacttaaataaaaccgctttctggagtcggtacacattataaagcttatcttattacagcactggaaaacttatggaagaaaaattcggatgtcgatgcaaaacgattggccacatttgtcaacaaatgcaaagatttgctcgtgtttttccacttgatggcctattactcttttatgatgatgcatgcatgggcggcttgtgtgctcttgcgcgtgcggggaaaacacatacacgcggacttttggggactcatcatgtaacgtgcgggttcgaggtgcattcacgacagcgtggatgagtgtatacctgcactggacggtcaacagattgaaacatccgggtattagcccagaaaacaacagaacgtcagtggacatcgtgagaggaagtgactctcgcgcggttggtcaacttttcaaaagcctcaaaagacaggggtatattctaaaccctggctatacaccgtaaggtgtgccgtacacgaagtggtttcagtttagtattccgttgactgtgtatcaccgcttatgcactctgctacatgggtccaaaataggcatcctgcatcatgccactggtgcttgcaaacatgggcttagatcaagcctggatatcctgcttgaagcaggtaggtgtgaaggtcgtagttgggggtgatgccgatgcgcatgattgtggtgccaagttcgcccttcacgacccccagcagacggccatgcttgtcgaccactggaccgcctgaaaacccgtcatctgcgtgtgcagtgatggccactgagccaggcatggtgctggatagtgagcccttggagcaactgggcttgttctctgtgcctgtgtaccccagtgcgtacactgacgccatgatttcaagatcagtggaccaaaggctcttggcagagcgggaacccttcaacagaatgaggtcaggcacattgcctggaggtgagggggccacgacctccaaatcctcctcaaagccgtcggttgggtaccttgccttaaaggccacagccggcgatgtactacctagggtcttgccacagaacccctgcatgtgtcctgctgccacgatgacttccccatgcatgaagccgctgaactgaccaactaggcttccgtcctgactgaatccaatcagcttcactaccaatggtgacaccttggcatacactgcctggtcgagcatctccgctgcagcaccgacgtccaccgggtcaacaccatcatccaagtttatccgcaacctggtcatgttacagccagaccggtcaataatgttacagtatattgaatcaattccaattctctatgtacaacttggacagacggtcga

SEQ ID NO: 299 - DNA, 21239 bp, unidentified
  misc_feature 1..21239: note = Fanzor polypeptide
  source 1..21239: mol_type = other DNA
tcgcaacgttgttgtcgatcgcctccactcggacctggagctgattggtgatgttgaagccgttgacggtggcattcttgtacgagaagcaccccttggctgtcattctgcacggcataacgtagtcatgtcagtgttgcgcattaaaactagaaaagtttacagccaacagtaacgatcttcccggccacttcctcccggccgatttttttaaatttctaatcaggatttagagcatccggaatgactcgctagcttgagacatcagcaccaaggaatcacaattcctctccatcccatgtttctcaaccagtcaaaatcggccgggaggcaggaacgcccattgacctcagactcagaactccacatcagactcagactcagaacccgcatcatcattagtgatgcaacaagaacccaccgggagagcgggcgtcccgaacacaccccggaaagcgtgcgtcatccgtacttgcgccccactccaatacttgtccaatgccgtctcgaacccatcgtacgtcacaaccacctcctgatcaaacatgcgccccagtgcgacaccgaacttgctgccccggctgttaccagtggtcttgccaaactgctgcgtggctgccactgtcatgccgtagtaggtgctaggcgcgcctgcccccccttgcatctgagcacctcgcagccttactgcgtccctggtaccttgcccatccttcaactgttgcaacccttcggcatcgcacatgttcagcaaccttacaaatgtgcctttgaacttctccgccacgcactcaattgcctcagctgtgaccagctgcttgaatgaacacacgagactaccgtgctgcggcgacccctgccacatgccatggccgcagaacaacaacacagccacctctgtgtcgtgggacaacaaccacttcaggtggtccaatacagcgctggacaacacctcgccctccagtgtttcaaaactgaaacccggccctaactggcggcgtagccctgctgcgtcgcgcgcaaaaccctcagtgctgtacttgcccaggtcactggggagcactcctgttttctccatcacgtatcgagtcctgatatccaacccaggcgtggcgtaactagggatgaccagcaaggcacgcttttgtctctgcatctgtgggggttacacttatttataccggttaatatttctctatgtatcatgcatgtccaataaagaaataatgatgcgggactcctaagcagcgtgatttttaagaggcgcgctccaccatccccaaaaaacacaggtttgttaagcagaaaaaaagtattggttcgcttgtgcatgcatgtatgtatgcacgaacgaacgaacgaacgaactatgatgagaacgacgacggcgccagagcagcagccgcagagtagttgtacttgttgtcatcgcacgcagatgtgtacgcggttacgcaatcagactgtgtctgagatgcgctgatgaccttcgcgtgtctctcgaaacagcgtgtagcgtaggccttgttgaccttttctgctacatgctttggtgatgacgcatgcgtggtgcacagcaggccagtggcctggcgattttttttgcactgtctagctccggacgaatcgagcaggacgatgcagcacttcgtattgcagaatggcagattgaggctggtgagcaggtcgtgtccaaagtggtacggggacaactctggaactagctgactcttcagcaggatattctcatgcatggtagtctcggagatgagcttcagctcatcgttatgcttgataagtgtctgattcttgatccgacagttctcgagctcgcgcaggagcgcatcgtagtcttcgactgtagtagtcatcggctcttcagacgcattggactcctccttgaaggagtcgtcctgcttgacgtggttgtagcagtatttactgccgtcagttacggtccgggaacatgggaaaccgtccttcttggtcccggcgcaagtgcagcgggcgttagaggtggttgttgtggatccagacatttcgggtatttcagtgagtgaatttggcgattacgtgtgttgtagttgttgttggttgttgtgctggagaaaacgtttcaatttttttcgaaacgtagtctatttggcgcgcggggtcctcgttgtcttatccgcgtttcaaataaagtggggcacaccttacaaactttcctcagactcctcaaaaaatatttgtagtgaaccacggaccctgtatctggtttcatgggaaatcttttaaacaaaccaggctttgattttttgtgttggatgaaaatgcatcgcatgtgtcatcaggtacacctgagcggcaattcgagacaacttaactgaatcccacctgagcgtacggcaccatgtcgcaaagtggtcacagttgcagcccagcaagtgatagaggccagagcaatcttgcagatccctgtgcagccccaacgccagtgccgccgagaactcccgaagctctggtgtgtcgctatcccaacacattacagcaagctcaggacagccggggacagccatgaattcgcccaatgtacgcagccggatcttggcctcttgtttgccagcatcctgtgagccccaaaaatcaaccacgagatttttacccccctgcactcctgaaatgggaccaacaaagattccatgatagaatctctccttgctacccgctgtccgaatgaggatctgatcgccagaaaggagctctgtggcaacttcagctatgtcaacgcggcgggctgactgcgggagcaagttgtgaatgcccatgacattcatcgcgccctccatgagggcgaaaacgtcattatcagcaccttctgactttacgcccaggatcttggccaccaacaacatcaggctgttcatctcgacaggcgttgttcacttattatcctggaaagttaataattgatgtcgagcagacgcctgctttagaagacacatcggaaaacgcccaagtgttccagtgataagctcaagtgttccagtgataagcccaagtgttccagtgataagctcaagtgttccagtgataagcccaagtgttccagtgataagcccaagtgttccagtgataagcccaagtgttcctgtgataagctcaagtgttccagtgataagctcaagtgttccagtgaccttcgagagtgcccattgaaggaccagccgccgcactgaagcgatcgcctctcttcctggacacgccgactgtagcttagttggttgcggttattatatgcatcgaattcccttgtcatgtgagtaaatgagcatcacacagacaacttgtaagccacaagtaatgtacattttagggcgcagggaaagtgggaagagtcacgctatcactcaacttattgctcaacattcaccacccactctaatattggtcatgacagaacataataaggagtaccatgctttacatacaccagaggcaacgttgtgtaaactgtctgaatctgaatcagaatcaccttcacttgacggtttcaatgtgctagcatttgatgacatccatctttttaatgtacaaggccgccaattgttacacaatgccatgcagtcgaaagctcgtgccgtcatcgtgtctgtctctcacccgtgcagcattcccctagccggtcgagacaccatcttacaactcagtcagtatcatgaccatcacggatctgaatgggtgaagatgttgaaggccacgtatgcattcaaattctacacttgacggaatactaaaatgaaaccgctttctggagtgtaaggcaaatgtagatgcaaatgtgcctggttctggaaaccaatccagccgtgtgcgagcatggagtagtgggacaccttgtatttcatgataaagtgtgcttaaggaaatgtggtgcatgattttatcaccaaaataataatgcaaacatagaatggatgcaaatcatcctttacctgttctacaaaatagtgcatgtacacccaatgacagtaaccacatcgtcaataatgtgctcaattatgtaaacaaatgcacaagtaaggtatcaatcattgtatttccagagtgtggcagcggatatcatgagtggaatgttttaatagccctcattcaaaccggttataacatcaatacagcgattttcatggatagccatatcgaaccccattcggtggacgagtggcttaggatgtctcaagtgcaccatgttgcgacaaaagtcgttgactcgtacgtagcgctggagcattggacgaaggagcaaacctccccaaacaaagtgtttgtaatttacatcaatggtgggctgaagttcggtgagtcgtattgtgccaaacatggatcctctgcatgtctcactgcggcggcacaattctggaagtggtgtgaccagaacgcagctaaccaactcacaattaatttcattggacgagacatgcgacaccctgccgattgcaagtcatggactgaattggctaacacgttcactaaactgtgatatacagtttgatacagttgttctcaaataaagtgggacaccttataatcatccagactgcagatcgttgcttttgggcaacgttggggggtgcagaaggttgaagaggttctcgaagatattccgagtagcctctttggtaaaccgttcaaccgtctgtgtccccatatcagtatcagggggtgggggtggggttgtcgaggaacttctcggcgcgtctcggcgaaacgcgagaggacgctctctcccaaagacttggtgaagtgtaagcatcaggatgttcctggaagcgttcacatcgcggtcccaagtcttcccgcagtgaagcataccaccgctctgttggcgtggcgctccgctttgactgcttttgcagtggagaatcttatgaatccgcttgcgtccttctgtacattcccaacctgtaccgtcttgcttcttacgatgagtgagtgccaccatgttgcaaaggtggttctcacagcagctgcatcgttgagatgttctgaactcatcgatgtcctccatgatgacgttttctcggctacgaagctcgaaacgaatagcttggagagggccacaagtccgcctagagattggcgtcgcccccagacctttccaatcaccaaacccgacgagtaccttagcactcttctctctcggagctacgaagtcagcaatctcaacaataagcttctgtttcttgcagtaccttcgaaagcggaggtttcggtaccccctggaagcacgatgggcaagaaggattggggcggcacccatgtagaatctggcgtacgcaccaatctgttcagaactcgaagagtctctatccggaatgataccaccgacgatatcagccgtctcgaggttccaaacgtcagtttgacgctgagacttgaagatcagacccttgcgataatattgcgccgagctgtacgatctggtacctccgttgagtcctgttacagtcacgatatcagtaacacccgggtctaccgcagccacgaccacattgtcaaggaaggatacaatgccaccctcgtatgttgtcacgtactcatgcgcccgcgtagagaacgcgtctgcaggcatcgaacatgtcagacacgtaggcttattcatcaagatgctgactgcaaagccgtctgtcacaatgcggtaaccgaacttccgagaaactgtctccactttcttgaggtttgcgaagcgctcccatattccttgatggtttttggaagcaacgtctgccttgcatgaatcaaagtggcactcgttgaccatatagaaaaaggccattttcgaaatcggaatgtgcgacagagtgaatccagatttgtaaggcaacaacgagaatgtgcgatgtttttcgtttttagtttttcgtttttcttcgatggtctccgacaatatcttgtggtacagaggcagggtcatgtgagcccgagtcgcaaaaatgtttccggatggtaaaggtagaacccccctgagacagaatgccacttcgcgtgcaaagaagcgtttcgcgttatctgcgtccaccctaaggttcttcgaggagagccaagcttcgctcaacttttcaagcctctcttgaagtttagtcaacctaacacgcaaaggggatccttctggttccttcctaccgaccctcttcttcgcaagagcaactgcactttttgccgatcgaagtctagatgttggaagcttggttggcagcttggttgtatgagggctcatcttgaagatgacgtcgagattctttgtagggcacttgatcaatgcagccacgatgtccgaccgcaggcgctttgcaatctgtgggtacttccacttcaagtaagtcgttatgcgtcgctcaaggttggtccaaagatggttagaggccattgtggccatgagaatagacaggtctgcaatgatctggttcttcacgttcccccgaatgtcaactttggattgccccggctctcttaacaagtcgaacagaagccgactactcttgaagtcttcgccaagagtcaaccccttacatttgttggtactgactgcaataaggcaccggtagaagaagttgcgatttacaggagggacagcgataccattctcaaaaagacgagcaatgtggaaatttgcgaaaatataaccctctccaagcaacttgttcatgtccagtaccagtgtgtctatcttgttacgaagccaatcatggggaataaaggtactcaatttcatcttgaccacacaaatcgctcgcccaggtgcacactcctcgtcttcctccccttcataatcgacaagttctgcaacgtcatcatgttggtcagcctcatgtaccaacgatgatgactcgccgatcccattctccatcacaaattgtaccccgaaaacgttttgatgtaatctggatctgcagacaggctctctcgaacattcctaacccaatctctcgtattaatcatatattttgacaagtctttatacctccacatttctagaacacaacatatttgcattaagtaatcgaaattacaggttgacgtcaatggacatgatgccctgtagtctctcttcatgcttccaaatatttgttcaatcgcattagctctggggcaataaggaggggtgtacaaaagcttccaccctttgcattcggatatatcctttatttctgaagaatggtgaaaccgaatattatccatgacgatcgtggttttctttgggatgaccaaagttttaaagaatttaatgaaatcttcttttttacaattgtgctccaataactgataatctattattccctgagatgaaatagcgagtaataaagtgaacttcacacgacggaggttactcattgtcttcgtagttaatctagaaccgatcttgctgtatccatatttgctgtgttctccagcgtaaaatcctgcttcgtcgatacaaacaacgttagagttttctctgtacttgtcacaaaacatttctacattttcttttgaatgtccgtagagaactgtgggaaacgccttcttcctagaaaatccacattgttttatgtgtctcgatgcagtactgatcgataatcttacattacaactcttgcaaattataccgaccaaatccttgcatgttatgaaggggttctctgcaatattattggatatcgtggaacgtaaaagcatggacaattctttcctttttcgttttaaacgcttacttttacccacctgatcagcattgacccatctatgtagtgagctcttggacacgttgtatatattacaaaccttcctgagactcctcaaaaaatatttgtagtgaaccacggacatgtacctggtttcaggggatatcattcaaattatactgagtgtcccaaaattatttgagaacaactgtatggtcgttaacaggttgatcctatccggcttgatacacacgactttctcttgagtagtgataatttaattctgcgattttgcaaaagagggggtctgagcatcttcctcatccggtgataccatgaggcaaagtagtaccattccctattaatccaattatcatgtacaactccatgacgcaattgatcaaacccatgcccgccttccaatccctccctgcacaagagcgacatggccactttgttgaatgacgatattgcaccaagtcgatatcgtgatcacagcattgctctcctctctgttgaagtctgtcatgcaatgcgtgtgaaggactttcagggcattctgaagcaccgatttctccgttgagttgatgacccacctttgtggaatcacaagcgcaaatcaaatcatacctgttgttgttgtttcgcagcatggctacggcagcttcaacagccgcatgcgccacccgcactgcctcatcagctcgctcagcagtttggacaagtgcagccaatgcagcattcttgtgtggccctccgtcagcgatgatgatgcctagcttagctggtgatgtattagtgaagtccatgcttattatctgtgtgcatgaaaaaatgaaagcagtgacaaataagatactgtgtacacaattataggctttaagtaataccgtgataaaatagggttgtcaagcagctaacaaaccagaattcgcccccgtacagacagttttagtatagatccgaattagatttgtgttagatacgtgtgcgtcggtatcacaccgtgcgcgacactcgatgcgatgagatgagatgagaaaacccgaattcaggccaaattcccatgaacacggcatccccttttgtgtgaggatccgccaaccttggtagctgtacgtggacaagacaacctagccgtcgcttagcggattcagctaaatgcagcccctgcatcaacaatcacctacacacccctttcgggggatatcgcatctcttcgatattgcgtcccattttttggtcgccttgccatatttcacaccttcattcgagcaatggacggcaccgcatcgcgcggtgcttgcgtgtttatcgaacgagctcatggcggttttggaattattggtcagcctcgccatgagttcatacagctagggacatttgattgtgggacaccttttattttgaaaagttgattatgggtataaggaaatgtgagtgcaatattgtatcaccatgagaagaagaagtagtgtcagacaaaggagaaggggctaaaacgtttgagaagcagaagatggtggtaaataacgtcaaggtccactaagtactgcactgtcacaacagtgtcaaaagcgcatccaatgtggctatagtgcaacctggaacctagacgtgaactctgctgaaccttcttctgcttctgataacgtggagcgaccggatgtattctgtgttccttcgccccccccccctaaaaccccagcttccggagaggcaaatgtgggcgctcaaccaaccgacccacctgggtcagttatcagcttacaattgttatcctctgggccagcttaaatgctgaaatacgggatgaaggacacgaaggattgggactttgatacaaaacctttagctgacctacccaatcaattgggttcaagggtcaccggtaagggtgtcccacaaattctgtctctgactgtaactgctacgacatttgctctcgatacaagatttgaggggcttttcagttttctcaatgacttcacctgcagccgatagtttatcgttgcattttgttacttttctgcactttgatgctttcatgcggagcgcgcctgcccactctatccattcatcaagcgtccgttcttttttgtcagaggcctcatgcttcataaacgcgacgaactcttcggacgtgtacgagtcgtccttctttccgcgtggacggggacctgtgtagcacacgatatcagatcgactcttcgtttatttttttgcttgaggtagttttggcattcaatgaatgtagggtataaggaaattgtccgttagtatagtatcactaaaataataatcactccctctcgatgggggtggtgacaaacaacggagatgacgacgatctggacatcatggtggtcaagaagacgcttaattctttgtgcatggatgtatcgaggcagcagatctgctcaaggatccaaagcatggtactcgtaatcaaccacgcagttgcagaggcatacttattcgcaaattttcacataaccagatgcctagatgatggagactttgatgtcaagcagttgccgcacctggatcgaaacttttattacaggtgcatccttgctgtctcgacatccaatgttcgaaaggatacgctgggacaaagcttgaaggatagcatggttgctttcgacgctctcaggcctgcaggctacttaaaggtggacgttcgtcaatggggacaggtaatcgcagacgtctcaatacaaatggcgacgatggcatgcaacagcgtctgggcaaacgtggacagggttgtaatcaagtacctgcgcttgaaacatccctcgttgaagaaacatttcaataagattgtcaaggcagtggtccagtatcctgactcggatatcgacaaaatcatcccagcgagtctcgtgcatgcgaacctcatcaaagacgttgtcagacgcctgagagatctcttgccgctgccaagggggaagcagttcaacactcgagcgcacctgacaatgagactgtttcatcacgtgcttacagagttgggagcggatctaaaagagaaaacaacaaaaaaacgcccccgtctgttcagtatccttccacgcaagagcggcttcaccatttcttacgtccctatatcgtccatgacactcatgaagcttctcagcattggcgattcgccgctcgagagcgtccgtggcgatggacgtcacgagaatcattccatgttgtggagaaagtacttcaatgtccaaggacttgagacgaaagggtctcgttttgacaaccgaatcctcagcgacggcaaaggggtctccgtccaaatgaagcatcaggtgggtaaagatatcgctggagaaggaggaggagataatgcggggtatcccaaagacgcaagtatcgaagactgccaggacgcttctttgcgccagggtgcgctgcgtgtcggtatcgacccgggtatgacagatatcgtcactatagcatcttctgacggtcgagtcgagtctttcagctctgcccactttagcgaagcagctgggtacaataccagaatttgagaagcagaagacggtggtgaagaacgttaaggtccacaaagtactgcactgtcgcaacagtgtcaaaagcgcatcatccaatgtgcgctgtggtgcaacctggaaccgagacgtgaacgctgccaagaaccttcttctgcttctgacgacgtggatggacgggaaagagcgaccagcggcattttgtgtgccctcctcatcgcccaccccaaaaaccacagtttccggagaggcaaatgtgggcgctcaaccaaccgacccacctgggtcagttagcagcttacaattgttatcctctgggccagcttaaatgctgaaatacgggatgaaggacacgaaggattgggaccttgatacaaaacctttagctgacctacccaatcaattgggttcaagggtcaccggtaagggtgtcccataaattctgtctctgactgtattttcggaaagcaaacgatcaattgttgcaaccctttgacaccatggacctacatcgcgcatggaattgaattagtaatgtgtgtgggtcagcacagagagatgttattgtattgcatgcattgtggggcacaacgcgcaccgcgtctattcatgagtgcactagcaagaatcacgcacttgaggttctcgatctcttcgtcctgcttggaaaccaagctcagcgcctggttcagtagacgatgttgctcatgcgtctgagccagtagctttttgtaagctagctgaacagcgtcagtacgcacgcgctctgcagccacggcatcagccacggcaacagccacggcatcatcgagttgggctttcgtgtacatttcggccatgatcagtcactgcacatgcattgccttgtctagggctgggtctctatattactattctactagtgtactgtactgtactgtaccgtacccctgtgaattcccccctccgtttgcgtgcgtgcgtgttccatgcgtgcgtgcgtgtctcttgttctcctgacgtcgtcgtcttgctccctcccccccatacatcatccgcgtgttccatgcgtcgtgtgtgtgtgtgtgtgtgtgaaaggggctccgccacttgttaaatgtggtacgttggcgacatatatcacttgacaagcagttttgaggttggttgcttgaggatgagaacaaagtaaggcaaattgtgtctgtattttgcgttatttgtagatggaagaaaggaaagaggaggcgaatgacgcgcattttgcacatcaacaaagaccccgtgtacttttgggccacggtactggggaagagtcgatcgcttaagtgcggctggtccttcaatggacactctcgaaagtactgacaaaataacgatacggagtctgcaggatggagagccgtgatctaaaaaagaaccacgatattctcgttaacatcctgcaatttgttgattcaaaatcgtattggtgttccactgccccgtgggttgctacaccatttggttacacaccgtacacgaggcggtttcattttagtattccgtcgactgtatgaagaggattcgtctacatgtttgcgtgggtcaatgagtgtcctgtgtgtgccattcgacagcagccgccgctacgcgtgtgtgagtgagtttaagttgtcaagtttaagttgtcgtcgactgtgatgtagtgtttggctgtcttcacaatactgtatcagataagacgatcttcctggaaaaattgtcacaatctagaacaaaaacgcaaattgcattctctccaaatccagccatagcaaatcataaccatagcaaataaaccctaaaccctttttttttttaacccgctccataccatgtttcgcaaccagtcaaaatcggccgggaggcaggaacgcccattatatgctaaatgcccattatgcacacgaagtatgacaaatggaatgtgtttgtgagggacaatcttaaatgcgtcttggacagtattgaaccctgtaagcacacacactgtcggcttcgacaatacggattcctcatttaaaaatcccatctgtaccaggtatccttatacccaatccataaaagtcctgaattaaaacccatgtcccccccggtgttgcaatgagaaaatgacggtcgcataaaaaagatccctatataattatctattagaaatcctcgaagcttaacacgagtcagcagctcaatttgagacaaacatggcatctcgggaagatccccttgccgacatcctcacatcagcaatcgcccacatcaagcgaatgcttccagattggtcacccccagacatcgggcacccatatgctaccctgacgccgtacaagagcggctatgctatgctcggcaagcttaagcctggcgcccagatcatggtaaaagacgcatccggttacaggcaccatggcatctttgtcgggcagcaagtggtggcaccaggggatatcgaagtcccgacagtcgttgatgtgtggggaatttctaaggagcaggccaacgtctccttgcgatcctacgaagacttcgttgccaacggctctatctttgcagaggctttgtaccccgaaggggctgctctggatcagaccctctcggcaagccttgccctcgctctagtcaaagatgctgagcaaaccccatttgtctacaacgccgcatttaacaactgcgagcactttgcaacgatgtgtcgctgcctcaggtgtgcatggaaggcatgccatctcatcattgacgcacagtttgctgaactgaatacattccctacatcacatctgcctccccgcggttttgtaggtatctgaatgaatcacaagcccataaccgtttggcctaagaatcgcagtagacggctcagtttatggcccttaccacatgaacacctctgaaaagactctccatctctggaacaacaattatttgagacataagcaccgaggaatcacaattccgctccatacaatgtttagcaaccagtcaaaatcggccgggaggcaggaacgcccattgaatgccggaggctcaaatcaatccctattttaaacggaaaatgaacaataatattactaaggatgacccgttgaacaattttacacatcattccatccatttttcaagtacgtcaacgaagtgagtcctgccagcggtgatatgtcgtccacgtcggtgttcgaactgtccaggtgaaccaacgaagtgagtcctgccagcggtgatatgtcgtccacacgtgtggacgacatgttcaggtgaatcaacgaagtgaggccggaaagcggtgatatgtcgtacacgtcggtgttcgaaatgtcgaggtgcaccaatggagtgagtcctgccagtggtgatatgtcgtccacacgtgtggacgccatgttcaggtgaatcaacgaagtgagtcctgccagcggtgataataggtcccgtgtgtacgccatgttcagatgaaccaacgcggtgagtccggaaagctgtgatagcgaaatgtctaggtgaatcaaagaagtgagggcggccagtggtgatatgtcggtcacaagtgtgtgcgccatgttcaggtgaatcaacgaagtgagtccgtacagagcttgtatgttgtacagaggtgtgtgcgacatgttcaggtgcgtcaacgaagtgagtccggacagcggtgataatatctcttcgtccacgtaggtgtgcgacatgttcaggtgcgtcaacgaagtgagtccgtactgtggcgatatgtcggtcacgtaggtgttcgatatgtccaggtgaaccaacgaagtgaggccggacagcggagatatgtcttggatcttgtcttcgatagccgacattgattggtagggtacgtattccccacgattgacacctattttcaactctttgagcctgcaaatgcgtgataatgcgtattccaaactgttataatgtcttaagtggatccttttgacacaccggggtgcggagcatctccactgtttgcaaacgagaggcacttgtttgaggtgggattcgttcgaaatcgcattggatagaatgatctccaatacattttcattgatttcgtcaaaggaactcattcgtttgtgaagtgtgctgtgctgtgctgatggttgtttatactgaagaatggttgtttacacttcagtagaggacgagaatccgccaccgcatccgtgtgtcatgaatgtacgtttgcgtgtgtcaatgagggcctgcgtgtgccattcgaccgtgttcggcctcttgtgtacactcctcctatacattcgtttgcgcgtgccattcggtgtccgatacattcgacagtgttccgccgtttgcgtgtgtcctccgatggacaagtcagatcctggggtttaaatatcaaaatttctaggacattgcgaatgtccaaattgacactaattgctgccgtttctgctaaaggattattgatgcgcacgatgttagacatcagtttgacttttcagggtactttgaacatgtaaattcagtgtctttagatgccttgaattttttgtgtcaatcacctgaagacagtatctgtattgacaagatcggttacaaatcttgaattggtcaacttttcagaatcccccaatataaggtgtcccaatatcaaatgtccctagctgtatgggtcttcctcctccaattcttagtaaatttcctggctgtggatattttgacagaagacgcgtccaccgcgattcacagctgtcacgatcatacgagaaattttcacatatccaagtgaggttccgtctttcaggtccatgtttatgagatgcggtagccaggacaaaagtctagtcgcgcccatagtggtctgctgtatggccttcgacaccttggcatgtccatactgggcaggggggggttgaggattttcggctccacaacgaaaagggtgttgatagcatgtgagaatacaagggcgcttccgttggcgatcttgtagcagccgtcatcgaagaagtactccacagcgacgaggaacaaacgtgacggtggggatgtgtggtgtctttgtttaataaggtgaagcaatgcgtcatacttcaagatgcgtggatcaccggaaacaaccgatgacgcccgcagtgcatggagacggctgacattctggcagtggaggcgatcaagaaacttggttgtgccgagactgtccatgtccagcgacaacgcctttcctagtttgcggactggttttgaaatgggctgacaaggtgggatatatatatcggtcggcatcgtgtcgatgaatactctttttcttcgcgcaatcgctcaatggtttttatcaggtatgtatgttgcgttgtttagactcgttttttagaaacgcacacgaaacacttgtcgtcgattaaagccgcattgagtcttacgcaaccgcattcactgtggttgctactgctgttcttttagtaccccattgctatttggggccattggctgccatgcaaaacatgcgatgtcccgtatgattctaagagcatcagaatcaccataaatcgtcttcccacaccacttgtaccgaattatttagagtgaccagtactttatgttcatatgtcccaattccgtgatacttcgtagcaagaataatgacgttagtctgcttatacttcctagcacagactttgtcaaatccccaccagaatccatcttcatccatccatgttctcttgttgtgcaactggcactggagctcgttaggaatgtatcgttcgatgtaatcactaccccattcaggcacgaggcctctcatgaggcgggccaattccaatgttttttgcatttcaattgtatcaagatgaacatcttggaccccagtgcaaatcaagtcggacgtacccgacacagtgatgtccgaagcgtaatctgtcattctatagttattctcaaataaagagggacaccctttataatgatggacgaggccgtcacatccaatccaccaaggagacaccaatcatcatcgaatcacatccaataagtgctcccccaagagtatcgacatcgttccgccgtttgatataagatgattttgtgcgcggtgatcgtctgaagacgtcttggtcagtcagtcgtcgtcttgtggtctgccatgtaaaaataattgtacaactctctcagactgcagccaactaactacttgaagcatgaacaaagggtgcttgattgaggcctctgcctgatgtaaggtgagaagcccaagtgttacactcagaccggtgagaagcccaagcgttacagtgaatggtgtacgcgagtcatcaaaatgaatccaatctgcccgcgctcccccttcagaaacaaatatatggggtgaaaacgattccatgtaaatacccacttattgtccagcagaagcctgcttgggaccattcggttttctttggatgacagtcctacggacctaccgtgaatgcgattgcgtaagatgcggtggctcattcaaaacacggaaacacaaaaacacacaaatttactaaacattggttagttcccctttacactcggacaagggaattatgttacataatatgccgagtcccccaaaatcctcttgtatgtgtttatcttctacacttcgctcgacactgcgttatgtaaagaacctgtcagcttgtaatcaattgtgcgtcctaccacaacttccagtttgcaatatttctttggcctcgggttgggtacattgtaaatcaattgtggatgttaatggctgcatttaggtcacggtttacaaacaacttgctgttatccatggtgtaactgcaccatagcaagcctcgaaccgtgcgcccttctttttcggactgcacactctggaggacggtggtgctgtccttgtgccagatctttgtggtacggaattcgtcaatgacggcaactcgccccttgaaacggtcgctaaacgcattgaacgcgctcgttgtagggacagaaagttcacccttgccaccaggggcaaacttagaagaaccgtatgcgatgacaattgttttcctctcaccgacatccgcctggacctcgttgaagaagcgtgctaagacacgtttcttaccaccgtagagccgcaggcgctgcgcgacacaccgcgacttggacatctccccccatcgagaatcccaatggttgaccattacagtcacgtaagcgtcaaacgactctagagatgtgcgcttgggactgttgtccttcaggtcgtcaaggcagtcctggatgttagacaaccacttcttggtcggacctctagatttgaagaccccgctctcaacgtagtaccgctcccgcgtgagtctcttgctcccaaactcgcagtgcctcttcctcttcctaccccccttatctttttcttcgaccttatttttcttccaagtcaaaaaggcaatgttgcagcggccagggtcgtttgcaacgacaaccacattggggtcggactcggaaaactcgcggagagtcttggtctgcttcttaatcgccgttccgtcgtccttgattgaaatctttttcttctcggccctaagaaagtgggtacaagccattacgccgtcagtgtctatggtgcatgtaaacacacctttcccagtagaacgggtgttttccacatcgaagaccgactcccagtgctccttgttcgtcagcgtcttttcgagactcttgacgagacccacgtccttgaggacgcccagtaggccgtcggtgtctatcgtgatgaaggagtgcttgactgttgggatgggagcgatgttgaccagcttggcgtagccctcgtcctctgtggcctcgaggtatcaattgataaagacgttgtaccggatcatcttggcgctgttggaaacgctcttaagccactgtcggttgatctcgtctcgtccgatgatcgagtgctgaatcttcagcaacatctttgttcgctccggtaggagcgaatgtatcgctatgaggtcttcctttactccccaagagtggatatcgtagaggaggtatcggtggaatacggtctcgtctatgccgtgctcatctttgaactccttggccaagatcctgttttccttcgagtaaacgaacttcttgatccatgtggagagatggactctgtagtggttattgaaattggtcaggtacttcttcgacgcgtggctgtacaggtttcgatcgccatcgtagcgagcgatggcacccacgtattgtttcttctttttcacaattacctcgcgcccctcaatcttctccctaaaccaatagttgttgtgaaagaacctttcgactgtggcgtccctcgtctccatgtgcgcctgtctcgaccccaccataagctgccgaatgtagttctggtcgacgctagggacacttacagtgtgaagttgcgcatctggtaccccttcgaagacttcttttaatatccggttcaccgcaacaccggcaagataagtcctcttggatacgctgtcgacccgatccttaatcaccttggtgataacgtccttgttgtccttatccgctatgatccgactcagtgtacactttaccacgttctcctcgccgtttttcctgtccttaattttggccgcccggtccggtcgcgtacgcttgtccggaggctctttattgactatcgtctccatttagtagccaatgtatctatttccttgtatcaaggtccagaaattgtattcaatgactttcgattttaacagaactcaaagccttatacacatcttggcttctatagaaatcgcgtttgacgatggagaacaccccttctattgggttgaaccaaggtgagtagggaggagtgtataggactcccacccccttgaagctgcaagtgttttgaccttcttggagtggtgaaaagcaacgttgtcaagtataattactgtgtcagttggacagtccaaattttctaaaaactcaacaaaagtatgcgtgttgaaagacccttgcctgatgttaaaataaatgtctccttttccttgttgaataagacaaaatgccgacattgtcgtcaccctaggtctcaacctcggtacaaccagtagctctccctttggtgagtagccaaacacgtctctcgtatgtcttccaaatgaagtttcgtcgatcgatacaaaagtcctcccttcctcttttaaccgttccctttggcttatgaatgacgtggttttctcatataagttatcaggcctggagaagaactttgcttttttctttgtgagcccaagcctttttatcacaacgcgaatcaattcttttgatacctcaaatccgaaagcatcctttaccttatgacgaagaacagcaagagatgcgaatggatctatttttaatgacgcctttaagaactctatgaccacatccgattttgtaggtttattccggttgtacacttttttagtggggtttgagatccacctcgagactgtcatgtggcttacattcgcaagtatagccactctcctcaaactttgcagcaatgtgtacatgtgtacaacaatcgaccgtctgtccaagttgtacatagagaattgtaattgattcaatatactgtaacattattgaccggtctgagtgtaacaaagggccttttctgggactgggtccctatattactattcaagcagaatcgccactcgcctgtgaaccattagccggccatccgaagatccctttcaaccttgcaggatacagcagtgccctcccactgccaccaggccagtgcctctgcaagagctcatcaaggcgctcgtaggttaagatcgactctgcgtcaaacattctgcccagggcagcgatgaagggtgtgcctgccttgccacctgccgtttcttcaaaagtcccagttgccaacaacatcacgtccttgtgtgcaacgcgatggaactgtgcatcatgatctgctcttgatgcgtcaagcagagatcttccgtgctggaacggcagaccaggggcaatggcattttcttcgcacatgttgagcacgcggatgagtgtgccgcaaaaacgttgc

SEQ ID NO: 300 - DNA, 21026 bp, unidentified
  misc_feature 1..21026: note = Fanzor polypeptide
  source 1..21026: mol_type = other DNA
cccacgtccttgaggacgcccagtagtccgtcggtgtctatcgtgatgaaggagtgcttgactgttgggatgggagcgatgttgaccagcttggcgtagccctcgtcctctgtggcctcgaggtatcgattgataaagacgttgtaccggatcatcttggcgctgttggaaacgctcttaagccactgtcggttgatctcgtcccgtccgatgatcgagtgctgaatcttcagcaacatctttgttcgctccggtaggagagaatgtatcgctatgaggtcttcctttactccccaagagtggatatcgtagaggaggtaccggtggaatacggtctcgtcaatgccgtgctcatctttgaactccttggccaagatcctgttttccttcgagtaaacgaacttcttgatccatgtggagagatggactctgtagtggttattgaaattggtcaggtacttcttcgacgcgtggctgtacaggtttcgatcgccatcgtagcgagcgatggcacccacgtattgtttcttctttttcacaattacctcgcgcccctcaatcttctccctaaaccaatagttgttgtgaatgaacctttcgactgtggcgtccctcgtctccatgtgcgcctgtctcgaccctaccataagctgacgaatgaagttctggtcgacgctagggacacttacagtgtgaagttgcgcatctggtaccccctcgaagacttcttttaatatccggttcaccgcaacaccggcaagataagtcctcttggatacgctgtcgacccgctccttaatcaccttggtgataacgtccttgttgtccttatccgctatgattcgactcagtgtacactttaccacgttctcctcgccgtttttcctgtccttaattttggccgcccggtccggtcgcgtacgcttgtccggaggctctttattgactatcgtctccatttagtagacaatgtatctatttcaaggtccagaaattgtattcaatgactttcgaaaaaaagcctctacgtgtttctctttaacataactcaaagccttatacacatcttggcttttatagaaatcgcgtttgacgatggagaacaccccttctattgggttgaaccaaggtgagtagggatccatcttagaaacgtattcttttgaattccattcgatttgtttggaattgtctatgaacttaatatttgatattgcgagtttaatatttgcttttttcgagtcctcgtctgtagcgtatgtgatataatgtcgtaaaatataatggcgttgcaaaactcaggaccgatcaaattatcagacctcgctgcccagttcggtcaaacggccgcagcgggacagaatctgaagctatcagaataccgcagaggcggagcatacggcgtgcttgcggcggtgggagcaaatgctgccgcacccaacgtgccatctaataattacaacatcaagattagcgatttttatggcgcttacaagatcaaaacaccggtattcaacacgatccccacgctgaccggcacgaacacgtcagcgaatgttacgttttcgatggcgagctacctagtcagctcgtccaaatatggcaccgtaacatggacgatgacgggcaaccccaccggcgtgacgataaactcctcaacgggcgtcatcacggtgacggcaggaacgatagtaaacaacagtatcacggtcactgccacgggacctggcgcgatccccgtatccaagacgttcacgatgacgctgacgacgacgactagtagcatcccatcgtttccaggagtgaataataacgcatttgtgtatgccgtcatacctggtggtccgcgcacagtgctcaactatttgcagtcattcggggtggcaaacacatccaccaacaacaataatagtttatggtttggggggcacgatacgctatactatgtaggggggcaaaacaatggaacagattttttctcactgtacaatcgtgcgagggtgatacaaggtgatggccacgcagacggaatggattgggtcgtgttcaatttcacgcaggacattaacggtgatttcgacggtaaatatctgacatctggttactttggcggggaaaacgcatcgagcggtggctcaatgggcatacaagaacttgacgtttacatatacgggtgggccaacaacgtctggaatattctatacaagctccctctgggcacaagaacatcgtcatttaaccacaccaacggtaattggttcatgtctggtgggacggttacttcgggatatggtaaatactctgactttgacagcttgaatgtgacagagataggttttggtgtttcgagtcgctttattgcgtcactgtcaccggtggtcgacacagctaaaacatcaattgagctcttaggggggactctgttttccacacccacagtcggagcgttagccgaacgactaacaaaaacgaccctgataacgggtgtagggcagtttaacaccgagaagcttgcggtcactttcacaaagctgtacggcatgtacttccttaacgacgtgcaacaatttacgatcgaatggacgttcacggacggaacaaacagcttcgactctttctttaacaaagccaataccacaaactatggcgccacatacacgtttagagtgttcaatgaatccggagggctaattttcacaagtgattcatctgtcagaaagtggtgcttcagcaactcgttcaattacgcaacgtttgcagatcgggtatatgtgtcgccagatgatggtatttggggcgccgcgatacagggaaacctggacggaaactcacccggtcttggtcttaataccaacactgggtggggtatacagaactttaatagcggggatactgcctattccggactattcaataactcagtgacgatcacatctggtacggcggtggcttttatatattcaattaatacttaacagtacacgtatttgaatttatacagatgaaaattctgctttcattctgcttcggtgtcgccaagtaataccaagacctcaaacaaacccaatgactcgcgtgtacggatatgacttgtggcgcgagaggccacccgagagcacttgacgcactttcttaggcagcccccccgttcgtccattcattcatctaccctaacccattgacaaatacagaatccgcctatctcttcacatgcgcggcgcaataccactcggcctatgtaagcaatggcgagctgttcgtatacggtcgcaacgactatgggcaactgggtctacagtcggcggaacagtaaaatgaaacatcccaataaacggtataaggcgtcgactatagtgtacgagtggatggtcctacaaaatggcccgtccagcaaagaaacctcctttcatgacgcattgcacatcaacaaagaccccgtgttcttttgggccacggtaccggggaagagtcgatcgcttaagtgcggctggtccttcaatggacactctcgaaagtaccgacaaaagaacgatacggagtctgcaggatggagagccgtgatctaaaaaagaaccacgatattctcgttaacatcctgcaatttgttgattcaaaatcgtattggtgttccactgccccgtgggttgctacaccatttggttacaccgtaaggtgtgccgtacactccagaatacggtttcattttagtattccgtcaagtgtactgtaatgtaaaagaatggtcccactttactttattttagaacaacacaaccgtgagaatttatataatgctcgacatcgaaattagtcacatactggatcgagtaaaagccggagaatgcaaatgggattggggtcaattgagtgataatccatacctgacatgggacgtcatgtcgagtaacccagacaaaccgtggaattggagtaaattgtgcttaaacccaaatgtcgtcacgtgggacatcgtgtcgagtaacccagacaaaccatgggattggtattggttgagcacaaacgccagtgtcgtcacgtgggacatcgtgtcgagtaacccagacaaaccatgggattggtattggttgagcacaaacgcgagtatttcgtgggacatcgtgtcgagtaacccggacaagccgtggaactggagtggattgagcacaaacccaagtgtagccacctgggacattgtctcgagtaacctggacaaaccatgggattggcggggattaagttcgaatcccggagtagccaattgggacatcgtgtcgactagcctggacaaaccatggggttggtattggttgagcacaaaccccagtgtagctacatggaacatcgtgtcgagtaacctggacaaaccatgggattggattggattgagcacaaacacctgtgtagccacaatggaaatcgtgtcgagtaacatggacaaaccatgggattggaattggttgagcacaaaccccaatgtcacatgggacatcgtgtttagtaaccgggacaagccgtggaactggcgtggattgagtgcgaatcccagggtagccacgtgggacattgtctccagtaacacggacaaaccatgggattggtattggttgagcaaaaaccccagtgtagcctcgtgggacattgtctcgagtaacccggacaaaccatgggactggcgtggattgagtgtaaaccccggggtagccacctgggatattgtctcgagtaacccggacaaaccatgggattggtattggttgagcacaccccccagtgtagccacatgggacatcgtgtcgagtaacatggacaaaccatgggattggtattatttgagcataaaccccagtgtagccacctgggatattgtctcgagtaacccggacaagccgtgggagtgggatggattgagtgcgaatcccggagtagccacttgggacattgtctccagtaacccggacaaaccatgggactggcatttattgagtagaaacctcaacatgttggtatccgtccaagacgcgtgccgtttagtgcgaagacgcagagccgcagcgactattcaggaaacatggagacacgtgaatacaaacccgagttatgttgtgtgccgacgcagactcttgaaagaattcattacactcccgttggtgagtacaatgtaagaagtagtatcccaaaacgcctctcgtacaatcagagacatttcagcatttaagctgacccaatccgcatcatcaacatgacacggcaatgcggtggcgtatcgttgtagttgttttcgggggtagctttttgtagttgttttcgggggtagctttttcccgatctgtctcattccattgagtttcgctgttttcaggtgcataaaaggttctaagttcatgatgtcaactcggtccccctccggtggtcgcgacaacattaggttacaccgcaaggtgtaccgtacactcaagtgtacaacgacattacgactgagcttacattggacatgagcggtgttgattgcttgatcgccagcatgcccaccgtctttctgagcgctgcgctgaatgcgtgtgatcggcaggtcagcataggtaccgacaaggtcagcccacagttccaccagctgttcattcggacatgtaatgagcgtacacatgaacactgtcatctggtgggactggtcagtctcttcattgcaacctgtgatcacatgtcaagcatgggtctgctatacaagcgctctcgtatatcgataggggaatcgcgggacagcttttagtatgaaacgcaacacattctgtgtttcctcgcctccccccaaaaccacagtttccatcgaggcgagtgtgagcgctaaaccgaccgacacacctgggtttgtcagcagcttgccttgttatcctttgggccagcttaaatgctgaaataaagagatgaagggcaaaaatatgtactcgcctttagctgatctacccattgggttcaagggtcaccggtagggtgtcccacaaattgcgtctccgactgtacttccgagagatccttgacagttcacatgcaaacgcaacggcggaaacctgtagcctctttctcgtccacacactcactctgaaaagagaaccagtcaaagtttcgccattttttttgtttttgtgtatttttgttttgcatgcgggggacctggttggtcatgggatggcatgtactccaccaggcgtgcacctgagtcctcgcgtgacactccgaacaggccattcaatccagcaattgcatcttcgcgttttacatcgatgtagtagttcttcacttgcttggatggttccgactcctgcatggttgcttgttgtacaatcggacaaggggattatatactgaattcacaacaacgtttacactcgtgtttcgaggaacggcgaccgaccactcgcatcacggcggcatctgtcgagtcgagtcacagcacactgtgatttcgcagacccgtaccgtccccacgttcgtccatccatcctcacacacaccaaggcggctttcgttgacttcgaggcgcgcgaaaaacgtggcagaaatgccacgtttacactcgtattttcatgggcgcgcgaacacacgtgtcagatatgctgacatgtttcccctggttgcgtatgccacccctcgcagaaaaagtctgccatgggtactaagaaaatggcgagcatcgaggctggcatgtggctgcatgtggattgcgtcaaccccatcggcatcaagttcgagcacgatggcattgtgagcgcccccccagaagggtattcctctgcagcagacatcaaggtcatccactatgcggggtcagagccccatggaaagcgattgatcagcgagactactctggcagagttcctggtagttggcagctctgcacgggttgtgaaagcgaggtgtcgtttctcaccgttggaggtggtcaaaagggcacgctcgcagctcggaagggcggattacaatgtgttgggaaggaactgtcagcacttcggtagctggtgctatgagggggcggctttttctagagaggtgttcaagtacggcgtcataggcaccagtttcggcctggtggtcagtattgtagggatcattgcaattgggatggcgcgggcatcttagtagaagccgccagccatgtgcgtactaaaatgatggagcaggaggacaacaccgaggtataggaactgcaataagtgggggaataaatactggcgctagcgtcacaagggaggtgcatgggcctcggtagtataaataaataatgagttgggattttataaaaagctatagaccatcctgtgcgcttgcatgcattgtacacacatgtttatagaacatgcattcgcacacgcgatcatcgttaatcctaacgcttcccgatgacattcttgatcgtattgccctattatcttccaacccaaagattgtattagtgtgtaaaactctgtgcaaaagattttctggatggccccttaccggactgatccaaccaccacaacgagttggagagatgatggcgaaaggggggcgcaccgaccttctagcagtatgcttggtgtccaatcctcttgtacaagttaagggggccctacaattgagggcgaaccaaaatgaaaacaagcttctctatgtggctgccaaggccggtcacgccgatgtctgcaagctgcttatggatccagaggttgctggacttgagttcagggcccttgcgaactatagctacagctttgccttgttggaggctgccaatgaaggtcacgcagatgtctgcaagcttctcatggatccagcggtggctggacttgagttcagggcccgggcgaactctagcgacagtagtgccttgtgggcggctgccaaggaaggtcacacagatgtctgcaagctgatgatggatccagaggtggctggaattgagtacagggccgtggcgaactctagcgacagcttggcattgtgggccgctgctagagaaggtcacgcagatgtctgcaagatgctcatggatccagcggtgtctggactcgagtatagggcccgggcgaactctaccgccagcagtgccttgtgggcggctgccaaggcaggtcacacagatgtctgcaagatgctgatggatccagaggtgtctggaattgagttcagggccagggcgaactctagcgacagctgggccttgtgtgcggctgcgaaggaaggtcacgcagatgtctgcaagctgctgatggatccagaggcggctggccctgagtacagggccctggcgaacaccagcgacagctgggcattgtgggccgctgctaaggacggtcacgcagatgtctgcaatctgctcatggatccagtggtggctggaattgagttcagggctagggcgaactctagcgacagcagggccttgcgtgaggctgccaaggcaggtcacgcagatgtctgcaagctgctcatggatccagaggtggctggacttgagttcagggctagggcgaactctaccgacagcagggccttgcgtgaggctgccaaggcaggtcacgcagatgtctgcaagctgctcatggatccagaggtggctggacttgagttaagggcccgcgcgaactctgtcaacagctgggccttgcggctggctgcgaaggtaggtcacgcagatctctgcaagctgctgatggatccagtggtggctggaattgagttcagggccagggcgtacactttcgacagcagagcattgtgggcggctgccaaggcaggtcacgcagatgtatgcaagctgctgatggatccagaggttgctggaattgagttcagggcccgggcgaactctagagacagctgggccttgcgtgaggctgccaaggcaggtcacgcagatgtctgcaagctgctcatggattcagatgcggctggcaccgagtacagctgagttgagacaaccaacgtctgtgtctttttgatcagacttccaatggcctcaaaaaccctttgttacactcagaccggtcaataatgttacagtatattgaatcaattacaattctctatgtacaacttggacagacggtcgattgtggtacacatgtacacattgctgcaaagtttgaggagagtggctatacttgcgaatgtaagccacatgacagtctcgatttgactggcgacattatgaaacatataattgcaaacggtatgcagataaaaacttcaaccaagtggccatgccgctctggttcagggagggattggaaggcaggcatggggttgatacattgcgtcatggagttgtacatgataattggattaatagggaatggtactactttgcctcatggtatcaccggattattaatcggtaaatagatacttgttcaagtgcagtttatgtttactgcaaattctaagaaagtgcagctcagttgaatgtagtccgaataagttagaaaatcggagggctgtctcgatattatgtggacgcgtttgactcatgttattaattgcatgcaagaaatcattttctttgaacacaagcaatctccccggttctctagttgtttgcatgtaaggtaaatcaacttgtatttcgttgaagtcttcacatatctccctgttcagatcgacatgtatgtagcagtcttgacgagaaacaactctatctatatcagacacggggtgagtggatgcctgaataaccaagcgacaatcgttcatattagttttctttttataattatcatcgccttatgctttttgacctgatttacttaaacccattaagcaaaatagtagtgagtaagattaaatttacaaatttccggtgttcctttcataccatacagctagggacatttgattgtgggacaccttttattttggggatttgaccaattcaagctttgtaaccgatcttgtcaatacacatactgtcttcaggagattgatacaaaacattcaatcatgataacgtgcgcgtattagggtataaggaaattgtctgacaatgagactgtttcatcacgtgcttacagagttgggagcggatctaaaagagaaaacaacaaaaaaacgcccccgtctgttcagtatccttccacgcaagggcggcttcaccatttcttacgtccctatatcgtccatgacactcatgaagcttctcagcatgggcgattcgccgctcgagagcgtccgtggcgatggacgtcacgagaatcattccatgttgtggagaaagtacttcaatgtccaaggacttgagacgaaagggtctcgttttgacaaccgaatcctcagcgacggcaaaggggtctccgtccaaatgaagcatcaggtgggtaaagatatcgctggagaaggaggaggagataatgcggggtattccaaagacgcaagtatcgaagactgccaggacgcttctttgcgccagggtgcgctgcgtgtcggtatcgacccgggtatgacagatatcgtcactatagcatcttctgacggtcgagtcgagtctttcagctctgcccgctttagcgaagcagctgggtacaataccagcaatcgtcgcacaaacaaatggaatgccgatacgcaagacctcgtgaagtccataccatcgccgactacgagcagtatgcacgacatgcaggaccatgtcagaggttacctcagcgcgctcccgacccttcaacaccgagccaacagaggttaccgatcgatgcgattctttcgatatgtgggcaaacagaagacgattgaaaaggtatgctatttgattgctccaaaagcacagaagaaaacgattgaagaaaaggtatgcgatgtgattgctccaaaagcaaagaagaccgttgttggcttcggcaactggtccaaccagggctatggcatcagtcgttcgtgttctggaccagtgaaagagatcaggaagtgcctttcacgtcgtcagaatgttctgttcaaaaacgtcgacgaacgcaacacttcttgtacttgccacggctgcttccagaagctcgtcacatgaaggcagacagcgtcgtctggcgcagagttcaaaacgagccctccgccctcatcgacggggctcctacaacaacaacaacgttgagaagcagaagacggtggtgaagaacgttaaggtccacaaagtactgcactgtcgcaacagtgtcaaaagcgcatcatccaatgtgcgctgtggtgcaacctggaaccgagacgtgaacgctgccaagaaccttcttctgcttctgacgacgtggatggacgggaaagagcgaccagcggcattttgtgtgccctcctcatcgcccaccccaaaaaccacagtttccggagaggcaaatgtgggcgctcaaccaaccgacccacctgggtcagttagcagcttacaattgttatcctctgggccagcttaaatgctgaaatacgggatgaaggacacgaaggattgggaccttgatacaaaacctttagctgaccaacccaatcaattgggttcaagggtcaccggtaagggtgtcccataaattctgtctctgactgtatcacattttagtgaacgtgttagccaattcagtccatgacttgcaatcggcagggtgtcgcatgtctcgtccaatgaaattaattgtgagttggttaggcgaacggaggaaacatgatcggataacgcacgcacggcggcggatgtcgagatgatgctgttgatgttgctggccacgcacccactcgcactcgtattgtcacgacacatgacgcatcatccatcctcacacagccttacacacgcgaatctgtccaactgcgactcattcaatgcgccgaacgaaccagaattcgcccccccgtacacacacgtggtggtggtgcaatgcatttgttcaggccaacaaaaatggggagacgttgattcattttgttcgtccaccgagtgtagagacatatcgacaaaacggaagaaaaagtccaatgatcgacactttgcaatatagtgtgttgcacggagtattatgtgcactgggtcctgcagacagtgtccggttggcatcatgctcgaaatctcttaaccattccgttatgagtttggcaagtcttgagactttgataccaatactacgggagcgattgaaggaggcttgttggtcactattacaagctgggtattgtgttggagtcaaaaatacacttgccagttccatatcgagcgcgaattcgatgaaacattcacttacacagataagatgttacacgaatgtgattatttcgtcatgggtgcacctgaaacaaggatgtatcgctttcaagctttgattagggaaactgtggtcaacaacatgaagatgtttggagaagtcttcgacaggtacatcatccatacaaatgcacggctgcagagaaagggcaatcgcccaacaatccgtgcgaagaagattgaaaaacatttcgctagatgcgccgaacaattatcacgagtcgcccaaaccatgagttcagatactacagtcgacggaatactaaaatgaaaccgcctcgtgtacggcacaccttacggtgtagcaacccactgggttgggtgggtggtgaacgttttggtcacgcgaaattgctatccaaaggaccgtaccagcagactgccgctgggaagacggacctgcaagactcgatgctgccggtgctcagtaaacatcgtgcagcgaatgagcagggtgaacccggcagaagcaagcaagtacgaggacgacgacgccttcctccagggaggcgccggctccgtcaccttcagagccatgcagggcatggcactgcatagccggacctgcgtcagggtcctcacggagaggggcgtgccgctgccagaggaactacggacgcactgtcaagattcacaatggccatgtactcggggccagccacatctggatccatcaaaagcaagcagacatcggcgtgaccagccttcgcagccaccatcaaggcccagctgtcgctagcgttcgcccgggccctgaactcaagtccagccactgctggatccatcagcagcttgcagacatctgcgtgacctgccttggcagccgcccacaatgctctgctgtcgaaagtgtacgccatggccctgaactcaattccagccaccgctggatccatcagcagcttgcagacatctgcgtgacctgcatgggcagccagccacaatgcccagctgtcgctagaattagccctggcatgaactcaagtccagccaccgcaggatccatgagcagcttgcagacatctgcgtgaccggcattcgcagccgcccccaaggcccagctgaggtagagttcgccagggcccctgaactcaattccagccacctctggatcacatcagcatcttgcacacatctgcgtgacctccttcgcagccagccacaaggccctgctgttagagagagttcgccctagcccttgaactcaattccagccaccgctggatccatcagcagattgcagacatctgcgtgacctgcattggcagccaccctgcccagggcccagctgtcgctagagttcgccacggcacttgtactcaattccagccacctctggatccatcagcagcttgagacatctggtgacctgccttggcagctcacgcaaggccactgctgtcgcttagagttcgcctggccctgaacctcaactccagccacctctggatccatgagcatcttgcagacatctgcgtgacctccataggcagcctcacgcaaggcaaagctgttgacagagttagccagggccctgaactcaattccagcaccgctggatccatcaacagcttgcagacatctgcgtggaccggccttggcagccacatagagaagattgttttcattttgggtcgccctcaattgtagggcccccctcaacctgtacaagaggattggacaccaagcatactgctagaaggtcggcgcgccccccctttcgccatcatctctccaaatcgctgtggtggttggatcagtccggtaaggggccatccagaacactcttttgcacagagtttacacactaatacaactctttgggttggaagagaatagggcaatccgacaagaatgtcatggggaactttctaataaggagtggaaacgtgatcgcgtgttcgatgcatgttcgatgaacggtgtgtacaggatgtataaataaacaatgagttgggataacacccataaactggttgccacttgcctggcgtttatctgcaagcggcactttcctggactggaaagcgacaagcgggcaagctgtaagagtcattgcctggcggtatctgcaagcgttagagtgttagaggaaactggccggggatctgcattatgttatcaagaccacatgccgccatcctcacacacgccgcctgggtgctgtagagattgttgattaccacaaccactcacttcattccagcacgcacttatcacagcaaactgcggaacactgtcgacttataaggcaatcatccacctccagccatggtcgtgctgccaatttctcctcacaccagtgaacatcccacgcacaagaccattcatggcatcaatattttgggtggtggcaccgattacaaactcttccagaaaaatcggccgggaggcaggaacgcccattaatggtgatgcaaaacaccatgcggaactgtattcaagataaagagggaattacagggattttcatagatttgaatttatgatgttctttactttgtctatgaaactgttacaataaccacctagatcgcttttaaattcagggctatgtatcaatgatttgttttgaagatatttcaaccattgattactcacaatcaaccattaaatgcaacttttcatcttattgcttgacaaggttcatcgttaatattgctgtgtagattaaatgggccgtataacacatctgcaactcattctatataagtttgtacccattgttaattgtaagttttaataaacttgtatattaatgagcgttcctgcctcccgctatttttgactgtggtgcgacaacatgtatggagaggaatggggatttccttggtgctgctatctaacttagcgagtcgttccaggaggaggctctaaatccctgattaggaaatttttaaaaaaaatcggcgggcgacaggacgccccactttattacgtttgggtgtacggttggggtgtttcgccaacactcgacggaatactaaaattacacggagttacggtacacctgcggctgttgtcacctcctgttgtcgcgaccccggaggggcggaccgtattgttgtctacaacaaatacgagttttatttatcaacaacacacgagatgcatgtgggaaatggacaagaggtcgtcctagacccatcaattccatgcccgtgcagcctttgctattgtgagagagaaagcgcgatccccgggtcgagtaaatgcctgtttcggaggaggaatagaaaaggtcctcgtgacctctgtgtaccagctcgatcgaattttgagaatcatcgacaagggaagtggcgaagccacccctcctgtgcttctcttgtgcgcctttatgtattgtacaacctccctaagtggtcgcaatcagcgacctttggcatcgttttcgatttcgtgtgaccaaaacgttcaccacccaacctaagcttacgtctgctgaacaaaacatggatcttgtaaacacgttcttttttttacccgtctcccacgacatacgagtcgttttgaactcattgtcacagaacgaaacgtcctctttgaaaattctttacacgatgcgaacatggcccccgtgggaactgccaacttctcccggtccaggcttcagcttacaaagtgttgctattacagatgtcgaggagctcatcaatactgtcacgtcacaaattcaaaatcatgatggaattggagaagacgatcttggacacaggacgccttcgcataacttcagttgccgacctccctgacattgcggtcgcatccactttggtttagggggaatggcgaagaagaatcttgaaacagccgcgtgaccatgataaccgcctcataaatgtccgacaatccgacatgatcggtcgcaagaacttgtgggtcgggggaatgtacgacagcagaatcttgacacaggacgcgtgaccatggatacatgccaccatcaatgccgacatcccatgattgtctgtcgccagcactgttcgtttggagagtatccaagaagaatattgacacatgctgcattcgcatgcccccctgaatgccacaagcacgcatcagtgccgacatcctccagattattcgtagcaagcacttgctcgttcggagagagttcctaatgagaatctcgaccagggagacgttgccctgtttcaccccccaatcaatgccgtctccccagagtaattcggaggcttgcaagacgcattgccgcctcgaaaatgcatcggatcgttatccagcatccgttcggcaaggaccacggcaccgatgtcgcattgcatgcggaacgtgtggtcttgtcgagggtttgcctctcgaatgcgagctccagacgatcggccatgcgaaacccgccgcggatggcctttgtggtgcaccaaacattgcgggttctcgccgcagagcgtcgcgatggacacggatttcaagggaacggtaaactctcaacgtggaaagatggagaagaagacaccgacaagacgaagacatttctcgttcgcggtggtggttgtgagccaaaccgaatgactagcggttttccaaaaagaggagatcatagggggctgtttaagtacgagaatcgatcaatctttacactcggctgtgaaaattgttgtgtacaggtcacactggaggcgtgtattttacagagttcaaatcagtcatgggatgtgagtatttgggggcggccttggagtgagacccatcctttttacactcgacggatactaaatgaaaaccgcttttggagtgtacggtacaccttgaggtctccgttatcaaccgtgagataagagaaacaatgctcaaacaatgtattcttgttgctaatggcatatattaaatggatataactcagttttgcaacacctccattcaatcgacacaaatctccacacaacttgtatgcattgtcagcaatggactacactaacaggcaagttcgccaaatattgaaaaattgcgaacggctaatcaaatggtatacaaaccaacgaaaaacaaactgaactcctcgatcaatcatttcagactacaacgtttgtacggaaccatggcctttcagaatttgcaatcaaatcatgcaattacccaatcttctacatgacaatgtccgaagatgccgatttgctggaatgtgacattttaataccatcgtttctcccgccacatgtataaattgtccaatactatgcatgactcctccgcgacaaacggcgggacactgtcgacccatacgtcccactctacagggttcgaaaacgttatgattcttatgaagagtttgacctaatccggcaagctcacggttgaaggagcccgcaccagatgcctggctgatgtcatgtgtagcgtttttcacggaccccacgtcttgcgcatcgtggcagaaaaacatgggttcgcataccgaataaaatagcttggtttacataagcgcaaagcccaaccttcacgggatattatacgagataatccattaaactatgcttacatcggactaaatagcacattcgagacggtgtcaaattatggaacaaaggggtggggatgagtaaatccagtagactctgtgacggtacgttacgacttgctatccagacaaacattggaattggtacgtggtcagcagaaatcctgaaaagaaacccctcatacatgggatattatacaagccaaccccgataaaccatgggactggcgtggattgagcggcaaaccccaaatttcatatgggatgttattaaagccaccctgctcaacatgggactggcgtgaattgagcgccaaacccacatatcacatgggtattataccaaccaacccagatactaaaccatgggtggtataatatcagccaataaacccttgcgtcaaaatggtttatgtcaaagccaaccccggacaaaccatgggaactggtgtggattgacgcggcaaaccccgcctcacatggggaggatcttataccaagccaccctgataaaccatgggtattggtttatttatgagccacaaccaccccaaattcgcactgggatattgttttccccccacatcaacccgaccaacactatggaattggacccctgggataagccaaaaccccaatatcacttgggtagttttacagcccacaccctgataaaccatggattgtcactggatcagcgcgaaaaccccaatcattcaccatgggaatgttgcatccacccgacaaacctggatggccctggtacagcggcacccccaatatcattgggcattttatcaagccaaaccccaccaaaacatggatttggtatgggtcagcaagaagaaacccccaacatcacagggtatatagccacagccataccccgacaacccatggaattggtactggatcgcaaaaaacgtacactacccatgtgacttttatccaaagccaaccccgaacaaacatggatggctggttgtggattgagcgcaaaccccatatctgggagttgtcgtgagcaaacgcgataacccatggaattggtagagttgagctcaaccaccaatatggtgtatctacccaagcatttgcgatatcatcgtcgatggtaggcagcagcaaccattcagaaaaatatgggatacgacaatacaaaccgagttatatgttgtcacaaacaggttcttaggattataatgaaatggtttattccatcaatttaaattatttattatctttcaatcgggccaacaaaatgtatcctcgatccacacgatcgtacgcggtggcttgcgaactccatcaagcgagtatgtagtcgatgagctcagccatactcgtctgtattatcccggctgtccctcacatgcaaagcaggaaggggcaacacaacgcaagtcactatctctatatgacgaatgcaaaggttgaaacaaaataacctcgcatctcgttgtttgccacaacaagatgcaaggaggatcgttgaacacacggcatgtggccgcgataatgggctcggcgtcctcaaatcccgagtagtaacaacatgatgtacctggtatcctgattgctgccgatcgctttcacaaatgaatcagtgttgcggagtccaagacagcgtcagactggttgcaagatgaaaatgcacgtcacgaagttggttgtttgtttgatccactctcagtggtgagggcatcggaaggctcagccgcaaaataacaatgaaggcaaaaactgttcctctgtgaggcatgtgtcgcttgcgacaacatcctccaagtggacacttcgccaccgttggtccgaacggcgcgggaggggatccatactgcacacaagacgatccggcacgagtcctcgtgagtttgccaccgtggaatcaacagatccacagtcaaccttcttctaagggcccgagcatcaccacgacatgaccaagttgagtgggttgtaagcaaacgcgaaaccccgtgctgtggtgccctggtaatccaacacctcacattcttgcccccaatggttccggcttcacgcatgtgcacccacaagtccttcgaatgtgaccctcggaaacataattgtaatccacatacaacagaagtgccttgttttgggatttaaatggcgaggaggattcggttgcttgatggatggggaaagcgggacgagtcgggtgactcatgtctggcggcaaaagttgatgatgatcttgcctctttcctctcctccccctcccttctttcgtttctctccggttttattgaaatatatttctccctaggatgtgggacccgtacacaaaaaacgcccgcagaggatgcaaaaagaaagacggatcaattctactaacccagggccagctagtgttggtgtatatgaaaccttcagcaactagcacgtcaagctgaacttgctgtcccttcgttttcccccaaatattatggagggcaatataaggtatattccagtcaactgaagggcaatcctttagatgatgagatgcgaatagagcattgcttgagtaccggtgtgtgtcgtatcaggaggacgaaaaaaaatattgactgtgtcttcaaagtttaaatatttatgagcgtgagcgtgtgtgtgtgtgtgtgtgtgtgtgtgtgtgtgtgtgtgtgtgtgggggggggggggggggggggacctaatgaaatcaactgtaagatagatcgtcttcagatgagctaactaactgtcagaaataactaactgtcaggacagaaattgttctcctctttcacattacatcaataaaacccctgattagtttggggaaccagaagaaacacaaaattttagcttcccatagccaaccagccagccatatgatattaaaggcatagctagactacgtcttcaagctcacaatttgaacgatgaatctgataggagtaccctcgttatagtagaacttgcaggtgctgtgaatcctgtgatatggtggatgtgtggtttacggtagaagagtggaagaaaatgaaatgtcctttatattccgaggataggaattcgcttcttgacaaagtgaactcctaggcagcgtcgcaagcgacgcggaaaattggcatgtaggttgttctcataataccactgtgcaggggcgagtctcaccctctgcgtctgaccccttacattgccgctgtttggccccggaaaaaaatgctcaacactcactcataccgccatggcagtgtgccaatcccacccatgcagccgtggtagtaccccaaacccacccatacagccatgcaa

SEQ ID NO: 301 - DNA, 20849 bp, unidentified
  misc_feature 1..20849: note = Fanzor polypeptide
  source 1..20849: mol_type = other DNA
gccatcaaggccatgctgtttatatggttcgccctggccctgtactcaagtccagccaccactggatccatcaaaagcttgcagacatctgcgtgaccttcctttgcagcctcacacaaggcccagctggccatatggttcgccctggcccttttctcaagtccagccacctctggatccatgagcagcttgcaaacatctgcatgacctttcgttgcagcctcacacaaggccctgctgtctctagagttcgccctggccctgaactcaattccagccaccgctggatccatgagcagcttgcaaacatctgcgtgacctttcgttgcagccgccaacaaggccctgctgtcgctagagtttgccctggccctgaactcaattccagccaccgctggatccatgagcagcttgcagacatctgcgtgacctgccttggcagcctcacacaatgccttgctgtcgctatagttcgcccaggccctgaactcaagtccagccaccgctggatccatcagcagcttgcagatatctgcgtgaccttcattggcagccagccacaatgcccagctgtcgctatagttcgccctggccctgaactcaagtccagccacatctggatccattagcatcttgcagacatctgcgtgaccttccttggcagccacatagagaagcttgttttcattttggttcgccctcaattgtaggaccccgttcacctgtacaagaggattggacaccaagcatactgctagaaggtcggcgcgcccccctttcgccatcatctctccaactcgctgtggtggttggatcagtccggtaaggggccatccagaaaatctgttgtgcagagttttacacactaatacaatctttgggttggaagagaatagggcaatacgatcaagaatgtcatggggaaacgttgggaatggaaacgatgatcgcgtgtgcgaatgcatgttcgatgaacatgtttgtacaatgcgtgcaagcgcacaggatggtataaataaatactgagttgggataaaccctataaaccctataaaccctataaaccctgggttgcacttgcctggcatgaaagcgacaagcggcacttgcccggcggtatctgcaagcggtacagaatgggtgttcctgcctcctggcgatttttttgaattttccaagcagaagttagagccgtacaaacgactcactcactcgccaaccagagatttagttctccgtggaattgcgattccgaccagaccaggctccgaaaccagtcaaaatacctccgtgaggcaggaactgtactggtgcaaattgtcaatacaacagatattgtcttcaggagattgacacaaaacattcaaggacatagaagttacatcttcaaagtagcctgaaaagtcaaagtgctggctcacatcgtgcgcatcaatcattttcaaagagtttcctgcctcatcataatcaaatatttctgctacatctggaattattgggcacacgcagcgagaaaactgaacacattgctgaaaagtttgaggagagtggataaatacatgctctacggtggcaataaacgtgtctttcctacactcgggcaagggaattatgttacataatatgccgagtcccccaaaatcctcttgtatgtgtttatcttctacacttcgctcgacactgcgttctgtaaagaacctgtcagcttgtaatcaattgtgcgtcctaccacaacttccagtttgcaatatttctttggcctcgcaagaattccggggcgggttgggtacattgtaaagcaattgtggatgttaatggctgcatttaggtcacggtttacaaacaacttgctgttctccatggtggaactgcaccatagcaagcctcgaaccgtgcgcccttctttttcggactgcacactctggaggacggtggtgctgtccttgtgccagatctttgtggtacggaattcgtcaatgacggcaactctccccttgaaacggtcgctaaacgcattgaacgcgctcgttgtagggacagaaagttcacccttgccaccaggggcaaacttagaagaaccgtatgcgatgacaattgttttcctctcaccgacatccgcctggacctcgttgaagaagcgtgctaagacacgtttcttgccaccgtagagccgcaggcgctgcgcgccccaccgcgacttggacatctccccccatcgagaatcccaatggttgaccattacagtcacgtaagcatcaaacgactctagagatgtgcgcttgggactgttgtccttcaggtcgtcaaggcagtcctggatgttagacaaccacttcttggtcggacctctagatttgaagaccccgctctcaacgtagtaccgctcccgcgtgagtctcttgctcccgaactcgcagtgcatcttcctcttcctaccccccttatctttttcttcgaccttatttttcttccaagtcaaaaaggcaatgttgcagcggccagggtcgtttgcaacgaccaccacattggggtcggactcggaaaactcgcggagagtcttggtctgcttcttaatcgccgttccgtcgtccttgattgaaatctttttcttctcggccctaagaaagtgggtacaagccattacgccgtcagtgtctatggtgcatgtaaacacacctttcccagaagaacggatgttttccacatcgaagaccgactcccagtgctccttgttcgtcagcgtcttttcgagactctcgacgagacccacgtccttgaggacgcccagtaggccgtcggtgtctatcgtgatgaaggagtgcttgactgttgggatgggagcgatgttgaccagcttggcgtagccctcgtcctctgtggcctcgaggtatcgattgataaagacgttgtaccggatcatcttggcgctgttggaaacgctcttaagccactgtcggttgatcttgtcccgtccgatgatcgagtgctgaatcttcagaaacatctttgttcactccggtaggagcgaatgtatcgctatgaggtcttcctttactccccaagagtggatatcgtagaggaggtatcggtggaatacggtattcgtgtaatccggttgtacacttttttagtggggtttgagatccacctcgagactgtcatgtggcttacatttgcaagtatagccactctcctcaaactttgcagcaatgtgtacatgtgtacaacaatcgaccgtctgtccaagttgtacatagagaattgtaattgattcaatatactgtaacattattgaccggtctgagtgtaacacaagacctagctgctgtcaagattcacaagggccctgtactcggggccagccgcctctggatccatcaaaagcgagcagacatcggcgtgacctgccttggcagccgcccacaaagccctgccgtctctagagttcgccctggccctgaactcaattccagccaccgctggatccatgagcagcttgcagacatctgcgtgaccttcactggcagccgcccacaaggccctgctggcgctagagttcgccctggccctgaactcaagtccagcgactgctggatccatgagcagcttgcagacatctgcgtgacctttcgttgcagcatccaacaaggccctgctggcgctagagttcgccctggccctgtactcaagtccagccacctctggatccatgagcagcttgcagacatctgcgtggcctgcattggccgcagcctccaaggccatgctgttgacagagttcgcccgggccctgaactcaagtccagccaccgctggatccatcagcagcttgcagacatctgcgtgcccttcctttgcagcctcaaacaaggcccagctggccatatcgttcgccctacccctgtactctagtccagccacctctggatccatcagcagcttgcagacatctgcgtgaccttcccttgcagccgcccacaaggccctgctgtcgatagagttcgccctgcccctgaactcaattccagccacctctggatccatgagcagcttgcagacatctgcatgacctgcattggcagccgcccacaatgcctagctgtctctagagttcgccatggcccttagctcaattccagtcaccgctggatccatgagcagcttgcagacatctgcgtgaccttcctctgcagcaacccacaaggccctgctttcgctagagttcgccctggcccttagctcaattccagccaccgctggatccatcagcagcttgcatacatctgcatgaccttcccttgcagccgtccacaaggccctgctgtcgatagagttcgccctgcccctgaactcaattccagccacctctggatctatgagcagcttgcagacatctgcatgacctgcattggcagccgcccacaatgcccagctctctctagagttcgccctggccctgaactcaagtccagccaccgctggatccatcagcagcttgcagacatctgcgtgaccttccttggaagccacatagagaagcttgttttcattttggttcgccctcaattgtaggaccccgttcacctgtacaagaggattggacaccaagcatactgctagaaggtcggcgcgcccccctttcgccaacatctctccaactcgctgtggtggttggatcagtccggtaaggggccatccagaaaatctgttgtgcagagttttacacactaatacaatctttgggttggaagagaatagggcaattcgatcaagaatgtcatggggacacgtaaggagtggaaacaatgatcgcgtgtgcgactgcattttcgatgttcatgcatgcaagcgcacaggatggtataaataaataatgagttgggataaaccctataaaccctgggtttcactttcctggcatgcaagaggcaagcggcaagaggcacttttcctggcggtatctgcaagcggtatagaatgggtgttcctgcctcccggcgattcttttgaattttcaaagcagaagttagagccgtacgaacgactcactcactcgccaaccagagatttagctctccgatgaatttcgattccgaccagaccagtttccaaaaccagtcaaaatccctccgggatgcaggtcacacgaaatcgaaaactatgccaaaggtcgctgattgcgaccacgtaggggtaaggttgtacaataaacgtaaaggcgcacaagagtagcacaggaggggtggcttcgccacttcccttgtcgattctcaaaaatcgatcgagcggtacccagaggtacgaggactgcgattctctccagaaacatgcatttactcggaccgggatcgctcttctgctctcacaatcgcaaggctgcactgcatggaattgatgggtctaggacgacctcttccatttgcccacagcagctctgttgttgttgatgaataaaaactcgtattgttgtagacaccactcggtccccctccggtggtcgcgacaacattaggttacaccgcaaggtgtgccgtacacgaagcggtttcatttaagtattccgttgactgtagtgcaaattgtcagtacaacagatattgtcttcaggagattgattgacacaaaacattcaaggactgttacatcttcaaagtagcctgaaaagtttgagtagagtggataaatacttgctctacggtggcaagacccagctgctgtcaagattcacaatggccatgtactcggggccagccgcctctggatccaccaaaagagtgcagacatctgcgtgcccttcctttgcatcctcccacaatgcccagctgtcgtgagagtccgcccgggccctgaactcaattccagccacctctggatccatcaaaagagtgcagacatctgtgtgacctcctttctcgcccacaaggcccagttgttgacagagttcgcccgggccaagacccagctgctgtgaagtttcacaatggccctgtactcggggccagccacctgtacatccatcaaaagcaatcagacatctgcgtgaccttccttggcagcctcacacaatgcccagctgttggcagagttcgccctggccctgtacttgtgtccagccaccgctggatccatcagcagcttgcaaacatctgcgtgacctgccttggcagcctcccccaaggccctgctgttgatatagttcgcccgggccctgtactcaattccagccaccgctggacccatgagcagcaagcagacatctgcgtgacctgccttggcagcagcccacaaggccctgctgtgcgtagagtttgccagggccctgaactcaagtccagccacctctggatccatcagcagcttgcagacatctgcgtgacctgccttggcagcctcccccaaggccctgctgttgatatggttcgcccgggccctttactcaattccagccaccgctggatccatgagcagcaagcagacatctgcgtgacctgcctttgcagccgcccccaaggccctgctgttgatatggttcgccctggccctgtactcaagtcctgccacctctggatccatgagcagcttgcagacatcggcgtgaccttccttggcagccagccacaatgccctgctgtttatatggttcgccctggccatgtactcaagtccagccacctctggatccatcagcagcttgcagacatctgcgtgaccttccttggcagccgcacacaatgccctgctgtctctagagctcgccagggccatgtactcaattccagccaccgctggatccatgagcatcttgcagacatctgcgtgaccttccttggcagccgcacacaaggccctgctgtcgatagagttcgccctggccctgtactcaagtccaaccacagctggatccatgagcatcttgcagacatctgcatgaccttcattggcagcctcccacaaggccctgctgtcgctagagttcgccagggccctatactcaagtccagcaaccgctggatccatcaaaaacaagcagacatcggtgtgaccttccttcgcagcctcacacaaggcccagctgtcgctagcgttcgcccgggccctatactcaagtccagccacctctggatccataagcaggttacagacatctgcgtgaccttctctagcagccgcccccaaggctctgctgttgatattgttcgcccgggccctgtactcaattccagccaccgctggatccatgagcagcaagcagacatcggcgtgaccggccttggcagcctcacacaaggccatgctgtctctagagttcgccagggccatgtactcaagtccagccaccgctggatccatgagcagcttgcagacatctgcgtgacctgccttggcagcctcccacaaggccccgctgttcgtagagttcgccagggccatgtactcaagtccaaccacatctggatccatcagcatcttgcagacatctgcgtgacctgcataggcagcctcacgcaaggcccagctgttcatatggttcgccttggccctgaactcaattccagccacatctggatccatgagcagcttgcagacatctgcgtgaccttccttggcagccgcccttaatgccctgctgtttctagagtttgccagggctctatactcaagtccagccacctctggatccatgagcagcttgcagacacatgcgtgacctgccttggcagccagccacaagaccatgctgttgatatggttcgccctggccctgaactcaattccagccacctctggatccatcagcagcttgcagacatctgcgtgaccttcattggcagccacatagagaagcttgtttttattttggttcgccctcaattgtagggccccatcaacttgtacaagaggattggacaccaagcatactgctagaaggtcggcgcgcccccctttcgccatcatctcttcaactctctgtggtggttggatctgtccggtaaggggccatccagaaaatctgttatgcagagttttacacactaatacaatcttggggttggaagagaatagtgcaatacgatcaagaatgtcatggggacacgcaaggagtggaaacgatgatcgcgtgtgcgactgcatgttcgatgtaactacatctttctttattactttaagtacagaatgggttttcctgcctcactgcgatttttttgaattttcaaagcagaagttagatccgtacgaacgactcactcgccaaccagagatttagctctctgcggaattgcgattccgaccagaccaggctccgaaaacagtcaaaatccctccgggaggttgcaacagttgacttgtttgctttccgaaaataagtaaacctaacaggaatttgcatgtaatgggcgttcctgcctcccggcgattattttgaattttcaaagaagaagttagatccgtacgaatgactcactcgccaaccagagatttagctctccgaggaattgcgataacgaccagagcaggctccgaaaccagtcaaaatccctacgggacgcaggaacaaatcagggccgatagttctaagggagtacatacagctagggacatttgattgtgggacaccttttattttggggatttgaccaattcaagctttgtaaccgatcttgtcaatacagatactgtcttcaggagattgatacaaaacattcaaggcctgtacagacacagaagttacatgatcaaagtagcctgacaagtcaacgtgttggcttacatcgtgcgcatcaataatcattttcaaagcgttcctgtaatcaaataattctgctacatctggaattattgggcacgcgcagcgatattttcgcttgagcaaactgaacacattctcaatagcgttgaactctggactgtaaggaggtacaaagagcgggcgtattcctacagaatcgaacgcagagatcgtctcctttgaatgatggaactggatattgtcaaggacagcgacagtaccctgctttacatgtaactctgatacaaactgtacaaattcgactttcttgcaattgtgatcaaggatcttgtaatgaacgatacctttgacagaaacggcagcgacatcttgatagaggacagagacgtcacaccctctgcaagctgagacattgtcaagaatggattggagtcgatcagtttttttatagcaaccttgatatcttcggtaatgacgctcgcccgtttcttccaatgatgttttatattggctttggtgacccaacgttggagtgacgattttgatactttgtacgacagactaactttcctcaagctacgattatagtatttgtagtgaacaaccgcgcgatgtcttacctctgcatcaatcatgataacgtgcacgtattagggtataaggaaattgtccgttagtatggtatcaccaaaataataatcactccctctcgatgggggtggtgacaaacaacggagatgacgacgatctggtcatcatggtggtcaagaagacgcttaattctttgtgcatggatgtatcgaggcagcagatctgctcaaggatccaaagcatggtactcgtaatcaaccacgcagttgcagaggcatacttattcgcaaattttcacataaccagatgcctagatgatggagactttgatgtcaagcagttgccgcacctggatcggaacttctactacaggtgcatacttgcggtctcgatatccaatgtccgaaatgatacgctggaccagagcttgaaagatagcatggttgctttcgacgctctcaggcctgcaggctacttaaaggtggatgtttgtcaatggggacaggtaatcgcagacgtctcaatacaaatggcgacgatggcatgcaacagcgtctgggcaaacgtggacagggttgtaatcaagtacctgcgcttgaaacatccctcgttgaagaaacatttcaataagattgtcaaggcagtggtccagtatcctgactcggatatcgacaaaatcatcccagcgggtctcgtgcatgcgaacctcatcaaagacgttgtcagacgcctgagagatctcttgccgctgccaagggggaagcagttcaacactcgagcacacctgacaatgagactgtttcatcacgtgcttacagagttgggagcggatctaaaagagaaaacaacaaaaaaacgcccccgtctgttcagtatccttccacgcaagagcggcttcaccatttcttacgtccctatatcgtccatgacactcatgaagcttctaagcatgggcgattcgccgctcgagagcgtccgtggcgatggacgtcacgagaatcattccatgttgtggagaaagtacttcaatgccaaggacttgagatgaaagggtctcgttttgacaaccgaatcctcagcgacggcaaaggggtctccgtccaaatgaagcatcaggtgggtaaagatatcgctggagaaggaggaggagataatgcggggtatcccaaagacgcaagtatcgaagactgccaggacgcttctttgcgccagggtgcgctgcgtgtcggtatcgacccgggtatgacagatattgtcactatagcatcttctgacggtcgagtcgagtctttcagctctgcccgctttagcgaagcagctgggtacaataccagcaatcgtcgcacaaacaaatggaatgccgatacgcaagacctcgtgaagtccattccatcgccgactacgggcagtatgcacaacatgcaggaccatgtcagaggttacctcagcgcgctcccgaccctccttcaacaccgagccaacagaggttaccgatcgatgcgattcttttgatatgtgggcaaacagaagacgattgaaaaggtatgcgatttgattgctccaaaagcacagaagaaaacgattgaagaaaaggtatgcgatgtgattgctccaaaagcaaagaagaccgttgttggcttcggcaactggtccaaccagggctatggcatcagtcgttcgtgttctggaccagtgaaagagatcaggaagtgcctttcatgtcgtcagaatgttctgttcaaaaacgtcgacgaacgcaacacttcttgtacttgccacggctgcttccagaagctcgtcaacatgaaggcagacagcgttgtctggcgcagagttcaaaacgagccctccgccctcatcgacggggctcctacaacaacaacaacgtttgagaagcagaagacggtggtgaagaacgttaaggtccacaaagtactgcactgtcgcaacagtgtcaaaagcgcatcatccaatgtgcgctgtggtgcaacctggaaccgagacgtgaacgctgccaagaaccttcttctgcttctgacgacgtggatggacgggaaagagcgaccagcggcattttgtgtgccctcctcatcgcccaccccaaaaaccacagtttccggagaggcaaatgtgggcgctcaaccaaccgacccacctgggtcagttagcagcttacaattgttatcctctgggccagcttaaatgctgaaatacgggatgaaggacacgaaggattgggaccttgatacaaaacctttagctgacctacccattgggttcaagggtcaccagtaagggtgtcccataaattctgtctctgactgtaagtagtcaccaagtcataaaacgcttgagagcaccgcaattcatgctgacactccacctatgacacaggtgacatacaatactggtgcaaatttgtcttcttacattaaggaattcaagtttcatcaagttttgtaaccgatcttgtcaatacaacagatattgtcttcaggaatctgcctaacacaagacctagctgctgtcaagattcacaagggccctgtactcgggtccggacgcttctgtatccatcaaaagcaagcagacatcggcgtgaccttctttggcagcctcacgcaaggcccatctgttgacagagttcgccctggccctgaactcaactccagcctacgcttgatccatgagcagcttgcagacatctgcgtgaccgtccttcgcagccgcccccaaggccctgctggcaggagagttcaccctggccctgaactcaattccagccacctctggatccatcagcagcttgcatacatctgcgtgacctgcattaacagccgcccacaatgcccagctgtcgttagagttcgccctggccctgaactcaagtccagccacctctggatccatgagcatcttgcagacatctgcgtgaccttccttggcagcctcacacaaggccctgctgtcgctaaagttcgccagggccctgaactcaattccagccaccgctggatccatgagcatcttgcagacatctgcgtgaccttcattggcagccgcccacaatgcccagctgtcggtagagttcgccctggccctgaactcaactccagccacggctggatccatcagcatcttgcagacatcggcgtgaccgtcctttgcagccgcccacaaggacctgctggcggtagagttcgccctggccctgaactcaagtccagccacctctggatccatcagaagcttgcagacatctgcgtgaccgtccttggcagccgcccacaatgccctgctggagctagagttcgccctggccctgaactcaagtccagccacctctggatccatcagcagcttgcagacatctgcgtgaccttccttggcagccgcccccaaggccctgctggcggtagagttcgccctggccctgaactcaattccagccaccgctggatccatcagcagcttgcagacatctacgtgaccttcctttgcagcctcacacaaggccctgctgttgctagagttcgccacagccctgtactcaattccagccaccgctggatccatgagcagcttgcagacatctgcgtgacctgccctggaagccacatagagaagcttgttttcattttggttcgccctcaattgtaggcccaccttaacctgtacaagaggattggacaccaagcatactgctagaaggtcggcgcaccccccttttgccatcatctctccaactcgctgtggtggttggatcagtccggtaaggggccatccagaaaatctgttgtgcagagttttacacactaatacaatcttggggttggaagagaatagggcaatacgatcaagaatgtcatgggaaaacgttaggaataccgatgatagcgtgtgcgactgcatgttctacgaacatgtgtgtacaatgcatgcaagagcacaggatgaaaacctaaataatgagttgggttaaactctataaaccctataaaccctgggttgcactttcatggcatgcaagcggcacttgcatggcggtatctacaagcggtacagaatgggtgttcctgcctcccggatatttttttgaattttcaaagcagaagttagagccgtacgaacgactcactcgccaaccagatatttagctctccgcggaattgcgattccgaccataccaggctccgaaaccagtcaaaatacctccgggaggcaggaacaaatgtacaggtgcaaattgtctttcttacttacattaaggaattcaagtttcatcaagttttgtaaccgatattgtcaatacaacagatattgtcttcaggagattgacacaagacattcaaggactgtaaagacatagaagttacatcttcaaagtagcctgaaaagtcaaagtgctggctcacatcgtgcgaatcaataatcattttcaaagagttcctgcctcagaatcaaatatttatgctacatctggaattattgggaacacgcagcgatattttcacttgagcaaactgaacacatttctgaaaagtttgaggagagtggataaatacttgctctacggtggcaagacccagctgctgtcaagattcacaatggccttgtactcggggccagccgcctctggatccatcaaaagcaagcagacatcggtgtgaccggccttcgcagcctcacgcaaggcccagctgttgacagagttcgcccgggccctaaactcaagtccagccacatctggatccatgagcagcttgcagacatctgcgtgaccggacttcgcagcctcacgcaaggcccagctgttgacagagttcgccagggccctgaactcaattccagccaccgcaggatccaacaaaagcaagcagacatcggtgtgaccggccttcgcagccgtccccaaggccctgctgtcgctagagttcgcctgggccctatacttaagttcagtcacatctggatccatgagcagcttacatacatctgcgtgaccttctttggcagccgaccccaaggccctgctgtcgaaagtgttcgccctggccctgtacttgagtccagccacctctggatccatgagcagcttgcatacatctgcgtaaccttcctttgcagcctcacgcaatgcccagctgtcactagcgttcgcccgggccctgaactcaagtccagccacctctgtatccatcagcagcttgcagacatctgcgtgaccttctttggcagccacccacaaagccctgctgtctctagagttcgcccgggccctgaactcaattccagccacctctggatccatcagcagcttgcagacatctgcgtgaccttcattggaagccgccctcaaggccatgctgttcatatggttcgccctggccctgtacttgagtccggccactgctggatccatcagcagcttgcagacatctgcgtggccttctttggcagccgcccacaatgcccagctgtcgctagagttcgccctggccctgaactcaagtccagccacctctggatccatgagcagcttgcatacatctgagtggcctgcattggctgccgaccccaaggccctgctgtcgctagaattcgccccggctctgaactcaagtccagccacctcttgatccatcagcagattgcagacatctgcgtgaccttccttggcagcctcacgcaagccctagttgtcgctagacttcgccagggccctgaactcaagtccagccaccgctggatccatcagcagcttgcagacatctgcgtggccttccttggcagccagccacaatgcccagctgtcgatagagttcacccgggccctgaactcaattccagccacctctggattcatcagcagcttgcagacatctgcgtgacctgccttggcagccgcccacaatgcccagctgtctctagagttcgccagggccctgaactcaagtccagccacctctggatccatcagcagcttgcagacatctgcgtgaccttcctttgcagccacccacaaggccctgctatagtttgccagggccctgaactcaattccagccacctcttgatccatcagcagcacgcagacatctgcgtgacctgccttggcagccgcccacaatgccctgctgtcgttagagttcgccatggatgaactcaattccagccaccgctggatccatcagcagctagcagacatctgcgtgaccttccttggcagccgcccacaatgcccagctgtctctagagttcgccagggccctgaactcaagtccagccacctctggatccatcagcagcttgcagacatctgcgtgaccttcctttgcagccacccacaaggccctgctatagtttgccagggccctgaactcaattccagccacctctggatccatcagcagcttgcagacatatgcgtgacctgcataggcagccgcccacaaggtcctgctgtcgatagagttcgcccgggccctgaactcaagcccagccacctctggatccatcagcagcttgcagacatctgtgtgaccttcctgtgcagccgcccacaaggcccagctgttgacagagttcgcctgggccctgaactcaagtccagccacctctggatccattagcagcttgcagacatctgcttgacctgccctggcagccacccccaaggccctgctttctctagagtttgccagggatctgaattcaattccagccaccgctggatccatgagcagcttgcatacatctgcgtgacctgcctttgcagcctcacgcaaggcccagctgtcgctagagttcgccagggccctgaactcaactccagccaccgctagatccatgagcagcttgcagacatctgcgtgaccttccttggcagccacatagagaagtttgttttcattttggttcgctctcaattgtaggccccccttaacctgtacaagaggattggacaccaagcatactgctagaaggtcggcgcgcccccctttcgccatcatctctccaactcgctgtggtggttggatcagtccggtaaggggccatccagaaaatctgttgtgcagagttttacacactaatacaatctttgggttggaagagaatatggcaatacgatcaaccctataaaccctataaaccctgggttgcactttcctggcatgcaagcggcacttggaactctgctaattatgcttttaagcttgttgatgtcccttcattcggggaactgactggattgtttgatcagtatcgtcttcttaaggttaaggtaacgtgggttcctcactttcgtgatcccacatccggcggaccagatacatccaacatgacagcaggtcctttaatctattttactagatccgatgatggcactcaaaacttgacgactaaacttgaagcttttcaggactcttccattaaaggagttgtggatccttattcggaatttagcgtcactcttactcccaaagtacagtttgaagtacaaaccgcattaactattaatgggcgttcctgcccctgggccgaagccgaccaagcaaattctctaggtccaccagtcatgagccctgaaccctagtatcaggctaatctggtggcagtattaccctagagaattgcttgaggcgatactagatttgcttgagactgatactcgactataaaagcaagcgtatctgcaagcggtatttacaagttagttacatcttcaaagtagcctgaaagtcaaagtgctggctcacactggctcacatcgtgcgcatcaataatcattttcaaagagttaaatatttctgctacatctggaattattgggcacatgcagcgatattttcgcttgagcaaactgaacacatttctgaaagtttgaggagagtggataaatacttgctctacggctctacttcattcggggaactgactggattgtttgatcagtatcgtcttctttaggttaaggtaacgtgggttcctcactttcgtgatcccacatccggcggaccagatacatccaacatgacagcaggtcctttaatctattttactagatccgatgatggcactcaaaacttgacgactaaacttgaagcttttcaggactcttccattaaaggagttgtggatccttattcggaatttagcgtcactcttactcccaaagtacagtttgaagtacaaaccgcattaactattaatgggcgttcctgcccctgggccgaagccgaccaagcaaattctctaggtccaccagtcatgagccctgaaccctagtatcaggctaatctggtggcagtattaccctagagaattgcttgaggcgatactagatttgcttgagactgatactcgactataaaagcaagcgtatctgcaagcggtatttacaagttagttacatcttcaaagtagcctgaaagtcaaagtgctggctcatcctggctcacatcgtgcgcatcaataatcattttcaaagagttaaatatttctgctacatctggaattattgggcacatgcagcgatattttcgcttgagcaaactgaacacatttctgaaaagtttgaggagagtggataaatacttgctctacggtggcaagacccagctgctgtcaagattcacaatggccctgtactcaagtccagccaccgctggatccatcagcagcttgcagacatctgcgtgaccttccttggcagccacccacaaggccgagctgtcgctagcgttcgcccgggccctgaactcaattccagccacctctggatccatgagcagcttgcagacatctgcgtgaccttccttggcagccgcccacaatgccctgctgtctctagaattcgccagggccctgaactcaagtccagccaccactggatccatcagcagcttgcagacatctgcgtgacctgccttggcagccgaccccaaggccatgctgttgatattgttcgccctgcccctatacacaattccagccacctctggatccatcagcagcttgcagacatctgcgtgaccttccttggcagccccccacaatgccctgctgtcgttagagttcgccagggccctgaactcaagtccagccaccgctggatccatgagcagcttgcagacatctgcgtgaccttctttggcagccgcccacaaggccctgctgttgacagagttcgccctagccctgaactcaattccagccacctctggatccatgagcagcttgcagacatctgcgtgaccttctttggcagccgcccacaagactcagctgccgctattgttcgcccgggccctatactccagtccagccacctctggatccatcagcagcttgcagacatctgcgtgaccttcctttgcagccgaccccaaggccctgctgtcgttagagttcgccctggccctgaactcaattccagccacttctggatccatcagcagcttgcagacttctgcgtgaccttcctttgcagccgaccccaaggccctgctgtcgttagagttcgccctggccctgaactcaattccagccacctctggatccatcagcagcttgcagacatctgcgtgacctgccttggcagccgcccacaagacccagctgtcgctagtgttcgccctggccctgtactcaagtccagccacctcttgatccatcagcagcctgcagacatctgcgtgaccttccttggcagccagccacaatgccctgctgtctctagaattcgccctggccctgaactcaagtccagccaccactggatccatcagcagcttgcatacatctgcgtgaccttctttggcaggcaccaacaaggccctgctgtcgctagagttcgccacggccctgtactcaagtccagccacctctggatccatcagcagcttgcagacatctgcgtgaccttcattggcagccgcccacaatgcccagctgtcgctagagttcgccctggccctgtactcaattccagccacctctggatccatgagcagcttgcagacatctgagtgaccttcctttgccgcatcaagcaaagccctgctgtcgctagagttcgccgcggccctgaactcaattccagccaccgctggatccatcagcagcttgcagacatctgcgtgacctgccttggcagccgaccccaaggccatgctgttgatattgttcgccctgcccctgtacacaattccagccacctctggatccatcagcagcttgcagacatctgcgtgaccttccttggcagccccccacaatgccctgctgtcgttagagttcgccagggccctgaactcaagtccagccaccgctggatccatgagcagcttgcagacatctgcgtgaccttctttggcagccgcccacaaggccctgctgttgacagagttcgccctagccctgaactcaattccagccacctctggatccatgagcagcttgcagacatctgcgtgaccttctttggcagccgcccacaagactcagctgccgctattgttcgcccgggccctatactccagtccagccacctctggatccatcagcagcttgcagacatctgcgtgaccttcctttgcagccgaccccaaggccctgctgtcgttagagttcgccctggccctgaactcaattccagccacttctggatccatcagcagcttgcagacttctgcgtgaccttcctttgcagccgaccccaaggccctgctgtcgttagagttcgccctggccctgaactcaattccagccacctctggatccatcagcagcttgcagacatctgcgtgacctgccttggcagccgcccacaagacccagctgtcgctagtgttcgccctggccctgtactcaagtccagccacctcttgatccatcagcagcctgcagacatctgcgtgaccttccttggcagccagccacaatgccctgctgtctctagaattcgccctggccctgaactcaagtccagccaccactggatccatcagcagcttgcatacatctgcgtgaccttctttggcagccaccaacaaggccctgctgtcgctagagttcgccacggccctgtactcaagtccagccacctctggatccatcagcagcttgcagacatctgcgtgcccttcattggcagccgcccacaatgcccagctgtcgctagagttcgccctggccctgtactcaattccagccaccgctggatccatgagcagcttgcagacatctgagtgaccttcctttgccgcatcaagcaaagccctgctgtcgctagagttcgccgcggccctgaactcaattccagccaccgctgtatccatcagcagcttgcagacatctgcgtgacctgccttggcagccgaccacaaggcccagctgttgacagagttcgccctggccctgtactcaattccagacacctctggatccatcagcagcttgcagacatctgcgtgaccttcccttgcagccgcccacaaggcccagc

SEQ ID NO: 302 - DNA, 21236 bp, Chlamydomonas sp.
  source 1..21236: mol_type = other DNA
tacggcacaccttacggtgtaacctaatggtgtagcaacccacggggcagtggaacaccaatacgattttgaatcaacaaattgcaggatgttaacgagaatatcgtggttcttttttagatcacggctctccatcctgcagactccgtatcgttcttttgtcggtactttcgagagtgtccattgaaggaccagccgcacttaagcgatcgcctcttccccagtaccgtggcccaaaagaacacggggtctttgttgatgtgcaatgcacacccacctcagttccgagaacacttggatgagaaccaccgtaccacattaaacaagtggcggagcccctttcacctcttccccccagcggagcgaccgggggcgaccggaggggagcccccacaaaggattccgcgaggaaccgagcgggtgggcgaccggaggggagcccacagttcacatcaagcattagacactactgtgtaactaactgtcaagtcttacacaatgtgtatgttgtttgtaaaagattcacttgtttgtaacacttgggcttattatcactgtaacgcttgggcttctttctcactgaaagtcatcggagtgcactgtaacgcttgagcttatcactggaacacttgggcgttccgaggtgtcgtctcaagcagactaacttcttgagtatgaaagaggaatcgagggacacacggagggggcaggggaattgagttgcggactcagtcgcaccgaaaataaacttgtacggagaacagtaattgaggggatgatatgatatgatttcatcagaatggttgggctttacagttgttctcaaataaagtgggacacaccttcaaatcaatcatccagactgcaggtcaagctgctgcagctgtcgcgcacacgcagtacatgaacataatcatggaccacgcctgataccagcagacatatgtgtacgaacgggaccgccgctgggagaagacggacctgcaagactcgctgctgccggtgctcaggcaaatcgtgcagagaatccacctactttagatgctttgccacgaccttttttttcgactcagtactacctcctactttttgatatgactttttgttcgcaccaccagtttgatttgcgttagctaatgcatcatctatacgttttgtttctgttgcagtttgatttgccttccttttgtctcctagctcttgcaatttgttcaaattgttggctaattctatattatcacgttctttacgttctgtttctggtttttttgaaataaactcaaacatttcattatacaaagatgaaaaaaatcaacgcatctgaagaggagaataagggtttagttaaagagaataccctttaacgaacattattctcctcttcacagccagcaagacacatacatacattttatgattgttcggtcatgttcctacacattgaggaggacgtccgcgcgtgcaacgggagcctttctggagatggccgttgtcttcgcatgcaaacggcggaaacatgtcctcgtctccaaaagacgtcttttcagaggtgttcatgtgaacacgtttgaaatagggattgatgtgagacatcggggtctgggcaatccccatctttgccgttgttgagcaagagaaggttgcaacaggagcgaacgtcttgaggcgcaataccccacgttcagtggaggtacttgcatctattctgtgccctgatctgcagcgaccctttcgtggcgtgccgttgcaccccgagtgaaaactttttatatataatatatatatatttcaatgataaagacgtcgagaaacggaatttgcgatgatgggaaatcccgagtattgtacaaggatgatgatgtgaaaagtaaaactgttggcctattttttgttaaaaagaagaacaaaacagggaatatgaaactagtactttataagccattggacaataaacgggctgcaaataaacaaaaaggtggggcttttgaaacaaaaacaactagtagtgtaattgtacagaactcaaccgaatttaatgcctgtattaagtatatagaaaatggtagtggttggggtgattttaagattgttaaaatgggccaagacatgaaatatttcggtaatcgatttcagaatttggtagatcacattaatagccaaaccgaatacccgtaccatataatgagtgggtattaacaatcagtcatcctacaagtagggctgacaattgccaatgaattcgtcaattcaaacataagtgcttgacatgacagtaacattacaatcaagaacaacctatgaatttgacaaggaaagtacttcacaaaaaacaaactcactaggggttgtcggtcgtgttcgaaggaagagagaggagaacaaaacaaaaggaaattatgcagtttcggggatcgtcgggccttttatcatgtccggcgatcgattgtaccgccgcaagcactacacaggatttgggtgagggggcttacgttttttagaggaaaggacggcggaatctgtgtcgagtcgagtcgagtcgagtcgagtcacacacgtttaaccactgttcagccaggcctcgtgtggcgttcgcgacgggtgggacctccgcaaggtgtccaaggcggttaagatgatcttgaacgccgtgggtctggatatggtgagcgagaccacgcgcgcgcaggtcaagggcaagtgcaccaaggaggagaggaactaccgcctgtgcccggagagtgtctcccggatgctggagctcttgaaacttcgtcttctgcgcacggacctcacgccgccgccgctgccctttctggccacgagctgtccatatacagccatagtccatcggcaaacaacggattgtattcaacaagcggcggagcccctttcacctcttcccccaagcggagcgaccgggggcgaccggaggggagcccacagttcacatcaagcattagacacactactgtgtaactaactgtcaagtcttacacaatgtgtatgttgtttgtaaaagattcactgtaacacttgggtttattatctctgtaacgcttgagcttctttctcactggaacgcttgggcgtttccgatgtgtcgtctcaagcagacttctgcttgacaactatgtcgggagtatgaaagaggaatcgcgggacacacggcggcacctgtcgagtcgagtcacagagcgaccgacctctcgcatcaggcggcacctgtcaagtcatcatacacgtacatacgcaaacggcggaaaactgtcgcatccacaccgtccgtccgttcgtccattcatgacacacggatgcggtggcggattctcgtccctcatcgtctcgtatcttagtcctcgaattaagtgtaaacgagcattcttcagtgtaaatgccgccagttagggccgggttttagttttgaaacactggagggcgaggtgttgtccagcgctgtattggaccacctgaagtggttgttgtcccacgaaacagaggtggctgtgttgttgttctgcggccatggcatgtggcaggggtcgccgcagcacggtagtctagtgtgttcattcaagcagctggtcacagctgaggcaattgagtgcgtggcggcgaagttcaaaggcacatttgtgaggttgctgaacatgtgcgaggccgagggggagtctatgtggcaggatgggcaaggtaccagggacgcagtaaggctgcgaggtgctcagatgcaagggggggcaggcgcgccaagcacctactactgcatgacagtggcagccacgcagcagtttggcaagaccactggtaacagccggggcagcaagttcggtgttgcactggggcgcatgtttgatcaggaggtgctggtgacgtacgatgggttcgagacggcattggacaagtattggagtggggcgcaagtacggatgacgcacgctttccggggtgtgttcgggacgcccgcttccccggtgggttcttgttgcatcactaatgatgatgcgggttctgagtctgaggtggagttctgagtctgaggtgcctggggaagggttgcaacagttgactcgttttctttccgaaaataagtaaacctaacagagtggggagtgaagtgacgtccactttcttggataccccatcaacgtctctacccactctgggtttaatgtacccggatgatagatgcaggcaggaagggaggttgttgtcagttgtgcaggggagggacagcaagacgccgccgtcaggagaacaagagacacgcacgcacgcacgcatggaacacacacgcacgcaaacggaccgcatgcaaattcacagggttttaggtacatacaggcatgaccaaatgtctcgtctctaagaaatatatgtataaaaaaaagaggttttactaactaaactaactaactgactgactgaatgactaaagctggctgagggacggggagcaaagctcaattgagagatctatagcagcgcgcttcttagcgaggtaagactcacgctgggagggcctctttgccactttgccaccacatgaagtcccatgctgcgtgatgtcatcccaaaaacgagtgtaaacaactttttccaaaaacacgagcgtattattaattcacggtctccctctttcttcatggcgagtcagtagcagaatcactgtacacaccaccacccagtgacaacaccccaacgttgccaaaaagcaacgatctgcaagttcgattataaagggtgtcccactttatttgagaatgactgtatagaatgacagattacgcttcggacatcactgtgtcgggtacgtccgacttgatttgcactggggtctaagatgttcatcttgatacaattgaaaagcaaaaaacattggaattggcccgactcatgagaggcctcgtgcctgaatggggtagtgattacatcgaacgatacattcctaacgagctccagtgctagttgcacaacaacattacattacattacattacattacattacattacatgttaaagtctacttgacaccgcgagggtgtatgagactctgtgctttaaacaaaaagaaaaagcacccacaaagcaaaaaaccccattacatcaggggtgtgtcgaggacaaacaaaccaaactcccaaccaccgttttggtggcgtaggtattaaaccccttagagcaggacccagatctcaaccacttacagtggcggaggtaagaagctaacaaatgagaagtctcaagaacaaaaaaaaagggataataaattacggtgccactaagcagtccagggcttcctgtcttgctcttctacaagtagaaagatagtcggctaggttgctccaaaaagacttagtgccatttccattcataaaggttctgaatgtggaatcgcagaattccacattccatacggttaagtcggtatcctcatggacatgcctataaatatctgtaaacagattctggtagcggaggcgaatatcattataaaaagggcactcaaacatatgcatttcatcctcagacaagagaacatggatggatgaagatggattctggtggggatttgacaaagtctgtgctaggaagtataagcagactaacgtcattattcttgctacgaagcatcacggacttgggacatatgaacataaagtactggtcactctaaatagttcggtacaagtggtgtgggaagacgatttatcgtgatcaaggcatgattgcatgcacttgcatgattgcatgcatgcaccatctaggaatcatgtctgagaaacgtttttcttgctgttttttctgtttcttgataccagacttgtggtaaaaagctccgcgtgtaagcttccatgtcttgcttttgtcgtctgccagatacgtgactgtagcgatgtgtttttcgaatgggtttttctacaggggggagggcgggcaccgcggagcggtgcagtggaattcagctgctgactcacacgcacgcacgcacgcaaacggagggggaaattcacacggtacggtacagtacagtacagtacagtacagtacatacaggcaggaccattttttatcgtctctaagaaatgtagcaaaaaaaagagtatctaaataactgagtatctatataactaaagctgctggctgagggacagggagtgaagctcaattgagagctcgatagcagcgagcttcttggcgaggtacgcctcacgcttggagggagtctggttcatgcacgctaggtgcgcgcacttgccagtggtgaaggtcccaccattggggttgcttaagagcacctgttttctaccacacgggttgccgtgaatggtgacagcagtgcagcccagggtgggggagtaccccacgatggtcagatcgccgtgtttggagccaacaggaagctcgttctttagaacggaccccccgcaacgaccaacacgaccggaggccaaggaggaggaggggggggccgttgaaaacgagacaccagaagcagcaggaacagcaggagcaggagcagcagcaggagcagcagcagcagtagcaggagcagcagtagaagcagaagcagcagtagaagcagccggagcagcaggagccacagagagtgacaccgtggtgcgggggcgcttggttccaccggaactctcctctgacatgcaaacgtcctcggtggggacgtcgtcctctgggagggcaagggcactggcgagggcaagcaaggaggaagcagcaggagcagcagcagaagcgacggcattcgcagcagcgacggcaacagggagaagcattagctgtaaaggctttttctccgctttgtgaggagaatctaatagaaacttagcgtgcgcaattttcattgcgcagacagggtctgcgaggcacgcaggaacgcggggaaatgaaattatcttgtagcagatgtccttcaattgagggacggtgggtttgctggatagcttcgttcggtccgtcgttaggaccacttttaatatacaggtatcattcacgaatgatgtgatctcggtagacatgttgttggcagacatgttgtttgtagacatgttgttggtagacatgatatcagttgagttggggtttatcagttgttgttgttgttgttgtggtggtttcaaaggaaggaaaaaggcgtcaatttttttttagcatggaaatgcaacggatgctcagataaaaacaacaaataggggggggggaacggaccgaatcggaaacgcggatgaggcaacgcggaccccgcgcaccaaatagactacatttcgaaaaaaaacgaaacgattttctcaacagagccagcacaacaacaacacacgtaacgtaatcgccaaattcactcactgaaatgcaaagctactttcggagttcgctggatgctccctaacacactgagttcttcgtgagcgaagaattggagtcggtacttggttaagattgacatggctggggtgtgtgtggcttggactgggtgcgtcaagtagggcgcgcgctgaacacgtgtcttgacaactatgtcgggagtatgaaagaggaatcgcgggacccacagagtgggccacaggaattcagctgctgactcgcggaaacacgtgtcggatctgacctgcttacactcgtctttcatgggcgcgcggaaacacacgtgtaggatatgcctctgtcacacatcccctgtgggtcacacatcccccggaatctggtaatgcgactgctggtcaatttgaaccatggccactccccaacccctgagcttttcccgaatggcatggcggtgggaatggcgctccaccatgccgtatgtgcccctagccctgtcgatgtcgtcatccagatcagaacatgggactgtccggacagcgaacctcctcaagacactaagctccgggctgtgaacatgtgttgagaggaacatgatgagtattgtgccctccctacaatcactcgacgtacaatatatatttcgcacctcacttcattcagctggctctccagattgcccactttcttgcgcaacctacggacaagttctaccaaagcctctttggtacccgcgcgctcgagctcatcatcttgcatgttctccatccttacgatcaaagatttttttttaataaaaggcctaaggcagagccttttaattactttaaatttattggaaatctttaaacagtgcaagggctcatcagcctcacacataatgggcaagttacgaccaactgcagcctatgacaaccaactgcaacccatgagaagcctcattccacattcagtaccatgcagttaccattcctagtgcagtctgttccatgcagcccatgcggccagtgcagatctgtgcagccccatgcatcctatcaagtagccccctgggtcaatggattggtgggtggaacgtgtgtacaagtggagagccctcgtgtgatacatgctcttgaacaccaagctaagctcatttacctcagttcgctattccctcactcaacaatctgatcctccctcgaattcgtcgtaacgagaggagaaggcgaatctgcgcagcaaatgagagtcacaacaaacaaactttgagatttgagacggcggcttttgtctgacgattcctcttttgacagaggaactgctcgtcttcgcaagcggtggcggctaccttgattgacagcactcccatcgatccgataggtaagccaacctcgagtgtgtactcagacatcggggtctgggcaatccccatcaatgatgctgtcgggcgtaagccgcatactgcactcgaggctcgatgaatgatgctgcatatagaaaggaggtcgtgtgtgaagtaagagagagagagagaggagaacaaaacaaaaaggaaattatgctgttttcggggatcgatgtacgcatacagctagggacatttgatattgggacaccttctattttggggattctgaaaagttgaccaattcaagatttgtaaccgatcttgtcaatacagatactgtcttcaggtgattgacacaaaaaattcaaggcatctaaagacactgaatttacatgttcaaagtaccctgaaaagtcaaactgatggctaacatcgtgcgcatcaataatccttttcaaagcgttactgtaatcaaatatatctgctacatctggaattattgggcacatgcagcgatattttcgcttgagcaaactaaagacattctcaacagcgttaaactctggactgtaaggaggtacaaagagtggtcgtattcctacagaatcgaacatagaaatcgtctcctttgaatgatggaactggatattgtcaaggacagcgactgtaccccgctgtacatgtaactcagatacaaactgtacaaagtcgactttcttgcaattgtgatcaaggatcttgtaatgaacgatacctttagcagaaacggcagcaattagtgtcaatttggacattcgcaatgtcctagaaatttggatatttaaacgtttgccgcgttgacagtaccctctgcgacaagtgtcaccaatgtaaaaacccgcctcatcgatgcttaacaaatccgatgtcggaacggctaaatactccttacaaaaacggtcgacagaagatttgtggtcattcttgtgccgaactgttttgcatgcgcgcttgcgggtgtaaccaagtttgcgtgtgtagcgtccacaagtttttggagacatcttgacagaggacagagaagtcacaccctctgcaagctgagacattgtcaagaagggattagagtcaatcagttgttttatagcagccttgatatcttctgtaatgacactcacccttttcttccgatgatgttttatattggctttggtgacccaacgttggagtgatgattttgatactttgtacagcaaactaactttcctcaaactacgattatagtatttgtagtgaacaaccgcgcggtgtcttatctctgcatcaatcatgataacgtaggaaatgtgtataaggaaatgtgggtgcaatattatatcaccaaaagaaaaagaatactaaccccctcttaatgggggtagtgcaagacaaaggagatgacgatattaacatcagcgtcgtcaagaagacgcttaattctctgtgcatggatgtatcgaggcatcagatctcctcaaggatacaaagcatggtactcttaatcaaccacgcagttgcagaggcatacttattcgcaaactttcatatcacaagatgcctcgatgatggagactttgacgtcaagcagttgccacacctggatcggaacttttattacaggtgcctccttgcggtatcgacctccaatgttcgaaaggatactctgggccagagcttcaatgataccatggttgctttcgacgccctaagacctgcaggctacgtgaaggtggacgttcgtccttggggacaagtaaacgcagacgtctcaatacaaatggcgacaatggcgtgcaacagcgtctgggcaaacgtggacaaggtcgttatcaagtacctgcgcttgaaacatccctctctgaagaaacatttcaagaagattgtcaaagcggtggtccagtacccagaatcgaaaatcgacacaatcatcccagaggtcctcgtgcatgcgatccacatcaaagaggttgtcagtcacttgagggctctctttccgctgccaagagggaagcagttcaacactagagcgcacctgacaatgcgattgttccatcacgtgcttacagagttgggagaggtcggacgagtggatccgaaagataaaaaaacaaaaaaaagtcacccccgtctgttcagtatccttcctcgcaagaacggcttcacaatttcgtacgtcccgatatcgtccatgactttcatgaagcttctcagcatgggtgattcgccactcgagaacgtctctggcgatggacgttacgagaaccatacaatgctgtggcgaaagtactttaatgtccaaggtcttgagacgaaaaggtctcgctttgacaaccgaatcctcagcgacggtaaaggggtatccgtccaaatgaagcagaagggtaaagaagaggtcgttgaagaaggagaaaacgcaggctatcccaaggacgcaaatatcgtagagtgcaaggacgcagtgggtgcgctgcgtgtcggagtagaccctggaatgacagatatcggtagcatcttctgcaggtcgcatcgagtctttcagctcggctcgctttagcaaagttgctgggtacaatacaagcaagcgtcgcacctacaaatggaatgacgagactcaagacctcgtgaagtccattccatcgcctaatacgagcaacatggtcgacctgcaggaccatgtcagagcttatctcaaagcgctcccgatcctcctacaacacagagccaacaaaggctaccgatctatgcgattctttcgatacgttggtaaacagaagacgattgaaaaggtatgcgatgtgattgcaccaagggcacagacgaccgttgttggcttcggcaactggtccaaccaagggtatggtatcagtcgttcatgttctgggcccatcaaagagatcaggaggtgcctctcacgtcgtaagaatgttttgttcaaaaacgtcgacgaacgcaacacttcttgtaaatgtcacggctgcttccagaggcttgtcaacatgaaggcagacagcgtagtctggcgcggagtttgcaaagagtccccaatcgacgggtctataactgttgagaagcagaagatggtggtgaagaacgtcaaggtccacaaagtactgcactgtagagacagtgtcaaaagcgcatcatccaatgtgcgctgtggtgcaacctggaaccgagacgtgaacgctgccaagaaccttcttctgcttctgacaacgtggatggacgggagagagcgacctgaggcattctgtgttccctcgcctccccccaaaaccacagtttccatcgaggcgagtgtgagcgctaaaccgaccgacccacctgggtttgtcagcagcttgccttgttatcctttgggccagcttaaatgctgaaatacagagatgaagggcaaaaatatgtactcgcctttagctgatctacccattgggttcaagggtcaccggtagggcgtcccacaaattgcggctccgactgtataagagatccgtgatctgtaagtacattacgccccctccattaaaaaaaaatagaggactcatgccttactacagtggcactgcagggtcaatagcgaatcacgtacaaactttgttgtgtggaggaccgacacataaaacgagttgcgtttgtgtgttccctgatgcaggcgatgcggtgaaagagttagaagtagccgaagcgttgcttgacatgggatggaatgtgacgaaagtttggttgatgactcgcgatacattgccatccacaattatgcgtttgtctggacgctgccctgtagaaacatttcatggttacaatgagttgacgatcgctttgcgatccattatgtccatgacttcatccggagcaccgaaggaagtgctggtacccggcattcaccaaatgcatgtgtcgtacacaagtcaggaaattcttgatatttgcaatcactttgcaacctgtcatgcacttcatcaccaagggtttcttaagcatggttacatcaactttgtgagtattccgcaatactttcccatccgtactacgcccccatggatgaacgacctagtgatcgaagaaggacagcatgtatacatgtcatcatgggctgcccggctggcattctatgtggggcaactggcgagacggtacccacaactcgaagtgccgcttgtcctgagagaggtgagcgaactgcattcctccagcatccacgataaatacctttccatcccgacacaaaactccagcaacagtgtgcatgggaccttgcatgctgggggcaaaagttcctgcacagggctcccagatcccgtgttgtcctgaagctttgtagcacacggaatcatcaggaacaagaccaatacacaatttttaaggatattagaatagtaatatagggacccagccccagacaaggcaatgcatgtgcagtgactgagcatggccgaaatgtacacgaaagcccaactcgatgatgccgtggctgttgccgcggctgatgccgtggctgttgccgtggctgatgccgtggctgcagagcgcgtgcgtgctggcgctgttcagcgagcgtacaaaacgctactggctcagacggaggagtctgcgcatgagcaacatcgtctactgaaccaggcgctgagctcggtttccaagcaggacgaagagatcgagaacctcaagtgcgtgctgcttgctcgtgcactcatgaatagacgcggtgcgcgttgtgccccacaatgcatgcaatacaataacatctctctgtgctgacccacacacatgactaattcaattccatgcgcgatgtaggtccatggtgtcaaagggttgcaacagttgactcgtttgctttccgaaaataagtaaacctaacagtgtataaggaatttgcatgtactagatatcagaatgccatgtatggcaaccaacgcttctgtaaatgaggcatccgtattgtcgcagccgacagtgtgtgtgcttactcatgtgatgtatattgttgggcgtaggcagactggaaagagcttcatgatcacaaacgaaataggggatggtgaatccactttggtggtttgtgagacagaccatgacgtaactcatcataaactgcattccccaattgcaattatgagcatgcgagacaccctggatagcctaatcgggtttaagattatagttttggacaacgtcattttcaattcgacagacagtctactacaagatgctatatcactgcatgtcaaaactggaacacggttaattgtagcagtttcacatccattcagtatcccagctgatggcgatgggataattatacaactgagtgaatacaaagactcatgtggcttgcaatgcctaaacaaattaaaagccaagtatgaattccagctggccgcaaatgtgctgaataggaataagatgcacaccaccacgcaagcggcggagcccctttcacctcttccccccagcggagcgaccgggggcgaccgaaggggagcccccacaaaggagtccgcgaggaaccgagcgggtgggcgaccggatgggagcccacacttcacatctactgaaatcacacacacacacaaacacacacaagcgacgccgcggatgatagatgcagcaatcatcatcgaaccctcaaggaccgtacagagtgcccaagtagcttttcccagcttttgaagttgcgagtctaacggttccctagaggaggaactgcttgtcttcacaagctgtggtcggcttccttgacagcactctcatcgatccgagaggtaagccaacctcgagtgtgttatcagacatctgggtctgggcaatccccatgaatgatgctgtcgggcgtgagccacacacttcactcgaggctcgatatcatcatgatcatgaagatttgttaagcaaaagaagtggatgatttctcaattttggatgttcccccctccgtttacactcgtttttcgaaagccgccgtgcggagagagagaggagaacaaaacaaaaggaaattatgctgttacggggattgtcgggtcttttatcatgcccctccctcatctcatcaaggacggcgacttttgcatcaggcggcacctgcattggcggagccgagtagtcactcacagggatactttcgcatcaggcggaacctgtgtcgagtcacatcacagagagaccgaccactctcatcacggcggcacaggtgccactatggccctccccatcaaaaaataacgaaagtaacaaaataccaccgtaccacattaaacaagtggcggagcccctttcacatcttcccccaccgggggcgaccggaggggcccccacaaaggagtccgcgaggaaccgagcaggtgggcgaccggaggggagcccacagtgtaacatcaaccagcagacacactactgatttacggaacggaaatcacacacacacacacacacacacgcgacgccgcctcggacatggacagcatcagcaaacttggttcatcgtgacacctcttcccccccccccaaagattttcatatctatctacagtcggcggaacagtaaaatgaaacatccaaaaaacggtataaggcggtgacaatcatatattgtatgagtggatggtcctataaaatgacccgtccagcaaagaaacctccttacatgacgcattgcacatcaacaaagacccgtgttcttttgggccacggtactggggaagaggcgatcgcttaagtgcggctggtccttcaatggacactctcgaaagtaccgacaaaagaacgatacggagtctgcaggatggagagccgtgatctaaaaaagaaccacgatattctcgttaacatcctgcaatttgttgatttaaaatcgtattggtgttccactgccccgtgggttgctacaccattaggttacaccgtaaggtgtgccgtacacgaggcggtttcattttagtattccgtcgactgtaagcactgctcaatttacaactccctccaacatgatcaaatctgtgttcatgaagaactcgatgcaaacaacaacttcaacttgacacagaagatgatacatacatgatcgataatgtcggcagtcgtgcggattgcggggatcacgatgacttgcgcatactcattctcacacggaggcttaaagcagactcctgctcgattggtttctgaagggggagcgcgggcaccgcggagcggggcagaggatttgattggattggattcatttgatgactcgtgtacactgtacactcggacaagggaattatgttacataatatcccgagtcccccaaaatcctcttgtatgtgtttatcttctacacttcgctcgacactgcgttctgtaaagaacctgtcagcttgtaatcaattttgcgtcctaccacaacttccagtttgcaatatttctttggcctcgcaagaattccggggcggattgggtacattgtaaagcaattgtggatgttaatggctgcatttaggtcacggtttacaaacaacttgctgttctccatggtggaactgcaccatagcaagcctcgaaccgtgcgcccttctttttcggactgcacactctggaggacggtggtgctgtccttgtgccagatctttgtggtacggaattcgtcaatgacggcaactcgccccttgaaacggtcgctaaacgccttgaacgcgctcgttgtagggacagaaagttcaccattgccaccaggggcaaacttagcagaaccatatgcgacgacaattgttttcctctcaccgacatcctcctggacctcgttgaagaagcgtgctaagacacgtttcttgccatcactgtcttgctgcttgcaatagtgctgtgaactgcctccctgcttatttcggtgttgcttattgtctcgatgcttgctgcgttgctgcatactgctaaatgcttattgtggtgctgtttattgtcatgctgcttgcaatggtgctgcgtactcctcgatgcttattgttgtgctgcctactgttaagctgcttacagtggtgctgtgtactgccttcctgattattgttgtgttgcctattgtctcgatgcttgcagcgttgctgcatactgctaaatgcatattgtggtgctgcttactgtcatgctgcttgcaatggtgctgcgtactcctcgatgcttattgtggtgctgaccactgtcttgctgcttgcaatagtgctgtgtactgccttcctgcttatttcggtgttgcttattgtctcgatgcttgctgcgttgctgcatactggtaaatgcttattgtggtgctgcttattgtcatgctgcttgcaatggtgctgcgtactcctcgatgcttattgttgtgctgaccactgtcttgctgcttgcaatagtgctgtgaactgcctcccctgcttaatttcggtgttgcttattgtcttcgatgcttaagctgtatgcctgcatactgctaatgcttatgtggtgcttctttactgttgtagctgcttgcaatggctgctgcgtactgtccttcatgcttagtattgtgtgcctactgttttttagcttgcttaagtggttgctgtgtactctgccttcctgatttgtgtgtgttgccttatggtctcgatgcttacagagttgctgcatactgctaaatgcgtagtgtgaatctgcttactgtcatgctgcttgcatggtaactgcgtactcctcgatgcttatgtgttctgaccactgtcttgctgcttgcaatagtgctgtgaactgcctccctgctaatttgtccggttgcttattgtctcgatgcttaagcgtgcattctgcatagctgctaaatgccttattgtggtgctgcttactgttgtcagtggccttgcttgcaatggcgctgcgtcttccttcatgcttattattgtgttgcctactgtttagctgcttacagtggtgctttgtactgccttcctgattattgtggtgttgcttattgtctcgatgcttgcagcgttgctgcatactgctaaatgcttattgtggtgctgcttactgtcatgctgcttgcaatggtgctgcgtactcctcgatgcttattgttgtgctgaccactgtcttgctgcttgcaatagtgctgtgaactgcctccctgcttattgtggtgttgcttattgtctcgatgcttacagcgttgccgcatactgcttacatgcttattgtggtgctgcttactgtcgtgctgcttgcaatggcgctgcgtcttccttcatgcttattgttgtgctgcttactgtcttgctctgtccagtggtgctgtgtgctgactacctgcttattgtggtgttgctcattgtattgatgcttgcactagttctgcgtactgcttacctgcttattgtgttgtatcttattgctttgatgcttgcagccgtgctacgtgctgcttacaaggttatgcaggtgctgcctgctgtcttgcttcttacaatggtgccgcttactgcttactttactattgtgttgttgcttattgtcttgctgcttgcagaggtgctgcgtactgcttacatgctgattgtggtgttgcttactgcctccctgattaatttttgcagagcagcttacttcctacctgcttattgttgtgctgcctactgttttacttattgcctcgatgcttccaccgctgcgttctgcaacctgactcactatctgactcacagcctgtctaacaacctgacttactatctggctcttatttatttgcagggacctgtgctcttatcggttgcaggattattgccccctctcaatgcaggtgcggcacattttgcgacgttgtatagccaagggaattaattcacttgattaaatgggcaacatttgattcatctggtacctgacgctcaaccttctaggccgggcagttacctgctggcagcttgcaagttggttaatctgttttcactgggccctattagtgttagcaaattcctgcttaccaccataatcttaaatcttctcgttatgcctgaaatgcagtcagactctgtttgtacctcaagacggcacacagtttggcaactaagtagaggccatgttagtgacattgaaaactatttagcttgcaagatggtcaatatgcaatcacattattgttatacttcattactaaattgccatgtgtaggcacctgaactagcttgcaaggatacaaatatgtattcacctgacccgcatgcttctgaaacacaccttcataactagatacaaatctgaatggaccagaacgagcttgcaagctagttcatctgcattcaccagactctcagccttctgggcgagttggcaacatctaggcatctgaactagctattggtaactatctatataattatcaattaactaacatagtacctgattatctgactggcttgcgaatgtatgtatgaatctccttctgtgtatgcatgtcttgcaggccaagaggagggatggatgtaatcggaatggcaagattgctggcatgaagtaactacaaatgctgatgatgtacagatatagattcagcgaggacggagagaaatgatgatcgggttgacttgctagcccccttccttccctctctatgcggtcggttgtacttgctagttttcttctttgactctctatgtcgtcatgtggactgtctagtcctcttccttgactctcctagcggttggttttccttgcttgtcacatttcttgcctcagtggttaggttgccacacctccggtagttggagtaccttcatgcctccttccttgcctcctattaggttgggtataccttgggttatgcaggtttcatattggacctgatcagacttgtcctacatgctattgacatacatatttggttggatgcatagagatccttgtgaaagacactccgaaaaatatcgaatctgacacatggggtcgtggtatatccctctaaattgtagatgctgtgaaatggggatgctggacggagaatatcctcttagtagtagaggatggacagcacttcttgatggaatgtcacgtgtactcttaggatttcttggggtgagaactttgaaagcaccccgagtggatttaacagtttatagacttgttagggctcaccccttgattgtaaactgacatacacgatttgttgcatggatattttatgcttgtaaagtgcccaagtctcattccagactagagatttgcgccatactacatcctttgagaaacgcaataacctcaacccagactaaagagttgcgccagactacatcctttgagaaacgcaatgaactcaacccagactaaagagttgcgcaagactgcatcctttgagaaacgcaatgaactcaacccagaccaaagagttgcgccatactacatcctttgagaaacgcaattaactcaacccagactaaagagttgcgccagactgcatcctttgagaaacgcaattaactcaacccagactaaagagttgcgccatactgcatcctttgagaaacgcaatgaactcaacccagactaaagagttgcgccagactacatcctttgagaaacgcaattaactcaacccagactaaagagttgcgccagactacatcctttgagaaacgcaattaactcaacccagactaaagagttgcgccagacaacatcctttgagaaacgcaatgaactgaacccagactaaagagttgcgccagactacatcctttgagaaacgcaatgaactcaacccagactaaagagttgcgccagactacatcctttgagaaacgcaatgaactcaacccagactaaagagttgcgccaggatgaacatactatgccaactctgcgactggacagtcaacgcagaataaacggtccacaatcgtccacgtcctgatcctctaaatcgacgaggaagcgtctattatgcgctactatcgcaatgcaacgcattcaagttggacgtccggaaagctgcagtgcgttcgaattccgtcaaagagtccacccacgtggccctaagtcacgtgatcactgagtcatgctctagggcgcggagcgccttccgtacaccattagtcattaacctgataggcgcaactgcgcaaccgaacgggaacctttacgcaaccccgcgcaaaacgggtcgttccctgagtggtaggggatgtcgagtagcttggaaggaacgtcttcgtggtaggagtagaagggttcattccgagtagctcgtgtctatgtacgcaacgtgtgcattgtgagagatgaggcagtacatgtgtatggtactgtatcatgtgcgttcgtcacgtggcttacgggtacggtgtacccgtatgccttgctggacgtccagattacccgtgaagggttctgtaccgttacactccccccccttcagaagagatgcggaccccgcatctgatcgtaataaaggtgggatgtgaataccagtcgtagtcgtatgtgccgtgctcaaaatatacttgatggatcaagttggtttcggagacaaccatttaacatcccttttgagtactccgggaaag

SEQ ID NO: 303 - DNA, 21236 bp, Chlamydomonas sp.
  source 1..21236: mol_type = other DNA
tgatgaatcaacaagcgaagagagtagacgtcatgcgtcaaaagaagaccctgagtaggaatgtacagttgttaccgttgttaccgttgttacaatttagttggttacactgtttatgaagaagatgagaattcagatgatgaatcgtcttgaaaaaataaggatatcatgaattaataattaatattaccatgttaccaatgataccaataaaaagtaagtatattaaaatgtcacttttcactttacaatatgaaaaatgaaaaatgcaattttctcataaccctattaaatctgtggtaacgttggtatcgttggtatcgttggtgacatggtttatgaagtgaggaagataattcagatgatgaatcaacaagcgaagagagtagacgtcatgcgtcaaaagaagaccctgagtaggaatgtacagttgttaccgttgttaccgttgttacaatttagttggttacactgtttatgaagaagatgagaattcagatgatgaatcgtcttgaaaaaataaggatatcatgaattaataattaatattaccatgttaccaatgataccaataaaaagtaagtatattaaaatgtcacttttcactttacaatatgaaaaatgaaaaatgcaattttctcataaccctattaaatctgtggtaacgttggtatcgttggtatcgttggtgacatggtttatgaagtgaggaagataattcagatgatgaatcaacaagcaaagagagtagacgtcatgcatcaaaagaagaccctgagtaggaatgtacagttgttaccgttgttaccgttgttacaatttagttggttacactgtttatgaagaagatgagaattcagatgatgaatcgtcttgaaaaaagaaggatatcatgaattaataattaatattaccatgttaccaatgataccaataaaaagtaagtatattaaaatgtcactttcactttacaatatgaaaaatgaaaaatgcaattttctcataaccctattaaatctgtggtaacgttggtatcgttggtatcgttggtgacatggtttatgaagtgaggaagataattcagatgatgaatcaacaagcgaagagagtagacgtcatgcgtcaaaagaagaccctgagtaggaatgtacagttgttaccgttgttaccgttgttacaatttagttggttacactgtttatgaagaagatgagaattcagatgatgaatcgtcttgaaaaaataaggatatcatgaattaataattaatattaccatgttaccaatgataccaataaaaagtaagtatattaaaatgtcacttttcactttacaatatgaaaaatgaaaaatgcaattttctcataaccctattaaatctgtggtaacgttggtatcgttggtatcgttggtgacatggtttatgaagtgaggaagataattcagatgatgaatcaacaagcgaagagagtagacgtcatgcgtcaaaagaagaccctgagtaggaatgtacagttgttaccgttgttaccgttgttacaatttagttggttacactgtttatgaagaagatgagaattcagatgatgaatcgtcttgaaaaaataaggatatcatgaattaataattaatattaccatgttaccaatgataccaataaaaagtaagtatattaaaatgtcacttttcactttacaatatgaaaaatgaaaaatgcaattttctcataaccctattaaatctgtggtaacgttggtatcgttggtatcgttggtgacatggtttatgaagtgaggaagataattcagatgatgaatcaacaagcgaagagagtagacgtcatgcgtcaaaagaagaccctgagtaggaatgtaccgttgttaccgttgtaacaattagttggatacccctcctatcactcttgttcacgtgcgtgcttttgtgatcttgcgatctcccccgcacacctcgcttctcatatcgcacacattgaagcgcatgatgatggaacatcccccctcccaaccctgcacacccaagcttctcggatctgaaaagaagggtctaaataccgttttcgtgtacgtgtgtcttcgcttcgaatgtggatacacaagaggatggatgagaccaagttttttctactcgtcttcaatcacatgcaaatcttgtggcatacgggccttgtcccgtaaacttggcagtgtggaaacacgcacgacacccacgaaagtcacaacaaagctggcgacattccaatgatttgtcattatttgtctgccgtcgatgatgtcgacgggatgcgatggcgttggaatggcctcaccgcggtacatgatgtcactgaccatgtctgtcagcttttccttggcagctgcaaatgcctcctccatcgtgcctccggcgccaatcgcacatcgcacatcaggcacggtaacctcatggcaggaatatccatcttcgggacggtaacatgtgttgtaaaccccccagaattcataagaatctaggtatcgtgaaggtatcctccaccaagggtgcatttgcgcttatctcgttagccgttatttcaatctttcgaacagcttgctgtgcctttctcttacgaaaccttcttatccaacggcgcaagcaatgttcaactttgttgtgccagaaaatggtgaacgagatgtcaaaggccttatctcgttgtgtgattgtatgcgcaaacaatgtattggggtcaagagcggtgacacatgggtactggttcaagttcaattgtttcatgtaaacacgctcccccatccaatcacggatgacgatggatgtgcctttttcccataacagtcggacatccttggcaatcacggtgcctgtccccgaaagcaccatgcacgtgtccttcgggggccaccaatcctgagaataaaatcggaacatgatcgggttgagcatcttagtagttctcaaataaagtgggacaccccttataatcatccagactgaagatcgttcgttgctgatgatgcgatcgaagaactctgccgccgggctgaggtcaccgaggcagctgctgctgtgtctcctacaacgttaacatcctgcaatttgttgattcaaaatcgtattggtgttccactgccccgtgggttgctacaccatttggttacaccgtaaggtgtgccgtacacgaggcggtttcattttagtattccgtcgactgtagccatggtcatgttctctacagtggccatcatcaggagtttcttgtgtacataagggggaatcgtgtgtttactgtactcagggacaaaatatttgacgaaatgcgttggcatctcccgcagtttgatgatgatgatgaagaagagtcagatcatcatcaattttgccgccatgaacatgagcaaccgactctccctcttcaccatccagcagcaaccgactctccctcttcatcatccagaaacaaggcacttctgttgtatgtggattacaattatgttcctagggatcaaattcagaggactttgtgggtgcacatgcgagaagcaggaaccatgttgggcaagaatgtggatggtttggatataccaggtcaccacagcacgtgggttcgctttttgcacccactcgactttcatgtcgttgtgcttccggggcacttgaagaaggtggagctgatggatctgttggatgatcacatggcaaactcacatgatgactcggtgctcgtgatcgtcttgtgtggtcatggatcctccggtcagctcgttctgaccaacggtgcgaaggtgtcactggaggatgtgtcacatgcgacaatgcatcacagaggaacagttttgcctttcatgttattttgcggtgcgaggccttccgatggcctcaacccactgagagggatcaagaacaacaaccaacttcgacggtgcatgttcatctttgcaaccgataacgctgtcttggactcgcaaacactgaatgcatttgtgaaagcgatcggcagcatcatggataccaggtacattcaatgttgttactctgggattgaggacgccattcgcggccacatgcgtgtgttcaacggatcctccttgcatcttgtgggggcaaacaacgagatgcgaggttatttgtttcaacctgcattcgtcatgcatagagaatgcattcgtcatgcatagagaataggtgagcttggcttgtgtgccccctgcttctgcatgtgagacaccgggatatacagacgagtggctgactcgactacatgatccgcattgatgaggctgcgcaagccaccgtggcgtcgtgtggacgaggagtacaatttgaatcaacaaattgcaggatgttaagttgagcagccggccaagcgcatcaaatgcgtcacatgcgtcattgagaccataaaacatcccctctatctcatcagagtaccgatgctgaggagcacgggagaggtattcgaaacccatgttgtctgccacgatgcgcacgacgttgagtccgtgaaaaacgctacacatgacatcatccatggcagcttggtgggggctccttgacaccgtgagcttgccgggatgctcaaactcttcataagatatcataacgttttcggggggccttcgaaccctgtggagtgcaacgtaggtgtcgacagtgtcccgccgttttcgcggaggaggcatgcatcttattggacagatgatacatgtggcgggagaaaacgattggtattaaaatgtcacattccagcaaatagacaaatcggcatcttcggacattgtcatggttgagaagatttgggtgccacattgcatgatttgattgcaaaattctgaaaggccatggttccgtacaaaacgttgtagtctgaaatgatttgatcgcggagttcaggtttgttttcgttgttttgataccatttgatgagccgttcgcaattgatttcaatatttggcggatacttgcctgttgagtgtatccattgcataacaatgcatacaagttgtgtggcaagatttttgtcgattgatggagggtgttgcaaaacttgagttatatccattttaatatatgcattagcaaacaataatacattgtttgacgcattgtttcttatgcctcggttgataaacggactaaaaggatgtggtctcactccaaggccccccaaaatacagaacgaacgcgagaagcatcatcagcatcgtgacagacgcctcctccgcgaaaacggcgggacactgtcgacacatacgtctcactccaaggccccccaaaatacagaacgaacgtgcgaagcatcatcgttccattctgacaccaaccatggaagttaggggatctcaaagtttgtttgttgtgactttctttccatttgctgcgcagattcgcatctactcttcgaaagccgccgtggcccgtgtgagaatgaatggacgaacggggggcccgcacagttttttagctattgtgttctctcaagtgcaagtgcgtccgtagttcctctggaagcggcacgcccctatccgagaggaccctgacgcaggtccggctgtgcatggccatgccctgcatggctctgaaggtgacggagccggcgcctccctggaggaaggcggcgtcgtcctcgtacttgcttgcttctgccgggttcaacctgctcattcgctgcacgatgctcctgagcaccggcagcagcgagtcttgcaggtccgcctttgcccagcggcagtcccgtccgtacacgtacgtctgctggtagcagtcggggtccatgatgatgttcatgtactgcgggtgcgcggggttgaagtgcgatagctgcagcagcttgaccaggttgtacccgcactcattgaattgagcgaccgagaggaactctgactcgggcgtgacctcctccccgaaggggtgcatgtcctccaccggtgtcgtagcagctggagatagcgccgccgcatctggagcagtattgttgttgttggtggtggtggtggtgttggtgaaattttcgcatgtaacgacatagttgttggtggccaacccgaagctgttgttgattgtgaaagtgtgttttttacgcaacgcctccagttccgcttgcatttcatcgatccgattctcgaggtactccatgcgcttctccatgaagtcaacatcaacagctcccttggggtgagacctccgcttgtgtgaagacttcgaataccggttactgaactgcttgtcacacaactcgcacgcgaacaaacaggaggggggcgtttttttctccatggtgcatttctccatgaggagagaacccccttatgtttgttacatcatttgattgaccgaaaaattgtatgaagaatgccggaggctcacatcaatccctattttaaacgtgttcacatgaacacctctgaaaagactctccatctctgtaacaacaattatttcaacaaaaaataaatactgaagaatgccggaggctcacatcaatccctattttaaacgtgttcacatgaacacatctgaaaagactctccatctctgtaacaacaattatttcaacaaaaagtaaatactgaagaatgccggagactcacatcaatccctattttaaacgtgttcacatgaacacctctgaaaagactctccatctctgtaacaacaattatttcaacaaaaaataaatactgaagaatgccggagactcacatcaatccctattttaaacgtgttcacatgaacacctctgaaaagactccccatctctgtaacaacaattatttcaacaaaaaataaatactgaagaatgccggagactcacatcaatccctattttaaacgtgttcacatgaacacctctgaaaagactctccatctctgtaacaacaattatttcaacaaaaaataaacactgaagaatgccggaggctcacatcaatccctatttaaaacgtgttcacatgaacaataatatgctgacctcaataagatgcatatcgataacttgttcaaggtgtgcgacaatctttacctatcaggccaagaagcagctctcaaccaccaactttgtaaaacgttgcaattcaagattgttgtgaactgcacaaaacacaaaccgtacataaaaccaaggaacccccaacacaacatacattaagggtgctgttgaagacaactgcaggcaaaaagaggtcacgaaactcacatcccatgactgatttgaactgtaaaataaacactccagtgtgaccgtacacaacacgtttcacgacgagtgtaaagattgatcgattccctgtactttaacagcctcagagacccccctattctcctctttttggaaaaccgctagtcatcggtggtggctcagcaaccaccaccgcaaacgagaaaatgtcttcgtcttcgtcggtgtcttcttcatctttccacgttgagatgttaccgttcccgttgatccgttccatcgcgacgctctgcggcgagaccgcaattttgtgcaccaacaaagccatccgcggcgggttcgcatggccggatcggctggagctcgccatgcgagaggccaaaaccctcgacaagaacacactgttccgcatgcaatgcgacctcggtgccgtggggacttgcgaacggatgctggataacgaggccgatgcagtttcgatggcggcgatgcttcttgcgaagcctccaaactactctggggagacggcattgattgggggctgtaaacagggcaacgtctccctggtcgagattctcattaggaactctccgaacgagcaagtgcttgcgacgaataatcatgggatgtcggcactgatgcgtgcttgtggcattcagggggggcatgcgaatgcagcatgtgtcaagattcttcttagatactctccgaacgaacaagtgctggcgacagacaatcatgggatgtcggcattgatgtgggcatgtatccatggtcacgcggcctgtgtcaagattctgcttcgacattcccccgacacacaagtgctggcgaccgatcatttcggattgtcggcattgatgatggcgtgtttccatggtcacgcggcctgtgtcaagattcttcttcggcattccccctacacacaagtgttggcgaccgaatgtcatgggaggtcggcactgatgtatgcgaatgcgtcctgtgtcaagattcttcttagatactctccgaattccatcatgatttgaatttgtgacgtgacagtattgatgagctcctcgacatctgatgaaggcaacactttgtaagctttctttccccattctcgagcctggtttgctgcatctttgttaaactcgggttgaatgctgactttgagccactctgtgctgttcaatcggctgaaggagaagtgtgaagagtacgggacagtgttcttgcatgtgctggagcattacacaagtcagacatgccctatgtgcggtttcttaaacaagtgtggaggagagacatacacctgcaagaactgtcaattcacatgcgacagagacattgtgggggcagctggcatcttcctgaaggcagttcgaacagaaaatccctgttcgtaaaggaaagcatccccgggggagttgacccctatgatacccctatggagaaaacacaccatatctgaacataacaggaaaccccaaacagtaatatacaagtattattaacttacaattatacaatgggtagcaaacttgataggattcgtgcagatattatatcggccattaaatctacacaagcagatattaacgatgaaccattgtcccgcaatagaggcaaagttgcctttaatgttgattgtgatgtaatcaatagtatgaatatcattcaaatcaaatcattgatacatagcccggaagttaaaagcgatctaggtggttattgtaacagtttcatacagctagggacatttgatattgggacaccttatatttggggattctgaaaagttgaccaattcaagatttgtaaccgatcttgtcaatacagatactttcttcaggtgattgacacaaaaaattcaaggcatctaaagacactgaatttacatgttcaaagtaccctgaaaagtcaaactgatggctaacatcgtgcgcatcaataatccttttcaaagcgttactgtaatcaaatatatctgctacatctggaattattgggcacatgcagcgatattttcgcttgagaaaactaaagacattctcaatagcgttaaactctggactgtaaggaggtacaaagagtggtcgtattcctacagaatcgaacatagaaatcgtctcctttgaatgatggaactgtatattgtcaaggacagcgactgtaccccgctgtacatgtaactcagatacaaactgtacaaagtcgactttcttgcaattgtgatcaaggatcttgtaatgaacgatacctttagcagaaacggcagcaattagtgtcaatttggacattcgcaatgtcctagaaatttggatattttaacgtttgccgcgttgacagtaccctctgcgacaagtgtcaccaatgtaaaaacccgcctcatcgatgcttaacaaatccgatgtcggaacggctaaatactccttacaaaaacggtcgtcagaagatttgtggtcagtcttgtgccgaactgttttgtatgcgcgcttgcgggtgtaaccaagtttgcgtgtgtagcgtccacaagtttttggagacatcttgacagaggacagagaagtcacaccctctgcaagctgagacattgtcaagaagggattggagtcaatcagttgttttatagcagccttgatatcttctgtaatgacactcacccttttcttccgatgatgttttatattggctttggtgacccaacgttggagtgatgattttgatactttgtacagcaaactaactttcctcaaactacgattatagtatttgtagtgaacaaccgcgcggtgtcttatctctgcatcaatcatgataacgtatgaaatggtataaagaaatgtgggtgcaacattatatcaccaaaagaaaaataatactcaccccctcttaatgggggtagtgcaagacaaaggagatgacgatattaacatcagcgtcgtcaagaagacgcttaattctctgtgcatggatgtatcgaggcatcagatctccacaaggatacaaagcatggtactcttaatcaaccacgcagttgcagaggcatacttattcgcaaactttcatatcacaagatgcctcgatgatggagactttgacgtcaagcagttgccacacctggatcggaacttttattacaggtgcctccttgcggtatcgacctccaatgttcgaaaggatactcttggccagagcttcaatgataccatggttgctttcgacgccctaagacctgcaggatacgtgaaggtggacgttcgtccttggggacaagtaatcgcagacgtctcaatacaaatggcaacgatggcgtgcaacagcgtctgggcaaacgtggacagggtcgttctcaagtacctgcgcttgaaacatccctctctgcagaaacatttcaagaagattgtcaaagcggtggtccagtacccagaatcgaaaatcgacacaatcatcccagagggcctcgtgcatgcgatccacatcaaagaggttgtcagtcacttgagggctctctttccgctgccaagagggaagcagttcaacactagagcgcacctgacaatgcgattgttccatcacgtgcttacagagttgggagaggtcggacgagtggatccgaaagataaaaaaacaagaaaaagtcacccccgtctgctcagtatccttcctcgcaagaacggcttcacaatttcgtacgtcccgatatcttccatgactttcatgaagcttctcagcatgggtgattcgccactcgagagtgtctctggcgatggacgttacgagaaccatacaatgctgtggcgaaagtactttaatgtccaaggtcttgagacgaaaaggtctcgctttgacaaccgaatcctcagcgacggtaaaggggtatccgtccaaatgaagcagaagggtaaagaagaggtcgttgaagaaggagaaaacgcaggctatccaaaggacgcaaatatcgtagagtgcaaggacgcagtgggtgcgtgtcggagtagaccctggaatgacagatatcgtcacggtagcatcttctgcaggtcgcatcgagtctttcagctcggctcgctttagcgaagttgctgggtacaatgcaagcaagcgtcgcacctacaaatggaatgacgagactcaagacctcgtgaagtccattccatcgcctaatacgagcaacatgtccgacctgcaggaccatgtcagagcttatctcaaagcgctcccgatcctcctacaacacagagccaacaaaggctaccgatctatgcaattctttcgatacgttggtaaacagaagacgattgaaaaggtatgcgatgtgattgcaccaagggcacagacgaccgttgttggcttcggcaactggtccaaccaagggtatggtatcagtcgttcatgttctgggcccatcaaagagatcaggaggtgcctctcacgtcgtaagaatgttttgttcaaaaacgttgacgaacgcaacacttcttgtaaatgtcacggctgcttccagaggcttgtcaacatgaaggcagacagcgtagtctggcgcggagtttgcaaagagtccccaatcgacgggtctataactgttgagaagcagaagatggtggtgaagaacgtcaaggtccacaaagtactgcactgtagagacagtgtcaaaagcgcatcatccaatgtgcgctgtggtgcaacctggaaccgagacgtgaacgctgccaagaaccttcttctgcttctgacaacgtggatggacgggagagagcgacctgaggcattctgtgttccctcgcctccccccaaaaccacagtttccatcgaggcgagtgtgagcgctaaaccgaccgacccacctgggtttgtcagcagcttgccttgttatcctttgggccagcttaaatgctgaaatgcagagatgaagggcaaaattatgtactcgcctttagctgatctacccattgggttcaagggtcaccggtagggtgtcccacaaattgcgtctccgactgtagacaaagcaaataacatcataaattcaaatctatgaaaatccctgtaattccctctttagcttgaatacagttccgcatggtgttttgcctcaccattttgaaacgaaattataggaaataaccattaattaatgtgaggtcctcattgaaacagagagccggcagcgaggactccagaggtcacagacgatgccgaaggtccggctcctccagcgtgggcagagcccctgggcggagaaatagagcgatgaaatggccggccagggtttaccccgccagcgcgtgtccacattgaccgcatggttgaaggcgctcccgcttgttgtcgttcaaaggagacgatatttgcctgaataccccacccagcccttccccagcgccattttcttgtcccggcctcgagacaatgcccctgaagccccccccgaaagtacgtgctcagtgtgtgttacagcgcccatggaaatacgagtgtaaacagacatgtcagatctgccacgtgtgttcgcgcgcccatgaaaatacgagtgtaaacatgccagcatatcttccacgtgtgttcgcgcgcctcgaagattcacacgagtccgcagctgaattcccctgccccccctccgtgtgtcccgctcatactccctacatttttgtcaagcagaggtctgcttgagacgacacgtgtcccccatgcgcccatgaaaatacgagtgaaagcaggtctgatccgccacgtgtccccatgtgtctcgaaaaatacgaaccctactacttgactattggatccggcaccaccaccttgcaacactccaaagtgttccactctttcggtgcattccagtcggtaaaatacagcatctccaacctgcatcaacaaaaaatggcgttgtctaaacaactgggctcgttgtgggttataaaaaaacgatttaggaatacatctcacccctatgtttttgccaggggtctcgactcgactcgactcgacacaggttccgtcatgatgcgagaggtcggtcgctctgtgactcgactcgactcgacatgtgccgccgcctgatgcgagaggtcggtcgctctgtgatgtgactctactcgactcgacaggtaccaccgtgtgtccgcgattcctctttcatactcctgacatagttgtcgagcagaagtctgcttgagacgacacatcgggaaaaagcccaatcgttccagtgagaaagaagctcaagcgttacagtgaatcttttacaaacaacatacacattgtgtaagacttgacagttagttacacagtagtagtgtgtagtagtgtgtattgtgtagtagtgtgtagtgtgtagtgtgtagtgtgtagtgtgtagtgtgtctgctggttgatgtgaactgtgggctcccctccggtcgcccacccgctcggttccttgcggactcctttgtgggggctcccctccggtcgaccccggtcgctccgctgggggaagaggtgaaaggggctccgccgcttgttgaataatacaatccgttgtttgccaatggactatggctgtacatggacagctcgtgacccgaaagggcggcggcggtgtctgcgtgaggtccgtgcgcagaagacgaagtttcaagagctccagcatccgggagacactctcctggcccaggcggtagttcctctcctcctgagttctcttgcccttgacctgcgcgcgcgtggtatcgacatggtgagcgtgaccaagcgggtgcaggtcaatggaaagagaactcaggaggagaggaactaccgcctgtgcccggagagctgtacatggacagctcgtggccagaaagggcagctgcggcgtgaggtccgtgctcagaagacgaagtttcacgagctcgagcatacggcagacactctccgggcacaggcggtagttcctctcctcctgagttctctttccattgacctgcacccgcttggtcacgctcaccatatccagacccacggcgttcaggatcatcttcacagccttggacaccttgcgcaggtcccacccgtcgcgaacgccgcacgatgcatggctgaacagcctagcggtgtttgcgtagtcgctgaacatctgtgttcccttgagcttggcgtcgaacaccgtcatcatgttcgggatgattgtctcagtgtcgaacggggacgaaaaccgatcagatcagctagtgtctcctctatcaacacgatcttcagaagattggggtgcaacggcacgccacgaaaggggcgctgcagctcagggcacagaagagatgcaagtacctccacggaacgtggggtattgctcctcacgacgttctcgaatatcttggcgaccattcgagagacagtcttctctctctccttctctcgctcaacaacggcaaagatgggtggcacgtcctcggtgcagcaatcaaggttgtcgacgccacctgtccacacgtactggaatacgacattggccatctcccgaaagacggcacctgcatcacccgcgtcaagttggtagtactcgtatccaacgtctagacggtgcttgactcgagggtaatctccgctaaggtaccggagcagggcagtctcagcctccacacaagcacgcggattaagtacgtggattgcgaatatcatctttgagttcttcgggtactgagaaagtcgctgaccaaagggcttcgacgtccggccaaccttgacgacgatctcatctttctgaatgaacttgtgctcaaccaacgcgtacacgacattggttgtcatgtgcgccatgatcgctgtcgagctgctcctatcccaatgcgcgccgtttacaccattattatgtgcataataatgcgctattgaagaggatgatgatgatgatgacagtgttccgccgtttgcgtgtgatagagtgcgtgcgtgagaatgagtgagagtgggcatcatcatctcgacagcagccaccgcgacgcgtgtgtgaggatgcggcatgtgtcgtgataaagtgcgttatcctatctatctatctatcctatcggacagcataaccagagtgcatctcttgcacacataatgcaccgttcaccagatgccaactttgaggaatgacggtatgcatccacatcatgcacattaccttacgtcctggggtagaaatcgaaacctgtctgatgagaatgataccatgtttatttttcacaagcataaaaaatcaagacttgctttgcgcaccctatctcttctgtgtaaaacagaaacaatggataacttcaagaagttggatacaagcatgtatgtgtgtttcacagtttcaggcgatacgtggaatgacaagtgcaacaagtttactttacatggaacggtggtattcgattatgaggatgttatgttatgtttacttattttcggaaagcaaaagagtcaactgttgcaaccttttaaaatatgtgtaaaactgtatacaccaacatgagatatgtcccgacaaaaacaagcgaaaaagtgaatgtggttgtgaatggcaggactgtcgaacgaaccgtgtacttggtaaagggaactcgatgctattccaaacgcgattcgacaacacataaaaccaagtacgtccccatagggaaaacaaaacaggtggggggtaatcgtaattacgataatgcttggcaaacaccaaacaaccaagtaaagcaacatacaagtatattgaacaatattgatattacaaaaataaaggcagaagagaaagagcaacaacataaccgacaaaggaatggaatgcaggcgcagagaaataattataacctggaaaaaatatctgaggagtatgatatgcaaaaaaattcgcaaaatgcccaagaacagaaccgacaaaggaatattttaaagataaattgcaaaaggatggaatgcaggcgcatagaaataattataacctggaaaaaatatctgaggagtatgatatgcaaaaacattcgcaaaatgcccaagaacagaaccgacaaaggaatatttcaaagataaattgcaaaaggatggaatgcaggcgcatagaaataattatgacctgaaaaatatatatgaggagtatgacttgcaaaatgcccaagagcaaaaaaaaaaaaaggaaacaagaagaagaagagaataatacgaaagcgcaacaacagaaccgacaaaggaatactttaaatataaaattgcaaaaggatggaatgcaggcgcagaggaataattatgacctgaaaggctccaaatcagaatcaaatggtcgtattcctacagaatcgaacatagaaatcgtataacttcacagcaggctccaaatcagaatcaaatggtcgtattcctacagaatcgaacatagaaatcgtataacttcacagcaggctccaaatcagtatcaaatggtcgtattcctacagaatcgaacatagaaatcgtataacttcacagcagaatcgaacatagaaatcgtataactttacagcagaatcgaacatagaaatcgtataacttcacagcagaatcgaacatagaaatcgtataacttcacagcaggctccaaatggtcgtatccctacagaatcgaacatagaaatcgtctcctttgaatgatggaactggatattgtcaaggacagcgactgtaccccgctgtacatgtaactcatatacaaactgtacaaagtcgactttcttgcaattgtgatcaaggatcttgtaatgaacgataccttgaacagaaacggcagcaattagtgtcaatttggacattcgcaatgtcctagaaatttggatattttaacgtttgccgcgttgacagtaccctctgcgacaagtggccgcttgcgtacaagttattactaggtgtgaacccggcagcgaatgagtcagcagagatgcgcacgtacccgtcggcgatagagacatttgacggcgacatccacgaaaagtcaccgtaccctacagtaagcgtgtcaacggaatactaaaatgaaaccgcttcgtgtacggcacattttactgttccgccgactgtagtggaagtgtggccatacacaatgagatgtctcattccgtcgagtgtacagtttccattacttgaatagcatggtgtatgggatagttgttgtcacaactgcaatggacatcatgttgcgatatgcctttgaaaccgcaatccctcgtgtagggtactcgaagaacctctttttcatcatgattttagcaatgacaaaccctaaaactgtcaagatgagcgtttccatgccgaagtcgatgatcatgtcggagatgaatgcgctgtcaatgacaaacgtgtttgatgacttggcatatgtgtacatgacaatcaccagtgctacaaaaatgatgacctggatgataatgtcgagtaccaagaaaataaggaggaatccgctgtcgataatgagtttgtcgataatgggtaatggataatgaggttgtcgataatgagtttgtcgataatgagaagtgtggacctacattataacaatcgattatttacaccatcatgtatcctttgaaaacccctctcaaattttcgtttctctaggtgacgtcccaggtccgtctcttgctgtaggtgacgttccaggtccgtgtccgtctcttctcttaggtgacgttccagttccaggtccattcccgtgtccgggctggccgcgacgtgctcttcgacgaacatagccacggcgtcgttcgcgttcaagtacatcgcactggtcttctttaacgaatcgggcatatcgaacttgtaagcgtatgcaaacgcgtgtagaagggtgcgtaggaactccatgcgcatcgctcccattcaagtcattcaaggaagactctacaagccctgcgtctcgtgggaagaggaatttgtcggcgtccgcatcatcctcgtccacaaaccgactgacgtagtcgagttttcgtatccgtcgttggactcccgagtcagaacagtcgaccatcgtcggtgcgtcgcacatgatgtgtatcttgtgttgcgggcggaagtgtacgatgtcgctggagtgcaagaggcggtgggtgatgccttccccaccggtcttgtgttgcgggcggagaaagcttacgatgtcgctggagtgcaatacaccggtggtgatggcttccccaccggtcgtcatatccttgaggactccggaatttaagacttcgtcgtggtttggctctgtgcaatacataatgcggacccccttccgcgtcgaaaactgtggtatcgggcgacattgatcgatgcgtttctttcttgtcagcatttccacgccgaatttctggatgtagtctcccaatacgatctccatgacttcgaagaacttggtcttcccgttcgaggtggacgcgtcggagccgccggtgtgtatgtgaaagagctcttgtccactgtcaccgtacagctgtctagcaaatgtgtggatgctaaacagtttcccgccgtttgcgtgtgtcctcctatacattcgacagtgttccgcagcttgtgtcctccgatacattggacagtgttccgccgtttgcgtgagtactccgatgacttgacgcaggcgttccgaatgaatccggtatttgagtaatttcccttacaagtctgatgcttgatgtgaactgtgaactgtgggctcccctccggtcgcccacccgctcggttcctcgcgaactcctttgtgggggctcccctccggtcgcccccggtcgctccgctggggggaagaggtgaaaggggctccgccgcttgtcctgaggagacaagaccaggtctcaagctgacataatgatattaataatccgcttcactccagttgtaccgtactctagaaagcggtttcattttagtattccgtcgagtgtaccatacatcttaatcgattccacaaaccctggtgggaacaatgccgatggcatgattgcgtctttcttctgcaatttctgacgcgaactccggtgatactggacagagctgactcacatctaatggatcgcgagtgaatggatcggtggcacttgcacgcacccatctttctatccaacaacggtcatacagatgaccagcgggtgagacggctggctgatctggccactggtgcgatatggaacatcggaacttgaacgggacataaaattcaacacgatctactgcgtggatgagaactatacggttgtatgcccgcatcagtacattgtcccaatgtacaatcctggttgtatcagatacaagggttcgtgctgcagcgatcagcctatgaatcaaactgtcatcatccagatctagggcccacacatccgacagagattgtatatccgcttgctccagcaattcagcagtccacccattgccgaccattgccaactcccgcagagcactgcttccaagcattctttggaatatagcagagctattcctttaagacctgcgagcgtttgtgaagtgtgctgtgctgatggttgtttatactgaagaatggttgtttacacttcattcgaggacgatgatccgccaccgcatccgtgtgtcatgaattgcgtgtgtacgtgtatgatgacttgacaggtttctgcaactaaattcccctgccccactccgcggggcccgcgatccccctatcgatatacaatagcgcttgtctagcagatccatgcttgacatttgatcaccggttgcgattactttaccgtgttttccgtcatctatgagtatcttagagagtatcgacttctttgcgatgcgagcgatcgatcgtcccccgtaagtcgacatcgttccgccgactgtagtggtcgctctgtgactctgtgattcgactcgacacaggttccgccgtgatgcgagaggtcgctctgggagtctgggagtgggagtggggggtgggggcatatcctgaagacacagagtcacaagacacacagtctctgtattgacaatatcggttacaaaatatggttgacttggtcaacttttcataatccttaaaaaaagtacaatgtaatcatcaactgtccctatgagcttccgtgccgaacttgatcaccatctgcctgcattcgcagcagctttggtagctctgcatggtccagcttagctaatctaggggatccccttcactgtaggctcattcctgttggtgacatcatcattcctgttggtgacatcatcatcattcctgttggtcctgattgtctccccgacgattccccttccacaattcttgcattggccatcaaagccgaaattcctccgagctttacaaacatcgcaatacgcattcggcatttccctgcatgggggggagggagacgcattggtttagttccctgcgccagatgtctgagtacgcaaaaaatccagatgtctgagtacgcaaaaaatttagatgtctgagtacgcaaaaaacccagatgtctgagtacgcaaaaaatccggcaatcaatgtaatgtaatgttttctacgccaacgaaaggccgttgtgggttcgttggtcgtcactcaactcgtaatgagtgcccccgtaattgctttaaggttgagaagctgatattaccgtaaaccatataggtacctttggaattcaaatcaatactactgaccatacgtatccccattgatcgtttaccagataattacttattccaatctaatctgacatcaatcctcatctgttggttctgaaaagacgagcttccttagcaccaaccaacccatgacgcgctgcggcggctttggcggcgtcaattccgtcgcacaccacccgcgcatttagagggccgaacaggagtgtaaatgggggagtgacaacccattccatcccatcctacttgtcaaatcaatctcgaaccatcattaccatcctccatcatgtacaatttgcctcgagtgaagtctgtcgtgaaagactcgcctcctttcacgatgattattgacgctgttgtcctcgaatttgtcgcgtcgtgaatccgatgacaagagcgtcaataatcatcgtgaaaggaggcgagcccttcaggattggaaggcgtttgcctgcttgataatacgagaccgcatggacttcag

SEQ ID NO: 304 - DNA, 21125 bp, Chlamydomonas sp.
  source 1..21125: mol_type = other DNA
cgcttgggaggtgaagcaaagtgcaggggagttgcgctctgcgaagcacatgcgcactcgatctcttttttgaggggaatctaaggtagaaacaatccaatcgattatgtataaagtgaaaacgataatacacggcattactactacaatctcacaagcattactaagacaaatcactcaggtagtatgggcactaaggctgaagacaatacgggatcatcatttacctctgctaatgactctgctactgctactgcttctgcttctgatgcccccatgaaaaaggggcagtccatgctatcaaagaggcggtacagacagatagaagaaaaattcaaggagatactcatcggagtcagcaaagaagaaaacgaaggggtcatcctagcaaggctactcacagaattcagggaaattatgcagtttgacccggagggaccaacgtatggagcaagggacacggcaaaacagtgcgaataccaaagaaacagaaatatggcaatcaaagatctggcaaaaatagtgagggaaaagcttaaagaagaatcatacaatgtttattaaacacccgatatgtcatccctcgatgttcttctggcggcggcacatgtcaataacttccctgcccccaccgaggcaactcacggtgccatgggggaccccatgttcggatcgtttgcgatccctgactgcggacctcaggcacaggcgttccgcgaggcatacgtgcacgcgctcagggatgagggtcgacccctgtccatcgtagagacccatacagacacatcgccaatcatagttgacctggacatgcgacagaacacccctgagcgcatgtacacacagaagcacatcgagaacttcatggacgcgctcgtgtcggccaccaaatactttgtagaccagcagcacatggacgtagtgatcctcgagaagccaaatccaagactcgacaagaaacacttaggggtgtacaaagacggtctccacgtggtcatgccaaatgtaatcacacacacacagatacaacttgccatcagggagcacttcgtaaacgatatgaccgaacataggacgtacgagagcaccatttgcatccctggaatggccgaaatggatcccggaaagatatatgacaaaagcgtgatcaccccgggaggcaggtggttcttgtacggatccaagaaaccggatgagacccacccgtggaaagtcactgcctggtaccaacttgatactggagcaggctcgctcaagaaacttgacgtacagaacatggatcttgatacactcgtgcagaatctgagcatccgtgtgcatccgcacggggggcacagcatatacaccaaatacggtcaggaggaaatcgaccagtacaagagccaaaacgtgttagagactaaaaagacattcgactcgcagcatggaaggaatgtggaatccatatacaatctcgtggacattctagacgcacaaagagccagcggatacgattcatggctgaaggtcgggatggcgctgaagaatacagtcgacgcaggaaccgacactcagcgcctcgatatatggaagtcttttgcaaaaaaatgccccgataagttctgtgacaccaagcacgaacaggtgtgggcaaatctgaagccgacaaatatcactctagggacactccgcttccttgccaagcaggatgacccgatggggtacgccgaatggatcctaaaatgggacaacgccaacaaacagggcgaggaaatagacaaggatcgcatcatcaaagacctcaaggtaaagctagaattggcaattgacaacatggtatcattgaatgtcgtaaacgatagcatcgagttcaagattgacaacggagcgaaaggagccatccacaagaacaaatacatggtggaggtagatgacatatattatggatcgatgatcaacaagttcccaatccatgaagacccagggttcatcaagaacgtgcctatcgaccaaggaccatacgaatgcgagctgcggaccatggatggcaaaacaattaacagtgccatcttgaagagcaccgacggcttgcaaatcgcattaatgaatatgggaagtgacaaccaatacgtaaatgtgagatccaacacgagcaacgcaactatccgagacaagcaggtcatcaacacaatccataacatgatcttcaaggcgcaagagtcccacgcgaagaacatgtaccggatcacgcagaacatcttcctggtcaacaacggcaccatcaacatcaacatgaagaggggagatgatgatgatgatgatgactcgttttcgtcctcaatcaaagaggatacgttggcggagaagttcatggaggccgcaccagaattcttcaccagaatcaagtgtgtgccaaaactcaacaggaaagaatgcgtaggtgacatgtactactgcgaccctgctaccaatcgctggtcgaacttaagcaacttgatgataatcaaagtaatcaaactcgagttcaaatccaaattccctgctgagaagaataacaagacgaataagaagattcgggggtttgtcgacacggttaaggggcgttctgtgttacttcaagccatcgcacttctcgtcctagacgaaacgttcaccgataacctcgatgtcaaccctgacctctttgcggtcaacaacggtgtatttgacagcttgtcgagggacaacgtggttttcagaaacgtagagattaccgacaatagtagcaggtgtgcgaagtgggattaccagggagaggaggacaaccacaacctccaaagatgcaaagaggagctagacgacttctttctaaaaattctgccagtggaagaggagcgtgacgtcgtgctctcatttttcgcaggtctcctaacaggtcgacgcgatgagaagaaattcctagccttcaccgataaaacatccggagacaacggaaaaagtacccttatgacgctcatgggcagcttcttcagctcgtacaagagcagtaatggaaaaaaaatcctgacaaaggggtcgtttgcaaggagccgggatgaccacgacgcgggtctcgaggccatgaaaggtctcaggctactggtggcagacgaaatgaaatccaacatccctctggacgaggcgttgatcaaaaacattgcggggggggagggtgtgtgtatcgaagggcgctcatgtggctctgcggactctttcgaattcatctggcaggctggggtcgtcatggtattcaacgaaggcgattgtccaaagttcgacggaggagacaacgcatttgtcaaaaggatgatcgtggttcccatgcgctcaaactttgtgcaacaacccgacccagagcacgagaacgagtttgagcgacggaaccttaccaaaatattgcccacttggctgtcggcgctggcgcagctgttcatagagcacttaagtcgaccggggcgctcaagcatcttcgacaaactaccggtaacgatgaccgagtggaagtctggtattgcggacagcgccaacccccttgccgagtggctcgaggaggtggtggaggtgacgggggagtattcggacgtggtgtgggccggggacctcaaggcccggtggatagagtcccactatggacccgcggcagcagtcttcagcaacaggctggtcaaggcattcttttctggaaaacagggaatcgagtggaaagatagtgcaagaatcgagacaatatgcaaaaagggagtgataagggggtgtaaattgttgttggttagacacgattgaggaggcatgctttagcatcatcatcatcctcgtcaaacatcgtccatctgacgcgatcgaacacacgccggatttcgaaccctcgtacactcgtagacgagtataaataagtcagcgtactcttattcactaaacgacaacaacacacttcttcattcgatgcattcacggtactgatgctgagggacgagacggtcgagcaacgccttgacatcgtggacacggatggtctcattggcggggaccgtcctcaaggtcctgtggaaggattatgtcctattacagtcggacacatctcgtccacaatatcagacttccactctgtcataatagagtggaagtctgatattgtggacgagatgtgacgtcttgtcagcttcagtcttcaacaccaagctggtcaatggtatttgttctttgttctttgcgggcaaacaatagaatgcaagaatcgataaaggggtgtcaacttgtttcactgtacatgtacacacgcaaacggaggaacacaacactcactgtcgacgacgatcgaaaaacatctgagtacacgcgcaaagagaggaggaacaccaatgtcagccaatgtccatcaatcagactgaatacacaagacacgcacgcacgcactctatcacgacacatcatgccgcatcctcacatgccgacagcagacaacaagtcgtggttgtgtgtgcgaggcgaagtatgacagtcgcgcaaggtatgctctgcgccccgttctgggatcgttcaagcagacagtggatgatggttgttgccacctgggtggcgtcttgtgcgcaaggacctcacgccactcaacgcgcacgccaccgatgccctttcgggtcacgagatgtccatgtacagacagccatagtccatcggcaaacaacggattgtattcaacaaacgcggagcccctttcacctcttcccccagcggagcgaccgggggcgaccggaggggagcccccacaaaggagtccgcgaggaaccgagcgggtgggcgaccggaggggagcccatagttcacagttcacatcaagcattagacatacacactactgtgtaactacagtcggcggaacagtaaaatgaaacatccaaaaacaaataaaacaaatagacaaccgtttttttattgtctatttgttttatttgtttcagcttggttgggtatccagggccaccacgtggaggtgctgattttggccccgttttgtttctttttttttcaaatacttgaaacagaaacaccttctcatccagattacttcttggtgtgggacatccctttgcgtgttaacacaggcttggcgacgaaagtcgggttgtcgtaaatgacgaataccttgggtcgggacgcaatgatcgcgaagacgtcagagattccaaacatttcgtatgacagatgcagtatattaaggggtgtgaggaggttgttgttgtattcctaacgttccgaaaaacctttcaatttttttgtatttaaagattctcagaccacgcgatcgaggactcggggatgataacggcactcacctgccatagctggtgcttagccaactgcttcaccaacttaattccgttcttgcgggtctcgtaagaagtctcaatcgtgtctacgaaacggtcaacaagaacgtcacttgtaaaagcacactgacgcaggcaactgaacttttcgaaagaaagaatatcctcgatgttcttgctactacacaactgagctagggcaatggacaaattacccttcgtagtgctcataaccacttgaaacccctcgcaactgatgttcatatgcaaaagggggatgatacccttcacataatcactcgagtgaaggaagccctccttctcggaaaaatgaatgccgtgtgattgagcgttcaacatgaacacacccagcttagctgcaaaagtcgcatctccagaagtcttctaacgttttgaagtagaagaggaattgcggggtgttgaagacattttacatacacatgtatacatgtatataaaaatagcctagttcctccggaacgactcgctacagtcggcggaacagtaaagttgtatacaggatggacacaaagacttttcatgcgctccggcgtgatccagagtttgtgatcaactcgttcactaccgccgtgatgccttcgcattcgaacgccaagctgtgatatgaatcgtcagcatggcacaccgtatgtgtgccgaaactacgcagtgtggcatacaatccgatgcggtctccgacatgcaactgcgtgtccccagtggtgcatgacaggctgcatgtgccctcgccagcaccactcgtgtcatagatggtggtgtaacgaggcacaaacactgtgatggtccgtggtggcaggaacaccgcctcgtccacatcaaaccatttcttgatcatgtcccttcgtagggcggctaccgcatgccatgtgtgttcgtcaccaattttgagttgcagggtggcaccggtcttgaatgtgccgtcgcctgacagactgaatatctgcacgatttctcccataggaatggtgacaaaggcgcacgggacatgactggggaacttctcacagacaccggtggcatctgccccgatcacgatcataatgtatggtaatatgatgtatgtatggtaatataatgtatgtcggtaaacccttacagttgttctcaaataaagtgggacacaccttataatcatccagactgcagatcgttgcttttgggcaacgttggggggtgcagcaggttgaagaggttctcgaagatgatattccgagtagcctctttggtaaaccgttcaaccgtctgtgtccccatatcagtatcagggggtgggggtgggcgaaacgcgagaggacgctctctcccaaagacttgtttcactgccccgtgggttgctacaccattaggttacaccgtaaggtgtgccgtacactccagaaagcggtttcattttagcattccgtcgactgtatctgtatgaaggtcagatgagcaaactccagtgttgccaagttgctgcagatctgcaattgtcaggttgcatttcatgcatcggtatggttgtaattctgccatttctagcagaccacatttccaaatgtgtttgcccctattgcggtttagaaggtcttcgctgagtttgaactcgggatgttgcattattgtcctcccacgcgggtgttgcattctggggatgatatccatttagttgtagagattcttatattatttatcaattccaaaataatggcattcttgttctcagttttttaggtcttaaaaaatgatccggatgtcagggtcaagcaggaacagaaacaatgcactcgatcaatgcgtgtgtccatctagagaatatgtatggaagagggggatgcagagggatttcattttagcggtttaataattgtttcaaatgtttcattacccactctcctgactcttcagatacgcttactacaaaactaaacagcaatctggtccagaacgacgaacatcttcctaatcttcgtcggcacatactgagcttcgatggtagaagatgctgcgcgtagcgcattcgcgtctggctcccctaccatacttattatgttctctatcacgtcaggtggaattgatgacaatagggttgggtccaactgtctggcaagacatgtgctttcgtttgggcagaagcggatcacggaatcgcccacaacagcgtcggatgcaatgaggcgggttagtctcctttctaatacattccactccacataaatctcaacaatgcctgccccccgtctaggtccatccttattgttctcccatgctcgcatgtgctccaacagtgtcagtctcctcataagctcacaaacgagtccgttgagattgcatttgcggatatgaatattctcatgccacacttcttgagggtctaagggtatgctatcgtccttgacgtacgcctcgaacgcattgcgttgtagaaacaaaacctgcaaacggtcaggaaatccaaacaattgacgcacatcggcataccttgcacattgcactccaatgttcaacgatttaaaacccaccttgtaaggcatacttgattacatatgcacagctttttactccttatgttgagcagtcagtaccaacatccaggagtcattcctcgaatccgcgattcatctttcattaactgccgtctcaagcaggcgtctgcttaacaaactattccggtatcatgaaagggaatcgcgggacccacggagtggggcaggggaattcagctgcggactcgcgaaaacacgtgtcctaggatctgacttgtccatcggaggaggacacacgcaaacggcggaacactgccgaatgtatcggaggacgcacgcaaacggcagaacactgtcgactgtatcggaggacacaagatgcggaacactgtcgaatgtaatgatgcgggaggggggcggctccatgttcatgtccctaaaggcgcagcagacaagaaaacgctatatataaacgtacagagacaaagtgctgacgattgaatgcaatctcatgcatctcaatgtcaaagcaatccaaagaatccatgcacgccggcggatcctcgtccagactcatcacgcacacgcacggaactgatgcggcggcggcggcttatcgcccagccccatcacgcacagcagaggcagcgtctcgtccatccttatcacacatcatgccacgcggcggcttgagaatgccacactggaaatcgatcgtcattgattgcagcataacaacaacacggcgttaaaaagggaattacagcgtgtccactttatttgagagtaagagcacatgatggcgtccgtgaagactcgtcgagccttgttaatttttccaagttactacgtagacgggttgggacccatgcttatgcacacattgcaagagtgtggtacgctgccaagggacttgaaggggtacagatgtggcggagccatgaaggaccatgatgtttttgtcaacaaggttttgggttctggtatggagatcaatgttctcgaaggcaccgtgtgccggaggaccgtcatggaccaattggcttggttgttggagccatcagtggacgttgctcttttgttattctgtgggcatggcatgaatgaggggtcgccacgtcacggtacattggtatgttcttacaaacagctggtgtcatctgaggccatcgatgcggtggtggaagcgcaacgtttttgcggcacactcatccgcgtgctcaacatgtgcgaagcagatgccattgcccccggcactggtctgccgttccagcacggaagatctttgcgtgacgcagcaagagcagatcatgatgcacagttccatcgcgttgcacacaaggacgtgatgttgttggcaactgggcattttgaagaaacggcaggtggcaagtcaggaacacccgtcatcgctgccctgggcagaatgtttgacgcagagtcgatcttaacctacgagcgccttgatgagctcttgcagaggcactggcctggtggcagtgggagggtactgctgtatcctgcaatgttgtaagggatcttcggatggccggctaatggttcacaggtgagtggcgattctgcttgacaataagtgggtatttacatggaatcgttttcaccccatacagctagggacatttgatattgggacaccttatatttggggattctgaaaagttgaccaattcaagatttgtaaccgatcttgtcaatacagatactgtcttcaggtgattgacacaaaaaaatcaaggcatctaaagacactgaatttacatgttcaaagtaccatgaaaagtcaaactgatggctaacatcgtgcgcatcaataatccttttcaaagcgttactgtaatcaaatatatctgctacatctggaattattgggcacatgcagcgatattttcgcttgagcaaactaaagacattctcaatagcgttaaactctggactgtaatgaggtacaaagagtggtcgtattcctacagaatcgaacatagaaatcgtctcctttgaatgatggaactgtatattgtcaaggacagcgactgtaccccgatgtacatgtaactcagatacaaactctacaaagtcgactttcttgcaattgtgatcaaggcgcggtgtcttatctctgcatcaatcatgataacgtatgaaatgatataaagaaatgtgggtacaatattatatcaccaaaagaaaaagaatactcaccccctcttaatgggggtagtgcaagacaaaggagatgacgatattaacatcagcgtcgtcaagaagacgcttaattctctgtgcatggatgtatcgaggcatcagatctcctcaaggatacaaagcatggtactcttaatcaaccacgcagttgcagaggcatacttattcgcaaactttcatatcacaagatgcctcgatgatggagactttgacgtcaagcagttgccacacctggatcggaacttttattacaggtgcctccttgcggtatcgacctccaatgttcgaaaggatactcttggccagagcttcaatgataccatggttgctttcgacgccctaagacctgcaggatacgtgaaggtggacgttcgtccttggggacaagtaatcgcagacgtctcaatacaaatggcgacgatggcgtgcaacagcatctgggcaaacgtggacagggtcgttatcaagtaccttcgcttgaaacatccctctctgaagaaacatttcaagaagattgtcaaagcggtggtccagtacccagaatcgaaaatcgacacaatcatcccagagggcctcgtgcatgcgatccacatcaaagaggttgtcagtcacttgagggctctctttccgctgccaagagggaagcagttcaacactagagcgcacctgacaatgcgattgttccatcacgtgcttacagagttgggagaggtcggacgagtggatccgaaagataaaaaaacaagaaaaagtcacccccgtctgttcagtatccttcctcgcaagaacggcttcacaatttcgtacgtcccgatatcttccatgactttcatgaagcttctcagcatgggtgattcgccactcgagagtgtctctggcgatggacgttacgagaaccatacagtgctgtggcgaaagtactttaatgtccaaggtcttgagacgaaaaggtctcgctttgacaaccgaatcctcagcgacggtaaaggggtatccgtccaaatgaagcagaagggtaaagaagaggtcgttgaagaaggagaaacgcaggctatccaaaggacgcaaatatcgtagagtgcaaggacgcagtgggtgcgctgcgtgtcggagtagaccctggaatgacagatatcgtcacggtagcatcttctgcaggtcgcatcgagtctttcagctcggctcgctttagcgaagttgctgggtacaatacaagcaagcgtcgcacctacaaatggaatgacgagactcaagacctcgtgaagtccattccatcgcctaatacgagcaacatgtccgacctgcaggaccatgtcagagcttatctcaaagcgctcccgatcctcctacaacacagagccaacaaaggctaccgatctatgcgattctttcgatacgttggtaaacagaagacgattgaaaaggtatgcgatgtgattgcaccaagggcacagacgaccgttgttggcttcggcaactggtccaaccaagggtatggtatcagtcgttcatgttctgggcccataaaagagatcaggaggtgcctctcacgtcgtaataatgttttgttcaaaaacgtcgacgaacgcaacacttcttgtaaatgtcacggctgcttccagaggcttgtcaacatgaaggcagacagcgtagtctggcgcggagtttgcaaagagtccccaatcgacgggtctataactgttgagaagcagaagatggtggtgaagaacgtcaaggtccacaaagtactgcactgtagagacagtgtcaaaagcgcatcatccaatgtgcgctgtggtgcaacctggaaccgagacgtgaacgctgccaagaaccttcttctgctgctgacaacgtggatggatgggagagagcgacctgaggcattctgtgttccctcgcctccccccaaaaccacagtttccatcgaggcgagtgtgatcgctaaaccgaccgacccacctgggtttgtcagcagcttgccttgttatcctttgggccagcttaaatgctgaaatacagagatgaagggcaaaaatatgtactcgcctttagctgatctacccattgggttcaagggtcaccggtagggtgtcccacaaattgcgtctccgactgatataataccagtcccatggttgttctgagtaggcttgtacaatatcccatgtgatatttggttttgtgctcaacccaccccaatcccaaggtttactgggggttgtaatgacaatatcaatcgttattgtagggtttctgctaatccagaaccagtcccatggtttatctgggttggcttgtataatatctagtgtgatgttggggtttctgctgatccagttccaatcccatggtttgttgggattggattcgatgatatcccatgtgatattggggtttgagcttaataaactccaataccacttgtgttccatacatttgacccgtctcgagatgtggttatttatttccgctgaaatcattattatgattgttaaattgtaataactaaaaatagacaccggatgctctaaatcctgaatagaaatttaaaaaaatcggccgggaggcaggaacgcccattttatatcaaacggcggaacgatgtcgatactcttgggggagcacttattggatgtgattcgatgatgatttgtgtctccttggtggattggatgtgacgacctcgtccagcattataaagggtgtcccactttatttgagaataactatagaatgacagattacgcttcggacatcactgtgtcgggtacgtccgacttgatttgcactggggtccaagatgttcatcttgatacaattgaaaagcaaaaaacattggaattggcccgcctcatgagaggcctcgtgcctgaatggggtagtgattacatcgaacgatacattcctaacgagctccagtgccagttgcacaacaagagaacatggatggatgaagatggattctggtggggatttgacaaagtctgtgctaggaagtataagcagactaacgtcattattcttgctacgaagtatcacggacttgggacatatgaacataaagtactggtcactctaaataattcggtacaagtggtgtgggaagaagatttatagtgattctgaatcatacgggacatcgcatattttgcatggcagccaatggccccaaatagaaatggggtactcaaagaacagcagtagcaaccacagtgaatgcggttgcgtaagactcaatgcggctttaatcgacgacaagtggaagcgcccttgtattctcacatgctatcaacacccttttcgttgtggagccgaaaatcctcaaacccccccctgcccagtatggacatgccaaggtgtcgaaagccatacagcaggccactatgggcgcgactagacttttgtcctggctaccgcatctcataaacatggacctgaaagaaggaacctcacttggatatgtgaaaatttctcgtatgatcgtgacagctgtgaatcgcggtggacgcgtcttctgtcaagatatccacagccaggaaatttactaagaattggaggaggaagaaaggtggaaccttggcaaaattgtggagttgccgagaatcgaacccggctctgttggtatcggacaccatgagattgacgggaaagaagaaaaacccagacgtagatgcaaaaaaaagctccttatatatattctgtatattactacaacttatgtaaaatctacttcccatatctcgcctttgctcctgcgcccctgtgccagttttcccccagtcttctgtgacacaggatctgacttgtccatcggaggacacgcaaacggcggaacactgtcgaatgtataggagtgtacacaagaggccgaacacggtcgaatggcacacgcaggccctcattgacacacgcaaacggcggaacacgtttaaaatagggattgatgtgagcctccggcattcttcagtatttatttttgttcaaataattgttgttcccgagatggagagtcttttcagaggtgttcatgtgaaaaaaacacccccctcctgtttgttcgcgtgcgagttgtgtgacaagcagttcagtataatgatattattcattggtttaacattaagtttaatgatttcgacaactgtcccagataccggatggactgtggtgttaagcagcaactgcgaaaactgtcggttgtttgcaacatattacatttcttggttggaatgcgaggatgcgagagttgtttttgtcgatgacctatcacatttcgaggtcgacctgctggagttgatcacgaggtttccagcaatcgtttacaaaaaggagatcttcgaaggagccgatgcatacgataagatgcaagaaattacaggtgtcgcgtgggaaggaacaaaagaaagcacaaccacagaggaattgagtatcatacagggcatgaaaaatgcctaaacgacagcgactgcgtcgatgacatcccaactctgcaagtggggttatcatccccagcggagcgaccgggggcgaccagaggggagcccccacaaaggagtccgcgatgaaccgagcgggtgggcggccggaggggagcccacagttcacatgcatgcatcttaccaggcggcacctgtgtcgagtcccactgcgaccactacagtcggcagaacctttgtcgacttaaggaggacgatcgctcgcatcgcaaagaagtcgatactctctaagacaacctgtgatcacatgtcaagcatgggtctgctagacaagcgctctcgtatatcgataggggaatcgcgggccccacggagtggggcaggggaatttagttgcagaaacctgtcgcatccacacgcaaacgtacattcatgacacacggatgcggtggcggattctcgtcctcgaatgaagtgtaaacaaccattcttcagtataaacaaccatcagcacagcacagcacacttcacaaacgaatgagttcctttgacgaaatcaatgaagatgtattggagatcattctagccaatgcgatttcgaacgaatcccacctcaaacaagtgcctctcgtttgcgaaaagtggagatgcgtcacacccctgtgtgtcacaaggatccacctaagacattataacagtttggaatacgcattatcacgcatttgcaggctcaaagagttgaaaataggtgtcaatcgtggggaatacgtaccctaccaatcaatgtcggctatcaaagacaagatccaagacatatcgccgctgtccggcctcgctgcgttggttcacctggacatatcgaacacctacgtgaccgacatatcgccactgtacggactcacttcgttgacgcacctgaacatgtcgcacacctacgtggacgaacacatattatcacctctgtccggactcacttcgttgacgcacctgaacatgtcgcactcacctctgtacaacatacaagctctgtacggactcacttcgttgattcacctggacatggcgcacacacttgtgaccgacatatcaccactggccgccctcacttctttgattcacctagacatttcgctatcacagctttccggactcaccgcgttggttcatctgaacatggcgtacacacgggtgggcgaacacctattatcaccgctggcaggactcacttcgttgattcacctcaacatggagggcacacgtgtggacgacatatcaccactggcaggactcacttcattggtgcacctcgacatttcgaacaccgacgtggacgacatatcactgctttccggcctcacttcgttgattcacctgaacatggcgtccacacgtgtgcacgacagatcaccgctgccaggactcacttcgttggttcacctagacagttcgaacaccgacgtggacgacatatcaccgctggcaggactcacttcgttgacgtacttgaaaaatggatggaatgatgtgtaaaattgttcaacgggtcatccttagtaatattattgttcattttccgtttaaaatagggattgatttgagcctctggcattcaatgggcgttcctgcctcccggccgattttgactggttgctaaacattgtatggagcggaattgtgattccttggtgcttatgtctcaaataattgttgttccagagatggagagtcttttcagaggtgttcatgtggtaagggccataaactgagccgtctactgcgattattaggccaaacggttatgggcttgtgaatataatccggtagtatccatgtcagttgtgttgatgattcattcagatacctacaaaaccgcggggaggcagatgtgatgcagggaatgtattcagttcagcaaactgtgcgtcaatgatgagatggcatgccttccatgcacacctgaggcagcgacacatcgttgcaaagtgctcgcagttgttaaatgcggcgttgtagacaaatggggtttgctcagcatctttgaccagagcgagggcaaggcttgccgagagggtctgatccagagcagccccttcggggtacaaagcctccgcaaagatagagccgttggcaatgaagtcttcgtaggatcgcaaggagacgttggcctgctccttagaaattccccacacatcaacgactgtcgggacttcgatatcccctggtgccaccacttgctgcctgacaaagatgccatggtgcctgtaaccggatgcgtcttttaccatgatctgggcgccaggcttaagcttgccgagcatagcatagccgctcttgtaccgcgtcagggtagcatgtgggtgccagaggtctggtggtgaccaatctggaagcattcgcttgatgtgggcgattgccgatgtgaggatgtcggtaaggggattttcccgagatgccatgtttgtctgaaattgagctgctgactcgtgtgaagcttcgaggatttatgatagagaattatatagggatcttttttatgcgaccgtcattttctcattgcaacaccgggggaggacatgggttttaattcaggacttttattgattgggtataaggatacctggtacagatgggattttaaaatgaggaatccgtattgtcgaagccgacagtgtgtgtgcttacagggttcaatactgtccaagacgcatttaaggttgttcctcacaaacacattccatttgtcatactttgtgtgcataatgggcatttagcatatgcatttgatgacattgaggaggtgcgcattgagccagattttgtgttattgaatgcccttggtctaaaacatcgtgtgtttgtgttgtgtgacaggtttacagatcttactcccaattataggtcgtgcgtgagccacgtcatctgcgcatcaacaagttgcgatgttgttgtaccccattgcaatgatttgctatggctggatttggagagaatgcaatttgcgtttttgttctagattgtgacaaattttccaggaagatcgtcttatctgatacagtattgtgaagacagccaaacactacatcacagtcgacgacaacttaaacttgacaacttaaactcacacacgcgtagcggcggctgctgtcgaatggcacacacaggacactcattgacacacgcaaacatgtagacgaatcctcttcatacagtcgacggaatactaaaatgaaaccgcctcgtgtacggcacaccttacggtgtaaccaaatggtgtagcaacccacggggcagtggaacaccaatacgattttgaatcaacaaattgcattaaaaggaggggcaatccagccagctccaattcaatccgcagtgcggtgcaatccactcatacaatatatgattgtcaccgcactataccggtttttttatgtttcattttactgttctgccgactgtagaatagtatagagacccagccccagacaaggcaatgcatgtgcagtgactgatcatggccgaaatgtacacgaaagcccaactcgatgatgccgtggctgttgccgtggctgatgccgtggctgcagagcgcgtgcgtactgacgctgttcagcgagcttacaaaacgctactggctcagacggaggagcaacatcgtctactgaaccaggcgctgagcttggtttccaagcaggacgaagagatcgagaacctcaagtgcgtgattcttgctcgtgcactcatgaatagacgcggtgcgcgttgtgccccacaatgcatgcaatacaataacatctctctgtgctgacccacacatggtgtcaaagggttgcaacaattgactcgtttgctttccgaaaatatgtaaacctaacagtgtataatgaatttgcagaatgcaaccaacgcttctgtaaatgaggcatccgtattgtcgcagcagacagtgtgtgtgcttactcatgtgatgtatattgttgggcataggcaggctggaaagagcttcatgatcacaaacgaaataggggatggtgaatccactttggtggtttgtgagacagaccatgacgtaaatcatcataaactgcattccctaattgcaatggtaagcgtgcgagacaccctggatagcctaatcgggtttacgattatagttttggacaacgtcattttcgattcgacagacagtctaatacaatatgcgatatcactgcatgtcaaaactggaacacggttaattgtagcagtttcacatccattcagtatcccatctgatggcgatgggataattatacaacttagtgaatacaaagactcatgtggcttgcaatgcctaaacaatttaaaagccaagtatgaattccagctggccgcaaatgtgctgaataggaataagatgcacaccaaagatcagctaagtaatattgtaccgtgtcttagataatacatagactttttatctgatcttgtattttggtactagaaattaaggaaaacgcaaaattcgggtctaagtacaggatattttactgttccgccgactgtagaacccgaaaactttatacacacacgtgactaattgaaccccgcaaccaacaagtcttacaaattttttttatttaaaatatatacactttcattcattcattgaatgccaaaactacctcatgcgaaaaaagaaacgaagagtcgatctgatgtcgtgtgctacacaggtccccgtccacggggaaagaaggacgactcgtacacgtccgaagagttcgtcgcgtttatgaagcatgaggcctctgacaaaaaagaacgaacgcttgatgaatggatagagtgggcaggcgcgctccgcatgaaagcatcgaagtgcagaaaattaacaaaattcaacgaaaaactctcggctgcaagtgaagtcgttgagaaaactgaaaagcccctcaaatcttgtatcgagagcaaatgtcgtagtagttatgaactcatggcgaggctgaccaataattccaaaaccgccatgagctcgttcgataaacacgcaagcaccgcgcgatgcggtgccgtccattgctcgaatgaaggcgtgaaatatggcaaggcgaacaaaaaatgggacgcaatatcgaagagatgcgatattccccgaaagggatgtgccggtgattgttgatgcaggggctgcatttagctgaatccgctaagagacggcgaggtcgtcttgtccacatacagctaccaaggttggcggatcctcacacaaaaggggacgccgtgttcatgggaatttggcctgaattcgggttttctcatctcaccgcatcgggtgtcgcgcacggtgtgataccgacgcacacgtatctaacacaattccgatgtacatctaacacaaatataattcggatctatactaaaactgtctgtacgggggcgaattctggtttgttagctgcttgacaaccctagtggatgtagagatcgcggtattacttaaagcctataattgtgtacacagtatcttgtttgtcactgctttcattttttcatgcacacagataataagcatggacttcactaatacatcaccagctcagctaggcatcatcatcgctgacggagggccacacaagaatgctgcattggctgcacttgtccaaactgctgagcgagctgatgaggcagtgcgggtggcgcatgcggctgttgaagctgccgtagccctgctgcgaaacaacaacaggtatgatttgatttgcgcttgtgattgcacacaggcgggtcatcaactcaacggagaaatcggtgcttcagactgccctgcaagtccttcacatgcattgcatgacagacttcaacagagaggagagcaatgctgtgatcacgatatcgacttggtgcaatatcgtcattcaaccaagtggccatgtcgctctggtgcagggagggattggaaggcgggcatggggttgatccattgcgtcatggagttgtacatgataattggattaatagggaatggtactactttgcctcatggtatcaccggatgaggaagatgctcagaccccctcttttgaaaacaggttagtttgcttagcctaaaaagtctataaaaaatcgcagaattaaattatcactactcaagagaaagtcgtgtgtatcaagccggataggatcaacctgtcaacgaccatatcaaactgtatatcacagtttagtgaacgtgttagccaattcagtccatgacttgcaatcggcagggtgtcgcatgtctcgtccaatgaaattaattgtgagttggttagctgcgttctggtcacaccacttccagaattgttccgccgcagtgagacatgcagaggatccatgtttggcacaatacaactcaccgaacttcagcccaccattgatgtaaattacaaacactttgtttggggaggtttgctccttcgtccaatgctccagcgctacgtacgagtcaacgacttttgtctcgacatggtgcacttgagacagcctaagccactcgtccaccgaatggggttcgatatggctatccatgaaaatcgctgtattgatgttataaccggtttgaatgagggctattaaaacattccactcatgatatccgctgccacactctggaaata

SEQ ID NO: 305 - DNA, 21086 bp, Chlamydomonas sp.
  source 1..21086: mol_type = other DNA
ccggaccaggagaggtagctgtgcctacgggatctatgttcgcttcctgcaagcgcctcttcaaagaggaggttcatgtgacagatgagttcaagacgactctcatgtcttgggaaaccggtgccaagaaggaatgtgtttacaagattccaagtgtccaaataaccacggaaggtcagattcgtctaggttacgagttgttgggtcacaccccattgaaggagactccaaaggtctcttatcgcgaccagttggcggtgagggtgtactgcacacgtaaacaaatccaagaaaaacacaggaggggtggcttagccccctctcttgtcgacaacaactcgatcaagcggtaccctgaggtacgaggactgcgattctctccagaaaccagcaccgggactcggaccgggaccgctcctctgctctcacaatagcaaggctgcactgcagggaactgttgggtcaagggagaccgcttccattttgcagggatgcgtgttgttgatgggctacaaaaaaacatgatggtgttccactgccccgtgggttgctacaccataaggttacaccataaggtgtaccgtacactccagaaagcggtttcattttagtattccgtcgagtgtagattgcgtctccaacaccgagtacagactcggtttagccattctgaggagttcggctgtgctggtgctcaggagaatcgtgcagagaataaaaaaataaaaaaataaaccaccagtttcatttgcgttagctaatgcatcatcttttgtttatgttgcagtttgatttgccttactttgttctcatcatcaagcaaccaacctcaaaactgcttgtcaagtgatatatgtcgccaacgtaccacatttaacaagtggcggagcccctttcacctattccccacagcggagcgaccgggggtgaccggaggggagcccccacaaaggagtccgcgaggaaccgagcgggtgggcgaccggaggggagcccccacaaaggagtccgcgaggaaccgagcgggtgggcgaccggaggggagcccacagttcgcagttcacatcaaccagcagacacactactgatttacacacacacacacacacacgcgacgcatggaacacgcggatgatgtatgggggggagggagcaagacgccgacgacgtcaggagaacaagagacacgcacgcacgcatggaacacgcacacacgcaaacggaggggggaattcacaggggtacggtacagtacagtacactacactcgatcgatgtacgcatacagctagggacatttgatattgggacaccttatattttggggattctgaaaagttgaccaattcaagatttgtaaccgcatctaaagacactattggtaaggtgtgccgtacacgaagcggtttcattttagtattccgttgactgtacgcccccatgctgcccggctggcattcgatgtggggcaactggcgagacggtacccacaaatcgaagtgccgcttgtcctgagagaggtgagcgaactgcattcatccagcatccacgagaaatacatttccatcccgacacaaaactccagcaacagtttgcatgggaccttgcattctgggggcaaaagttcctgcacagggctcccagatcccgtgtagttcctgaagctttgtagcacacggaatcatcaggaacaagaccaatacacaatttttaaggatttagaatagtaatataggcacccagccccagacaaggcaatgcatgtgcagtgactgagcatggccgaaatgtacacgaaagcccaactcgatgatgccgtggctgttgccgtggctgatgccgtggctgcagagcgcgtgcgtactgacgctgttcagcgagcttacaaaacgctactggctcagacggaggagtctgcgcatgagcaacatcgtctactgaaccaggcgctgagcttggtttccaagcaggacgaagagatcgagaacctcaagtgcgtgattcttgctcgtgcactcatgaatagacgcggtgcgcgttgtgccccacaatgcatgcaatacaataacatctctctgtgctgacccacacatggtgtcaaagggttgcaacaattgactcgtttgctttccgaaaatatgtaaacctaacagtgtataatgaatttgcagaatgcaaccaacgcttctgtaaatgaggcatccgtattgtcgcagcagacagtgtgtgtacttactcatgtgatgtatattgttgggcataggcaggctggaaagagcttcatgatcacaaacgaaataggggatggtgaatccactttggtggtttgtgagacagaccatgacgtaaatcatcataaactgcattccccaattgcaattgtaagcatgcgagacaccctggatagcctaatcgggtttaatattatagttttggacaacgtcattttcgattcgacagacagtctaatacaatatgctatatcactgcatgtcaaaactggaacacggttaattgtagcagtttcacatccattcagtatcccatctgatggcgatgggataattatacaacttagtgaatacaaagactcatgtggcttgcaatgcctaaacaatttaaaagccaagtatgaattccagctggccgcaaatgtgctgaataggaataagatgcacaccacagatcagacacggtaaagtagtcgcaatggtgatcgcatatcctaaacttggttggtcagaatcgtacggcagatatcgtcaccgtcgtagcaggttgtgtcgatacgattatcgcaatgattcaagttgggctggctgctgcttcgaatgcacatggcgtctaatgagatgaaaaggtgttgtttcccagtaagggtgttgttgcttatatctaattatttctgggagttcttcaatacgatccaggaagttgtacatgattgctttatcccacagggtcggtgtttttatttgttgaaacagctggaatacgtcttctgcatcttgtaatgtaaagttgttacgaacctgctgaactcggttcttgaaggctctctgattctgatctttgtgaaaaaaaaacattttttacaggatatgcgtaattgatatagaacccgaaaactttatacacacacgtgactaattccctcagaatcgccctctggaagcttctagggaaacagaaaaaaaaaaaaaaaaaaaaaatcggtagtcatggtgtcgattgtttgcttttcgaacctgttgctactacagtcggcggaacagtaataaggtgtaccgtacactccagaaagcggtttcattttagtattccgtcgagtgtagagtaattgggtcatttatagtgtgcaagtaatttgtctcaaaccattttgtgacacctggcacatttgataatgggaaatatgtacttgatgcacaagaatggctcatgatgatatgggatgttgatataaaccttatgtaacagccttatacgtatcgccattcgatgacaaggaggatgctgactgtgtaagaatgttttgtttttgacaaaactcttgaaaaatcacatgcaagggtggacatgctgcatgctcgcggtgtgcatccacatgagaatgaatgaatgtacgtgcaggggggggatgcgcaagccgcctccttggcatgtgtgaggatgaatggatgactcaacatgataaggaactctgaagaaaaacgttacaccgcaaccaacaagtcttagataattttatttttttatttaaaatatatacactttcattcattcattgaatgccacgagtggcaaaactacctcaagaaaaaagaaacgaagagtcgatcagatgtcgtgtgctacacaggtccccgtccacgcggaaagaaggacgactcgtacacgtccgaagagttcgtcgcttttatgaagcatgaggcctctgacaaaaaagaacggacgcttgatgaatggatagagtgggcaggcgcgctccgcatgaaagcatcgaagtgcagaaaagtaacaaaatgcaacgataaactatcggctgcaggtgaagtcattgataaaactttaaagcccctcacatcttgtatcgagagcaaatgtcatagtcgttatgaactcatggcgaggctgaccaataattccaaaccgccatgagctcattcgataaacacgcaagcaccgcgcgatgcggtgccgtccattgctcgaatgaaggcgtgaaatatggcaaggcgaccaaatcatgggacgcaatatcgaagagatgcgatattccccgaaagggatgtgccggtgattgttgatgcaggggctgcatttagctgaatccgctaagagacggcgaggtcgtcttgtccacatacagctaccaaggttggcggatcctcacacaaaagggaacgtcgttcgtgttcatgggaatttggcctgaattcgggttttctcatctcaccgcatcgggtgtcgcgcacggtgtgataccgacgcacacgtatctaacacaattccgatgtacatctaacacaaatctaattcggatctatactaaaactgtctgtacgggggcaaattctggtttgttagctgcttgacaaccctatttgatcgcggtattacttaaagcctataattgtgtacacagtatcttgtttgtcactgctttcattttttcatgcacacagataataagcatggacttcactaatacatcaccagatcagctaggcatcatcatcgcttacggagggccccacaagaatgctgcattggctgcacttgtccaaactgctgagcgagctgatgaggcagtgcgggtggcgcatgcggctgttgaagctgccgtagccctgctgcgaaacaacaacaggtatgatttgatttgcgcttgtgattgcacacaggcgggtcatcaactcaacggagaaatcgatgcttcagactgccctgcaagtccttcaaacgcattgcatgacagacttcaacagagaggagagcaatgctgtgatcacgatatcgacttggtgcaatatcgtcattcaaccaagtggccatgtcgctctggtgcagggagggattggaaggcgggcatggggttgatccattgcgtcatggagttgtacatgataattggattaatagggaatggtactatttaacctcatggtatcaccggatgaggaagatgctcagaccccctcttttgaaaacaggttagtttgcttagcctaaaaagtcgataaaaaatcgcagaattaaattatcactactcaagagaaagtcgtgtgtatcaagccggataggatcaacctgtcaacgaccagatcaaactgtatatcacagtttagtgaacgtgttagccaattcagtccatgacttgcaatcggcagggtgtcgcatgtctcgtccaatgaaattaattgcgagttggttagctgcgttctggtcacaccacttccagaattgtgccgccgcagggagacatgcagaggatccatgtttggcacaatacgactcaccgaacttcagcccaccgttgatgtaaattacaaacactttgtttggggaggtttgctccttcgtccaatgctccagcgctacgtacgagtcaacgacttttgtcgcgacatggtgcacttgagacagcctaagccactcgtcaaccgaatggggctcgatatggctatccatgaaaatcgctgtattgatgttataaccggtttgaatgagggctattaaaacattccactcatgatatccgctgccacactctggaaatacaatgattgataccttacttgtgcatttgtttacataattgagcacattattgacgatgtggttactgtcattgggggtacatgcactattttgtagaacaggtaaaggatgatttgcatcaccctggatttgcattattattatgatttcttattcttttggtgataaaatcatgcaccacatttccttaagcacactttatcatgaaatacaaggtgtcccactactccatgctcgcacacgactggatgattataaggtgtgtcccactttatttttattagagcgcacctaattctcacaaagggttggtcattcgtgttctacgccatgaccgggagcaggttagggtgcaaggtcttactggccgtagcaaggccaaagtaagtagttacaaggtttatattgtacctccgctccggcaatcaatgtaatgtaattggaagttgaaacgctatctttcgcttattctggacaacaagtggaaatctatactttataaacaatcaataaatatgattgacaagtgtttttctctactaatacctgtctgcaccttcgcttttatttacatagctcgactgaagattgagcttgagactgatcgcactcgaaataagtcagatgctgctcgactgaagcttgagactgagcgcgcagaagcacttgagaagcaactgaggtacgaactgtcaagcatgactgccgagcaatggaattccctgaacgatcatgacaggcgtctcattgaggatctttgcaaacaatacggaatctcatttcccaacattcaggagtcattcctcgattcctcgattcatctttcatgagcgcatgaggacacgtgtcgtatcaagcagacttctgcttaacaaactatttagagatcatgaaagaggaatcgcgggacccacggagtggggcaggggaattcagctgcggactcgcggaaacacgtgtcggatccttccattcacgagcgcccccatgtcatccaaatatttgcttgctggtggccatgttcagatggatatcaagaaagtcaagattggagggtcctccatgatggggatatcgccatctgtcgatggtgcatgggaattcttgagtattgtgacatggaaactacccacttggcagtgcagcacaacggtggggctgtgtctgtggatgtatttccagaaccaggcacatttgcatctacatgtgccgtacactccagaaagcggttttattttagtattccgtcaagtgtagaatttgaatgcatacgtggccttcaacatattcacccagtcagatccgtgatggtcatgatactgactgagttgtaagatggtgtctcgaccggctaggggaatgctgcacgggtgagagacagacacgatgacggcacgagctttcgactgcatggcattgtgtaacaattggcggccttgtacattaaaaatatggatgtcatcaaatgctagcacattgaaaccgtcaagtgaaggtgattctgattcagattcagacagtttacacaacgttgcctctggtgtatgtaaagcatggtactccttgttatgttctgtcatgaccaatattagagtgggtggtgaatgttgagaaataagttgagtgatagcgtgactcttcccactttccctgcgccctaaaatgtacattacttgtggcttacaagttgtctgtgggatgctcatttactcacatgactagggaatttgatgcatataataaacgcaaccaaacaagctacagtcggcgtgtccaggaagagaggcgatcgcttcagtgcggctggtacttcaatgggcactctcgaaggtcgaagaccgattaccgctgtccggcttcatttcgttttgtcgccggagcaaacggaacggaggaaacatgtcgggaatagcggatgctggagctcgtgaagcttcgtattcagcgcacggaccaaccattattcatatcccttcattccgtatttcagcatttaagctgatgaaccctatgcagttggatgggtaggcgaagtgtcatgcgacaatacaagaacttgaatcaactgctcccgttcgcagaagaatggacttctcccccttccgcagatcatcgctgatggcttttaggacacgctcaacttggtgggaatgcgcattgatgtcaccagttttgcagacccaagcaaagcactcgcaattccatgcaatcagattgtacttcttccgagcaaactcaggtgattccaccatccacttggcaaggtcaacggcgcgttggcgttcgaatttatcggcctcggagttggcagaggcatacggcacgataccaaaagtcgctcttgctccaatgaactcggtgtgcgagccgatctgtaatcgagcatctcgcatcaacatgtcaccagtcggagacacgaagtgcgcaacctgaggatcttgaccagggccataagggcttatcacaatgccatggtgtgcataaccaaggcgccaccttccgatcatcacgaccacatgatcaccaggcttcaagagcttccaagcatctgtgctaaattgctgcacagttccctcctgggctagagtccagtgtccctgtgactgcccctcaagaagttcaatgaacttagccattcgcctgcgagcacgatgcaacaaatagcgttggtatgtagcaactgcaaaccgaaaactatccggaaacaggcaattttgtgtgtgcacatccaatcccgcccaaactgtagatggtatattgcgcagtgccaacacgtcaagccttggtacaatgtgcatctaaaggtgctacgtctggtggaacgtattgtcacatcaaccagcagacacactactacacactactgtgtaactaactgtcaagtcttacacaatgtgtatgttgtttgtaaaagattcacatgtttgtacactcggacaaactgtgcactgcaacgcttgagcttatcactggaacactttgtctgcaacgcttgagcttatcactggggattgtgaaggggaaaccgcggacaatccctagctagggacatttgatattgggacaccttatattttggggattctgaaaagttgaccaataatgggcgttcctgcctcccggccgattttgactggttgcgaaacatggtatggagcggatttttgattccttggtgctcatgtctcaagctagcgagtcgttcaagaggctctaaatcctgattagaaatttaaaaaaatcggccgggaggcaggaacgcccattcaattcaagatttgtaaccgatcttgtcaatacagatactgtcttcaggtgattgacacaaaaaattcaaggcatctaaagacactgaatttacatgttcaaagtaccctgaaaagtcaaactgatggctaacatcgtgcgcatcaataatcaatatgactgtaatcaaatatatctgctacatctggaattattgggaacatgcagcgatattttcgcttgagcaaactaaagacattctcaatagcgttaaattctggactgtaaggaggtacaaagagtggtcgtattcctatagaatcgaacatagaaatcgtctcctttgaatgattgaactggatattgtcaaggacagcgactgtaccccgatgtacatgtaactcagatacaaactgtacaaagtcgactttcttgcaattgtgatcaaggatcttgtaatgaacgatacctttagcagaaacgacagcaattagtgtcaatttggacattcgcaatgtcttagaaatttggatatttaaacgtttgccgcgttgacagtaccctctgcgacgagtgtcaccaatgtgaaaacccgcctcatcgatgcttaacaaatccgatgtcggaacggctaaatactccttacaaaaacggtcgacagaagatttgtggtcagtcttgtgccgaactgttttgtatgcgcgcttgcgggtgtaaccaagtttgcttgtgtagcgtccacaagtttttggcatcttgacagaggacagagaagtcacacactctgcaagctgagacattgtcaagaagggattggagtcaatcagttgttttatagcagccttgatatcttcttgttggggctagctgttgttagggccagctgggggcaaccgcgcggtgtcttatctctgcatcaatcatgataacgtatggaatggtataaggaaatgtgggtgcaatattataacaccaaaagaaaaagaatactcaccccctcttaatgggggtagtgcaagacaaaggagatgacgatattaacatcagcgtcgtcaagaagacgcttaattctctgtgcatggatgtatcgaggcatcagatctcctcaaggatacaaagcatggtactcttaatcaaccacgcagttgcagaggcatacttattcgcaaactttcatatcacaagatgcctcgatgatggagactttgacgtcaagcagttgccacacctggatcggaacttttattacaggtgcctccttgcggtatcgacctccaatgttcgaaaggatactctgggccagagcttcaatgataccatggttgctttcgacgccctaagacctgcaggatacgtgaaggtggacgttcgtccttggggacaagtaatcacagacgtctcaatacaaatggcgacgatggcgtgcaacagcgtctgggcaaacgtggacagggtcgttatcaagtacctgcgcttgaaacatccctctctgaagaaacatttcaagaagattgtcaaagcggtggtccagtacccagaatcgaaaatcgacacaatcatcccagagggcctcgtgcatgcgatccacatcaaagaggttgtcagtcacttgagggctctctttccgctgccaagagggaagcagttcaacactagatcgcacctgacaatgcgattgttccatcacgtgcttacagagttgggagaggtcggacgagtggatccgaaagataaaaaaacaagaaaaagtcacccccgtctgttcagtatccttcctcgcaagaacggcttcacaatttcgtacgtcccgatatcttccatgactttcatgaagcttctcagcatgggtgattcgccactcgagagcgtctctggcgatggacgttacgagaaccatacaatgctgtggcgaaagtactttaatgtccaaggtcttgagacgaaaaggtctcgctttgacaaccgaatcctcagcgacggtaaaggtgtatccgtccaaatgaagcagaagggtaaagaagaggtcgttgaagaaggagaaaacgcaggctatccctaggacgcaaatatcgtagagtgcaaggacgcagtgggtgcgctgcgtgtcggagtagaccctggaatgacagatatcgtcacggtagcatcttctgcaggtcgcatcgagtctttcagctcggctcgttttagcgaagttgctgggtacaatacaagcaagcgtcgcacctacaaatggaatgacgagactcaagacctcgtgaagtccattccatcgcctaatacgagcaacatggtcgacctgcaggaccatgtcagagcttatctcaaagcgctcccgatcctcctacaacacagagccaacaaaggctaccgatctatgcgattctttcgatacgttggtaaacagaagacgattgaaaaggtatgcgatgtgattgcaccaagggcacagacgaccgttgttggctttggcaactggtccaaccaagggtatggtatcagtcgttcatgttctgggcccatcaaagagatcaggaggtgcctttcacgtcgtaagaatgttttgttcaaaaacgtcgacgaacgcaacacttcttgtaaatgtcacggctgcttccagaggcttgtcaacatgaaggcagacagcgtagtctggcgcggagtttgcaaagagtccccaatcgacgggtctatatctgttgagaagcagaagatggtggtgaagaacgtcaaggtccacaaagtactgcactgtagagacagtgtcaaaagcgcatcatccaatgtgcgctgtggtgcaacctggaaccgagacgtgaacgctgccaagaaccttcttctgcttctgacaacgtggatggacgggagagagcgacctgaggcattctgtgttccctcgcctccccccaaaaccacagtttccatcgaggcgagtgtgagcgctaaaccgaccgacccacctgggtttgtcagcagcttgccttgttatcctttgggccagcttaaatgctgaaatacagagatgaagggcaaaaatatgtactcgcctttagctgatctacccattgggttaaagggtcaccggtagggcgtcccacaaattgcgtctccgactgtagcaaagctcatcgtggaaactccaagtatggctctgcgcaagtatgacttgattcactggaattatgagtgtttcgcatggatttgcaagacaggtggcttgaagcacaactcagaccaggtgtaccgagtgttgcgagttgttctcaaataattttgggacactctttataatttgaatgatatcccatgaaaccagatacaggaggaaagtttgtaaggtgtgtcccactttatttgaaacgcggatgaggcaacgcggaccccgcgcgccaaatatactacgtttcgaaaaaaattgaaacgttttctccagcacaacaaccaacaacaactacaacacacgtaatcgccaaattcactcactgaaatacccgaaatgtctggatccacaacaaccacctctaacgcccgctgcacttgcgctgggaccaaggatgacggtttcccatgttcccggatcgtaactaacggccgtaaatactgccacaatcacgtcaagcaggacgactccttcaaggaggagtccaatgcgtctgaagagccgatgactactacagtcgaagcctacgatgcgctcctgcgcaagctcgagaactgtcggatcaagaatcagacacttatcaagcataacgatgagctgaagctcatctccaagactaccatgcatgagaatatcctgctgaagagtcagctagttccagagttgtccctgtaccactttggacacgacctgctcaccagcctcaatctgccattctgcaatacgaagtgctgcatcgtcctgctcgattcgtccggagctagacagtgcaaaaaaattcgccaggccactggcctgctgtgcaccacgcacgcgtcatcaccaaagcatgtagcagaaaaggtcaacaaggcctacgctacaagctgtttcgagagacacgcgaaggtcatcagcgcatctcagacacagtctgattgcgtagccaagtacaactctgcgtgcgatgacaacaagtacaactactctgcggctgctgctccggcgccgtcgtcgttctcatcatagttcgttcgttcgttcgtgcatacatacatacatacatgcatgcacaagcgaaccaatactttttttctgcttaacaaacctgtgtttttttgggatggtggagcgcgcctcttaaaaatcacgctgctttggagtctcgcatcattatttctttattggacatgcatgatacatagagaaatatgtgtgattcaatacaggtataaataagtgtaacccccacagatgcagagacaaaagcgtgccttgctggtcagccccagttacgccacgactgggttggatatcaggactcgatacgtgatggagaaaacaggagtgctccccagtgacctgggcaagtacagcactgagggttttgcgcgcgacgcagcagtgctacgccgccagttagggccgggtttcagttttgaaacactggagggcgaggtgttgtccagcgctgtattggaccacctgaagtggttgttgtcccacgaaacagaggtggctgtgttgttgttctgcggccatggcatgtgtcaggggtcgccacagcacggtagtctcgtgtgttcattcaagcagctggttacagctgaggcaattgagtgcgtggcggagaagttcaaaggcacatttgtgaggttgctgaacatgtgcgatgccgaagggttgcaacagttgactcgtttgctttccgaaaataagtaaacctaacagtgtataaggaatttgcatgtaatgggcgttcctgcctcccggccgatttttttaaatttctaatcaggatttagagcctcctgaacgactcgctagcttgagacatcagcaccaaggaatcacaaatccgctccataccatgtttcgcaaccagtcaaaatcggccgggaggcaggaacgcccattatgtactaaatatcagaatgccatgtatggcaaccaaagcttctgtaaaattggcaaggcctccgatgcccttggtgtctccaggaccgtcctccgtcgatgggcggataatggcacgatcagaacgatccggactccaggcaaccaacgtctctttgacccaagcagcatccaaggctacctcatcgagcaggaaaaaaaacccagcagtcgtcaagtcattctctacgcacgtgtgtctgtcctcacacaaacaacaacccgacctgctcagacagcaattgttcttgcaaacccatatttctgacaaacattccggatgcgagcaagtcattgaagtcaaggacgtcggatcagggctcaacttcaagcgcccaggacttttacgagtattgggactcgtcacggcaggacttgtatcgtcaattgttgtggcttccaaagacaggttcgcaaggtttggtttcgagctcattgaatggatttgctcgcagcactcctgttcgatcatcgttctcgatcaccaagacggagcccctgaatacgagcttggaaaagacctcatgtccatcgttcaagtatattgttgccgatggaacggtcgaagacgctacaaagtcaaatgccaaacccaagttgaggaccttaaagctgaagctgaacccaacaaaggctcagaaatcgatgctggcagagtttgcagggtgcagccggttcatgtacaacaaggtggcagcacggttgggcgtcggaagcactcacaagtctgtcttccgaattcgagacaggtatgtgacgaacaaggtgaggggggaggggaagatgccaaacccgtacttcaagaatcgccaatggttgcttcagtgccccaaaagcgtacgccaaagtgcaatcaaggctgccttggcaaacatcaaggcttgcttttcgaatctgaaagcaggtaacatcaagcagttttcagctccgttcagacggaagaagacagagcttgagaggggttgggccattgagatggatcagaagaacgtttccaaggatggcgacaaactcttcatcttcaaagacatattgggcaacatgcgctacttcggtagcaaacaactccataagttgatgcctgaggaaaacccgacccacgatccaaaggtccacaaatcccgcttcggcgaatatttcctcgtcttgtctgtagccgccagggacaggagggcagagcggaagcctgtccatccagacaaggttgcaactgcatccatcgacccaggcgtccgcaaaacaatggtcacgtactcaccagagaatgaggaatccttcatgcttggtcagggacaggcatccgaccttgtcaaactcctgctggttcatgacaagctgcagtcaaggttggatactgagaaaaccttacgatcaaaagagaggatgaagataaaaatgcagatgattcgcattcggaagagaattttttacctcaagaaagagtttagggaccagacaacaaatttcttggccgctcgctacgatgtgttgttggtacctcaattggagacggcgaagatgaccatcagtgctgaacgggagctgacaatcaaggttgcccgtcagatgctgactttgagccactctgtgctgtttaattggctgaaggagaagtgtgaagagtacgggacagtgttcttgcatgtgcttgagcattacacaagtcagacatgccctatgtgcggtttcttaaacaagtgtggagagacatacacctgcaagaactgtcaattcacctgcgacagagacattgtgggggcagctggcatcttccttaaggcagttcgaacagaaaaatccccgggggagttgacccctatgatacccatatggagaattcattgtctttcttactacatgtcccccggacccccggatgtgtaataagaaattcataggttcgaggatatacgggtagcttaaattcaacgggagtctacgttgaaggatgggcaaggtaccagggacgcagtaaggctgcgaggtgctcagatgcaagggggggcaggcgcgccaagcacctactacggcatgacagtggcagccacgcagcagtttggcaagaccactggtaacagccggggcagcaagttcggtgtcgcactggggcgcatgtttgatcaggaggtggttgtgacgtacgatgggttcgagacggcattggacaagtattggagtgggtcgcaagtacggatgacgcacgctttccggggtgtgttcgggacgcccgctctcccggtgggttcttgttgcatcactaatgatgatgcgggttctgagtctgagtctgagatggagttctgagtctgaggtggagattgtgtggggaacgtttaaacaaaattcagggaaacctatcattatacatcacggttgttctcatcatcaagcaaccaacctcaaaactgcttttcaatggatgaaccaccgtaccacattaaacaagtggcggagcccctttcacctattccccacagcggagcgaccgggggcgaccggaggggagcccccacaaaggagtccgcgaggaaccgagcgggtgggcgaccggaggggagcccacagtttaacatcaaccagcagacacactactgatttacggaacggaaatcacacacacacacgcgacgccgccgcctccatctcggacatggacagcatcagcaaacttggtctcttcgcctcatcatcatcgtgaccatcagcaacgtctcttccccccagcggagcgactgggggcaaccggaggggagcccacagtgtaacatcaaccagcagacacactactgggttcacaagcaaacacacgcacgtgaagaagagtgataggcgaacggaggaaacatgtcggatagatcggataacgcacgcacgcactttatcacgacacataccgcatcctcacacacgcgtcgcggcggatgctgtcgagatgatgcccaccaaccactctcactcattctcacgcacgcactctatcacgacacaaacggtggctttcgcatcatcctcggtgtccatcctgagtagaacgcctgatgttcgtaaacacagaagtttttaacacattttactgttccgcagactgtaggcaccgcgtgtcagcttccatgtattgtttttctgattacagattcctttgtattcgagtaaaaaatatgtgcattgaaagtacaaacccctatatataaaatgatccgattgtctgaagtctatgcgaaatcacagtcgacatcaaacatcttatatagcgataatgtacccattaaaggagtgcgatcgcgaccaggtgtaaaagaagcaccatcgatgtcatttgaacaagatacagacacaggaatgttcaatgcaacaagtaatgtcttaggatttgctgcaggagcatatactacgctcattgcatcatcttccaatttacaagccaatacgcaaatcacaacatcttcaaatatagtgcctctcaacgacaatgtctcagaattaggaacagtaacaaagaagttcgcaaaactgtatgcaacagatatctatggaacatctgctacatttaacacactcggaggaacggccatctcaagtatcgtcacttccacaagtagcaatgtcgcagccagttctgcagcggtcaaatcagcatacgatagtgccgtatcagcttccaatcagacgtacggcatcggagcgctcgatagtaatggtgatatccttctcaggggcaacttgcgcatctccgaaactgacaatatatacaaaggtacagaggtattcagtagcggtggcggtggtggcggtggtggtatcatcacttccgactctaatattgtccctagtgtgaatgggacacaggatctgggtgcacctgataaacgatggcgtaatctttatttgtctggtaacctcatttctttcggtaacggaatgaacatcgacggatactcttggaattatttggccaattacgtcgttccccagcgtgtcctggaaaatactgtttccacttatctcttcaatggtgctgcacaagatcattcggcatacgtgcgcaatggcgaattgtacatgtacggtcgcaatgattatggacaattgggattgggacacacatccaatatcgccgtacccaccaaagtacccggtatcactaatgcagcattggtagcgtgtggtgaacgcttcactctctgtgttcgcacagacggtaccgctatctctaccggtctgaacaacaatggacaattgggtataggttcgactgtgacgacctcaaactttagtattgtagcaggcgtttccaatgcgattgctgttgctgcaggatacacgcatgcaatgtacatgacatcgaacggtatcgttttgagtgcaggaagcgatgctaatggacaacttggaagaggcgcatcctctgccaatgtcgtgatcaatgcaaatatcgttcccatgctcatgccgaatggaagcaatgtgtctgcacgtgccatttctgctggcgggtaccattcagctgtcctcctaaataacggtagcgcttatctttgtggtaagaatgatcagggacaatgtggtgcatctcctaccctcgttccacaagccaattcattgggtatcatctccacactttcgaatgtggtagatgttgcttgtggacacgaacatacgctcttcacgcgctacgatgggcaagtgctgggattcggacgtaatgatcgtggtcaattgggacagggcaataagacgtcacctgtgacgtctgtggtgcaggtacttgcgggtggaggcgcaggctctagcaacggtttgtccgtcgagatcgcggctggtttcaaccattcggcctatataaaaaatgacaataccatcttcgtattcggtgccaatgataagggtcaattgggattgggacagaccaccaccaaatcgttgacgcctacacaacttgtgggatatgcgggctacgatatcgcatgtggcaggaaccatacggtgatctcgaccacaccggatcctttgacattcaattatactggaaacaatgcattgatcgcgtttggtgataatgcatacggacaggtgggtgataacaatcccaatgtgacgacgcgatggttcccgaaccgtattcatgacggaacgttcaagaaaaagttgggggtgggatgtattacaggttcatccgcctacgttgattcggacggagtgttgttcattacaggttataataataatggtcaactcggagatgaaactataattaacaaaagcacgttcagacccgtttcacgcctgatgaaggaaggaatacgtatcgtagctgttgcggtcggcgaagtacacacgcttgcccttgactcgacgggacgcgtgcacgcatggggagccaacttctacggccagctaggaagaaataataccactcgatcaaatgtcccgatcgatgtctcgagtttcggatctcttgtcggtaaaacgatcgtggccattgcgggcggtcaatatcacacgcttgccctagactctacgggacgcgtgcacgcatggggatacaacagccaaggtcagctcggaaataatactactaccactcaatccaatgtcccgatcgatgtctcgagcttcggatctcttgtcggtaaaacgatcgtggccattgcgggcggcagcagtcacacgcttgccctagactctacgggacgcgtgcacgcatggggatacaacggtcactgcaatctcggaaacaatagtatcactaaatcattagtgccgatagatgtctcgagtttcggatctcttgtcggtaaaacgatcgtggccattgcgggcggcaaccatcaaacgcttgcccttgactcgacgggacgcgtgcacgcatggggatggaacctctacggtcagctcggaaataatactatcactcaatcaaatgtcccgatcgatgtatctagtttcggatctcttgtcggtaaaacgatcgtggccattgcgggcggcaactatcacacgcttgcccttgactctacgggacgcggcacgcatggggatacaacaacaccggccagctaggaaatactactattactcaatcaaatgttccgatcgatgtatcgagtttcggatctcttgtcgataaaacgatcgtggccattgcgggtggcggcatgcacacgcttgcccttgactctacgggacgcgtgcacgcatggggaagaaacatctacggtcagctcggaaatactactaccactaattcattagttcccctcttaatcgacaagaccgcgcgtgactaccatcctcgtgtcttatcgaccggtcttggttctcacaaattgctaacgaatatcggcgttacctccagttcctccctcatggcggtaggcacaaatgcttcccgtcagatcggcgataatacggcgatcgataggtacattcccgtcgatgttggtgttggaagttttggaagtgtcatcatcagttcagcagagagtgttacgcacagcgcgatcgttttacaaagcggtgaagtctggtgctggggtaataatacatatggtcaatgcgggacgaatacagctggtgctgtagtgagcgttcccactaaagtcgttagtatcacgaatgcagtcaaagtcgcatgtggaaacgggttcacattcgtacgcaatgctgacgatacggtcatggcattcggtaacaatgcgagtggacaattaggtgttggaatgagtattgttgcaacatccacattcacacctacccttataagtggattggtaagtatcaaacagattgcggcaggtacatctcatgctgcttccatcgatggctcaggtactttgcgtgtctggggttcaggtatactaggcaaattgggattgggtgatgcttctaataaagatgtacccacaatcgtggatgtgtccttattggactttgccaaagcgacacatgtcgctcttggagg

SEQ ID NO: 306 - DNA, 21770 bp, Chlamydomonas sp.
  source 1..21770: mol_type = other DNA
tgcatgcaatacaataaaatctctctgtgctgacccacacacattactaattcaattccatgcgcgatgtaggtccatggtgtcaaagggttgcaacaattgatcgtttgctttccgaaaatatgtaaacctaacagtgtataatgaatttgcagacagtgtgtgtgcttactcatgtgacgtatattgttgggcgcaggcaggctggaaagagcttcatgatcacaaacgaaataggggatggtgaatccactttggtggtttgtgatacagaccatgacgtaaatcatcataaactgcattccccaattgcaattgtaagcatgcgagacaccctggatagcataatcgggtttaagattatagttttggacaacgtcattttcgattcgacagacagtctactacaagatgctatatcactgcatgtcaaaactggaacacgcttaattgtagcagtttcacatccattcaatatcccatctgatggcgatgggataattatacaacttagtgaatacaaagactcatgtggcttgcaatgcctaaacaatttaaaagccaagtatgaattccagctggccgcaaatgtgctgaataggaataagatgcacaccacagatcagacacggtaaagtagtcgcaatggtgatcgtatatcctaaacttggttggtcagaatcgtacggcagatatcgtcaccgttgtgtcgatacaattatcgcaatggttcaatttgggctggctgctgcttcgaatgcacatggcgtctaatgagatgaaaaggtgttgtttcccagttagggtgttgttgcttatatctaattatttctgggagttcttcaatacgatccaggaagttgtacatgattgctttatcccacagggtcggtgtttttatttgttgaaacagctggaatacgtcttctgcatcttgtaatgtaaagttgttacgaacgtgctgaactcggttcttgaaggctctctgattctgatctttgtgaaaaaaacacattttttacagtatagaacccgaaagctttatacacacacgtgactaattgaaccatcagaatcgccctctggaagcttttcgaacatgttgctactacagtcggcggaacagtaataaggtgtaccgtacactccagaaagcggtttcattttagtattccgtcgagtgtactgctttcagtctttgtcgtgtacgcgtttgttcagtttttttcgtgattccatccacttataccattcatcccatggagtggaattgatgtacgtgtgttcatggacagtgttaagcatgggtttatagagcccatgtatatgggccgctaatgcgaaatgcaaccttgaacagtccatggtatttaagtagggtgtgatcaagcgaccgttgcatcgagcagcaacacaagcctgtatgtacgtattgtagtctgcaacttcttgcaaattgtgaaaaacatggctttgatgaagtccgatgattgcgaattttcccctgatggtgaggatttggggaacaagagaacagtatgtaccgattagcgtaatttgtatgccacgttgttcgatttgatgaacaagatctcgacatggtgagataatgcctacgtatgttcggtcctgatgatgatactcatgcatttcaacccatgttcaataagttgttttgccattgtgagctctgcacaagcatggccagcctctgtgaatactagagtaattgggtcatttatagtgtgcaagtaatttgtctcaaaccattttgtgacacctggcacatttgataatgggaaatatgtacttgatgcacaagaatggctcatgatgatatgggatgttgatataaaccttatgtaacagccttatacgtatcgccattcgatgacaaggaggatgctgactgtgtaagaatgttttgtttttgacaaaactcttgaaaaatcacatgcaagggtggacatgctgcatgctcgcggtgtgcatccacatgagaatgaatgaatgtacgtacagggggggggatgcgcaagccgcctccttggcatgtgtgaggatgaatggatgactcaacatgataaggaactctgaagaaaacgttacaccgcaaccaacaagtcttagataattttatttttgtatttaaaatatatacactttcattcattcattgagtggcaaaactacctcaagcgaaaaaagaaacgaagagtcgatctgatgtcgtgtgctacacaggtccccgtccacgcggaaagaaggacgactcgtacacgtccgaagagttcgtcgcttttatgaagcatgaggcctctgacaaaaaagaacggacgcttgatgaatggatagagtgggcaggcgcgctccgcatgaaagcatcgaagtgcagaaaagtaacaaaatgcaacgataaactatcggctgcaggtgaagtcattgataaaactttaaagcccctcacatcttgtatcgagagcaaatgtcatagtcgttatgaactcatggcgaggctgaccaataattccaagaccgccatgagctcgttcgataaatacgcaagcaccgcgcgatgcggtgccgtccattgctcgaatgaaggcgtgaaatatggcaaggcgaccaaagcatgggacgcaatatcgaagagatgcgatattccccgaaagggatgtgccggtgattgttgatgcaggggctgcatttagctgaatccgctaagagacggcgaggtcgtcttgtccacatacagctaccaaggttggcggatcctcacacaaaaggggacgtcgttcgtgttcatgggaatttggcctgaattcgggttttctcatctcaccgcatcgggtgtcgcgcacggtgtgataccgacgcacacgtatgtaacacaattccgatgtacatctaacacaaatcgaattcggatctatactaaaactatctgtacgggggcgaattctggtttgttagctgcttgacaaccctattttatcgcggtattacttaaaggctataattgtgtacacagtatcttatttgtcactgctttcattttttcatgcacacagataataagcatggacttcactaatacatcaccagctcagctaggcatcatcatcgctgacggagggccacacaagaatgctgcattggctgcacttgtccaaactgctgagcgagctgatgaggcagtgcgggtggcgcatgcggctgttgaagctgccgtagccatgctgcgaaacaacaacaacaggtatgatttgatttgcgcttgtgattgcacaaaggtgggtcatcaactcaacggagaaatcggtgcttcagactgccctgcaagtctttcacacgcattgcatgacagacttcaacaaagaggagagcaatgctgtgatcacgatatcgacttggtgcaatatcgtcattcaaccaagtggccatgtcgctctggtgcaaggcgggcatggggttgatccattgcgtcatggagttgtacatgataattggattaatagggaatggtactactttgcctcatggtatcaccggatgaggaagatgctcagaccccctcttttgaaagtcgataaaaaatcgcagaataaattatcactactcaagagaaagtcgtgtgtatcaagccggataggatcaacctgtcaacgaccagatcaaactgtatatcacagtttagtgaacgtgttagccaattcagtccatgacttgcaatcggcagggtgtcgcatgtctcgtccaatgaaattaattgtgagttggttagctgcgttctggtcacaccacttccagaattgtgccgccgcagtgagacatgcagaggatccatgtttggcacaatacgactcaccgaacttcagtccaccactgatgtaaattacaaacactttgtttggggaggtttgctccttcgtccaatgctccagcgctacgtacgagtcaacgacttttgtcgcgacatggtgcacttgagacagcctaagccactcatcaaccgaatggggctcgatatggctatccatgaaaatcgctgtattgatgttataaccggtttgaatgagggctattaacacattccactcatgatatccgctgccacactctggaaatacaatgattgataccttacttgtgcatttgtttacataattgagcacattattgacgatgtggttactgtcattgggggtacatgcaccattttgtagaacaggtaaaggatgatttgcatcacccattctatgtttgcattattatgatgatgttaagatcctttcttattcttttggtgataaagtcatgcaccacatatccttaagcacactttatcatgaaatacactcattccccaacattcaggagtcattcctcgattccgagattcatctttcatgagcgcatgaggacacgtgtcgtatcaagcagacttctgcttaacaaactatttagagatcaaagattaatcgcgggacccacggagtggggcaggggaattcagctgcggactcgcggaaacacgtgtcggatccttccattcacgagcgcccccatgtcatccaaatattcgcttgctcgtggccatgttcagatggatatcaagaaagtcaagattggagggtcctccatgatggggatatcgccatctgtcgatggcgcatgggaattcttgagtattgtgacatggaaactacccacttggcagtgcagcacaacggtggggctgtgcctgtggatgtatttccataaccaggcacatttgcatctacagttggaatgcatacgtggccttcaacatcttcacccagtcagatccgtgatggtcatgatactgactgagttgtaagatggtgtctcgaccggctaggggaatgctgcacgggtgagagacagacacgatgacggcacgagctttggactgcatggcattgtgtaacaattggcggccttgtacattaaaaagatggatgtcatcaaatgctagctcattgaaaccgtcaagtgaaggtgattctgattcagattcagattcagacagtttacacaacgttgcctctggtgtatgcaaagcatggtactccttgttatgttctgtcatgaccaatattagagtgggtggtgaatgttgagcaataagttgagtgatagcgtgactcttcccactttccctgcgccctaaaatgtacattacttgtggcttacaagttgtctgtgtgatgctcatttactcacatgactagggaatttgatgcatataataaacgcaaccaaccaagctacagtcggcgtgtccaggaagagaggcgatcgcttcagtgcggctgttctctcgaaggtcgaagaccgattatcgctgtccggcttcatttcgttttgtcgcctcagcaaggtgctcgacatatcaccgctggcaggactcacttcgttggttcacctggacatttcgaacaccgacgtggacgacatatcaccgctggcaggactcacttcgttggttcacctggacatttcgaacacagacgtggacgacatatcaccgctggcaggactcacttcgttggttcacctggacatttcgaacacagacgtggacgacatatcttcagcacacggacctcacgccgctgctgccctttctggccacgagatgtccatgtacagccatagtccatcggcaaacagcggattcaatattcaacaagcggcggagcccctttcacctcttccccccagcggagcgaccgggggcgaccggaggggagcccccacaaaggattccgcgaggaaccgagcgggtgggcgaccggaggggagcccacagttcacagttcacatcaagcattagacacactactacacactactactgtgtaactaactgtcaagtcttacacaatgtgtatgttgtttgtaaaagattcacttgtttgtaccacttcggcattaaattaaggagagcttattatcactgtaacgcttgggcttctttctcactgaaagtcatcggagtgcactgtaacacttgagcttatcaccgtaacacttgagcttatcactgtaacacttgagcttatcactgtaacacttgagcttatcactgtaacacttgagcttatcactgtaacacttgagcttatcactgtaacacttgagcttatcactagaacacttgagcttatcactggaacacttgagcttatcactggaacacttgagcttatcactggaacacttgggcgttttccgatgtgtcttctaaagcaggcgtctgctcgacatccatttagggttctgagatggggggcgcggatatagggaggtgttacaggatgatgagtgacggaaccatggaactactcccccggtaggatggaatggctcattttgttcagagtagcttgtaatgggcgttcctgcctcccggccgattttttaaaatttctaatcaggatttagagccgcctgaacgactcgctagcttgagacatcagcactaaggaatcacaaatccgctccataccatgtttcgcaaccagtaaaaatcggccgggaggcaggaacgcccattttgtgttgatatggtttcaattatttactttccaggataataagtgaacaacgcctgtcgagatgaacagcctgatgttgttggtggccaagatcctgggcgtaaagtcagaaggtgctgatagtgacgttttcgccctcatggagggcgcgatgaatgtcatgggcattcacaacttgctcccgcagtcagcccgccgcgttgacatagctgaagttgccacagagctcctttctggcgatcagatcctcattcggacagcgggtagcaatgagagattccatcatggaatctttgttggtcccatttcaggagtgcaggggggtaaaaatctcgtggttgattttgggggctcacaggatgcgggcaaacaagaggccaagatcgggctgcgtacattgggcgaattcatggctgtccccggctggcctgagcttgctgtaatgtgttgggatagcgacacaccagagcttcgggagttctcggcggcactggcgttggggctgcacagggatctgcaagattgctctggcctctatcacttgctgggccgcaactgtgaccactttgcgacatggtgccgtacgctcaggtgggatcagttaagttgtctcgaattgccgctcaggtttacctgatgacacatgcgatgcctttttatccaacacaaaaaatcaaagcctggtttgtttaaaagattttcattttgtttttgttgtgatgtatgtgggagtctgctcaagtccagagcatcgtcggcaatctgacttgtttacacgcgtgcttcgaggcgcgcgaaaacacgtgtcagatctgacctgtttacacacgtattttcatgggcgcaaggaaaacacatgtctgcttgacaaactatttcgggatcatgaaatggaaatcgcgaaacccacggagtggggcaggataggatacatgtcgggcattagatagataggatagcagatgctggagctcgtgaagcttcgtattcagcgcacggaccaaccattattcatatcccttcattccgtatttcagcatttaacctgatgaaccctatgcagttggatgggtaggcgaagtgtcatgcgacaatacaagaacttgaatcaactgctcccgttcgcagaagaatggacctctcccccttccgcagataatcgctgatggcttttacagtcaacggaatattaaaatgaaaccgcttcgtgtacggcacaccttacggtgtaacctaatggtgtagcaacccacggggcagtggaacaccaatacgaatttgaatcaacaaattgcaggatgttaacgagaatatcgtggttcttttttagatcacggctctccatcctgcagactccgtatcgttcttttgtcggtactttcgagagtgtccattgaaggaccagccgcacttaagcgatcgcctcttccccggtaccgtggcccaaaagaacacggggtctttgttgatgtgcaatgcgtcatgaaaggaggtttctttgctggacgggccattttgtaggaccatccactcatacaatatatgattgtcaccgccttataccgtttattgggatgtttcattttactgttccgccgactgtaggacacgctcaacttggtgggaatgcgcattgatgtcaccagttttgcagacccaagcaaatcactcgcaaatccatgcaatcagattgtacttcttccgtgcaaactcaggtgattccaccatccactttcattcgcctgcgagcacgatgcaacaaatagcgttggtaggtagcaactgcaaaccgaaaactatccggaaacaggcaattttgtgtgtgcacatccaatcccgcccaaactgtagatggtatcttgcgcagtgccaacacgtcaagccttggtacaatgtgcatctaatggtgctacgtctggtggaacgtcttgtcacatcaaccagctgacacactactactgtgtaactaactgtcaagtcttacacaatgtgtatgttgtttgtaaaatattcactgcaacgcttgagcttatcactgcatcgcttgagcttatcactgcaacgcttgagcttatcactgaaggggaaaccgcgggctccatggacactgtcagatttcgtgcagcgtagcatcgactttgtcgagctcacctttattcaatacataaggtgtaccgtacactccagaaagctgtttcattttagtattccgtcgagtgtattacgatagctttgcttctatccatttgatgaattcagtgttgccattttgagtcgcaattctgcaaggagcgttgtccatacagctagggacatttgatattgggacaccttatattttggggattctgaaaagttgaccaattcaagatttgtaaccgatcttgtcaatacagatactgtcttcaggtgattgacacaaaaaattcaaggcatctaaacacactgaatttacatgttcaaagtaccctgaaaagtcaaactgatggctaacatcgtgcgcatcaataatccttttcaaagcgttactgtaatcaaatatatctgctacatctggaattattgggaacatgcagcgatattttcgcttgagcaaactaaagacattctcaatagcgttaaactctggactgtaaggaggtacaaagagtggtcgtattcatatagaatcgaacatagaaatcgtctcctttgaatgattgaactggatattgtcaaggacagcgactgtaccccgatgtacatgtaactcagatacaaactgtacaaagtcgactttcttgcaattgtgatcaaggatcttgtaatgaacgatacctttagcagaaacggcagcaattagtgtcaatttggacattcgcaatgtcttagaaatttggatatttaaacgtttgccgcgttgacagtaccctctgcgacgagtgtcaccaatgtaaaaacccgcctcatcgatgcttaacaaatccgatgtcggaacggctaaatactccttacaaaaacggtcgacagaagatttgtggtcattcttgtgccgaactgtgttgtatgcgcgcttgcgggtgtaaccaagtttgcgtgtgtagcgtccacaagtttttggcatcttgacagaggacagagaagtcacacactctgcaagctgagacattgtcaagaagggattggagtcaatcagttgttttatagcagccttgatatcttctgtaatgacactcacccttttcttccgatgatgttttatattggctttggtgacccaacgttggagtgatgattttgatactttgtacagcaaactaactttcctcaaactacgattatagtatttgtagtgaacaaccgcgcgatgtcttatctctgcatcaatcatgataacgtaggaaatggtataaggaaatgtgggtgcaatattataacaccaaaagaaaaagaatactcaccccctcttaatgggggtagtgcaagacaaaggagatgacgatattaacatcagcgtcgtcaagaagacgcttaattctctgtgcatggatgtatcaaggcatcagatatcctcaaggatacaaagcatggtactcttaatcaaccacgcagttgcagaggcatacttattcgcaaactttcatatcacaagatgcctcgatgatggagactttgacgtcaagcagttgccacacctggatcggaacttttattacaggtgcctccttgcggtatcgacctccaatgttcgaaaggatactctgggccagagcttcaatgataccatggttgctttcgacgttctaagacctgcaggatacgtgaaggtggacgttcgtccttggggacaagtaatcgcagacgtctcaatacaaatggcgacgatggcgtgcaacagcgtctgggcaaacgtggacagggtcgttatcaagtacctgcgcttgaaacatccctctctgaagaaacatttcaagaagattgtcaaagcggtggtccagtacccagaatcgaaaatcgacacaatcatcccagagggcctcgtgcatgcgatccacatcaaagaggttgtcagtcacttgagggctctctttccgctgccaagagggaagcagtttaacactagagcgcacctgacaatgcgattgttccatcacgtgcttacagagttgggagaggtcggacgagtggatccgaaagataaaaaaacaagaaaaagtcacccccgtctgttcagtatccttcctcgcaagaacggcttcacaatttcgtacgtcccgatatcttccatgactttcatgaagcttctcagcatgggtgattcgccactcgagagcgtctctggcgatggacgttacgagaaccatacaatgctgtggcgaaagtactttaatgtccaaggtcttgagacgaaaaggtctcgctttgacaaccgaatcctcagcgacggtaaaggtgtatccgtccaaatgaagcagaagggtaaagaagaggtcgttgaagaaggagaaaacgcaggctaccccaaggacgcaaatatcgtagagtgcaaggacgcagtgggtgcgctgcgtgtcggagtagaccctggaatgacagatatcgtcacggtagcatcttctgcaggtcgcatcgagtctttcagctcggctcgctttagcgaagttgctgggtacaatacaagcaagcgtcgcacctacaaatggaatgacgagactcaagacctcgtgaagtccattccatcgcctaatacgagcaacatggtcgacctgcaggaccatgtcagagcttatctcaaagcgctcccgatcctcctacaacacagagccaacaaaggctaccgatctatgcgattctttcgatacgttggtaaacagaagacgattgaaaaggtatgcgatgtgattgcaccaagggcacagacgaccgttgttggcttcggcaactggtccaaccaagggtatggtatcagtcgttcatgttctgggcccatcaaagagatcaggaggtgcctctcacgtcgtaagaatgttttgttcaaaaacgtcgacgaacgcaacacttcttgtaaatgtcacggctgcttccagaggcttgtcaacatgaaggcagacagcgtagtctggcgcggagtttgcaaagagtccccaatcgacgggtctataactgttgagaagcagaagatggtggtgaagaacgtcaaggtccactaagtactgcactgtagagacagtttcaaaagcgcatcatccaatgtgcgctgtggtgcaacctggaaccgagacgtgaatgctgccaagaaccttcttctgcttttgacaacgtggatggacgggagagagcgacctgaggcattctgtgttccctcgcctccccccaaaaccacagtttccatcgaggcgagagtgagcgctaaactgaccgacccacctgggtttgtcagcagcttgccttgttatcctttgggccagcttaaatgctgaaatacagagatgaagggcaaaaatatgtactcgcctttagctgatctacccattgggttaaagggtcaccggtagggcgtcccacaaattgcgtctccgactgtaatgtcgagatgagctcctgctttccacaacaattccgcaatcttaacgtctccttcctcagctgctgatatcagcggtgctccacaccgtttgttgggatcgctaccagctataagcaacaagcgtgtcccgatttatttgagaacagatgtaaagacttggacactactacaataggatgtacgggttgtgaaacccacatcttcattgaaatgaccattgttccaaatcttgatgtattagcaattaaagcattaccaactagaatttgggatttattagacacacacgtacaacaatgcatttatccgacaagattttgtcgtgcaattgcttgcttgcaacgtataataattcgccgtgcacgtaggcggagggcatcatttctccaaatgatagaggaccaagaaactagtcattggacgttggcccctgaaggaaccgaagtgcatgcaactgcagaggcatggaagctcctctcccatggagaccacatcgtcgtgatggttggaggttggcgccatggatatgcgcaccatggcattgtgctcagggagtcccgtctggaccaagacccagatatcgcccacttcacttcaccctcaggagacacacgcatgcgcgatgcccgcctgcaaattgatacctacatcaattttctcgcacgccacacaacgtacggaattgttcaatatacttctccaactgactttgctgacgagcttgtccatcgtaagcgtgctgccaacatagcaaagctcatggtggaaactccaagtatggctctgcgcaagtatgacttgattcactggaattgtgagtgtttcgcatggatttgcaagacaggtggcttgaagcacaactcagaccaggtgtaccgagtgttgcgagacatttgtgatgatatccaaaagggcgacaagtccttcttgcttcgaacggcttctatgtcatctgggtgcacaatatcataaagttgttctcaaataattttgggacactctgtataatttgaatgatataacatgaaaccagatacaggtccgtggttcactacaaatattttttgaggagtctgaggaaagtttgtaaggtgtgtcccactttatttgaaacgcggatgtggcaacgcggaccccgcgtgccaaatagactacgtttcgaaaaaaattgaaacgttttctccagcacaacaaccaacaacaactacaacgcacgtaatcgccaaattcactcactgaaatacccgaaatgtctggatccacaacaaccacctctaacgcccgctgcacttgcgccgggaccaaggatgtcggtttcccatgttcccggatcgtaactaacggccgtaaatactgccacaatcacgtcaagcaggacgactccttcaaggaggagtccaatgcgtctgaagagccgatgactactacagtcgaagcctacgatgcgctcctgcgcgaactcgagaactgtcggatcaagaatcagacacttatcaagcataacgatgagctgaagctcatctccgagactaccatgcatgagaatatcctgctgaagagtcagctagttccagagttgtccccgtaccactttggacacgacctgctcaccagcctcaatctgccattctgcaatacgaagtgctgcatcgtcctgctcgattcgtccggagctagacagtgcaaaaaaaatcgccaggccacctgaagtggttgttgtcccacgaaacagaggtggctgtgttgttgttctgcggccatggcatgtgtcaggggtcgccacagcacggtagtctcgtgtgttcattcaagcagctggtcacagctaaggcaattgagtgcgtggcggagaagttcaaaggcacatttgtgaggttgctgaacatgtgcgatgccgaaggggagtctacgttgaaggatgggcaaggtatcagggacgcagtaaggcttcgaggtgctcagatgcaagggggggcaggcgcgccaagcacctactacggcatgacagtggcagccacgcagcagtttggcaagaccactggtaacagccggggcagcaagttcggtgtcgcactggggcgcatgtttgatcaggaggtggttgtgacgtacgatgggttcgagacggcattggacaagtattggagtggggcgcaagtacggatgacgcacgctttccggggtgtgttcgggacgcccgctctcccggtgggttcttgttgcatcactaatgatgatgcgggttctgagtctgagtctgagatggagttctgagtctgaggtaatgggcgttcctgcctcccggccgattttgactggttgagaaacatggtatggagaggaattgtgattccttggtgctgatgtctcaagctagcgagtcgttccggatgctctaaatcctgattagaaattttaaaaaatcggccgggaggcaggaacgctcatttttattttttgttgaaataattgttgttcccgagatggagaccgtccgtccgtccgtccgtccattcatgacacacggtggcggatcattgtcactcaccgtctcgtggaagtggtgtaaacaactgttgcaaccctttaacgaaccttattctcctcttcacagccagcaagacacacacatacatacattttattatcgttcggtcatgttcctacacattgaggaggaggacgacgtccgcgcgtgcaacgggagccataacgagatcgcgcgcatcgcgaaacgaatacttggaaaccgcatcgctgccgccgcgaggagcacgaacggcaagaagctattatggtacgtattcaacgggtgatggccaagttccaagtcaagcacgagctgtccaccgttgttcgagatcagtctgtaatccacgatctcaatctgagtcccactacaactgtcgggtcatatccatatgtcgagaccccttcctttcccaacagagtgatacaaaatttgtcaaagtgatatggcagcggaacacaatgcttatgcatgtactgcaaaaatgcaatctttaaaattttgtaatccatgtaggcgccggacttcttctcacattgctcgaaaaaggcagcaattatgtcgtttagttgttttgttgtatccataatgtgtagttagttacacacagactcaataatgttacagatcaaaagctttatacagttgttcaattcggcctgaaatattttttctcattgcaggatcgaagcaaacggaacggaggaaacatgtctcataatactcggtgcattagatagataggataggataggatatgatagatagatggatagatagatagatagatagatatgatagatagcgcactcactctatcacgacacaggcggcggcttgcgtatcatactcgtccatctggtctccacggaggcttgctcatcctactcgtcagtttgtccattcattaatcttcacacacaccaaggcggcttttgcaagcagacttctgcttgagaactatgtcgggattgtgaaatggaaacgcgggccccatggagtggggcagtggaattcaactgatgcaggtgccgtctttcgggagatgaccgatgtcgtcttccagtacgtgtggacaggtggcgtcgacagccttgattgcggcaccgaggacgtgccaccccatctttgccgttgttgagcgcgagaagacggtctctcgactggtcgccaagatattcattcgagaacgtcttgaggcgcaataccccacgttccgcaacgggcgtatggttgcagggcgattgtggtcgcgaaggccacaacggagtgtggccgtactcaatgcgacttttttttgttaattgttgtatgtataaatgtcttcaacacaccacaaacgtaaaaagacttctggcgatgctacttttgcagctaagctggctgtgttcatgttgaacgctcagtcacacgacattcgtttttccgagaaggagggcttccttcactcaagtgaacacgtttaaaatagggattgatgtgagcatccggcattcttcagtatttattttttgttgaaataattgttgttccagagatggagagtcttcttttcagaggtgttcatgtgaacacgtttaaaatagggattgatgtgcccacatctcttcgtgactggattctggaatcgtaaccactgcgcatgtacctgagcagtgtcgcctctgcatccacgcacgcttgtgcatctcgaacatggatggcaaaacgcacactataacgtctgtcgccgcctcataccgtttattgggaggtttcattttactgttccactgactgtagggttgcatgcatttctgtattttgcagggtggcgtgaccgagcgtagacatgcccacgaagcaggcatttgccggcggcattctggtgcgtttcgggacgggtgatcaaccctcttacaggtccgtggttcactacaaatattttttgaggatcccccaacgtcgccaaaaagcaacgacctgcaagttcgattataaagggtgtcccactttaattagagaacaactggaagatggctatcaaggagcgcacaaccgagtacattatcaaagggggcgtgacggcaaacactctccgcaattttgccaaacactacattccatggctgagactgtctgacaacacgtatggacactgggacatcagcttcccggtgaatgccaccacgagaaccggccccgtcctgaggggtttgcttttccctttgttcaatgacgcatgtgacgcatgtgatgcgcttggtcggatgctcaaccaggcgccaaaagctattgagaggctatagtgtgttctgatgggatatggcggagctgactcacatacaccaccattcactgtaacacttcggcttctcactgtaacgcttgggattctcactgtacacaccaccacccaatgacaacagagacaaaatggtttaaacggtggtggaaacaggtgtgtgcttggagaggagattgtttacacacatgccacggcggcttgcccatcttccattctcgcacacgccacggcggctttcgcatcctcattgtcgatactcctcaacatgccacggcggcttttgcattctccttgtccactcgtcatcgaatatttggcggagcaggacggggtcctcgcagagaactgcgagtttgaggaagatttcatggagtcgagcgttgccttgttccacatgtatctcgaggaaagcggggacagtaacgatgtgtctgctcacacgcaccgccgcggatgatacatggggtgccaagacaccacacacagagtcaaatggggatgaatgcagtcaggtggtctcacctcaagcagacgtctgcttgacactctcttgcatttttgagggggggagggcgggtaccgcggagcggggcagaggcattcagctgatcccatgcatggggcgactatatcattgtatattggtgttgtgcgcgcaggactgtgatttatttatatcccccaccacggcggcaagcgcatcctcattgtattgtcaatctgactccaaaagacaccacggcggcaagcgcatcctcattgtctcgtacatctgtatccacaagataaaagcgacggaaaagttcagtagtgtgtgttagttactgttggctgtaaacttttctagttttaatgcacaacactagcataactacgttatgccgtgcagaatgacagccaaggggtgcttcttgtacaagaatgccaccgtcaacggcttcaacatcaccaatcagctccaggtccgagtggaggcgatcgacaacgacgatgcaaagatctataccacaaatgagaacggcaacccgctgccgatgcctgtcaacgtctcattgcgcaccggagaggatgtgaacgtcccagtctacaacaatgagttcctcatcgtgtggattgaaagctacgtgctggctgtcggtggcgtcgacatcatgtggctccacaatcagaagaagtaggccttctctgctagcaacggcatcaaagctttctcactgtaaagcgtggtgtatccagtgccatgcagacgtaaaatagcgtggtgtatccagtgccatgcagccttaaaatagcgtggtgtatgccatgcagccttaaaatagcgtggtgtatccagtgccatgcagacgtaaaataacctcgcatcaggcggcacctgtgtcggcacctgtgtcggcacctgtgccgctatggccctcccaatcaaaaaataacgaaagtaacaaaattcagggaaacctctcattatacatcaaccagcagacacactactgatttacgaaactgaaatcacacacacgcaacgccgcggatggtagatgcaggcagggagggagcaaattggttggtggggtggttactgatatggggacacagacggttgaacggtttacaaaagaggctactcggaatatcttcgagaacctcttcaacccgctgcaccccccaacgttgcccaaaagcaacgatctgcagtctggatgattataaggtgtgtcccactttatttgagaactactgtataacagaagaagaggagaatacatggaaacggaaaacaaaaacaagatgaaacctacaaaaaaattgacagtatctttacctattgggtttcacatgggactcgaagaatggatagattcgcaaacacaacacagggacgaggcaatatacgcactgctcgcacacgggctacacgcagtgcggacgataccaaaaacattattaaaaaaaaaggagggtcgtcgttcaggcagatcgtcggatacttataatgatccaaatgacataagtgaggcggcgcacatccaggcgagcgcatacagaggaacacggtatgcagccttctttgataaggatatcggatcgttgagagtggtgtcaaggtagccgacacatattggcaatacgagaagatcctctcacgggacccaccacctatcggatagatgaaggatgctgctgctgcttctagaaatgaggaagagagaacaaaacaaaaggaaattatgatgttacggggtccttcatcatgaccctccctcatctcatcaaggacggcgactttcgcatcaggcggcacatgcatcggcggcgacgagtagtcactcacagggagactttcgcatcaggcggaacctgtgtcgagtcacatcacagagcgaccgaccactctcatcacggcggcacaggtgccactatggccctccccatcaaaaaaataacgaaagtaacaaaataccaccgtaccacattaaaaaagtggcggagcccctttcacctcttctccccagcagagcgaccgggggcgaccggaggggagcccccacaaaggagtccgcgaggaaccgagtgggtgggcgaccggaggggagcccacagtttaacatcaaccagcagacacactactgatttacggaacggaaatcacacacacacgagacgccgccgcctccatctcggatatggacatcatcagcaaacttggtttcttcgccttatcatcatcgtgaccatcagcaacgtctcttccccccagcggagcgaccgggggcgaccggaggggagcccaaagttcacatcaaccagcagacacactactgggtgcacaagcaaacacacgcacgtgaagaagagtgataggcaaacggaggaaacatgtcgcatactcgcactttatcaggacacatgccgcatactcacacacgtgttgcggaggatgctgtcgagatgatgcccaccaaccactctcactcattctcacacatgcactctatcaagacacaaacggcggtttcgcatcctcctcggtgtccatcctgagtagaacgactgatattcgtaaacacagaagtttttaacacacccaagtcagcgaccattattaacgccaattttctaacggcgatgtccctaaaggtaccatttatttccatctgacatatgtttcatttaactgttccgccgactgtaggggaatcgcgggccccacggaatttagttgcatacacgtacacacgcaaacggcggaaaactgtcgcatccacacagtccatccgtccattcatgagacacggatgcgatggcggattctcgccactcatcgtctcgtcttgtcgtccacattacagattcctttgtattcgaataaaaaatatatgcattgaaagtacaaacccctacataaaatgatccgattgtctgaaatctatgcgaaatcacagtcgacatcaaacatcttatatagcgataatgcacccattaaaggagtgcgatcgcgaccaggtgttaaagaagcaccatcgatgtcatttgaacaagatacagacacaggattgttcaatgcatcaagtaatgtcttaggatttgctgcaggagcatatactacgctcattgcatcatcttccaatttacaagccaatacgcaaatcacaacatcttcaaatatcgtgcctctcaacgacaatgtctcacaattaggaacagtaacaaagaagttcgcaaaactgtatgcaacagatatacatggaacatctgctacatttaacacactcggaggaacggccatctcaagtatcgtcacttccacaagtagcaatgtcgcagccagttctgcagcggtcaaatcagcatacgatagtgccgtatcagcttccaatcagacgtacggcatcggcgcgctcgatagtaatggtgatatccttctcaggggcaacttgcgcatctccgaaactggattcatttctttcggtaacggaatgaacatcgacggatactcttggaattatttggccaataacgtcgttccccagcgtgccgtggaaaatactgtttccaagaaaacgttgtgggggggaagtactacacatttatccgcctacgttgattcggatggagtgttgttcattacaggttataataataatggtcaactcggtgatgaaacaacaatcaacaaaagcacgttcagacccgtttcacgactgatgaaggaaggaagacggatcgtggccattgcgggcggcaacagtcacacgcttgccctggactcgacgggacgcgtgcacgcatggggatggaacagagaaggccagctcggaaataatactaccactgattcatcagtcccgatcgatgtattcggatctctgaacggtaaaacgatcgtggctatttcgggcggccaccaacacacgcttgcccttgactcgacgggacgcgtgcacgcatggggaagaaacgactaaggccagctcggaaataatactactggcactcgatcattagttccgatcgttgtctcgagcttctgatctcttgtcggtaaaacaatcgtggtgattgcgtgcggctcctatcacacgcttgcccttgactcgacgggacgcgtgcacgcatggggatacaacaacaatggccagctaggaagaaacaataccactgattcatcagtcccgatcgatgtatcgagtttcggatctctgaatggtaaaacgatcgtggccattgcgggcggcacgcaaacgcttgccattgactcgacgggacgtgtgcacgcatggggatggaaccactacggccagc

SEQ ID NO: 307 - DNA, 21650 bp, Chlamydomonas sp.
  source 1..21650: mol_type = other DNA
gcctgcactaagcttctcgaacccggactcgtcctcatcgtcatccgcttcgtcttctgctccggcagcgcccttcttaccctttttgcccttcagaggtgcggagagcattgcaccgcacttcgcctgcaggccttgccggttgaagctcctggtaaaggcgctcttaatctttgtagggacatccttcatggggtcctctccccaatcggccttggtcttgaacttggtcacatcaatcacgtagtcaaacatttcccgggagacgcagtagtcctgcatcagggtaacactctgctggatgccaccactctctccatcagtcactagtggacgcgtcagtagggtgcgcatggctgataggtactctaaccgcacgggagatctgctagaagccatgtggccgctggaagccatggtggtggtgagttctcccagcaagcgcttgtttgaggttgagaagttgcccagccatgaggtgaagcgagagtagttgtcgcctggccagaatgcgtccctcccgccgcgcatgtacgcccccggcacaaggcatgcaagcgtgttgaaggcaggcataaggctccagttcatgtagcgccgcacagacgtgttgatcacatctcatgcagatatgccctcagctgacttcgccactgccctcatccgctgctcctcagttcctgcgatgactgggcggtggttaaggtagttctcctggatcaacagggggacgatgtcgtccaccatagctaggttcagccgatcttgaatgctcatgcttgagctggaaggctctagcaactttcttgcacactcgaaaggagacaggtcactgtccttgtcgcatgcctggctgcccttaacgtcatcgtaggacagggtggtgcgactaagacggaccatttgcagctgtcctaggatagagcgtaggtcgaaattggctcccttggccagggcctccatggtggcatcattgacagtcagcccctccttgcggcagatctccatcatccttatcttgacttgatgtggggtgggtgtcctgaagtcaagctccacacagtagttccgcaagcttttcaacttctggttccacttgtcgttacagatgcagataatgggcacctttgaggacttgatcgtctggatcaggtcttgcacaccaccacggtcaccaccagacatcccatcaacctcagccatgatcagcagctgcttcttcatcttcccatcagctcccaccaacagagatcgattggttgccatctccttgatcatgttggccgacttccctcccatgccagctgagatcttttaatccgacttgttacgggtgtcacaggcattcatctccacaatctcaaagttacactccttggtcaagatatgggcggcagaggttttgccgattcccggaggaccactgagcagcaccgccttcttggacaggtccttaggattcttccggctgccaggaggggcctgtggttgctggccacgcagatttacaccctcccagttgctgagccacatcctgagggtggcaatcagcgtgttgttgcccaccagctctctagtgtctgttggcttgtacttgtccacccacagttggtagccggcattacccgaaggagcctggacaccaaatactactttgtcatgatcgttcagggaattccattgctcggcagtcatgcttgacagttcgtacctcagttgcttctcaagtgcttctgcgcgctcagtatcaatcttcatgtatgccttatttctgcgcgctgtcccccccccccaacgttgccccaaagcaacgatctgcagtctggataattataaggtgtgtcccactttatttgagaactactgtatcaattaagaaatggatgcaatccttagtactacgacattcaaaagccgcatcatgggcacttcagtcaacgtcagcttgacaataaggaatacccatgaggccaccatggagttcaccctcttcggtgccgcttacacattcactgttacgaggtggagcagaaagggtttgtcgtcctttctgattctcttctttacttacaagtgccgagaagcagctgacttcggttctctcacggtggatgacaacggtgttcctaccttcaatatgaccactgcccagaaggtcaatgctgtgatccaaggtgccaaggatgtcatggcatgcgtagacgagattggtactcggcaccagcggtcagtgctcgactatgccgtctggtaccgggagaagcacacctgctgggacacttacgagaactacatcaccatgctggcatgcaactgcatcgtccacacagatttcttggctccgggtgtcacatgggagttggtgacatttggcatggcttgaaggttgcaacagttgactcgtttgctttccgaaaataagtaaacctaacagtgtatacggaatttgcatgtactagataaggtgtgtcccactttatttgagaacaactgtaagagcgagcgacttctacagtattcatgcaagtgttgggtgatttcaattgaaaactcataaattgtaattcattgagtacataaattgtgagcgaattacatggcctgcgttcgacgtaaatacggaatcccttgccaaccatattccaataaatgtccaagccatcttgctcacattccaacctgtgcagttgacagcatcgcttacttggaaatactggttaaggcggaaaaaaaattggaggcccaggtcgacgtcatgtcaacccaagctgtacaggatgcagccaggatggaccatctggcatctcactccaatgtcatggcatcttactccaatgtcatgtcagcccaagctgtacaggatgcagccaggatggaccatctggcatctcactccaatgtcatggcagcccaagctgtacaggatgcagccaggatggatcatctggcatctcactccaatgtcatggcatcttactccaatgtcatgtcagcccaagctgtacaggatgcagccaggatggaccatctggcatttaactccaatgtcatgtcagccaaagctgtacaggatgcagccaagacaaactgtctggaggcccgggtcagccagttggcatcgcagctagctaggtttccgcacaacccgtgtatgcatttctacggcgatggcaacatcacccctccttgagattatctcccttgggggcatgccacggtgacttgcgcatactcattctcacacgtgaattcaagcagagcagactcctgctcgacaacctacccatacaaatacaaatactgaacaacgcacacatgaagtccgcatttcgaaaaaaaaaattatacgcagcaatttaatccaaagtcggcgtggagggaagctcaggcgtggagggaagctcattattgagcaagtagatgatgtcgtacatctcacggggaatctcgggaatctcgggactcgacacgtcgagtgcaccattcagattctgggacagtttgtccatccacctgtgatcatcataggtcatgcgcgcatcgcgcaaggccttggccttgtcgggatgtagccgcatgatcatcatcctctgttcattcctcgtccaaacgccttttaaccaggtgtcaatggcttcgttagacaaccagtacttccaccaggtggtggacatggtcgccagggtaggcccgcttgcgaggaacgtttctaagatcccggtcctcaccagtagcccgtatacgtcttcaaacgtgtgggccggctgatatatatcggcctcgggatcgtactgggcctcgggctcgggctcggtctcgggctcgggcacgggctcggtctcgggcttggtctcggacatgggctcgggctggtcctcttcgtcagactcggacatggactcgggctgggtctcgtcgtcggactcatcatcagacgataccaaggatacaatgcacggatcatgggcgttcagaacgcggttgaagattggtgtcacgaagtctcgaacaatgtcttcatcgtcccttgataggtcgatgatgcacggttgttctgacacgttaacgaaagtacaagacatgattgattgagttgagaaatgataaatagcggcaaagtggaagtataatatgtgtgtgtctttacagatcgagcgaaacatttcaatttttttcacaagcactccgaggagaaatacatgaaggaacgcgcgatcgatgataactacaaggacgggcgcattaatatcgcgccccgccaagggaacgcggcggcttgcgcatcctactcgtccatcctcacactctgatgcatggcatgcagcccctctttcacatggatttgcatacttttgtgtgtaaattgcagccttgggctattattgtgtgtgctacagtcggagacgatatttgtgggacgccctaccggtgacccttgaacccaatgggtagatcagctaaaggcgagtacatatttttgcccttcatctctgtatttcagcatttaagctggcccaaaggataacaaggcaagctgctgacaaacccaggtgggtaggtcggtttagcgctcaccgtcggtatttaggcagacctttgaaatcgtttgaatcaactggtttgaatcaatgaacccctatcaagcggttttccccttgaatcagggtaccttgaaaacagtttgaatcagtgattcaattcaagcagcttattcattgaatcagacggaagtcaatcaagacaatatcaaacggaattcaaggtggtcgaagatattgcacttcgaaatgtagctaagctcccatatgtaggctgccgagaggtaggaagctttgaatccgaggcgggcgagcgcctagcgataaccggcacaaatccgtaccttgtagtacattagttgtgcgttcattggctagacaaaaatctagggtggggtgtaggtgctagcaagatgatggctgtaatctcaagtgtcacaactggctatgtaaccaagttgaagtctggctatgtaaccaagttgaagtctggctacgtaaccaagttgaagtctggctatgtaaccaagttgaagtctggctatgtaaccaagttgaagttgaatgtaggagtttggaaacagcccaagtagggtgtgtgtgcgtgtttaagtactcgcactttggacaatggtaggaaagaaacttttacaagaaaggaaacaaatataatgccagaaaacaaattggtatcatatatttaattttcctgctgaggacggcttagctggctcgaagctacacaacaacctaatatacagagagacagcctaatggacctgcctggaagctatacaacctggcacacaaagtgaaagtcttatggagctggctggaagctgtacaacctaatggagctgggtggaagctttacaacctgccacacaagtgaaagtctaatggagctggctggaagctctacaacctaatggagctggctagaagctgtacaacctaatgcagctggctggaagctgtacaacctaatggatctggctagaagctgtacaacctgtcacacaaagtaaaagtctattgaagctggctggaagttctacaacctaaggagctagctggaagctgtacaacccatggctggaagctgtacaacctaatggagctggctggaagttaggtctaattcaggagtcgggaaagtattcatcgttgtgggtatcgcacaattgatgaatacaatacaatgctctcgtgggtatcgcacaagaaggctgtatattgtcaactaccaggcccggctattgtccaaggtggtggaagggataataggcctatctactgctgtgcttgaaatttcaaattaaattttggggttttttgtatgagggtttaaagatactgcctgtcctggtcaacaaggacaggcagtatctttaaaccctcataaacaaaacccaaactaaagtcaccctatgattactgctccatgctactatatattcagggcactaacatgccttaatatcccattggctaagcttggcaccacatgatggcagcttccaggcagctccactactgcatattcgtcctttacttgctcccaacagccagcattcatgaatgacctgcaagggaaaaacattagaatgagtaagataatgctgcttagaatgtgctgcacttatcatgttggtgacttaagtgtgtgcagagggtggtggatgcatacatggctaaacgcattgaccacccattttgtagcaagcagcctcaagggcgcttatgcggctacataatgggcaggtgcagctaagccatattttttattactgacatgcattaattaagttgttacatgagggtggttcaggcataccatacaaggcaaatcgcatctcccgcccattctgtagcaagcagcctcaagggcgcttatcgggctacagtatgggtaggttcagctaagccatattatgatattattcataagtaacatgcattaattaagttgttacatgagggtggttaaggcataccatacaaggcaaatcgcatctcccgcccattctgtagcaagcagcctcaagggcgcttatcgggctacagtatgggtaggttcagctaagccatattatgatattattgataagtaacgtgcattaattaagttgttacatgagggtggttaaggcataccatacaaggcaaatcgcatctcccgcccattctgtagcaagcagcctcaagggcgcttatcgggctacagtatgggtaggttcagctaagccatattctgatattattgataagtaacatgcattaattaagttgttacatgagggtggttaaggcataccatacaaggcaattgcatctcccgcccattctgtagcaagcagcctcaagggcgcttatcgggctacagtatgggtaggttcagctaagccatattatgatattattgataagtaacatgcattcattaagttgttacatgagggtggttcaggcatgaaaacataactcaccacaacttcttgccaagtcctagtttcgctcccctcgaatcctctgagcgagctgcaagtggaaacagacatcaaagttagtgaatgagtgagtgtttcaagtagctcagtcccccccccccccccccccccccccccccccccatccccctcccaacccccttgttctatagtgttgtgtagtgttgtgtagtgttgtgtagtgttgtatagtgttgtgtactgttgtgtagtgtagtgtagtgtactgttgtgttttgtcgtgtacgggtcccagcagctgcagcatattttcaccaaaggccaactgcccacctagggatctgcccagaagctgcagcatattttgtgtggatccaactcttaccccccaccccgcccacccaccccccaccccacccccaacccctgtagatagcgcacctgcatatccttgggcataatggttacccgcttggcatgtatagccgccagattagtgttctcgaagaggcccaccaagtaggcctctgtcgcttcctgaagggccaaatttgcccctgcttggattctgtaatttccgaaatcttgtacaatttgtcgaactagcctcgtgtaactacgaggagcagcttgcactaacgaggcaacgatcacaaggctctgttgtttgttttccagaatcggaataatcatatttgggtacatgagaagtttcgggatcattatcccccattgttcatcaggtttgattagcatgacccccatcagggttgtctaggtcctgcgacgcagatcccgcatgcaccgcaggcgcaggccccgagaatccgattcaaatatggcgacctgcttctccgcccatgcgcgtgaggttacggcggtactgcatgctgtacagttcaaactggtcagcgcaatgggttagcgcttcaacttagcggctgtgctagctttcactgttcactgcgcgtcaattggttctcgactcagcgatattcctgcagaatagcgcaccatgctgcctgctttccttgaattaacttggactgatctattcatagcttcagccattcccgaattgcttcctagatccgtcaatacctacgtgcgcgagcactttgcttccgcggcactttgctttgggaatggttgtgcttcaactcaagactgtagcgaccttcttctccgcccacgccggcgcgtgcggttaaggtactgcatttttcgtttcgtcaagtggtgccttacttgaccagagttgtgtcgcaggcattaaggcagctgcagcaaaatgacctatcatggagccgcaagagttccaatgctcgaggtgtgaaacaggtgcgcagtcagatagcgacatgctgcctgctttccttgaattaacttggactgagcttgctttcatagcttcagccattcccgaattacttctgagatccgtcaatacctacacgcgcgagcactttgcttccgcggtactttgctttgggaattgttgtgcttcaacccaagactgtagcgacctgcttctccgcccccgccatgcggttaaggtactgcgttttgcgtctcgtcaagtggtgccttacttgaccagaatttgtctcgactttgactgacttgctttttcgagttgttccgcaggcattaaggcagctgcagcaagtcgacctatcgtccagctcatcatggagccgcaagagttccaatgctcgaggtgcaaaacaggtgcgcattcagatagcgaatttggtttgaaccatggctgctatttgaaagtcggaagaatgcgcattgctgccaatgtatctcaactaacgctcaccaacgaacatttgtctgcaggtctcactcttgcgactggtctcgcgtcagaacgcctggatgctgatgaccttgaggctgaagacgatgtcgttgatgaacaagaagcacagcatgctggagtttcgtcaattcgtacctgaggaactacttcgtggccaactgcacttccttagtagcatatatatctagctcttcaatcactaattactatcatgtttaactatctaaggattcattcattatggtgctttcaatttctgtaacaaagatcgaagagtcctgctgtccaaatatgcgccctcagtcttcagtgcttgcattgctttacgaaaaaacagatctatttgaacatcatttgagtcatgtttgaaacaaccaaccttgtttcaaacctttttcaaggggcacgttgatgacggcttgattaagatctatttgaacatggtttgagtcatgtttgaaacaaccaaccttgtttcaaacctttttcaaggggcacgttgatgacggcttgattaagatctatttgaacatggtttgagtcatgtttgaaacaaccaaccttgtttcaaacggatctcaatcggtaggtttgatggccgactgattcaaaaaggaaacaaagatcgattgaatcaaggttatctccgattgaatctaagaatgaatcaaacgaacaattcaaacaggattttctttgtttcaaacgaccctcaaagaagtactaaataccgacgaatactccttacaaaagcggtcgacagaagatttgtggtcattcttgtgccgaactgttttgtatgcgcgcttgcgggtgtaaccaagtttgcgtgtgtagcgtccacaagtttttggagacatcttggagacatcttcgagacagagaagtcacaccctctgcaagctgagacattgtcaagaagggattggagtcaatcagttgttttatagcagccgccttgatatcttctgtaatgacactcacccttttcttccgatgatgttttatattggctttggtgacccaacgttggagtgatgattttgatactttgtacagcaaactaactttcctcaaactacgattatagtatttgtagtgaacaaccgcgcggtgtcttatctcagcatcaatcatgataacgtaggaaatgtgtataaggaaatgtgggtgcaatattatatcaccaaaagaaaaagaatactcaccccctcttaatgggggtagtgcaagacaaaggagatgacgatattaacatcagcgtcgtcaagaagacgcttaattctctgtgcatggatgtatcgaggcatcagatctcctcaaggatacaaagcatggtactcttaatcaaccacgcagttgcagaggcaaacttattcgcaaactttcatatcacaagatgcctcgatgatggatactttgacgtcaagcagttaccacacctggatcggaacttttattacaggtgcctccttgcggtatcgacctccaatgttcgaaaggatactctgggccagagcttcaatgataccatggttgctttcgacgccctaagacctgcaggctacgtgaaggtggacattcgtccttggggacaagtaattgcagacgtctcaatacaaatggcgacgatggcgtgcaacagcgtctgggcaaacgtggacagggtcgttatcaagtacctgcgcttgaaacatccctctctgaagaaacatttcaagaagattgtcaaagcggtggtccagtacccagaatcgaaaatcgacacaatcatcccagagggcctcgttcatgcgatccatatcacagaggttgtcagtcacttgagggctctctttccgctgccaaaagggaagcagttcaacactagagcgcacctgacaatgcgattgttccatcacgtgcttacagagttgggagaggtcggacgagtggatccgaaagataaaaaaacaaaaaaaagtcacccccgtctgttcagtatccttcctcgcaagaacggcttcacaatttcgtacttcccgatatcgtccatgactttcatgaagcttctcagcatgggtgattcgccactcgagagcgtctctggcaatggacgttacgagaaccatacaatgctgtggcgaaagtactttaatatccaaggtcttgagacgaaaaggtctcgctttgacaaccgaatcctcagcgacggtaaaggggtatccgtccaaatgaagcagaagggtaaagaagaggtcgttgaagaaggagaaaacgcaggctatcccaaggacgcaaatatcgtagagtgcaaggacgcagtgggtgcgctgcgtgtcggagtagaccctggaatgacagatatcgtcacggtagcatcttctgcaggtcgcatcgagtctttcagctcggctcgctttagcgaagttgctgggtacaatacaagcaagcgtcgcacctacaaatggaatgacgagactcaagacctcgtgaagtccattccatcgcctaatacgagcaacatggtcgacctgcaggaccatgtcagagcttatctcaaagcgctcccgatcctcctacaacacagagccaacaaaggctaccgatctatgcgattctttcgatacgttggtaaacagaagacgattgaaaaggtatgcgatgtgattgcaccaagggcacagacgaccgttgttggcttcggcaactggtccaaccaagggtatggtatcagtcgttcatgttctgggcccatcaaagagatcaggaggtgcctctcacgtcgtaataatgttttgttcaaaaacgtcgacgaacgcaacaccttgtaaatgtcacggctgcttccagaggcttgtcaacatgaaggcagacagcgtagtctggcgcggagtttgcaaagagtccccaatcgacgggtctataacttttgagaagcagaagatggtggtgaagaacgtcaaggtccacaaagtactgcactgtagagacagtgtcaaaagcgcatcatccaatgtgcgctgtggtgcaacctggaaccgagacgtgaacgctgccaagaaccttcttctgcttctgacaacgtggatggacgggagagagcgacctgaggcattctgtgttccctcgcctccccccaaaaccacagtttccatcgaggcgagtgtgagcgctaaaccgaccgacccacctgggtttgtcagcagcttgccttgttatcctttgggccagcttaaatgctgaaatacagatatgaagggcaaaaatatgtactcgcctttagctgatctacccatttggttcaagggtcaccggtagggtgtcccacaaattgcgtctccgactgtaggttagaggatataagggtagcttaaattcaacggataacacgatggccaacaacattttaagacaaatagctttctggatcgggtgcataggaatcaggacagctttcgtgattcttgcctttctcgcgacacctaggtatctaaggggtatgggcgtcttggcccttgtgccagcaatagggttctttgtcctatactttggaggccttcgtaaaacggggatagaggtggcgccagatggcgggaagatctggtggtcgaaacttcgccctgttcatggcacgttatacctattgtttgcaatccttgcgctctcccgctggcaaagacatgcatgggtcgccttggctgttgatgtattcatcggtgtcctcgctaaactgtgtttccctatgtttttgccaggggtctcgactcgactcgactcgacacatgtgccgccgtgatgcgagtggtctcgacatgatgcgagtgtgactcgacagtatccgccgtccgttcgtggcctaagccccccctcacccaaatcctgtgtagtgctggcggtacgatcgatcgccggacaacgccttgcagcaggtcacagcctcgccgtcgcttagcggattcagataaatgcagcccctgcctcaacaatcaccagcacatccctttcggggaatatcgcatcgcttcgatattgcgtcccatgctttggtcgccttgccatatttcacgccttccttcgagcaatggacggcaccgcatcgcgcggtgcttgcgtgtttatcgaacgagctcatggcggttttggaattattggtcagcctcgccatgagttcataacgactatgacatttgctctcgatacaagatttgaggggctttgaagttttctcaatgacttcacctgcagccgatagtttatcgttgcattttgttacttttctgcacttcgatgctttcatgcggagcgcgcctgcccactctatccattcatcaagcgtccgttattttttgtcagagaccagacggacagcctcaatcttcataaacgcgacgaactcttcggccgtgtacgagtcgtccttctttccgagctgacggggacctgtgtagcacacgacatcagatcgactcttcgtttctttttttgcttgaaatgggcgttcctgcctcccggccgattttgactggttgcgaaacatggtatggagcggatttgtgattccttggtgctgatgtctcaagctagcgagtcgttcaggaggctctaaatcctgattagaaatttaaaaaaatctgccgggaggcaggaacgcccattttgaggtagttttgccactcgtggcattcaatgaatgaatgaaagtgtatatatttgaaatgaaaatccgacaaatatcttggatgcgaaagtcgcctgggtgtcatgtgtgataatgaatgaatggacggacggatggggggcatgcgaaagccgccgtggcgtctgtgctgtgtttcggtcgctctgtgatgtgactcgacacaagttccgcctgatgagagtggtcgctctatgactcgactcgactcgacaggtgccgcctgatgagagtgttcggtcgctctgtgagtcgacacaggtgttgcagcaggaaaactggcctgcataaggattgatgagttgagacagttataattaaacgctttgaatacatgagtcacatgacaggcacatgcaggtgttgtcattcatctttcttgcttgatcatgatcccaagtcgtgcgattggtgtgacatcgaggcgagcaaatgggagctgattgcgaatgtagcagcacttcatggtaaattagagtgtctcgtcaatgcatggcatcatggacaatgtttcatcaatacataccgggtcgcccttcatgcagcttcatgtggacaaatggcttgtctttcattcttgtttgatcagtgcggagcagcccatgctatgcatattcatgaacatgaacatgtggagaatgatgagctcatggggctgagcaatgttgcagcattggggggaaatgttgaatgtctcatcctggttaatagaaaaggatcccctatgcatccttctctgtcaacctgggctttacacatttgtgccaattgcgattgcacatgcaagggtggacatgctgcatgctcacggtacattcggagacgcaatttgtgggacgccctaccggtgacccttgaacccaatgggtatatcagctaaaggtgagtacatatttttgcccttcatctctgtattccctcatggcacgttcccttgggggtacatgcagcagcaactcaagtaaactaatcccaacatgtgccgccgtgatgcgaaagtcgctctgtgatgtgactcgacacaggtgccgccgtgatgcgagaggtcggtcgctctgtgactcgacacatgttccgttacgtcatgatgcaagaggtcggtcggtctgtgactcaacacacgtgccgccgtgatgcgagaggtcgccatgtgactcgactcgactcgagtcgacacagatgccgacgtccttgatgagagtggtcgccgttcctctaaaaacgagtgtaacgtagtggcctaagccccccctcacccaaatcctgtgtagtgctggcggcggtatgccaacctggatggtgctcctcaagcgtatgccatcatccgggcatggttcacattagatggttacaacttagtccctgtagaatggtccaatcacttccccatcagggtatctgttgaatccatacaaaaaagcacgtggctcttcgttgaccaaggtttgaattgcaatgtgtgtgtggaaccgatgctgattatctaactctaagtggattataagcacttcatgtgcaaatggaagccttagtgtaatggcgttggaagttgacgtaatatcttggacaaacttggaggcccagtcttggtccataacatgcatagaccggtccataatgttacagtttgaatctctatgtagtttggccataatatgtgttttctcattgaaccgcatggggcttgaggagtggcacatccaagatgaagaggcaatccccatcgatgctttcgggagtagtgtgtagtgtgtctaatgcttgatgtgaactcccctccggtcgcccacccgctcagttcctcgcggactcctttgtgggggctccgctccggtcgcccccggtcgctccgctggggggaagaggtgaaaggggctccgccacttgcgtggtgtgtgcatcttattcctcttcacttgcgtcatcatgtcatgcattatcatcatgtcgtagccgcaatcccatatatccctgttgtggtcgttcattttgaggcgctctatttgaacgatatgatcatggataataccaccatcactgtccttgacaaagacgcagatcatatccactttgcggacacaatctgatgcgagcggcatgatggcaaccctaaacattttacattttagaaattcaggccaaaaagtttaagttgtcgtcgaccgtgatgtagtgtttggctgtcttcacactatttagtgcacctgcgcgcgtgctgctgtactttctccgatttctccgttgagttgatgacccacctgggtgcaatcacaatcacaagcgttgtgtgttatactaatgatgttgtctaggttgttcaaatggctatagagacaacaaagcaaatcacacctgttgttgtttcgcagcagggctacggccacatgccatggccgcagaacaacaacacttcacacgatttggcacacacggcaagaatcaacaagggcattttgtttatgggaaaagatctgttccgcaatatgtctttgtcgacagctcgcagcatgctaagcacataagcaatgactaatatgggaaggttgcaacagttgactcgtttgctttccaaaaataagtaaacctaacagtgtataaggaatttgcatgtaatgggcgttcctgcctcccggccgatttttttaaatttctaatcaggatttagagcctacggaacgactcactagcttgagacatcagcaccaatgaatcacaattccgctccataccatgtttcgcaaccagtcaaaatcggccgggaggcaggaacgcccattatgtactaaatatcagaatgccatgtatggcaaccaacgcttctgtaaaattggcaaggcctccgatgcccttggtgtctccaggactgtcctccgtcgatgggcggataatggcacgatcagaacgatccggactccaggcaaccaacgtctctttgacccaagcagcatccaaggctacctcatcgagcaggaaaaaaaacccagcagtcgtcaagtcattctctacgcacgtgtgtcctcacacaaacaacaacccgacctgctcagacagcaattgttcttgcaaacccatatttctgacaaacattccggatgcgagcaagtcattgaagtcaaggacgtcggatcagggctcaacttcaagcgcccaggacttttacgagtattgggacttgtcacggcaggacttgtatcgtcaattgttgtggcttccaaagacaggctcgcaaggtttggtttcgagctcattgaatggatttgctcgcagcactcctgctcgatcatcgttctcgatcaccaagacggagcccctgaagacgagcttggaaaagacctcatgtccatcattcaagtatattgttgccgatggaacggtcgaagacgctacaaagtcaaatgccaaacccaagttgaggaacttaaagctgaagctgaacccaaccaaggctcagaaatcgatgctggcagagtttgcagggtgcagccggttcatgtacaacaaggcggtggcaacacggttgggcgtcggaagcactcacaagtctgtcttccgaattcgagacaggtatgtgacgaacaaggtgaggggggaggggaagatgccaaacccgtacttcaagaatcgccaatggttgcttcagtgccccaaaagcgtacgccaaagtgcaatcaaggctgccttggcaaacatcaaggcttgcttttcgaatctgaaagcaggtaacatcaagcagttttcagctccgttcagacggaagaagacagagcttgagaggggttgggccattgagatggatcagaagaacgtttccaaggatggcgacaaactcttcatcttcaaagacatattgggcaacatgcgctacttcggtagcaaacaactccataagttgatgcctgaggaaaacccgacccacgatccaaaggtccaaaaatcccgcttcggcgaatatttcctcgtcttgtctgtcgctgccagggacaggagggcagagcggaagcctgtccatccagacaaggttgcaactgcatccatcgacaaaacaatggtcacgtactcaccagagaatgaggaatccttcatgcttggtcagggacaggcatccgaccttgtcaaactcctgctggttcatgacaagctgcagtcaaggttggatactgagaaaaacttacgatcaaaagagaggatgaagataaagatgcagatgattcgcattcggaagagaattttttacctcaagaaagagtttagggaccagacaacaaatttcttggccgctcgctacgatgtgttgtttgtacctcaattggagacggcgaagatgacaatcagggctgaacgggagctgacaaccaaggttgcccgtcagatgctgactttgagccactctgtgctgttcaatcggctgaaggagaagtgtgaagagtacgggacagtgttcttgcatgtgcttgagcattacacaagtcagacatgccctatgtgcggtttcttaaacaagtgtggagagacatacacctgcaagaactgtcaattcacctgcgacagagacattgtgggggcagttggcatcttcctgaaggcagttcgaacagaaaatccctgttcgtaaaggacagcatccccgggggagttgacccctatgatacccctatggagaattcattgtctatcttactacatgtcccccggacccccggatgtgtaataagaaattcataggttcgaggatatacgggtagcttaaattcaacggctaagcgaacggcgaacaagataagtaaacgtgaacccttggttgagcttgagcccttcatgtcagcgccacaagtatacctcgattcatatgaattctggggtgtatacaacacttgtttccgacctgaggatggatattcatgccacgaagtgttcgtgcctgatgttgactgtgcgattggtgcgggcggcacaatggaggaggcttttgcagctgccaaagaaaagctgactgacgtggtcagtgatttcatgtatcgcggcgaggccatcccgccgccatcactccccgccgacatcatcaaccgcagacagcaggacaacgatcaatttgccggcttcgtggtcaccttcgtcggagtcgtcattgtttccaccctgccaagtttatgtgacaaggcaggccaaccacgtgaactgctgccgtgccatgacgggtcgccgtgtgactcgacatgatccgccgtgacgagagtggtcgccgtttgacgtgagtcgacatgatccgccttgacgagagtggtcgctgtttgacgcgagtcagcagctcaattccactgccccactccgtggggcccgcgatttccccttaacaatgcaatatatttgtcgaacaggagtctgcttggcatgtgatcaccatttgcgacaccctgccaattgcaagtcatggactgaattggctaacacgttcactaaactgtgatatacagtttgatctggtcgtttacagggttgaactgctcaatttgttatcttccataacctcatgttgccatgcagacaacataaggagtaaaaagctgtgcatatataatcaagtatgcctttcaaggtgggttttaaaccgttgaaaattggagtgcaatgtgcaaggtatgccgatgtgcgtcaattgtttggattttctgaccgtttgcaggttgtgtttctacaacgcaatgcgttcgaggcgtacgtcaaggacgatagcatacccttagaccctcaagaagtgtggcatgagaatattcatatccgcaaatgcaatctcaaaggactcgcctgtacgcttatgaggagactgacactgttggagcacatgcgagcatgggagaacaataaggatggacctagacggggggcatgcattgttgagatttatgtggagtggaatgtattagaaaggagactaacccgcctcattgcatccgacgctgttgtgggcgattccgtgatccgcttctgccaaaacggaagcacttgtctttccagacagttggacccaaccctattctcatcaattccacctaacgtgatagagaacataataagtatggtaggggagccagacgcgaatgcgctacgcgcagcatctcctaccatcgacgctcagtatgtgccgacgaagattaggaagatgttcgtcgttctggaccagattgctgtttagttttgtagtaagcgtagtagctgaagagtcaggagagtgggggcgtgccgaatccgggtttaatatttaggagttcttgacacggttatcttggttgttcgggcgaaagtaatggcacagagttccgcattttttgtgagtagatctgttcccttttggtctgctctgcggcccgcgattcccctatcgataaactagatcgattactagcagagtcctgcttggcatgcgatcaccattgcgactactttaccgtgtgtttcctggatctgtgagtgctcccccaagagtatcgacatcgtcccgccgtttgatatacgatgattttgtgcgcggtgatcgtctgaatactattacggggaacgcccattacgtgcataatcgtccgcactgcgtgtagaccgtgggcgagcagggagtattcactttatcattgtatttcatgataaagtgtgcttaaggaaatgtggtgcatgattttatcaccaaaagaataagaaaggtaaccataattctaaaagaaaaactaagatgaacgcttgtcgcttggttattcaggcatccactcaccccgtgtctgatatagatagagttgtttcgcgtcaagactgctacatacatgtcgatctgaacagggagatacagtcggagacgcaatttgtgggacgccctaccggtgacccttgaacccaatgggtagatcagctaaaggcgagtacatatttttgcccttcatctctgtatttcagcatttaagctggcccaaatgataacaaggcaagctgctgacaaacccaggtttagcgctcacactcgcctcgatggaaactgtggttttggggggagtccggccagcgaacctcctcaagacactaagctccgggctgtgagcatgtgttgagaggaacattacattacattacattacattacattacattacatgttaaagtctacttgacaccgcgagggtgtatgagactctgtgctttaaacaaaaagaaaaagcacccacaaagcaaaaaaacccattacatcaggggtgtgtcgaggacaaacaaaccaaactcccaaccaccgttttggtggcgtaggtattaaaccccttagagccggacccagatctcaaccacttacagtggcggaggtaagaagctaacaaatgagaagtcacaagaagaagaaaaaaagggatgataaattacggtgccactaagcagtccagggcttcctgtcttgctcttctacaagtagaaagatagtcggctaggttgctccaaaaagacttagtgccatttccattcataaaggttctgaatgtggaatcgcagaattccacattccatacggttaagttggtatcctcatggacatgcctataaatatctgtaaacagcttctggtagcggaggcgaatatcattataaaaagggcactcaaacatatgcatttcatcctcaggtttttggaacccacacattcgacagtgtctcattgagcgagggatgtgtgctctatccaccaccctcattctttctgtgttcagccaatgggaacccattctaaactgtgctatagaacgaatctgatcctgcttatgtaaggcggatgtaaagggaatcaagccattctcatcattgctgttggctgcgaaccatttttggtatcggaggcgtttaaagccaatccttctctcatcagggatgtctctaactgcattggtgtcacttgggtacttaaacctccatgactcaaaaacttcagacataataccttcgacatcgacagcctccaaaatgttgatgtttttactggatcctagcttgtggagagcacaacgcaagtcatgaacccagccagtgttggagtcaaaagattcctcaagagccattctaatgagatcctcaggttctttatgtatggtcttgttccagaagcgcaa

SEQ ID NO: 308 - DNA, 21059 bp, unidentified
  misc_feature 1..21059: note = Fanzor polypeptide
  source 1..21059: mol_type = other DNA
gacaagtcaacgtgttggcttacatcgtgcgcatcaataatcattttcaaagcgttcctgtaatcaaataattctgctacatctggaattattgggcacgcgcagcgatattttcgcttgagcaaactgaacacattctcaatagcgttgaactctggactgtaaggaggtacaaagagcgggcgtattcctacagaatcgaacgcagagatcgtctcctttgaatgatggaactggatattgtcaaggacagcggcagtaccctgctttacatgtaactctgatacaaactgtacaaagtcgactttcttgcaattgtgatcaaggatcttgtaatgaacgatacctttgacagaaacggcagcgattagcgtcaatttggacattcgcaatgtccgagaaatttggatatttaaacgtttgccgcgttggcagtaccctctgcgacaagtgtcaccgatgtaaaaacccgcctcatcaatgcttatcaaatccgatgtcagaacggccagatactctttacaaaaacttttgacagaagatttgtggtcattcttgtgtcgaacggttttgtatgcgcgcttgcgtgtgtagcgtccaaacgtttttggagacatcttgatagaggacagagacgtcacaccctctgcaagctgagacattgtcaagaatggattggagtcgatcagtttttttatagcaaccttgatatcttcggtaatgacgctcgcccgtttcttccgatgatgttttatattggctttggtgacccaacgttggagtgacgattttgatactttgtacaacagactaactttcctcaagctacgattatagtatttgtagtgaacaaccgcgcgatgtcttacctctgcatcaatcatgataacgtgcgcgtattagggtataaggaaattgtcagttagtatggtatcaccaaaataataatcactccctctcgatgggggtggtgacaaacaacggagatgacgacgatctggacatcatggtggtcaagaagacgcttaattctttgtgcatggatgtatcgaggcagcagatctgctcaaggatccaaagcatggtactcgtaatcaaccacgcagttgcagaggcatacttattcgcaaattttcacataaccagatgcctagatgatggagactttgatgtcaagcagttgccgcacctggattggaacttctactacaggtgcatacttgcggtctcgatatccaatgtccgaaatgatacgctggaccagagcttgaaagatagcatggttgctttcgacgctctcaggcctgcaggatacgtgaaggtggacgttcgtccttggggacaagtaatcgcagacgtctcaatacaaatggcaacgatggcgtgcaacagcgtctgggcaaacgtggacagggtcgttatcaagtacctgcgcttgaaacatccctctctgaagaaacatttcaagaagattgtcaaagcggtggtccagtatcctgactcggatatcgacaaaatcatcccagcgggtctcgtgcatgcgaacctcatcaaagacgttgtcagacgcctgagagatctcttgccgctgccaagggggaagcagttcaacactcaagcacacctgacaatgagactgtttcatcacgtgcttacagagttgggagcggatctaaaagagaaaacaacaaaaaaacgcccccgtctgttcagtatccttccacgcaagagcggcttcaccatttcttacgtccctatatcgtccatgacactcatgaagcttctcagcatgggcgattcgccgctcgagagcgtccgtggcgatggacgtcacgagaatcattccatgttgtggagaaagtacttcaatgtccaaggacttgagacgaaagggtctcgttttgacaaccgaatcctcagcgacggcaaaggggtctccgtccaaatggagcatcaggtgggtaaagatatcgctggagaaggaggaggagataatgcggggtatcccaaagacgcaagtatcgaagactgccaggacgcttctttgcgccagggtgcgctgcgtgtcggtatcgacccgggtatgacagatatcgtcactatagcatcttttgacggtcgagtcgagtctttcagctctgcccgctttagcgaagcagctgggtacaataccagcaatcgtcgcacaaacaaatggaatgccgatacgcaagacctcgtgaagtccattccatcgccgactacaagcagtatgcgcgacatgcaggaccatgtcagaggttacctcagcgctctcccgacactccttcaacaccgagccaacagaggttaccgatcgatgcgattctttcgatatgtgggcaaacagaagacgattgaaaaggtatgcgatttgattgctccaaaagcacagaagaaaacgattgaagaaaaggtatgcgatgtgattgctccaaaagcaaaaaagaccgttgttggcttcggcaactggtccaaccagggctatggcatctgtcgttcgtgttctggaccagtgaaagtgatcaggaagtgaaagagatcaggaagttcacgtcgtcagaatgttctgttcaaaaacgtcgacgaacgcaacacttcttgtacttgccacggctgcttccagaagctcgtcaacatgaaggcagacagcgtcgtctggcgcagagttaaaaacgagccctccgccctcatcgacggggctcctacaacaacaacaacaacaacgtttgagaagcagaagacggttgtgaagaacgttaaggtccacaaagtactgcactgtcgcaacagtgtcaaaagcgcatcatccaatgtgcgctgtggtgcaacctggaaccgagacgtgaacgctgccaagaaccttcttctgcttctgacgacgtggatggacgggaaagagcgaccagcggcattttgtgtgccctcctcatcgcccaccaaaaaccacagtttccggagaggcaaatgtgggcgctcaaccaaccgacccacctgggtcagttagcagcttacaattgttatcctctgggccagcttaaatgctgaaatacgggatgaaggacacgaaggattgggaccttgatacaaaacctttagctgacctacccattgggttcaagggtcaccggtaagggtgtcccataaattctgtctctgactgtactcagaattaagagcctccggaacgactcgatagcctgagatatcagcaccgaggaatcacaattccgctccagaccatttttgcaaccagtaaaaatcggccgggagactggaacgcccattacgattgtgtttcatacagctccttcataacgtttcgaaccatgtctggcaacacgggacaagatgcagtgtccctcccatttcatagttctttggagagctcgtccatccacaagtgctcctcatagtccatgtcatctccgcgcatggtctcactcttgtcagggtggatgtgaacgatcacgcgcatgatgtctcggtgagtccatgatcgctccttccaattatggcgggcctctggagacaaccagtacttccaccacataatctgcaacggcgtgaccaagccctgggaatcgccataggacaggtaagccgcacatatctcgcttcggttcaacgttgataaggacatcgatggcgacattcctagatcagtgtcatggcaccgctcctcccggtcatggtaccgctcctcccggtcatggtaccgctcctccctgtcatggcaccgctcctccctgtcatggaaccgatcctccctgtcatggtaccgctcctcccggtcatggcaccgatcctcccggtcatggcaccgatcctcctggtcatggcaccgatcctccctgtcatggtaccgctcctcctggtcatggcaccgatcctggtcatggtgccgctcctcccggtcatggaaccgctcctcccggtcatggaaccgatcctcctggtcatggcaccgatcctggtcatggtaccgctcctcccggtcatggaaccgctcctcccggtcatggaaccgctcctcctggtcatggaaccgatcctggtcatggtaccgctcctcccggtcatggaaccgatccgcccggtcatggaaccgatcatttaggtgctcgttctcgcaaactgatgatgagtgatgcgaacgttcacgcctcctactagtaccagttgattcttgtcgcctggtgctagtagtgctgcttcggtgaccaccgaatccctgcgcaatacaaacaaatgttgtggtgagagatattacagggattcatccagctcttcggaacaatccagctcttaggtacccacccggtgggttggatagagtttcatagggatgctgcccactctatttacgttgcgcgctctgtacatgggaccgaatgggagccgagaccccggcttcgaaggactactggttgtgcagttgaatcgcatgttgtaagctcttgattgaggattcgttgtctatcttttgcctaggttcatgcatttatctaatttttgcatgtacttcacattgtagtgctgggaatgcggtgtgtgtacattgtggtcgcgttcatggctcatgtacactcttggaaatgccgttgaattttagtgtacccgttttatgtattgtaagaatctgccttgttgtgctctgacaggttgagttgttccccaattccaccgttactgttggcatacttagtcggttttcctttggagtatactgatgagacatcctcttgattgagagcgcggttgtagtaaatcatgtttccgatgcggttgttcgagataggatgcttccctgggaagaggtgtagtcggttcttgttaggtcgcatggcactggcgatcttctttgtcgcatacaacgtgtcgttgatgtatgcacggatgatgatgccctcctcgtgagtgctgatagcgacgtggtcttcgaatgtaaacgtcacaagcatccacttgtcctgtcccaatttcatgacgtttctgcggaggctgctgttagacgtgtttgatacggaccggataacgaagcgctcgtctgggtcatgaattgtgttcaactcgacctggaaagaatcgtaggttggtccgaaaagaatacgtggacacttcgtagttaccgtccttttattctctacacgctcattcacaccggtggctacactgaaatctttgtcggtaaagcgaaccattatgtaatcgaagacggtagggtcccccttcaaaataatgtccctgaacttgacgttatgggaatcggtgttgcgcatgttgatccaaaattggtacgtaaactggatgcctcccttgcggttgtaggaaggacgaataggcatgtaattggacgcgtattcgttacttgtcgtgaagaaacggttgtgaagctctgccatcgagatccagccgttcatcatcaacacttctactttgtggtcaacctgctttggtttcggcatcaacccgtccttgttcgttgcaaacaacgaaatcaggtatattaagtacactacaaatactccggcgacaatctgtaacgcatctttcaactttttgttcatcttacaaggacgaagttcccatacagttgttttcatatttttttggagatcaccgtgagggaaaaatgttgtgagggacgaacgagtcgatgcacctgaaaggttgttgcgactcgattggacggcgtttgatagacaatatcaaatcgttatctccatgcacaacagatggaatgggacggacatccctcgatgaagtgtctctgaattgtttctgagtagtagacgatggaagattaactgtggttggtcggatctcgtgccggaaagaggccttcgacttgtcatgtggtagccaactgatgtccattgttttcgtggcgttgacgcctgacacttcgaaaccgttcatcacgaggtgcctcatagaaaatcggatgcatctctcgatgtcaaacatcgggtaaccaaaaacaacctctggaatttcgaagtgacacgtatacattcctacagatgcgcaccgcttgatccgggaataaacacgttctagaactaccacgaagacttcacgttgtttccgttcacgctccttgctaatggtggtcaaatcccttgcagacacctggttcattacaatgatatcctgcattccgctttatttttatggaacaatacattgaaacacttttttttttatgattaacgaattcacgatgcacagaacgcgtggcttccattgcttgtaaaaaaatcgtgattcattttaaactacttggagccgcagtttaggtagcactctacaagtccctctatatcatgtctataacatcaactgttggcaccgcgctcaaaaattcaatcctcgctggactatctgtcgtcatcattcactttgtttttaagaacatcgcgacttcccgttcgtcagaacaacaacgcctcatcattccgcaacactactatcccgaacgcaacgacaccaattacaatagaagctacatcaccaattacaacagcgacattggagaaaggtcagatgaggaggaggacgtggacatgataaattacatatacggtgacaacaacaaagaacaattcatggaatcgaccccaccatcatcacatgaaacaacaacacaaataccttccaaaacactgtctgccacaacaaaagcggactcaaaagaatcttcttctccactagggcatgttaatgcgtttgaaggtttcttcgacgatggaatcttggcatcagtgtcttccaccccatgtaaagatatcgcgaccgcatcactagacgcattgttcgctcctctgaattaaatcaaatgaagtccttaaacagttgttcaagtacttcatggttgtatcacctgtaacctcgacttccacgcattcttcttagtttggatgagtgccgcgatgtgacttcttctggcgcataagtacgttttgtcatcgctaatactaatactactaacgttactactattagtagcagtaccggttgtatcattagtagcgaaaccggttgtgagaagaatgcggctttcaagggtggctatagaaacgaacgcttggtcttcttgaacgaccggattgcaagaatcacgcgcaatgataatatcccgttgggtaccgatgatgtcctcacggatgatcttatcaagtgtattggcgatatctccccatgcgaagtctctgacgaggcgtttgcgggcactcgccccgtgcctgcacatgaggtctctgtccccgtagtacctcatgatggcatcggcgaagtcgacaggcgcggagagttcggcctcgccgcccacgccatcgcgagcggtgtccacgtaaatggagatcttgggcttgaccatgagagcgcatgtctcatcgaagaaatgcaggaagccacccaaggcaggcacgacttgagggattcctatggccgcctgctcaaagttgcagagaccgaatccctccccgtcgcacgtgttgattccgatgtttgcgacgttgtacaggaagttagtctccatgtccgttaacatctgcgggtgcccgggaacgaccaatcgatcgcgaacaacctggggggcgtcttttactccccgcttgagtagctctcgctcgaagagttcaggtatgttccaagcaccggtcagcgccgtaccgactacgagtcggatgggtgcattggggaggcgggcgacgacctcggcgaacgcctggagacatatgtcccaccgcttccgcggctggttgcggtaaaggttcaggatgaggaatgagtcccctggcagtccgaaaaaacggcgcgcgaggtctttgggtacgggaaagtatgtattggggttgaagccgtgggggagggagaagcatggaagccgcatcccctgtccgatgatgcagtctcgccatccgggagtgaaggctagcaccgcattcgcgttatcattcacgtatgcgaggagatcgcggcgctgtgataggtacacctggtctatatacgcgatcactttgaactcggagcggttgggtgcggcgcacacctctctcaatatggtggtcaggacaatgaggtcgttaaaaatgatgacaacgtccgggcggatgcgtgttacataatcgcgtgcgcaattgaccccgaacccttgcgctcgtgggatttcgtttgctaatgcatcgaacacgatcacgttcgcaggcacgtccttccgatggcctgggtggttgtgcatgttctggaacccgaagatgtgaagctccatatccggagcattccacaccttgctaatctcatagacgaccttgctgtatccgttgaactgattcggatgggttccgaagatgactaccttcatctgtaggtgcgttgttgttgttgtaaatgcccaacaaacaaatatctttgtttcctccgcagtctttacaacaaacaaaccgaaataaccccctaaacttcagaccaatgtaccatgatgtctttgtgtaagaatcaaatgtactcgagccacgctttgtgctccacctcagggacgcatgcgtcttcgagggcttgccacacaagcggcaccgtctctgcaaggtacgtatcggtgtcattgccgtaaacggacgcgcttcggttacgcaaaaccaaaatggtgttggacaactcctcgttcttgcttagccctacgtgcacgccttccacgaatccgttaagggcgttgaccatgcgagacacgcgcccggccctgcaggtgcacaagccatccttgatttcctcatgcaaaatatcacgaatcgcatctcggaacatgtggtttagcacgattgccaagacgcatctggcgagcatgtggtattgttcatcctcttgaaaatggcgggtcatggcttcctcatacagctagggacatttgattgtgggacaccttttatttgggggattcgaccaattcaagctttgtaaccgatcttgtcaatacagatactgtcttcaggagattgatacaaaacattcaaggcctgtacagacacagaagttacatgatcaaagtagcatgacaagtcaacgtgttggcttacattgtgcgcatcaataatcattttcaaagcgttcctgtaatcaaataattctgctacatctggaattattgggcacgcgcagcgatattttcgcttgagcaaactgaacacattctcaatagcgttgaactctggactgtaaggaggtacaaagagcgggcgtattcctacagaatcgaacgcagagatcgtctcctttgaatgatggaactggatattgtcaaggacagcggcagtaccctgctttacatgtaactctgatacaaactgtacaaagtcgactttcttgcaattgtgatcaaggatcttgtaatgaacgatacctttgacagaaacggcagcgattagcgtcaatttggacattcgcaatgtccgagaaatttggatatttaaacgtttgccgcgttggcagtaccctctgcgacaagtgtcaccgatgtaaaaacccgcctcatcaatgcttatcaaatccgatgtcggaacggccagatactctttacaaaaactttcgacagaagatttgtggtcattcttgtgtcgaacggttttgtatgcgcgcttgcgtgtgtagccaagtctgcgtgtgtagcgtccaaacgtttttggagacatcttgatagaggacagagacgtcacaccctctgcaagctgagacattgtcaagaatggattggagtcaatcagtttttttatagcaaccttgatatcttcggtaatgacgctcgcccgtttcttccgatgatgttttatattggctttggtgacccaacgttggagtgacgattttgatactttgtacaacagactaactttcctcaagctacgattatagtatttgtagtgaacaaccgcgcgatgtcttacctctgcatcaatcatgataacgtgcgcgtattagggtataaggaaattgtcagttagtatggtatcaccaaaataataatcactccctctcgatgggggtggtgacaaacaacggagatgacgacgatctggacatcatggtggtcaagaagacgcttaattctttgtgcatggatgtatcgaggcagcagatctgctcaaggatccaaagcatggtactcgtaatcaaccacgcagttgcagaggcatacttattcgcaaattttcacataaccagatgcctagatgatggagactttgatgtcaagcagttgccgcacctggatcggaacttctactacaggtgcatacttgcggtctcgatatccaatgtccgaaatgatacgctggaccagagcttgaaagatagcatggttgctttcgacgctctcaggcctgctggatacgtgaaggtggacgttcgtccttggggacaagtaatcgcagacgtctcaatacaaatggcgacgatggcgtgcaacagcgtctgggcaaacgtggacagggtcgttatcaagtacctgcgcttgaaacatccctctctgaagaaacatttcaagaagattgtcaaagcggtggtccagtatcctgactcggatatcgacaaaatcatcccagcgggtctcgtgcatgcgaacctcatcaaagacgttgtcagacgcctgagagatctcttgccgctgccaagggggaagcagttcaacactcaagcacacctgacaatgagactgtttcatcacgtgcttacagagttgggagcggatctaaaagagaaaacaacaaaaaaacgcccccgtctgttcagtatccttccacgcaagagcggcttcaccatttcttacgtccctatatcgtccatgacactcatgaagcttctcagcatgggcgattctccgctcgagagcttccgtggcgatggacgtcacgagaatcattccatgttgtggagaaagtacttcaatgtccaaggacttgagacgaaagggtctcgttttgacaaccgaatcctcagcgacggcaaaggggtcgagggtctccgtccaaatgaagcatcaggtgggtaaagatattgctggagaaggaggaggagataatgcggggtatcccaaagacgcaagtatcgaagactgccaggacgcttctttgcgccagggtgcgctgcgtgtcggtatcgacccgggtatgacagatatcgtcactatagcatcttctgacggtcgagtcgagtctttcagctctgcccgctttagcgaagcagctgggtacaataccagcaatcgtcgcacaaacaaatggaatgtcgatacgcaagacctcgtgaagtccattccatcgccgacttcgagcagtatgcacgacatgcaggaccatgtcagaggttacctcagcgcgctcctgaccctccttcaacaccgagccaacagaggttaccgatcgatgcgattttttcgatatgtgggcaaacagaagacgattgaaaaggtatgcgatttgattgctccaaaagcacagaagaaaacgattgaagaaaaggtatgcgatgtgattgctccaaaagcaaagaagaccgttgttggcttcggcaactggtccaaccagggctatggcatcagtcgatcgtgttctggaccagtgaaagagatcaggaagtgcctgtcacgtcgtcagaatgttctgttcaaaaacgtcgacgaacgcaacacttcttgtacttgccacggctgcttccagaagctcgtcaacatgaaggcagacagcgtcgtctggcgcagagttaaaaacgagccctccgccctcatcgacggggctcctacaacaacaacaacaacaacgtttgagaagcagaagacggtggtgaagaacgttaaggtccacaaagtactgcactgtcgcaacagtgtcaaaagcgcatcatccaatgtgcgctgtggtgcaacctggaaccgagacatgaacgctgccaagaaccttcttctgcttctgacgacgtggatggacgggaaagagcgaccggcgacattttgtgtgccctcatcatcgcccaccccaaaaaccacagtttccggagaggcaaatgtgggcgctcaaccaaccaacccacctgggtcagttagcagcttacaattgttatcctctgggccagcttaaatgctgaaatacgggatgaaggacacgaaggattgggactttgatacaaaacctttagctgacctacccaatcaattgggttcaagggtcaccggtaagggtgtcccataaattctgtctctgactgtattcatgcgaattgagaaacgttgaatattccctgccagtggcctcgggtgttaaatgcgtgagacccaaggagccccccccaatactgaggatgagagcgaccgcggcgtcggtcgtttgcgtcaccccatggccgtgcgtattctcgttgtttttccacgtatatcccccatcttgtgtgcgcaacgagagctgcttctcaactgcatcggagtcgtaatcatgcccgcgtttattcaactctgagatggccgagttcagcttggtggtgctcaccaggttgagtcggtgcgcgcaaagcagctcatggatggtgtccttgttgaccatgctcacggggatgttcgataagtccgcgaaccagaggttgtcgttcctaaggaggatccggttgaccacccttgtgaagcacgggaatcgtaaagattgtagacgctgtgtgggatctccttgagtctattgaaagaaagatcaacatatcccagacacagcggcagccccccgcatggctcgaagtgctcaaggcaactgtacgaaatgaccagatgcacaaggcatggcggcaataagtcacgcacggtgcggatggtgcagtgtaccacccaaatatccgtcacgttgctctgaagggcatctggcgggagcttcgtgattgtgacgtctcgcaaagaaacggtcgtacagtccatgcaatcgatgcactccatgcattcctcatgaggacaaggcagctcatcggtgcatgatgtgtaatcgcttggatgaatattggattgggatagcaactcttcgatggtgattccaactcttggatggggattccaaatcttgaccaggcagcaccccatgtttctctaactcttacaaagtgcagtacaggaatacatgacgtgtttttatacatgaatgcaaaacatggaaacctgcccaattgacccaatcatgttccactgccccgtgggtttctacaccaggtgtgccggtttcattttcgtcgactgtaaggattcggttgtcaaagcttttcgtctcaagatctgaccatcacgttcgattataatgtggctcaatttattttataacaactgtattataacatagtgacgagccaaaaaaatgcaagagactactatcgtgtttattacattattgctacttctaataatcacctgcattttcggagggtcaatgcgccaaacaccggtcgttgtttccaagtacccccccaccaatatgggcggcagctatggattgcccatggaggagttcgacgaagaggaggaggaggtctacgaagatgaaattcccaacaatgaagatattatgggtggaggagaccccatggaagtacaaatggatgaaaccgtcgagggtatggagaataatgaagaagaagaagaggattcccgcgaattggtagcccacccccagccatacatctctgaggagtttgcttcttattaattaatcatctgacaactcttgaaacgaagcatcaaccatattccacggatgcaaaaggtcaccccgtagtcttccatgtcgccgcccactcgcaacacattggtatccttaatggagtccagaggtgcgacataaatcgattgtgtagggaggagggatgatgtgacgcaacaactctcgatctcagggtagacgtccaacattgcgcgcatgcgatttgtgatgcagcgttcaaattccgcatcttctatatcgctaatgttcaccgcagatgctccaccaccgaagacacgcaacaaccctttgaggagaacgtccagacaagtcaagaaacactctcgtccgtcaattgcgcggttgcaaagcgtgatacgcaatgaaggagattcatggttgttgttctcttgaaacactagctcggaaatatgagaagaagttaacgtcatgttcatgtggatggtgctctgttgcccacacccaaccattgttctctttacttcgaaggacctaaaaagttttcgtattcgaaagtcgtggaaaaacggaagctgaaaaatggtcgtgcaagtaatggttcaataccatgtcggcacgggaatcaccacccccatcatcgtcgtcgtcgtcgtcgtcgtcgtcctcattatcaccatcgtcgtcgtccccgttgtcgatttcggcttcgttcctgagagtgaacgcgagaaaattagggtcgtaatctggattgagttccgttcggaaccggacccccgtgtcgcgtttcgaggggacgtagtacttgatgtttatcagaatctggtgatttacacccttgaagtcatagagcaccccgtcgaacaactcaaaacggaagctgagtcgactcagtttccctatcgggtggaatggcttcctcacgagcgacacgaagtcgaaacgaaggtgcgcgagttcgctcccgctcgcgagtttgaacactcccagcccggtcgaatagcgacttgatcttccagagctgcacatgtgctcctctatctcggggcatctaagggtgatgaagcgaggccctgcgaggttgacgatgccggggggaccaagtgtgttcatgtacgcctgcgtgtccttgtctagcgtgaggatgctcatgcagcacggaagccccccgcccaacccactccctaggaatatgggctgaaatgtgcattcgtgtatgcatgggactgggcgtgtgtcgtcaaagcctaaaagtgacgcggcggaagagatgaacgcctccgttgacgggtcgtagtttgtgcatgtaacgaaaattatattagtcgacgctttaaatatgattttgttttgtctatccgcagccgccctgttgctggcaaccacgtcaattgagattggtgcgagcaactcttgcatgtacgtgatgagggatgaaatgttataatttccgacgatcatattgaagaagtgaacaccacaagacatgcgcgccgccccattggaaatgatgctatcgaattcggacgacgtcacatgcaaacagacgtaatacacaatgtcgtacagaggcgtgtccggtcctactccactgaataccgactgcaaccatatggtactcgacgggatgatggagaagttcagtgacgtggagtgcgtcgcaagccactctgctagttctcggttggcgggcgagcccgatggattcaccaactcgacgacatcgtccgtgaccgcgcctcccacgtttgctacgttgaacacgttcgtgttattcactgtctcgcgactgggcctaaacgggacgcctgagaaggagtacctaacaaacacggcgtgtgtgggtgcaaactgagctgtgtaatcagaggcgacaccttgttgttcatcaaccttatgttgcagcaaaggatgcgcagatagattgttgccatctactgtagctaaataatgagaggggtactcgtcttgcacggctttatcgaataggggatgctgtgataaggtctcaagctccttacgtacatcgttgtgctttttcaacgatccctgtaacacatcgaccgtgacaatcctcaactcattgttgtgcgaatctacattgtacatcgtgcttggaatagcagcatcgagtatgtccagtccgaagacatacttgacgggttcctcaaacttcacaacataatccgacggtgtgcgattgtacatacggttgcgtttgcttgaatctttgaacaacgtgagcgagtcggaaacagaattctgaacaaggtagtcaacatcctcaatgggtatcgttgggtcagaggtgctttttacacaaacaaacttaagaaatcatgttgcgaattctttaaccgataaaaagttgtagatcctgttgttcttcaatacatcaactccgaacaggaacactaccacattcagcaaccgcgcacgtccaccctccatataggcacatttaatgatatcattcacaatcaatccgcacggcgtgctgtatacaagggtatcttcggacattgcgactaacttgcccagtctatcgtatgtctgaatcaaggatcggtcacacatctcagtgtagagacgcatcaaactcaactcaacattatatgaggcgtaaccgccatcatcatcatcatcatcatcataatccatgttgccataaaactaaaaacggaagtcctgatcacttactctatccacaacctgtatgacttggaatgtctttacaccatttttttgaaacaaatgtgaaggatgtggtacacacgacgcgaacatcggactgctcaagcatcctttgtcttgagtgtggggcagaaggatacggcatcacgagtgctaccgacaatgtccatcgtgtcaggagactgaatgtctggtaacaaattcccccaagtatttgaaattcctatgaatgctacaagcgatgggaagcatgtgtggtatgggaaatccgaatcaaaaactctacgagacgaacgggtgttcagcacggtcagcaatggcatatggaactctcctacggatgtggagcaatctgtgttgtgtatgtccagaattgcaggctctctatccctgcaatggacatcaaatgcatgtctgcgcagtacagatcctgaagcgtgttcctgcacacaccggtcctaaacggaacgagggaatcgactgacgtccccgatatgtttaacctcttcagattggggagtgcggcgaacatctcgatgtcctcaacatcattgctattagagcaggacacatgcgccaaattcgcaaaggacatatgggaaagactccactgggtgccggctcgaaacgaaggtatcttcaccgatagatccgacatgtttgacaccactgccttgaactgcttgctcacgcacatcaggcgcaccaggtaccccatgtgcatctcatcacccttgcatgtagaccatgatgacacgatcttttccaagatttcgtccgggaagaaaaattccgccgagaccctctcatgtacatccacgtctatagcatccgcagtgtccagatccatggagaaagactcttgagtgtacgggacatctgttgtcataggtgatactaccacagatggtactaccaaaggcgatgacgacgatgtagtgttgtctcctcctaccacaacattggatggttgttgtcctgctagctcaatcacgagctcatcatcatcctcagaactgctactatcggtgtcttctagttggccttctatcgccgcaattgtggctctcaacttgcgcatccctccgtgttctgatggcagaatcgggcgctcgcctccagagagtatctgtagaatgggtatatcatcaagcttgatgcaaaacaccgacacacttgttgcttgtccatccatggcgctggtagcaaaaccattgcgtaaccgcgaatgtatctctgctttcgacaacgggagttctcctatgcgtacagacatcacctccgatccttcgactagtacggacaatacgtgtgcattaatcgagtcattgtttgacgaagagttttcataggttagcacctccttcaaccggttaaggctggtcgctaaagcgtcgggtatcgacatagggaggagtgtggttcaatgcgtgaaatcagtattttatcgttccagaataacaaacatcgcttcgaagtgagtgtattatactacaaaaattagggttagggcaatgatatcatgcggcttttggcgaagccgctttctgtatatcaggctacactcggcggaacatataaattaaaccgctttctggagtgtacgcattgcacatcaacaaagaccccgtgttattttgggccacggtaccggcgatcgcttaaatgcgattgtgtaccgaattgtttcccggagatgccccactgcacttgcggtcgatgcacccgtgcagtttatcttatttctcgctcatttgtttatcgaaccggatatctttctcgatcgtcatgttgtgtattatacgcttgttctgacattcacaaacgcaaagttcaatgaaatgattcctgtcaacatgaaaatgatgagtaagcccattatgctcaagtacgactcagtcgatttatgagagaggtgaatcgaatcttcaatgttgtacaataacataataatgtcttcgacgtcgtcgctctcgctttttattgctgacacccgccgtcgtttgcgatttttgtggatacccattctcttacccaatagcacaccagcttcttctccttcatcttcatcttcagatacaacaggatcggcagatgggtcagtgataccagatgagtcagtgataccagatgggtcagtgataccagatgggtcagtgataccagatgggtcagtgataccagatggatcttcctttgtatgagagagagtaacatcaacgtcatcgctatcagaatctgtaccaaccatttgttttgtaccggaatgcaacctcatcattacaggtaaagtgggacaaacctttactgtggtatcaaataaagtgggacacaccttatactcgggagtatcgagaacctcttaaactcccacaaataagaatcaggtggtggtggagctattttttttcccacattctatatctccaaggcatatgagcatttcctcatgatcgttcactcttgagctcaacgatactaatgagattccaatggctgcgagtatcgatatcgctacgatgaatagcacgacgtttccaaccaggtgcatcttttttacatcatctaaacatttaatttataatcgcactcctcaggtatctgcgcattccagacgcgtaaaaaaaggttcacaatcagaagaaagtcgcaacaggtcaaggcgcaggcaggcacatggaacatcagcttgatttaacaaattgcatcgacaagacagatgtttcgggatgttattgggaaggcaatgacgagtcatgtgtaaccaacgtttcacaacacatgaaaaccctttgctcgtcgcacactcatctcatggcatgcaaaaataagatatcctcatatttcctgtcccacaaatgggatatgttcaaaaagttcgcaaatgcctacgagagcatctattctcccacgttccacgggagcagctacggcgtttccctctacagaccgataagtcggtctttcttcaagctctgggagattttgcacgactttgaaccagacctcaggttcgggagaatggctcaatgtaaaaaacacccggtgcgcgccgcatttcttgctgagggcccaggaggcttcatggaggcgttcaccaagtatcgctacgattacggaacatgcgaaggtgacgagtaccatgggataacactcgtagaccggtcaagtcgctctatcccaggatggagaatcgcacctattcgccggttggcaaggtcaggcaacgcatgcggagtatggctgcacaacggggaggatggaacaggcaacctgtacaacatttgcaacgtcgataatttcgttgatgccgtaggtgggaaaggcaccgtagacttcgtgacagcagatggaggcttcgacttcagtggaaacttcaaccaccaagaagaaagagccatgcaactcgtggtggcacagctgtatacagctatgtgtctgcaaaaacataacggggtgctagtcataaaaatatacgacatacacggtgaagttgggtcagaggatgtgtgcgacgcggatgcttgggcctaatttgcaggagcgtcccgaacgttcctgcttcgtgcatttgcacaatgatgatgtcatcattgcgtttgtagaacgacgactcaacaccgacagttgttctcaaataaagtgggacacaccttataatcaatcatccagactgcagatcgttgcttttgggaaacgtaggggggtgcagcaagttgaagaagttctcgaaaatattccgtgtcgtctctttggtaaaccgttcaaccgtctgagtgtgtccccaaatcagtatcaggtgttggttgttctgttctgttgtgaaaataaattgtaaaacttatttaaacaaacatggcagcattttcgattcgagaggcatcggctattcctggagaaaacttttttttgaatgcgaaccagtctgatattatcatggctgccagtgactcctctagtcgtatcctcatgggcaactagtcgaaccatcttccgaccatggagttatactctaacgtggccaacgtcaacggtaacattctagcgacgcacttaagcacgaacacaatgaattgcacatcattcgacatctacatgccgtccgctggcgttggagagtactccaactacactatgcctggtactatcgctgacgcttactatgccagcaacattctcagtggaaacgccacaatcccgtccattcatatattgtccaacgtcactgtgggtgccgactgggagacatgggatcctgtgtatcccgtgcatgtcaagtcacaggtcaacggcatttctatttttgcgcgttacgagctcgcgcaagtctccgacatgcgcgtaaagaccaatctcgaagtgatcggggacgctttggcgaaggtcaagagcatatccggttatacgttcgaccgcacagacagcgtgatcagcatgcgccagtgcggactgattgcacaggagctgcaggcggttctccctgaagccgtgcacgagcaccctgtgacgggtatgctcactgtagcttacggcaacgtcgtgtccatcctagtgaacgccatcaaagaattgagcgacaaggtggacgcattgggatcttaaatatttgaacatcaacatcaacttttgcgtttcaacttatttgaaaac

SEQ ID NO: 309 - DNA, 21035 bp, Chlamydomonas sp.
  source 1..21035: mol_type = other DNA
ggaagtggggcggattatgatacggcaatgactccgaacatcggagcggtggggatgttatccacagccaattccgccacccgaagaaagaaataacctgggactggctgggggctggagggcataaacaacaacatccagggggattatggaacaagtaatcaggagaatcaagtggcgaagattgcacggtcactagatggaaaaatggaatccggtaaaggaattgtggcaaatacggtgatcacatcgtcaagcagaggttcggctagagcaattagatcacagtgcggatagcgctgatagggatcaatcgctaggactcgctgcccggagtgggcatgtgggtttagacccagaaccagtcacgtgtcaagtggtatcaatcatatgcatcaacacgcaaaactgggaagaaaactgtcgcatatccacaccgccgtcaggccatgcaatgacaccggattcgcgtgtgcgatcctcgccatcgtcaatcatcgtcctccgcggatggtttaaataatcgaagtgaatgaataatgatggacagtggcaaaccacaaccacgcacgtatcggacaacatcaggccgcaacgcaaggaggagcactgtcatcgtccatccatcagatccacatgcaaaacggctaacatgtcctcggcctcgtctcagtccgtgccaaaagacaccacggacacccattgtctcgtcctctggctcctaggcattcggaggataagagcgtagggatgatctctaagttgttcagaaaagaaggattgcgcagccaaaaagcacgacgactgtctcggccttcaaggaaccatctcaaggaagcgtattacaagggcccaggaaagccttcacaatggaatggaagagagtctgcagatcgtctctttgtacagaggaaatactcgtcttactaagcgcaagcggtgcggctacccttgaagcagcttctctcgcttccgatagattagccatacgctgcgagtgcgcaaaccggttggtacgaccggggtatattggcggcaatccccagcagatgcgatccgcggtgcagggcttgagccacacgcttcactcagctcgactcttaatgaggcggctcatgcaaaggaggaagatgtacggatcggaaattcggtccattcgggtctcgaagcgaagataagtaacaaaaaaaaagaaagtctgtcatgtacgggggatcgtcggggtttttatcatgtccgcagccgatcgatttagtctaacaacacggccagccagcactacactcgatgtggttggaggggcttctggccactcactaacgtgggtacccactcggttttagagggacggagctctcaaggacgacgcatgtgtcgagtccgggtcgagtcactgcaggaatcgatccatacgtgggaactgtgctagtcagcaaatcactggcgacatctcgcatcacggcggaacctgtcgtgctcgcactgcatcacgaacctgtgcgtgctcatacgcatcacgtgcggaactgtcaatgacatctcccgcatacccggacggctacctacgctcgtcgtgtcgagatctacagcattctccgctctgcatcacactttggcggcacctggccgagtcgaggtcacaagcgatcagcgaccgcctcagcattacatgacggcggaacggtcgattcgagtcgatcacatctcacatgaggcttattctctccgcatcatggcacacctagcgaggagtcggtcacccatccctcactacattggcgaccatctgcgcgcaggcggcgcacaggggcgatgtcgtcaatcacatctacaatcacatcacagggcgacctctcggtcgatcacgggcggcaccgctgtcgaggtcacatcacagagcgacctccatcatcggcatcaaggaacggggcaccttggcgccgctctccacggggcaacaccgacggtacctgcgtgcgtccggataaaccccgaaacccccgctgcgtaggagacatacgcgaggcagaaggggaaatgaaagagatttgtgctgtgtccaatcaccgcaccctcgagagggccccagatatcatcacgcgtaacctgctgccggtctgtcctgctggacggtctgggcatgtctctgtccgggccccagaatccaaacagactggaccatgcgttggttccagatggcgcaggcaggggagggagtgcagcagaggttccctgataggtgcgccagcgaactaaccaatgcgtctcccatacaggaacatgccgcaatgcggagtgcgaggtggggcgaaagactcgaggaatgggcgttttcggtcctttgattgcagagggcagcaattgtggtaggggaatcgcgggggatactcaagaccaacagaaccgagatcatgtcaccaacaggaatgagccacataaaggatccccgagattcagctaacctagaccagccgagctaccaaagctgccctgcgatgcaggcagaggggagcagtgcggtcgcatcaagctcagaggtaggacgttcgagggatgtacatgggactttaaggagtggaacagtgaccaagtcaaccattgttttaaaccgatattcgcaatacgagaccggggttctgttcctctgtggcttcactgatagccccccacccctgcgacgccaactccactcccaacgcccagaggacctcggcgcatcacacactacatccggggaactgagagtcgaggcaaagataaccaaaccacttggatgagaccacgtcgccacagaaaagagacagcgcgtgagcccctttccatccccacacggcggagcgatgggcgacctggaggtagccctccaacgagggtccactacgaggtaacactgcagcagaggtggggcgaccgtcaggggagcccacagtcacatcagcttggaagatcgagatcgtcagcgtatcggaggacagcaaacaacggcggaaaactgtccgatgtatgcgaggaccaacatgcggcacgctgtccgaatgatatccggaagcggaatggggggggccccgggaacacgtcgagtatccgagaaggcagaacacgtctatacagatacggacccgagcacaacggcggaaacgtcggtgggcgcagccacaccgtccgtaccgtccgtccattcatacacattcaggtacccacccggaatgctgggcggagcatcgtcctcttcaatggtccaattgtacacaacctgttgcaacacaagcagcacagcaaggcacagcaaggcacagcaagtttttaactcctgatttacatctgactattttcattttatgagggggggtgggtgaagtgcagcggcagttaaaacagatgatgatgatgatgcggtgtgtgcagtgtggagggaagctaccagtagtttaagtaatcctttatcaatgtctttaccggtcaacaaatgtttgaagtgctgaacccgctcgactggacaatacattgccagaagatgtagctgaggtagcccatatgttgcccctttgtagaaggatacacgatcgtgaacaggtgttatcggctcagtatgaggtttcatatcattattgaattctgcgatggtattgttcacaagttgaacccactcgcttgtgtccatagtcacggcggaccgtgctgtatcctccatttcattgcgccttgggtttacgaagaaagttgacagatcaagagacgacatttactttataccgcaactacatttaaaaaaaaaaaaatagacctgctttcactcgtggttcgaggctactgcatggggggcacgtgtcgtatcaagaagacctctgcttgacaaatatgtcgggaatcaaggtgggcaggaataaaagttgattatatatgtacatacaaatgtcggacactacatacaccaatactcatacaccaccctgtacggacggggggctgcaaaagccgccatggcatgtgtgtgtgtgcgaatgaatgatggacggggacggaaacactttgtcggctctgacctgctttcacctcacttgcttgttcactgccctccccccagacacccatgcactccggctttaatcaaaggcgacacttagtgttccgtgtacgcctcgaaaaacgagtatctgaccaagcgataatgttccaaatgttgttcgtcagtataaacattaacatgtgggtccttcgtgaaggcagcgctgaatactcggaggagccctgtgggttactgtaactgaaggtgagtgggcttgcttgtcacacttttgttcatgcaacagcaaggagagctaatcggctaatacactcaagaccgtcatggaatggcgtatctacccgacgttgggagggcatgtatgcactattctcaagcacatggaagaggctgtgactctgccccattccttgggactctggtatacaaaggggagacacattttctggcattttattgtccagtcgagcggggtcaacacttcaaacatttgatgatcggtaaagacattgattgataaaggaagtgcatttgcgcggtcactgtgccacagaatttcccccacatacatggaaagcgattgattgcctttcttttactcgcaggatgatggtcaacaacatgtacccaacacttattatagcggttgcaacaaacattgcgcttttcgtatacctccaccgtcgtgacgaggcctatcgtgatgagacctatcgtgctgaggcccgtgctgacaataaagctactgcccgttgtgcggaagctactgcccgtcgtgaggctgaggcccgtgctgacaatgaagctactgcccgtcgtgaggctgaggcccgtgctgacaatgaagctactgcccgttgtgcggaagctactgcccgtcgtgaggctgaggcccgtgctgcggaggctaaggccagtctcaggcaagagttgttgtcgttatcgcctgatgacgtcgctgctatgactcctgaacacgttgcggagtatatgacggcgtgtgcctcggttggggtagcagcatttcatttggatcagccggtattgtgataattgcttttttaaatacatacatgtcacacaatcacgtgacgaattgaaccctcagaatcgccctctgggaagtgtactggttgacataagtgaggcggcgcacatccaggcgagcgccgacagcggaccccggtctgcagcatttgtatctgtagacaaacgacgtagcatatatatatatatatatagataggatagataggatagataggataacgcactttatcacgacacatgccgtatcctcacacacgcgtatcggcggatgctgtcgagagattcgcagtcgcaacgaattggaggaccaaagcgttgaggatattttatgtttatttttttatatcgaggccaaattatatggtaggatggacaaatgctggcgtgcactccctaaggacatcattttttcccacatccttccaaaatgtgatattgatacgaggctggcatttaaaatccctccttcgaagatgtgctcgcaacgatacaaatcatctgacttcgtagagaccttgcgacacagatatgtgccagaccggatacaacaagttatgggtgttcagtatgtattgatcccaatgcacacaatttccggttggtatgacaacagcgatgcagaaatcaggcatgcaatggttaatttaggcatctattatgattttgctgggtaccgtcggaacaagatatacaaggattccattcaaatcacggtgatctgtatagattacagagatgccaataaatatcccatatcagatacagttgctcaactatggattaagccccgttgcctctgatgtcgaaacacataattgtattcccattgtctgtgaaggtgcgcgttcccttgacttgagcaatcatgaagccaggtgcgatgaggatctccttctcgttctcatagttagcatcagccccgactgccaatgcgcgcaccgtgtcatctgaaatgacaattttgcagatggttgccttgccatctgtaaggtgctttttagcatcacggcggcacctgtcgagcggcacctctcgcatcatggcggcacctgtcgagtcaagtcgagtcacatcacatggtgacctctcgcatcatggcggaaactgtcgagtcacatcacatggtgacctctcgcatcatggcggaaactgtcgagtcgagtcgagttgagtcacatcacatcacatcacatcacatcacatggcgaccgacctctcgcattacatgacctgtgtcgagtcgaggcaaagataacaaacaacacttggatgagaaccgtctcacattaacatataacaagcggcggagcccctttcacctccccacagcggagcgactgggggcgaccggaggggagcccccacaaagggtccgcgaggaaccgagcgggtgggcgaccggaggggagcccacagttcacatcaagcttggaagaagcgagatcgtcagcggtatcggaggacacaagcaaacggcggaaaactgtcgaatgtatcggaggacacaagcaaacggcggaaaactgtcgaatgtatcggagatgcggaacactgtcgaatgtatcggagatgcggaacactgtcaaatgtatcggagatgcggaacactgtcgaatgtcgtgtgtcatgtaaggatgcgggggggcggagggcctgaaggccacaacaacgtttacactcgtgtttcgaccactctcatcaaggacggcggcatctgtcgaggcgaggcgaggagaggcgagtcacatcacatggcgaccgacctctcgcattacatcacggcggaaactgtcgagtcgagtcacagagcgagcgacctctcgcatcagttcatctgtaggatcatcgtctcacacggtaatttctccattcattcattcattcattcattatcgtgcccagggtcggctgagtcagcttcctcgtcggatacctctgaaaccacctccagctgacgcgtcccgtcgcccggcttgcgttcgaagacgtgcagcgtcgtcccgtgatccgtgcattcgttctggcaggcacagatcaccgccatgaacgcctggtagtcgacgcagtgggggtcgactcccacgaaggacagggtattcaagccgtcggtgaagatgcggctcgtgttgccgcaggacttgccacaggacttgccggggaacgcgtcgtcgatgccctcgtaccgcatgactcggtcccagagcagcgggtggtggaggacctcgggcgagaagccggacatccggttcgggtggatacggatgcggtagcgacggcccgggacgaggaccaccgacgtctccatgagaaaatccgaatatacatacagtagttacgacagggtctctttacacgaaatgggtagaggtgacgctggtgatgttgatgttgatggacacgcagggaaggactaagtacaaacatggtcaatggggcagagtaggaatatctcatggcacccatccctgtcagtaccagcccagatcgcggatccgcgaatggatcttaaacacgttggcttctgtcattattccacgcatgatcatggccaacgcagatgcttggaagctggctacatgcctggaagcagccgccaaagctcagctgcagcaggggggggggtgagacagacaggccatctgtatcatcttcgcacggacttctctctgcgctttcaccatgtgattgccgaggacacgaaaagcatggacaattcatttttacatgtaaatgatgcaattcttgcattctgagcatgtgtacatggattctgaaggacagcatttgatcactcttttctttgtaggttcgcattctccacagaatacgcgtaggtcagggtctactatttcgtattcatcgcctcccatgtattgctcgagacgcacacccatggctttcattgtgtattgaattctgcgggcctttttcagccatttggacattgcagagtgcggatgctttccgttaatccagtatggcatcaagtagtccactaacaattcttctccccgcttcactttccttgatgtgcataggtatacttcttccgtatcccccttcttcttctgtatgaattcgcagttgtttgagaatcccgtcacttccggatggatggcatcgtttgcgatatgtgccactcccttgctcagatcgaatgggtctggttggagcgtgagaacgtttggggtgcacgcgatctcaaatgcgtacgcatgtacacgtttacttttttgctttcccgatcgtgtacgcgaggacacattcgattcgttgatgacaggtcctgggtactctgtgagtggtgttccagtgggtagcgaacggatagcaaagaggcccctccctgctccgggtattttggatttactgatgcgtatataggatggtatctttcctgtatcgctgaatgctacacgctcaaatgaaaatgggcgaacgtgttctcgcatgttgttacagttgttctcactgaatgatctattattccatttacaccataaactttgtaatgtacagttattctcaaataaagtgggacacacccactacagtcggcggaacagtaaaatgaaacatatatcagatggaaataaatgtacgacatcgccgttagaaaaatggcgttaagaatggtcgctgacttgggtgtgttaaaaatttctgtgtttacgaacatcagtcgttctactctgtggaggtggaaacgctttggtgtaaatcgaaaacgacgtgaatttgtaagcaacctttttgagacgaataaggatttgttaaaatcgtttttattgtcaatagttttgatgatgacccaataaggaagactgccattctgcaacactccaagtacatgttggtatgttctttgaaagtgacagtcaacaagattcctcaaaacatatttgtagtgaaccacggccctgtatctggtttcaggggatatcattcaaattatactgagtgcagggccttgtgggggcggctgccaacagcatgaagtgatgttaatttattcaacatacttgacgatggtgttgtcgtcccgctttgcagatggacctgcctgacatgacctacagcgggcgcaacattacggacgctttgctgcctgtcgcagctgcccgaaggacccgctcttgtgcacctgtactacacaccatggcagtacatgtgtgttttgaaaaagacgttcctgctcgggaagtgggcttcaagttttgcaattaaactggcagagtgtggggcagtgacagatatccctaattggtggagtactgacatgaaaacggttgcgcatacctgtcaggaaccatgtacacaataagatgcggtggtccctgtcaaagaattgagtgcgagtcacatggcgaccgacctctcgcatcacggcggcacctgtcgagtcgagtcacagagcgaccgacctcacgcgtttcgccgagacgcgccgagaagttcctcgaaaccccccccccccctgatactgatatgagtgaacacggccgaagagttcgtataagaagatctttcttacaaacaagacaggtacagtcagagacagaatttatggaggattttgaaaggagagtacgtgtgtggcacgaaaacattcggatcttcgaggatcatgtccctcctcgtgcttctttgaaagtttcttacgatccttccttcgagtttgatcgcacgaaatatggtacgatgcggaccgatatccgtgtcatacagctagagacatttgatattgggacaccttatatttggggattctgaaaagttgaccaattcaagatttgtaaccgatcttgtcaatacagatactgtcttcaggtgattgacacaaaaaattcaaggcatctaatctagtgaacaaccgcgcggtgtcttatctctgcatcaatcatgataacgtatgaaatggtataaagaaatgtgggtacaatattatatcaccaaaagaaaaagaatactcaccccctcttaatgggggtagtgcaagacaaaggagatgacgatattaacatcagcgtcgtcaagaagacgcttaattctctgtgcatggatgtatcgaggcatcagatctcctcaaggatacaaagcatggtactcttaatcaattacgcagttgcagaggcatacttattcgcaaactttcatatcacaagatgcctcgatgatggagactttgacgtcaagcagttgccacacctggatcggaacttttattacaggtgcctccttgcggtatcgacctccaatgttcgaaaggatactctgggccagagcttcaatgataccatggttgctttcgacgccctaagacctgcaggatacgtgaaggtggacgttcgtccttggggacaagtaatcgcagacgtctcaatacaaatggcgacgatggcgtgcaacagcgtctgggcaaacgtggacagggtcgttatcaagtacctgcgcttgaaacatccctctctgaagaaacatttcaagaagattgtcaaagcggtggtccagtacccagaatcgaaaatcgacacaatcatcccagagggcctcgtgcatgcgatccacatcaaagaggttgtcagtcacttgagggctctctttccgctgccaagagggaagcagttcaacactagagcgcacctgacaatgcgattgttccatcacgtgcttacagagttgggagaggtcggacgagtggatccgaaagataaaaaaacaagaaaaagtcacccccgtctgttcagtatccttcctcgcaagaacggcttcacgatttcgtacgtcccgatatcttccatgactttcatgaagcttctcagcatgggtgattcgccactcgagagcgtctctggcgatggacgttacgagaaccatacaatgctgtggcgaaagtactttaatgtccaaggtcttgagacgaaaaggtctcgctttgacaaccgaatcctcagcgacggttaaggggtatccgtccaaatgaagcagaagggtaaagaagaggtcgttgaagaaggagaaaacgcaggctatccaaaggacgtaaatatcgtagagtgcaaggacgcagtgggtgcgctgcgtgtcggagtagaccctggaatgacagatatcgtcacggtagcatcttctgcaggtcgcatcgagtctttcagctcggctcgctttagcgaagttgctgggtacaatacaagcaagcgtcgcacctacaaatggaatgacgagactcaagacctcgtgaagtccattccatcgcctaatacgagcaacatgtccgacctgcaggaccatgtcagagcttatctcaaagcgctcccgatcctcctacaacacagagccaacaaaggctaccgatctatgcgattctttcgatacgttggtaaacagaagacgattgaaaaggtatgcgatgtgattgcaccaagggcacagacgaccgttgttggcttcggcaactggtccaaccaagggtatggtatcagtcgttcatgttctgggcccatcaaagagatcaggaggtgcctctcacgtcgtaagaatgttttgttcaaaaacgtcgacgaacgcaacacttcttgtaaatgtcacggctgcttccagaggcttgtcaacatgaaggcagacagtgtagtctggcgcggagtttgcaaagagtccccaatcgacgggtctataactgttgagaagcagaagatggtggtgaagaacgtcaaggtccacaaagtactgcactgtagagacagtgtcaaaagcgcatcatccaatgtgcgctgtggtgcaacctggaaccgagacgtgaacgctgccaagaaccttcttctccttctgacaacgtggatgggcgggagagagcgacctgaggcattctgtgttccctcgcctccccccaaaaccacagtttccatcgaggcgagcgtgagcgctaaaccgaccgacccacctgggtttgtcagcagcttgccttgttatcctttgggccagcttaaatgctgaaatacagagatgaagggcaaaaatatgtactcgccttaagctgatctaatgggcgttcctgcttccgaacggattttttattttactgaaatcttacgataaatattgtaagatcgttttcgcaaattaattggttttgcttttttgtgtattttacgaaaatatcttacaatttattttgtaagatcgttttcgcaaattgattgattttgcttttttggtgtattttacgaaaatatcttacaatttattatgtaagattgttttgttgcattccggagaaagagactattcccttcaatttcaattgtaacattgatttgctcgtttggagagagagaaagttccttcgaagtattccaatacataatcaattgtagaggacagtcaagaggaaggtgaaagctgtttacaaagtcttgaacgcattgctcataattatttatctcacaactcacaactcaacagttcgaaagtacaacttagtacttatgacaggctatcacgttgtagaaagagggccaatgctaacttgttgggtaacaacagcgcctgtacaatcgctgcactagaatctcctcctccatgcccccatccccatcttcctcctcctccatctccttctccttagcaatgtctacattgtctccatccgattgcacagcctctgccttggtgtccttctcaatggattggcagcttgacccctttgcatgactccttgctgtgcattgattgccatgcccagcaccttctctggcagcttgacccctttgcatgaccccttgatgcgcattgattgaccccccttgccgggcccccccttgctgcgcatgcatgaaagactgttttgataagtcggtaaggctttgcttcatgccttgcgctttcacctcttttcatgccttgcgctttcacctcctttcatgccttgcgcaaattgcctttcgcatcctgcattgctttgctgcgcatccgcattagcaccgggtggccctgcatggtcccgagttgcacctaattctcgcaccttttgcgcaatgcatttcactgctatgggaattcacttcagctctgttctcatgatctgctgctttgcctttcgctttctgcatcgccttgctgcgcatctgcattagcaccgggtggttgtgaataacccccgagttgcttctaattctcgcaccctttgcgcaatgcatttcactgtcactgtcctgcctagcaccttctctggtggatgctgggcagatagccaggagcactggcgctcggagcactggataggtctgcctacctgcatggcggttacccgcctgcacctgccagaccagaccaggacacgcgccgggccagcacctgcgccggagtactggcgaacagctctgcacccgcttgcaccttcctgaggcctgcctacctgcatgatggttacccgcttgcacctgcgtcagagtaatggcggacagtactgcatacccatatggcatgcatcctcagctaccgttccaagatttccatagcgtctggtttggttatgaattgcattgtagtggtagactgcaattgtagcccagacttagctgccttgtgcctgtgttgaccaagttactgcttgccaacaggttgccttgtttattggttaatctttgccgggagtgtggttgggtgtttatgttgtgattggtactttacatgacactgacatatggatcatgtacacctgcagttcttctattttactgtgttcttgcccacctcggccacctacctatttactaggtttgttttagtggcccagtactgcaataggtaaagcaaagatgtgtagttggggcctgcttgacttgcatagcatgactgatgaaatgtcacagcccagaagaatttagcccttgtgcctgttccgtctaggcattcggtggatcaagttttctttgacaggttttaggattgatttttttatgatcgggaggactgtgtgtattccgagtttggttttctcaatcattcgcgcgttgggtttgacaatgctcccgattatgatcgggaggactgtgggtattctgagtttggtttatctcaatcattcgctcgttgggtttgacaatgctcccgattatgatcaagaggactgtgggtattctgagtttgatttttgtcaatcattcgttcgttgggtttgacaatgatcccgattatgatagggaggactatgggtatgccgagtacaaaaaaaaaaaaaaaaaaaaaaaatgccgagtacatgttttcttaatcatttgctcgttaggtttgtcagtgctcccgattatgatcgggaggactgtgtgtattccgaatttagttttctcaatcattcgctcgttgggtttgacaatgctcccgattatgatcgggaggactctgtgtattccgaatttggttttctcaatcattcgctcgtggggtttgtcagtgctcccgattatgatcgggaggactgtgggtattccgagtttggtttttctcaatcattcgttcgttgggtttgacaatgctcccgattacgatagggaagactttgggtatgccgagtcaaaaaaaaaaaaaaaaaaaaaatgccgagtacatgttttctgaatcattcgctcgttaggtttgtgagtgctcctgattatgatcgggaggactgtgtgtattccgaatttggttttctcaatcattcgctcgttgggtttgacaatgctcccgaatatgatcgggaggactctgtgtattccgaatttggttttctcaatcattcgctcgtggggtttgtcagtgctcccgattatgatcaggaggactctgtgtattccgaatttggttttctcaatcattcgctcgttgggtttgtcaatgctcccaattatgatcgggaggactctgtgtattccgaatttggttttgtcaatcattcgctcgttgggtttgtcaatgctctcgattatgatcgggaggactgtgggtattctgagtttggtttttctcaatcattcgttcgttgggtttgtcaatgctcccgattatgatagggaggactatgggtatgccgagtcaaaaaaaaaaaaaaaaatgccgagtacatgttttctgaatcattcgctcgttaggtttgtaagtgctcccgattatgatcgggaggactgtgtattccgaatttggttttctcaatcattcgctcgttgggtttgacaatgctcccgattatgatcaggaggactctgtgtattccgaatttggttttctcaatcattcgctcgttgggtttgtcaatgctcccaattatgatcgggaggactctgtgtattccgaatttggttttgtcaatcattcgctcgttgggtttgtcaatgctctcgattatgatcgggaggactgtgggtattctgagtttggtttttctcaatcattcgttcgttgggtttgtcaatgctcccgattatgatagggaggactatgggtatgccgagtcaaaaaaaaaaaaaaaaaaatgccgagtacatgttttctgaatcattcgctcgttaggtttgtaagtgctcccgattatgatcgggaggactgtgtattccgaatttggttttctcaatcattcgctcgttgggtttgacaatgctcccgattatgatcgggaggactctgtgtattccgaatttggttttctcaatcattcgctcgttgggttgtcaatgttcccgattatgatcgggaggactgtggttattctgagtttggtttttctcaatcattcgctcgttaggaatgacaatgctcccgattatgagagggaggactatgggtatgccgagtacaaaaaaaaaaaaaaaaatgccgagtacatgttttctgaatcattcgctcgttgggtttgtcagtgctcccgattatgatcgggaggacagtgtatattccgaatttggttttctcaatcatttgctcgttgggtttgataatgctcccgattatgatcgggaggactatgggtatgccgagtaaaaaaaaaaaaaaaaaaaaaaaaaatgccgtttatatgttttctgaatcattcgctcgttgggtttgacaatgctcccgattatgatcgggaggactgtggatattctgagtttgtttattctcaatcattcgttcgttgggtctgacaatgctcccgattatgatcgggaggactatgggtatgccgagcacatgttttctgaatcattcgctcgatgggtttgtcagtgctcccgattatgatcgggaggactgtgtgtattccgagttttgttttctcaatcgttcgctcgttgggtttgtcaatgctcccgattatgatcgggaggactgtgtgtattccgaatttggttttctcaatcatttgctcgttgggtttgataatgctcctgattatgatcgggaggactatgggtatgccgagtacaaaaaaaaaaaaaaaaaaaaaaaatgccgtttatatgttttctgaatcattcgctcgttgggtttgacaatgctcccgattatgatcgggaggactgtgggtattctgagtttggttattctcaatcattcgttcgttgggtctgacaatcctcccgattatgatcgggaggactatgggtatgccgagtaaaaaaaaaaaaaaaaaaaggccgagtacatgttttctgaatcattcgcacgttgggtttgtcagtgctcccgattatgatcgggaggactgtgtgtattccgaatttggttttctcaatcattcgctcgttgggtttgacaatgctcccgattatgatcgggaggactatgggtatgccgagcacatgttttctgaatcattcgctcgatgggtttgtcagtgctccgattatgatcgggaagactgtgtgtattccaggttttgttttctcaatcattcgctagttgggtttgacaatgctcccgattatgatcgggaggactctgtgtattccgaatttggttttctcaatcatttgctcgttgggtttgacaatgctcccgattatgatcgggaggactatgggtattctgagtttggtttttctctatatctgaatctgattttgaatctgaatctgaatctcaatcatttgctttaccaacctatttgtcttccgcagggtctacaatgacagtacagtggaagttaaactccaatcggacgggaaggatttgggattgagaaatcaatggccaagcgcttgatagcagcattggatgacttgtccatggatgtgtcagaccttttacctgcaagtaacgagattgccaagactatgaaggttgcacacactttggagactaatatggaaaggccagaggaggaggatgtgttgtacttatattcttcacaagggacgaagccggatagaagaatagcctacgagcccactactgatttggttgttggtcatgtcgctgtggtcaaggtacaaatggatgactctagcggattgagaggatgggacgtggtggaggtcaaatcactaccagtgaatggagaagtggaatgtgtgtatttaaagcccttgtactttgggggtcagaagttggtgtacactgaaacacaatacccaacttggccagaagattggatggaccacaagcttgtgcctattaccgtgggggttaggagaaaagcaacatggacgggcgatattcccattgacgcatttcaatttagctgcgaacccaccaagggtatgaagatccagagaaagtaccacgcaagcatgctcctagcttgtcaatccattgagaaggacaccagggcagagactgtgcaatcggatggagacaatgcagacattgctgaggaggaggagatggaggaggaggaagatggggatggggacatggaggaggagaaggaggaggaagaggaggacgaggaggggggggaggaggaggagtaagatgtttgacacatagccgttttttactaaattagaaaaattaaatgaattatacttatgatttttattgtaagatgtaaaagctgaattctgcctgccgccttataaccgtccgctttccctttatttcttacaattataattggaagacacgaattgatgttaacacctttttttacaaaatatggcatttcaatgttgtaacattcgcaatctgtacgtttctccgtctttcaagctcatttcaagcatattttgtcaaaattgactacaatcttacgttttttatcgtaagattgcatttgaaaagcatcaaaagaccccccaaaagtgattgtaagattggaaatccgttcggaagcaggaacgcccattatctacccattgggttcaagggtcaccggtagggtgtcccacaaattgcgtctccgactgtagacatggacacattagatgcgaccacattagatgcgaccctagctcttatagagcaaggtatgcacccgcttgtcttgaacatggcggacatacataatcctggggggtgcgtgtcttgtggaggtgggatgcaggaagagtcgttgttccggaggacgaactaccatcgtcatctctcgaggtcgttttacccgatcggagaaagggaagccgttgtatcgttcgacgtcgacatcatcagggagtgcgagagagacggattcgagttcctgaagttttctaaatcggcatccttcttggcatgtccgtgcatttccatgccacagctggtggacaacaggttctcagagaaagacagtcaattgtttcgcgaaaaggtgagactcgtattgagtgtagctcacaagtacggacatgacagcatcgtattaggagcttggggatgcggggcgttcgggtgtccacctaaacacgttgccgagatcatgtttgccgagatcgaaaaggtagaagggtgcttcaagaagatcgttttcgcgattctaggtaaaaacatcgatttctttcatctcgcagaaaatgaaaaaaagagatcactacagtaactgtccggcctcacttcgttggttcacaatttatgcacactcaactcaatgaacaatttatgagttttcaattgaacatgaggacaacaacgccagaaataatggcactgcctagatcaaattccatggcatgccttgggtcacagtgccgttttcttgtcgtctcaccgcgactaagagcgtttcatgcaagcagtcctcgtcacgtaatcgatagcaacatgcatcctggcatccatcaagaactgttggcccaggagacacacatgctcgcatctggtcttggggcacaatcccacctgtgtggaaataccgctgatgcacacctcatacatgtgctccgagtgagggagcttcggatctggaggataaactgcattcttgtaccccaaggcgtgtaatacctccagcgtcatgtagctgagtgtagagcccgtgtcatacatcatggaaatcttgaactggtgcaatggctcagcagcctcacacataatgggatccgccttgacaattacgggaaacaaaatgcggttcaaccccccgtaaaaccgaccagatgacattgcgtcatggggaaccagctcatcagtaactgacaggtagtgcaaattaaacagtgttttgctggcagagtaaactaccgatcgctcacagaacacggagcacatcacatcgtccatggcagcctggtatgggtttctggacaccgtcgccctccctggcatctcgaagtcttcatacacttccataatttcaagctcccttaccagctctgtcaggggaattattacgccgtcgagacgcgacaggccaaggtgcttatccggtaccaaactccggcatgccagaaggctgtcaagtgctgcgcccaacacgctgtctggcagagtgtcatacagtgccggagggaccagatcttgaacgttgtgcaggttttctaggatgcttgtaggggcacggacgtccctcatgcggtccaatgttgacatttgttagcatgaattgcgttgctctcacgcgttttatgacttggtgactacttctgtactcccttagaactatcggccctgacagcttcccgtagtgacagtttcccttagcctgagtcattgagtgactcagtgacaggttcctgtcagctacttcaccggtcttgcctttaccttgatagtttcccggctgcccggtttcctctaacattgactgtatagtgtctaacccttatgagggtatagcctacctttctttcttcctccactggtgccccttaatgggtctcctgtgcttgtaacttactctcgtctctgcatatatagattggcgtgctgcacacacaaagtccactcatccggagtgttatcaaagctaataggttatccggcccctcatttctaccactgctttgaaatgcaacttccgcgaggacccccggcgacatttgagaaactccatgacaagaatggagaatcctggtcgcgcgggatgcgcagcgttattataagtaatggctgcgaccgtgtccttcccaaggaggacgcggtttctcaagacgattggctagacgtctgtgcaccagcgacctctgctggcggttatgagagtccttccgccatcatggaagtaacccccccccaatcatacctctacctttgcgctccttcagctaccgtctgtcgtagacgactttgacgtgcagactcaagtcggcgactagcctggacatcggtggagataccccgtcttcgtctgctcgcgtccttgatgtcgctaactccggtgtttgaggctctgcctgcataccggaggttgccaagccgaccaagctccctgctgatgtctacgtcgtctttgccccccccccctttgcactctagtggctatgtgctaccttctggagaattttttcgatcaagctggcggatcgccggcactgccgtagggttcgccacaggaggacgacctacgcgtctggacctggagattcttgag

SEQ ID NO: 310 - DNA, 20957 bp, Chlamydomonas sp.
  source 1..20957: mol_type = other DNA
gtgacaattcgtcgtatgatcgtgacagctgtggatcgcggtggacgcgtcttcagtcaagatatccgcagccaggaaattgactaagttagttaacttaattaactcacgtaacttgattaactgaaggtggaactttggaaaaacactggaggtaccgagtctaccgttgacagattagcaactaaaaaactattgttttaataaaaacgagtgtaaacaactttgatccatacaggtctcggcattgttttgctgagtatgtaacgttccccccgttcccccagatggatgtaacgttccgttttcagaggtgttcatgtaaacacgtttaaaatagggattgatgtgagcctccggcattcttcagtatttattttttgttgaaataattgttgttccagagatggagagtcttttcagaggtgttcatgtgaacacgttttaaaatagggattgatgtgagcctccggcattcttcagtatttattttttgttgaaataattgttgttcccgagatggagagtcttttcagaggtgttcatgtgaacacgttaaaaatagggattgatgtgagcctccggcattcttcagtatttattttttgttgaaataattgttgttcccgagatggagagtcttttcagaggtgttcatgtgaacacgttaaaaatagggattgatgtgagcctccggcatttttcagtatttatttttgttgaaataattgttgttcccgagatggagagtcttttcagaggtgttcatgtgaacacgtttaaaatagggattgatgtgagcctccggcattcttcagtatttatttttgttgaaataattgttgttccagagatggagagtcttttcagaggtgttcatgtgaacacgtttaaaacagggattgatgtgagcctccggcattcttcagtatttattttttgttgaaataattgttgttcccgagatggagagtcttttcagaggtgttcatgtgaacacgtttaaaatagggattgatgtgagcctccggcattcttcagtatttatttttgttgaaataattgttgttccagagatggagagtcttttcagaggtgttcatgtgaacacgtttaaaatagggattgatgtgagcctccggcattcttcatacaatttttcggtcaatcaaatgattccatggcgacccgatgtgtttggccgagcattgcccagccctagcgatcgatgcctgcaccgcgagcgagctaggggggaggttgctgtgacccccttgtggaagaacacatgtatgacaactacaatgtaacaaacataagggggttctctcctcatggagaaatgcaccatggagaaatgcgccatggagaaaaaaacacccccctcctgtttgttcgcgtgcgagttgtgtgacaagcagttcagtaaccggtattcgaagtcttcacacaagcggaggtctcaccccaagggagctgttgatgttgacttcatggagaagcgcatggagtacctcgagaatcggatcgatgaaatgcaagcggaactggaggcgttgcggaaaaaacacactttcacaatcaacaacagcttcgggtcggccaccaacaactatgtcgttacatgcgaaaatttcaccaacaccaccaccaccaacaacaacaacaatactgctccagatgcggcggcgctatctccagctgcgacgacaccggtggaggacatgcaccccttcggggaggaggtcacgcccgagtcagagttcctctcggtcgctcaattcaatgagtgcgggtacaacctggtcaagctgctgcagctatcgcacttcaaccccgcgcacccgcagtacatgaacatcatcatggaccccgactgctaccagcagacgtacgtgtacggacgggactgccgctgggcgaaggcggacctgcaagactcgctgctgccggtgctcaggagcatcgtgcagcgaatgagcagggtgaacccggcagaagcaagcaagtacgaggacgacgccgccttcctccagggaggcgccggctccgtcaccttcagagccatgcagggcatggccctgcacagccggacctgcgtcagggtcctctcggagaggggcgtgccgctgccagaggaactacggacgcacttgcacttgacagaacacaatagataaaaaactgtgcgggccccccgttcgtccattcattctcacacgggccacggcggctttcgaagagtagtatccgtacattcattcattcattcattctcacacacacgccacggcagctttcgcagcctcgtccattcagtctcacgaccgcatgtgctttatctgtgtgtgtgtgcgtgcgtgcagcaatggataacagagctcaatccaatacaggccacatcttctcacgcatgtcattgatgacatccgtaatgcagaaagagtaaacagcacccgtgttgcagcgtcgcttggagacgcccctcaagccaagcttggacatcttgagaccaaacttgatcaaggtggtttcatgtttaggagaaccagggatcggggatagccagtcattgaacatggagaacaaggtggccgccgtgaagctcacagaatcatcgatacggggatgcgagacgctctgctctagcatcaggtgcaagaggaattgggactcaatcagcaggatgtcttcgggggtagctttttgcagggtgtacctcgtgtccaggccgcactcctggacgacctgcaccagctcgacaacgtcagcaacagtcgcctgtagcccctcctcctcgcagaacgtgacgtaagcgttgtacatgcccggggtcgtggcgatatgcggtcgcagatcgccggggttggtggcaatgcaccgctcatccagaaagcggaggatattcttgtggcgagtgaagtcggggaatcgcagggcacgacggggaagcagcaggccgtcgaaaatgtgctggatgggttggatgcccagatccttgagcgatgataccactttcttggcggtgaagctcgacctgggtagcttcgacagtacccgagcgacaaatgcgccctgatccaacaccgcaccagacaactctgttgcattggcctcgacaaagtcgtgcaccgtatcgtaacactcgatgttagcctgaacgacgttgtcgaaaatcacagtcaccacacgtgagacgtacgtctcacgatccatacgctcctggtccgtctcctcagattcaacggcggattccacggatccctcagattcaacggagtcattacgtggagtgtcacactcctcctgtttgccaccgcagtcgtcgccataccaggcgtacttcaaaacgttcgctaacataccattgtaaacggtggcttcgcccacctcgaagtactcggcacccacatctcttcgtggctggattctggaatcgtaaccaccgcgcatgtacctgagcagtgtcgcctctgcatccacgcacgcttgtgcatctcgaacatggatggcaaaaatgagctgggatccattggggtactgcgagagcctcttgcagaacggctggctggtccggccgaccttgacgaccaacggggacaatttgcccaggaactctcgctcgacgagggcgtacacgacgtgctgggtgtggtgcgccatggatggatgatacacaagggaagggaaggcttgactcaaccaatatgcttgtcgcgagctttatatcgtgataatcgagcgtttttacgaggtccatgcgacatccaccatgtcacacatatgacaaggagtgacgagaatccgtgtgtcatgaatggggggatgcaaaagccgcaatggcatatgtgtgtgtgtgtgtgtgcgaatgaatgatggacggggtcgcaaatggtgatcacatgtcaagcagaggtctgctagacaatatatatcgtatatcgatagggaaatcgcgggccccacggagtggggtaggggaattgagctgcagaaaccaagtgtgtcaaggcatcaatcaatcatcacacgcaaaactgtggaaaactgtggaaaactgtcgcatccacaccgtccgtccgtccgtccatccattcatgacacacggtggcggatcatcgcaactcatcgtctcgtggaagtggtgtaaacgcgcgcattgggatagcataggagcagctcgacagcaatcatggcgcacatgacaaccaatgtcgtgtacgcgttggttgagcacaagttcattcagaaagatgagatcgtcgtcaaggtgggcaggacgtcgaagcccgttgttcagcgactttctcagtacccgaagaactcaaagatgatcttcgcaatccacgtacttaatccgcgtgcttgtgtggaggctgagactgtcctgctccggtaccttcgcggagaccctcgagtcaagccccgtcgcgacgttggatacgagtactaccaacttgacgcgggtgatgcaggtgccgtcttttgggagatggccgttgtcgtcttccagtacgtgtggacaggtggcgtagacagccttggttgcggcaccgaggacgtgcagccagacccccccagctttgccgttgttgagcgagagaaggaacgcgagaatgagcgagagaaggaatatctattctgtgccctgagctgcttctattcttagccctgagctgcagcgccccttttgtggcgtgccgttgcaccccgatcttcagaagatcggggtgatagaggagacgctctctgctctgggttttgtgtccccattcgacactacgaccatcatcccaaatctgatgacggtgttcgacgccaagcgcaagggaacacagatgttccgcgactacaacaacaccgctaggctgttcagccaggcctcgtgcggcgttcgcgacgggtgggacctgcgcaaggtgtccaaggctgtgaagatgatcctgcacgcgcttggtctcgctcaccatgtcgataccacgcgcgcgcaggtcaagggcaagcgtaccaaggaggagaggaactaccgcatgtgcccggagagtgtctcccggatgctggagctcttgaaacttcgtcttctgcgcacggacctcacgcagccgccgccgccgctgccctttcgggtcacgagctgtccatgtacagccatagtccatcggcaaacaacggattgtattattcaacaagcggcggagcccctttcacctcttccccccagcggagcgaccgggggcgaccggaggggagcccccacaaaggattccgcgaggaaccgagcgggtgggcgaccggaggggagcccacagttcacatcaagcattagacatacacactactgtgtaactaactgtcaagtcttacacaatgtgtatgttgtttgtaaaagattcactgtaacacttgggtttattagcactgtaacacttgagcttctttctcgctagaacgcttgggcgtttcctatgtgccgtctcaagcagacttctgcttgacaactatgtcgggagtatgaaagaggaatcgcgggacacacggcggcacctgtcgagtcgagtcgagtcccatcacatggcgaatcagaatccccaaaatagaaggtgtcccaatatcaaatgtccctatctgtatgaaggtccgatgagcaaactccagtgttgccaagttgctgcagctctgcaattgtcaggttgcatttcatgcatcggtatggttgtaattctgccatttctagcagaccacatttccaaatgtgtttgcccctattgcggtttagaaggtcttcgctgagtttgaactcgggatgttgcattcttgtcctcccacgcgggtgttgcattctggggatttagttgtagagattcttatattctttatcaattccaaaataatggcattcttgttctcagtagggaatatttaaaaaatgatccggatgtcagggtcaagcaggaacagaaacaatgcactcgatcaatgcgtgtgtccatcgacagagtgtatgttgacctcagcatcaggcagttcgccgtcccaacaggagcagttctgcgcttgtatctgtcatgaggtccttggccagctcccaccagggactctggtagcaccacagcccggtgcccagatgcacggaccggcccggaaccctccagtggttggcgtcccccatgaaattcatgtaccgctggtgcatcgcgccacctgccgcccattccgcgcactggcacaggaaccggtgacattcgtacagctcctccgcgctgctcatgctcatccccgcgttgatgccgagcactatgaactgctccgcaggccgcagcgcatgctgtcgctgcaagaatgttgtcaggtccttgaatgaaaacaacaacgctggtcggggctgctgatcactcagcccgtccgcatagcacttcacattctgtaacgatcgcgtggtaaagcatgtgtccagaaaagccttttctagtagcttgaagctacctgttgccgccgcaccccgtcagtgcataaacacccgcccacattccccatagcgtgcagcagcgccacctcgttctctgcgctcccagcccctatgaacgctatacatgacaccgccttgccgggcactagcgcacccctaacctcgctcgccaccgcatcccagtctagtgcaggacagctcacctcgcgctgaccctccgacggcactagcactttgttctcccactgcattcttccgatacattatctcattcagctcccccttaagctcttttgacctgaatcttgaattggtcaacttttcagaatccccaaaatataaggtgtcccaatatcaaatgtccctagctctatggaagcttcgagagcagaccaactacgacttggcttgcgagtttcgcacagttcactcgcgattctgagaccggagatcgcggaaacacattcaataggtgagtttgcatcggaaacgcttcttgaatcgttcaattatgacaccaacaaagaaagttaggggatctcaaagtttgtttggtgtgactttctttccatttgctgcgcagacattctcattcatatgcacgcatccccctcacgcaacaaaatcgaggacaagaacgcatcttcgtgaaccaaggtgagtcttgacattgcgagatcggaaagcgctagtcatgatgagatagatgtacctgttgaggggtctgaggacgtatggaagagggggatgcatagggatttcattttagcggtttaataattgtttcaaatgtttcatgacccactctcctgactcttcagctacgcttactacaaaactaaacagcaatctggtccagaacgacgaacatcttcctaatcttcgtcggcacatactgagcgacgatggtaggagatgctgcgcgtagcgcattcgcgtctggctccccccctaccatacttattatgttctctatcacgttaggtggaattgatgagaatagggttgggtccaactgtctggcaagacatgtgctttcgtttgggcagaagcggatcacggaatcgcccacaacagcgtcggatgcaatgaggcgggttagtctcctttctaatacattccactccacataaatctcaacaatgcatgccccccgtctaggtccatccttattgttctcccatgctcgcatgtgctccaacagtgtcagtctcctcataagcgcacagacgagtccgttaagattgcatttgcggatatgaatattttcatgccacacttcttgagggtctaagggtatgctatcgtccttgacgtacgcctcgaacgcattgcgttgtagaaaaaaaacctgcaaacggtcagaaaatccaaacaattgacgcacactggcataccttgcacattgcactccaatgttcaacggtttaaaacccaccttgaaaggcatacttgattatatatgcacagctttttactccttatgttgagcagtcagtaccaacaactgtatgggatcgactcttggcgaagacttcgagaatagtcggcttctgttcgacatgttgacattcgggggagagtgaatgccgtaaggtgtgccgtacacgaggcgttttcattttagtattccgtcgactgtatcttgcgcttattctggacaacaagtggaaagctatactttataaacaatcaatcaatatgattgacaagtgtttttctctactcatacctatctgcatcgctaccttcgcttttatttacatagctcgactggagattgagcttgagactgagcgcgctcgaaataaggcagatactgctcgactgaagattgagcttgagcttgagcttgagactgggcactctctaaagaaggcagatgcttctcgagtgaatagtctggagattgagcttgagactgagcgcgctcgaaataaggcatatgttgctagactgaagattgagactgagcgcgcagaagcacttgagaagcaaatgaggtacgaactgtcaagcatgactgccgagcaatggaattccctgaacgatcatgacaggcgtctcaatgaggatctttgcaaacaatacggaatccccttacccaacatccaggagtcattcctcgaatccgcgattcatctttcatgaactgccgtctcaagcaggcgtctgcttaacaaactattccgggatcatgaaagaggaatcgcgggacccacggagtggggcaggggaattcagatgcggactcgcggaaacacgtgtcatacagctagggacatttgatattgggacaccttatattttggggattctgaaaagttgaccaattcaagatttgtaaccgatcttgtcaatacagatactgtcttcaggtgattgacacaaaaaattcaaggcatctaaagacactgaatttacatgttcaaagtaccctgaaaagtcaaactgatggctaacatcgtgcgcatcaataatccttttcaaagcgttactttaatcaaatatatctgctacatctggaattattgggcacatgcagcgatattttcgcttgagcaaactaaagacattctcaatagcgttaaactctggactgtaaggaggtacaaagagtggtcgtattcctacagaatcgaacatagaaatcgtctcctttgaatgatggaactggatattgtaaaggacagcgactgtaccccgctgtacatgtaactcagatacaaactgtacaaagtcgactttcttgcaattgtgatcaaggatcttgtaatgaacgatacctttagcagaaacggcagcaattagtgtcaatttggacattcgcaatgtaatgggcgttcctgcctcccggccgattttgactggttgcgaaacatggtatggagcggatttgtgattccttggtgcttatgtcacaagctagcgagtcgttcaagaggctctaaatcctgattagaaattttaaaaaatcggccgggaggcaggaacgcccattatgtcctagaaatttggatatttaaacgtttgccgcgttgacagtaccctctgcgacaagtgtcaccaatgtaaaaacccgcctcatcgatgcttaacaaatccgatgtcggaacggctaaatactccttacaaaaacggtcgacagaagatttgtagtcagtcttgtgccgaactgttttgtatgcgcgcttgcgggtgtaaccaagtttgcgtgtgtagcgtccacaagtttttggagacatcttgacagaggacagagaagtcacaccctttgcaagctgagacattgtaaagaagggattggagtcaatcagttgttttatagcagccttgatatcttctgtaatgacactcacccttttcttccgatgatgttttatattggctttggtgacccaacgttggagtgatgattttgatactttgtacagaaaactaactttcctcaaactacgattatagtatttgtagtgaacaaccgcgcggtgtcttatctctgcatcaatcatgataacgtaggaaatggtataaggaaatgtgggtgcaatattatatcaccaaaagaaaaagaatactcaccccctcttaatgggggtagtgcaagacaaaggagatgacgatattaacatcagcgtcgtcaagaagacgcttaattctctgtgcatggatgtatcgaggcatcagatctcctcaaggatacaaagcatggtactcttaatcaaccacgcagttgcagaggcatacttattcgcaaactttcatatcacaagatgcctcgatgatggagactttgacgtcaagcagttgccacacctggattggaacttttattacaggtgcctccttgcggtatcgacctccaatgttcgaaaggatactctgggccagagcttcaatgatactatggttgctttcgacgccctaagacctgcaggatacgtgaaggtggacgttcgtccttggggacaagtaatcgcagacgtctcaatacaaatggcgacgatggcgtgcaacagcgtctgggcaaacgtggacggggtcgttatcaagtacctgcgcttgaaacatccctctctgaagaaacatttcaagaagattgtcaaagcggtggtccagtacccagaatcgaaaatcgacacaatcatcccagagggcctcgtgcatgcgatccacatcaaagaggttgtcagtcacttgagggctctctttccgctgccaagagggaagcagttcaacactagagcgcacctgacaatgcgattgttccatcacgtgcttacagagttgggagaggtcggacgagtggatccgaaagataaaaaaacaagaaaaagtcacccccgtctgttcagtatccttcctcgcaagaacggcttcacaatttcgtacgtcccgatatcttccatgactttcatgaagcttctcagcatgggtgattcgccactcgagagtgtctctggcgatggacgttacgagaaccatacaaattgaatgctgtggcgaaagtactttaatgtccaaggtcttgagacgaaaaggtctcgctttgacaaccgaatcctcagcgacggtaaaggggtatccgtccaaatgaagcagaagggtaaagaagaggtcgttgaagaaggagaaaacgcaggctatccaaaggacgcaaatatcgtagagtgcaaggacgcagtgggtgcgctgcgtgtcggagtagaccctggaatgacagatatcgtcacggtagcatcttctgcaggtcgcatcgagtctttcagctcggctcgctttagcgaagttgctgggtacaatacaagcaagcgtcgcacctacaaatggaatgacgagactcaagacctcgtgaagtccattccattgcctaatacgagcaacatggtcgacctgcaggaccatgtcagagcttatctcaaagcgctcccgatcctcctacaacacagagccaacaaaggctaccgatctatgcgattctttcgatacgttggtaaacagaagacgattggaaaggtatgcgatatgattgcaccaagggcacagacgaccgttgttggcttcggcaactggtccaaccaagggtatggtatcagtcgttcatgttctgggcccatcaaagagatcaggaggtgcctctcacgtcgtaagaatgttttgttcaaaaacgtcgacgaacgcaacacttcttgtaaatgtcacggctgcttccagaggcttgtcaacatgaaggcagacagcgtagtctggcgcggagtttgcaaagagtccccaatcgacgggtctataactgttgagaagcagaagatggtggtgaagaacgtcaaggtccacaaagtactgcactgtagagacagtgtcaaaagcgcatcatccaatgtgcgctgtggtgcaacctggaaccgagacgtgaatgctgccaagaaccttcttctgcttctgacaacgtggatggacgggagagagcgacctgaggcattctgtgttccctcgcctccccccaaaaccacagtttccatcgaggcgagtgtgagcgctaaaccgaccgacccacctgggtttgtcagcagcttgccttgttatcctttgggccagcttaaatgctgaaatacagagatgaagggcaaaaatatgtactcgcctttagctgatctacccattgggttcaagggtcaccggtagggtgtcccacaaattgcgtctccgactgtaggatctgacttgtccatcggaggaggacacacgcaaacggcggatgtgtgtgagcgaatgaattatggacgggggggtgcgaaagccgtcgtgtgtcatgtaaggatgcgggggggggcggtctattttgtgagtgtggacgatacgtcattccgggtgttccatcatcatgcacttcagtgtgtgtgcgagtgaagggtctgagaagcgattgagcgtgtgtataagggagaggggaaatctataatggagaagcgtttataataattataataatactaattatgtgtgcccggactgcagaaatgccgccgttttccggtacgttcagctacaagaatgacaacttgtaccgcagactgatcggagatggcgtgcacatggtcatggagcgactggaccctaacattgccaagatccggtttgaggtccaacaccccgtggctgaggatacccaggctgaggcccctatcatctaccagccaattcagattccagagggggtcacattgatagtagcagactctgccatccctgctgcacgaattgggaatgatttttttatcgtcacctggataggcaactatctcgttctaagggggggtaatgtacttttcaggatcttcaatcagcaatcccaggagattcaattagctgagtaacagggggtgggggagagagtcatcgtacctttcctgcgtgctcatgcagcatgccatggaaccggatcgaccctggacatgcgggagtcgttgctgcatgcctggtcatggtcatgttctctacagtggccatcatcaggagtttctggtgtactcaggtgaatgtatataaggggggaatcgtgtgtttactgtactcagggtcaaaatatctgacgaaatgcgttggcgtctcccgcagtatgatgatgatgatgaagagccagatcatcatcaattttgccgccatgaacatgagctgccaacctactcgccctcttcagcatcccgcaacaaggcacttctgttgtatgtggattatacttatgttcctactgatcacattcagaggactttatgggtgcacaaccgtgaagcaggaaccatgttgggcaagaatgtggatgggttggatataccgggtcaccacaacacgtgggttagcttgttgcgcccgcttgactttcatgtcgatgcgatgcgggggcacttgaataaggcagagctgatggatctgttggatgatcacgtgacacactcacactatgactcggtgctcgtgatcgtcttgtgtggtcatggatcctccggccaactcgtcctgaccaacggggcgaaggtgtcactggaggaggtgtcacatgcgacaatgcatcacagaggaacagtgttgtctttcatgttgttttgcggtgcgcggccttccgagggcctcaacccactgagagggatcaagaacaactaccaatttcgacggtgcatgttcatctttgcaaccgatgacgctgtcttgaactcgcaaacactgaatgcatttgtgaaagcgatcggcagcatcatggataccggtgaatgttgttactctgggattgaggacgccattcgcaaccacatgcgtgtgttcaacggatccgccttgcatctggtgggggcgaacaacgagatgcgaggttctttgtttcgaccgtcatcagtcaaacagagagaggtgagcttggcttgtgcccctgcttctgcatgtgagacaccgggatgcactatagggtaaaacttacgcaaattcgtgtttcgtgcaggagctttttgcggagcgcttcttgttctctgccagtggcgcatcctgggcaccggcatcccacctgcaggcatgtgtcaaaaagtgcccggttaaaatctcgaatttagcgcaaccgccgcacaggtcaatgtcccaacaccgcacctgtgctccagcgcccgcactgcgtcgcgcacgtggttgatctgttgttgcatgtgcatgttggctgtgatgagctcagtgcgcgcatcattaatgtcgttcaactgttgctgcatgcgttgcatgatgcggagctcgaatgcaacgagctgctcttgggtgacgtagaagggtagttggttttgcaggggggccggctccatgttcatgtccctaaaggcgcagcagacaagaaaacgctatatataaacgtacagagacaaagtgctgacgcttgaatgcaatctcatgcatctcacctcaatgcatctcatctcaatgcatccacaaacaagtacggtccaatacagtatcaagcaagtagatagctctgcaagaagaactcatgagataactcaagtccatgcaagtcaaagcaatccaaagaatccatgcacgccggcggctcctcgtccagactcatcacgcacacgcacggaactgatgcggcggcggcttatcgcccagccccatcacgcacggcagaggcagcgtctcgtccatccttatcacacatcatgccacgcggcggcttgagaatgccacactggaaatcgatcgtcattgattgcagcataacaacaacacggcggactcttatcactgccagcacacctcacagacacttcttattattaattcgcggtatcggattggcaaaaaaggaaattacagcgtgtcccactttatttgagagtaggagcacatgatggcgtccgtgaagactcgtcgcgccttgttaatttttccaagttactacgtagacgggttgggacccgtgcttatgcacacattgcaagagtgtggtacgctgccaagggacttgaaggggtacagatgtggcggagccatgaaggaccatgatgtttttgtcaacaaggttttgggttctggtatggagatcagtgttctcgaaggcaccgtgtaccggaggaccgtcatgaaccaattggcttggttgttggagccctccgtggacgttgctcttttgttattctgtgggcatggcatgaatgaggggtcgccacgtcacggtacattggtatgttcttacaaacagctggtgtcagctgaggccatcgatgcggtggtgctgagagcagccgagggtggccacaccgaggtggtcagactcctcatggaagctccagcccaccctgcgcgagcggactaccagatggatggtgctctgctgagagcagccgagggtggccacaccgaggtggtcagactcctcctgtctgctccagtccaccctacacacgcagactgtctaggaggagctgctcttatggaagcagttagacgccagagggggcgtgctctggcgttggctagacagggtggacacgtagaagttgccaaacttctcttgagatttggtggttagagcacgattgatggctttgggagctgcctagaagctgcaatgcgcgcaggcctgatcacaccccctttgattgggggtgtttctgatacagtttgggtcacggagttgcctagaaactacttcagtttcaaaatctatattagtctccgttgtaaaagttgaatactcaatcgtttctcaacatgtccgtgtactgtcgtttgagaaccccgcactctctcacaaacgctgccaatttgtcctctgtgtacaaaggtggaaatatgaatccgggcctataactcaggttgtgttcgtgtatgccgtgtttctccaggacatctgcaaagtcattgcacgtgaatgtgcttggcagtttaagcgcatccatgattttttttgtaaaagtcaactgcatccagttgcggaacaccaaccaccccactgcgtcacgccatcaattcccttctccctaatcccgacgtcaccttacctctctggccccgcaagccaaatctcctgcccaaagcccccccccccctgcggaacacccccccccccccccccctgcggaacaccccccccccccccccccccctgcggaacaccaccccccccccccccccccctgcggaacacccctgcggaacacctctgcggaaccatcctgcggaacaccaaccaccccccctgcggaacacccaccaccccctgcggaacaccaaccaccccctgcggaacaccaaccaccccccctgcggaacacccctgcggaccccccctgcggaacaccaaccaccccctgcggaacaccaacccccccccctgcggaacacccctgcggaccccccctgcggaacaccaaccaccccctgcggaacaccatcaattcccttctccctaatcccgacatcaccttacctctctggccccgcaagccaaatctcctgcccaaagcccccccccccccccccccccttcctgcccgatatctatacccgtcttcctcctatccctacagtcggcggaacagtaaaatgaaacatcaaaaaaacggtataatggggcatgcagtgtgtgccatggggttgcatgaggcatggggttgcatggggcatgcggtgtgtgccatggggttgcatggggaatgcggtgtgtgccatggggttgcatggggcatgcggtgtgtgccatggggttgcatggggcatgcccggaggttcgtgtcgcgagctacccggacatgcgaaaccacacgctgcccggacatgcgaaaccacacgatgcccggaggttcgtgtcgctagctggctgacagcaaacgctcgcatcggtgaaaggtgacgtgtcacaggatagacatgtcaaacgtcgagagtttcagctgaaacatgataagggtttggtaggttcatatgctcggtccagcgaggatgcaccacatctttcgctggttaccactcaattcctggaaattctgaggcccaaggtgaggtgtctttgaaatagcttccatgattttgcgacgagttgcatcgcctgttcgctaatttgaattgcattgccgaattgcattgctcaggaaatgctcgctcgctcgctcaggaagtgcttgctcgcatcgctcaggaaactgcttgctcgcattgctcaggaattgcttgctcgctcgctcaatcggcgtttttaaatcgcgattgtttcatcgcttataggagctagatcgagttagctggcggatcttgcttacaggatagtcaatactgcttgcctgcttgaatgagaggcaaacaaggccattccgcacttcgcgactgttcgaaaattacaggatgctagatcgaggttgagctcgcggtcggaccttagcttaccggatagtgttagatgctgctgcaattgcctcctgcactgtcggcaattgttcgatagctgacaggatgctagatcgagttcagctggtcggatatgattacaggatagtacaaatgatgctgcttgcaatgctgcctgcactgtcgcaattgttcgataacttacaggatgctagatcgagttgagctggtcggacctagcttacaggatagtcaaatgctgctgctgcaatgcctgcctgcactgtcgcaattgttcgataacttacaggatgctagatcgagttgagcttgtaggatctatattacaggatagtcaaatgctgttgctgcactgcctgcctgactgattttatgctccattttttcgtaacacaggaaacatacccaagtcatcctatgtcaacttgacaggctatatatcgtcgtcgtcagaggaccaaggtacatgcaattgtttgcttttaatataatgtacaactgcgatgtcgttttacatttcccgtgtttctctatttattaatatctgacacgggttttcattttattcctgtgactacagatgaagaggatgaggtcgaggtagttgaggatgaggtcgaggtggttgagaatgaggtcgaggtagttgaggatgaggtcgaggtggttgagaatgaggtcgaggtggttgagaatgaggtcgatgtggttgaggatgaggtcgaggtggttgataatgaggtcgaggtggttgagatcgagcgccctttgtggaagtgtccttgctgcctaaacaatcatgttgcagcgctcgcccttccctgcgatcacctcgtgtgcggagactgctttccaagactgaattcgtgccctctttgccgcaactccatagctggccctagtagtgttagtgttgtgcctctgactgtgcaacgtgccaaacgtgggcagagagcattggaagtggacttgacgcatgataacgaagatgagggtgccgcgggtgctaactggtgttgccctcaatgcgcaaatctgcgcacgaaggggtcttcatgcaaggaatgcaaagctgcaagatgcgaagactgttggaaaagaagccaatacaagtgtgtgttctgtacaatcggcaccccttcgcgacggccgctacgtttgtgatttgatctgatgaaaatggacaccttgggattttgacagttgaccatcaatctttgtaaccgatcaaacccgttcagaagtgtcttttctcctgctgtctcacattgtgcgcgttaaaagcgttaatatgattgatgcaaaggtcggactcgaccgaaagcatgcaataatgcaaacgcacgcacacgcacgtgaagaagagtgatagatagatttacaacacaggatcacgcacgtttcgtgcaggggcgaagcccggcatttgaggtctttaggttgcatggggcatgttgtgtgtaccacggggttgcatggggcatgcggtgtgtgcggtgtgtaccatttggggaatgttggtgtgtcatgagggtggcaagggggcagagggtgtcggttgtccatgggcatgcgggttgtgtgccatgcggcatgcggttgtgtacaatgggcatgcgggtgtgcggtgtgtaacatgggggatgaggtgttctaccaatggggctgcctgttctcgtggcgggttgtacacacggagggcatgcggttgtgtgcggtgtgtacaatgggggcatgctgtgtgtaccacgggcattgcggatatggctttggtttgtgtgcggtgtgtaccatggggcatgcggtgtgtgtaccatggggcatgcggtgtgtgaggttgtgtaccatggggcatgcggtcttggttatgtgtgcggtctgttacattgggatgttgtgtaacgggggcatgcggtagttccgtttgtgtgcgttgttcttggttaccatgggcatgtgtgtgtacccatggcctgcgggtacgtgtgtgcgttaccatggggcatgcggtgtgtgcggtgtgtaccatggggcatgctgtgtgtaccatggggcatgcggtgtgtgccatggggttgcatggggcatgcggtgtgtgccgtgcaaatcgaccgggcggcaggaacgatgcccatcatttgtaaaccataggagctaaaaccccggatacaaggatacccgcggagcgggttttgccatctatttattcttccattatttcattatttcattcacaaaacccattcaccacataaataaatccctacttatccccacttgcttattcacgtccaaggtaaacacgatcaatatcatcgactattcattgattccttcatttgatgattacaacatttaattccacgcacttgtttcccttaggcacaacaatcaacatcatgggatccgtcccatatcatgggatcccaaccgaggtgtggctacacatagcatcattgactgtggaccgtagcggatcctcaacaccttttccgtgggcgctgagccgctccatgcaaaaggcagcgtgggagacccctgggtacatgcgacatctgttggtgaatagattctgctccatgcggaaggcagttcgtgccatgcaatcaatgggaaacatgaagtgcatactcgctttagtccaagataactctgatgtctctcccaaagtagcacgctcttgcatgctcagtgagacgtcggcggccatacacagtgacgggagcattgaagctttgagatgcatgcaagaatactggaaggatgtcatcaatgacaagattgtcattgagtgcatgggcctggccatcagacgcaaccgcccagacatcgtgaggagtttcctcatcactggaggacccgtgcgtctccgtctgaaccacttcgacgacccattcatgattgcctgcaagtttgggtacgctgaggtcgtgcagatcctactggacgctaatgcgatagacagaactggctacgccgacgatcactatgacaaggcattcgcacacgggcacattaccatcatgcacatgctattcgagagaggcctcacttcatttgacgcatgtacaatggctaacatgcattctgtgtactttttcgggagaaacctttcgagatcaggcaggacgaggagggtatcatgagagccgcaggacacgtcgtgagcggctgcaactgcaatatgtgtatgtcgaccaaaaacttgcagtagcagatgcacgccctggcgagtcacctgatgtagctagggattgtggattgacccccccccctctcagattttcgtgtgtcagattttcgggtgtgacacaaagatacacgcacgtagcgcagtacagtcagatatgagagctttgagttgtagtttgggcgaggacctgcgtaaggttccgtcgcaatagtaggccgtccaatgttcccgatccgagatctagttggccgatggaaggttccgtgggggattttcctagggaaaggtctgtttgggagcgaccctttgagagaagatccaattgggaattttcgaaggaatgttcgaggaatgttctttaggaatattccgataggaaaagctatgaatagagtgcct

SEQ ID NO: 311 - DNA, 20654 bp, unidentified
  source 1..20654: mol_type = other DNA
  misc_feature 1..20654: note = Fanzor polypeptide
ggatgccgtcgacaccagaggacttccgtcgcgctgcgcctacgacgccggatgcttacaaactcttgtaccggattctcatggaggaccccgtccgaagcaaggttgcaaagcagttccacaaactcaaggggtcgccctaccaactgcgattggcagggtacataaagacttctgtggagcacatcatgaacgacatccgcaaattgtacacgtacaacacgcctgcgaagaaagactcctttaacgacatcttcttttacaaggttcgtgtgctagtcatgaacacgtacctcttggcgcgcatgctttactacatgacgaatcgcgacacaaagcaattgcaccaccgcattgtgttgtatgccggggcgatgcacaccgccgcagctacgtcattcctagtgcactacattggcgcctccattgtgtccaacaccccgtcgacctttgcagctactactacaacaaccaacaaaaacaacaacaatgtcagaagcgtgaaccgttgcgtcaacgtcgagctggaccccgtgatagaggagctcgtggtacttggtcaatccactacacaatgaagtattgcgtccatataatgtatatataccttggtgtaacattattggactttaccgagtgtatcatcgtcatcatcggatatcttcaagcacgcctctagtaggtctgtacaccctcctttcaccagcagctctccagctcgctgtggtagctgtatcagacggaccaggttcaatccggagaaaatctagtgcagcgttttcgataccagcacaaccttggtgttcgccgataatatggcgatgcgaataagaacttcatacggaaggtcatgtagttgtagcctgtggaggagccaggaggaggaggggggacatatttttgcgaccgttggttgttcctctgctctgatgctgctgggttccgggaatcaaccattcatcaaagcgaattcgcgcatcagcctgttcctgcatgccgcgtactcgggatccgaagaggctcttttccacgccttctgaatcctctagaccgccaagtgttcctgaatgatgctgtttctttcggtgtcagacaatagcatgacaggatgtctgctcaattcacgccagtcccacggcacgtcggggttgtcccgtacgatctcccacgatgtcgcaacgctgcggttcctgctcaaataaatccactcccacggcttgtctgggttgtcccgcactgtctcccatgtcgccacactggggttctcgctcaacccgtaccagttccaaggcttgtcggggttatcccgcacaatttcccacgatgtcaccacgctggggttactattcagttcacaccagtcccacggcttgtcaaggttgtcccacacgatctcccacgatgctgccacgctggggttcccactgaatggcctccagtccgagtccttgtcgggactccccctgaaaccccagtttccagagaggcaagtgtgagtgctcaaccatccgacccacaagggtctgtcagcagcttaccttgttatcctttgggccagcttaactgctgaaatacgggatgaagagcacaatatgaaatcgactttagctgacctacccattgggttcaagggtcaccggtaaggtgtcccacaatttgtgtctccgactgtatcatttatacacattacaccacaacggaagcactgaattctggattgtaaggaggttgtgctgtacacaatgcggcaccattgggagattaggggagatttggacgaaaactgtgtttacaggacaaacgataaagatcagctcggttactgtccgtctaatcaataaagtataaggaagaaaggcctctgtatatcatagtaaaaatgtgacgcttcatgtgttggtgaaagtgcctgagaagaaagggttatttgtgggtttgcactggtgtctccttgagagttcccaccagcgacatttgcaaaatccataactgaccatcaatctctattctcatcaccaacgcctatcgaaacaacacatgttgagggagggcgagcaccccatgagccctagaggcctcaactcaggcgatgaagcttcggccgagccatacacgatgaagtcaagtgtaacattattcactggaccgagtgtacaaaacttgtaccggtaattggtcaacttttcataagagaagccccaaaagagacacacgagaggggtgtgattcccgctccctatcaaacaccctacaacttcctacgtgcaggcacactgaacaagtgcgacgcgatggaaacgaactggtccaagaacgtttggtactcggatgggtcagtctcagcctttcccaggtgcgtgtgcacgttgttgatgtgaaagaaagcccggttcctgttgacgatcgacagggtcaagatgatgatgatgtctgtgcggtagtcgctctggctgctgaatttgagcttactgcacatctgcagcatgtttatcatgatgcactgtatgttgtgcatgttcctcttgaactcaccagcttcgtcctcccaacagggctcatatatgacgtcatcgttcatcaccttgcacccatgaaacaaccaactgctagttttccagctgtgtgtggaaatcttagccggaggagcgttatacatctccccgtcctctacgtcggccacaattttctgagcgatggccttggcagacaactcccgtttgtcgtcgtcaaatatcttgtccagcgcgcatttatctgccagatggcttgccacaatgatcttcttgttcgtctcaccaccaccaccaccaccaccaccaccaccatttttgcctcgcatttcccacagcgccgaaagggggggcctggtagagctgatgatgcggacaaagtcaacactgtcgtagtcgaaaaggacaatgttgccactggcatcatagcccatgttgatagtgcgaatgtcagagtggaccatacccatagtccagaggtggcagagggcagtctcgatacctgtcctggtggcactgctcagaggtgtttcgtccgtcgtcggtacctcaagtctagggtactttatgtacagcttgacgttgacgttgcccttacactttaggacctcgatttccacaggcacgcaaagcttcgtttccttagacgtgagcccctccttcttgtggtacatgctaatcatcttggcggcgaccatctcacgaatcgctccgatgagcaagtgagtccagtctttcttccaaaggtcgctccctacaggagcccacccagcgatgtccatggtcttcaaaaaattatgcggattcttcatcataacgtcagcgcgcttggacgaacgcttgggaggttgaccaagcataagaacaaaatatcaaagaataaggagagggatacaaaagagggctctgtgaccaacaacacagggtgcgttccttaaatacaccatatcgtggttgtacatcaccagtacaattggcacctgcggtttcgtagcggtaccctagcggtttcctagcgaaacatgggtatatctttctccgggctagtgagtaaagagatccgcgccaatttgttgcgcgatcacgccgagagtttccaaacgttccgtccatttcaattaagtggcgacgacaacaggacgacgatcatttccaggtggcacgtggacatactggttatgttcgcgcgacacgtacacgtggacccgaattccgcggaaggggggttcggtatgtcttcctcttcttgggcagccccccccgacaaggtgattgttgtgggcgccgacgccgacgatttctcgaagctacggaacagtgtcgcgttggacatctgtgtcaagtacgggtacgtaaacacgttcgaaggaaaagctttcgccaaacggaatgctgaccacccccaagccaaaaaaaatctccggcaggctcaccttaaaaaaacaagggtcgcgatcaatgcatacaacaacaaccttgctctgaaagaaaaacatggtgaacacggtgagaagatgcatcggtctgtctccttggaaacaatcgctgatgaagccataaagttgggggataacgattgggacacacaattattgttatcactgatcgcggtaggaaacacgctgcacagggcgttcgaactgcgcaaactcaaacacgaaacgaaaacacattttcgcgaaagagaactgctgatccacacgaccaaggaatttgtaacatacgccgtcaatcatttctacgcagctcttacagagctaatggaacaaaaagaagaagaagaagaagaagagtcatcctctgaaaacgaacatttcatgtgcgtcgcgtacgagtatattcccgtccgaaggaggcattcaacaaagaagcctgtcgcttgattacaatgtgtaagtgatgcacgtctttgaggagcttgcgcttacgctgagcaacagcatgcacgaactcatccgccgtcccctctgcattcccctgctgtgctagaacctggtcgcgactgaatgttgacatgtgcacgtacacatctactgtgcgctcttccggcgggaggtcgtcgtgagagtacgcgcgtctggctcgccccaccacctgctcaattcggttggcgcgccagaaaggctcgagaacgtgaaccgctcgcacgtttcgtgtagagatcccctcggagcccgactttgagatcaacagcaccgccgctatttcccctctaatgttgttcgtcgcgtctttaaattcagtacggacgtcctcgcgcgccgcttgagggagctcgctgacacggttgttgaaaagggacaacaaaagctccatgcgttccgacgattgttccgaccccgacgagaacgtgatgaaagacagcccaatgtcattttttgtaccgggtggggggggaacgcggcgcaagcgcaattgtgttccatcggagaagcattggatttccccgaagccgttcgcgcgtagaacctgtccgaagattgcaataccttccgcagccctgaactgggagtatacgattgctgggaagccaccaccaccaacaaccgttttggcatcgccgtttttttttgtcgaagaagaagaaggtgacgacgacggcggcgacgacgacaacattgggtaccctgcatcaagtgagttgacacgccgttcccctccccctcccctcctcctcctgatgtccgttgatgatgatacagaaaaaccagaaagaattaactccaatacacgagcgaactttgacgataacacttccagggtgtactccctaccccccgtagtaccccccgtcattaggacggaattctctcgtcgttcgttttttagtcgaagctgtccaggacgctctaccagacgctgcaccgcggtctcaagtgctttctcgtagttggcggacaacaccgtagcagggctagtccggtaggggcgttgcatgtcgtgtgggaaggcgaagttacacacggcgcgtgtgaaaggacggtaccccatgccactgtcttcttctgcatcccccttcatcctcctctgcctcgccattttctcgcgacgcacttcgatggcgcgctggtacccgtactctgcgaactggtaggcgctgaggtgcgtgcgcacgatcgcgaacttccgcaacgtcgggtacacagatgcgtcgtgaccctcgaaaaacgacactcgacctcgcaagtgcccctccaacaggtccaaatttcttaagaagctcctcttcttttgagtggtggtggcaactggggggtcgtcgaccagatacatggcgtcgaactcatcgcggttgtcagagaccggtttcaacagcaccggtctggccatagcagctgctacacgatccttcggaagtcctaaggcggttgcaatttcaagatctatcgtggtggtggcactgctccgaacgaccaggaggtttgtgttgtctgtaccggtatcggcggagatgcgaaagccctcagggaccagcgtgatgcggacggcagggcgcaggaggcgccccaccacggagggcgtgaaactctgcaccacgggaatcgatgagagaccagaaatctgttgttgattcacgaaggcttggtgcggtttcaatgtccttcccccactattcccttctactactacatgcatgtcgagattgttcacgttcatgcgcaaacggatgatggagtcaaatctgtcggagctaagaagaggccatcctaagagctcttcttcgtcatcatcgtcatgatcatcatcattttctaatttttttttcatacggtggtagctcctcttattgtttttttcgcgaaagttgtgtatgcgactcaccaacacgtccagctttgacattgtagtatggtaaaaacgagtataaaaaaggtgcgtttaaaaaatcttagagagagatagagacatcatggcgtctctttcgcttgctgctattgagagcgatggagtgctcgtggtagcttctgcaggggctcgcgagcccccattggttcttgctgaacgaacgaaacttcttgcacaagagatctcgaggtgtcctgttggaagcaatgacggtccgagcgtgactctatcagcactcttagtatttcagaagaattggtcgaagagacgcggcaaaaggcgtgggcgaaaatcgcctcagtcgagtacctacctactcatgcatgaacgtttttttgagaaccacgaagagatcagcagaggagactgtgagaccatgggggacgaggttttttacagaacaaggggtaatggcaacacggtgccggttgccgagtttgtttcccgaaaatgattaaatctacgcctctgtaaaatctgcaaggcctccgagatccttagtgtctccagaacccaagcagtatccaactcaactaaaggatctggtgggaagcgttcactcaatcgcaaggctgcactgcatggaacactattgggtcaagagacgtctgaccgcttccacagtttgcccaccgcagctctgcttgtggatgttgacatccatcaccgccgcccagtgggtggtcgcgacaacaacacaacacaattatgtctcactccccggcccgtacacagacgtaagcacaactcctcttcatgaagtggatgaacaattcacatgcatcttggagtacctcggcgtcggccgcaggcgatgatggagtgatgttgattaatgtcgaagtattcagcgagaacatcttgtacttgcggggaggggactgatgaagcgtatccttgggtgtcatgttccatagggtcagtgcggcgccgatgatatcattatcatggctcgccttgttcaatatcttgcggcgaagagagtacctcttgggagtgttcataataatgtatgaatgaacaatgtaaagccaattttatactcgaaatcatcactaccgcaattttgtaccgcatttgtacaatctgtataaggattatccgcggattatctcatccatcatgccttcttccttcaaggtggggtttgagccgtcgcacatcggggagcagtgtgcccggtacgccgacgtgcgcaaattatttggattttgcgaccagggtttacaggttatgtttatccagcgcgaaaacaaaaactgtagaagcagtcttcttgtacgggaatgtgagaagagagttcacgtcccgaagtgcaatctcgggggcctcctatgtgtgctcagaaggcggctgatattgttggagcacatgagagtaactgggcaaacgatgaggatggacctccaccacacagtacatgcactgttgttgaagtctatgtggagtggtgcacgaatggagaagaagaagatgactcatcatcagcatcgaggaggaagagaatgaggagaaaactacgactgacccgcatcattgcagccaatgaagcatgcgccgtggggtggggagacgatgattcatcagttgcactgcacagcttctttggctacaatgacgaagacgaagacgatcccaccaattttttgtccattccgcctagtgtggtaaaaggtgtggaggctctcctccttcagcttcccaatctgttcaacgatcatcttgctgactcagctttagagaaggagaagcttgtctgccgggctttgaataccactactacttctccacctcctgccgtcgatgtgccaataacctcagttcggaagatgtacatagttgtcgaataatgtcttcccaccccactcgcgcaaacacatctttcttctctgtttttaaaaaaatgaaaataattaaagtgttgctttgttgcaaaatgtttgatacaacttacgcctgtctgcattgttcctgtgggctatgtttggattcatggggaacatggtgaattgcgacatccaacgattcgtgaacagcgatggggtgacccctcacatcgttggtgttacgtgcttctttttcttgtttacggtcatcgatcagggcaacagtggtgcgaccacggatgtatgggggatctggcttaaaacaatctacgtaaacttgctctttatgttaatgaccaagtccaagtggtacttcgttcttcctgtcctgatccttttgctggttgatcaatccatcaagaagcaggtatcgttcaacgaagctaaaagtaccgaagctaacagtaccgaagctaacagtaccgaagctaaaagtaccgaaaattttgcggaaggaggaggaactgctgtatcgaagcagcgacagttgcaacaaacgttttccaacgcaaccaacatcattgtcccgatcatcattgtcttcgggacggtgcattattcattttaccaaaggtccctcagaggtgacaaacgtttttcttaatataactttttgttcaggaagaacaaatgcaggttccagaaatgaaatgaaatgaatggttgacatacagctagggacatttgatagtgggacaccttgtattttggggatttgaccaattcaagttttgtaaccgatcttgtcaatacagatactgtcttcaagagattgacacaaaacattcaaggcatgtaaagacacagaagttacatgatcaaagtagcctgacaagtcaacgtgttggcttacatcgtgcgcatcaataatcattttcaaagcgttcctgtaatcaaataattctgctacatctggaattattgggcacgcgcagcgatattttcgcttgagcaaactgaacacattctcaatagcgttaaactatggactgtaaggaggtacaaagagcgggcgtattcctacagaatcgaacgcagagatcgtctcctttctatgatggaactggatattgtcaaggacagcgacagtaccctgctttacatgtagctctgatacaaactgtacaaagtcgactttcttgcaattgtgatcaaggattttgtaatgaacgatacctttgacagaaacggcagcgatcagcgtcaatttggacattcgcaatgtccgagaaatttggatatttaaacgtttgccgcgttgacagtaccctctgcgacaagtgtcaccgatgtaaaaacccgcctcatcaatgcttatcaaatccgatgtcggaacggccagatactctttacaaaaactttcgacagaatatctgtggtcattcttgtgtcgaactgttttgtatgcgcgcttgcgggtgtagccaagtctgcgtgtgtagcgtccaaacgtttttggagacatcttgacagaggacagagacgtcacaccctctgcaagctgagacattgtcaagaagggattggagtcgatcagtttttttatagcatccttgatatcttcggtaatgacgctcgcccgtttcttacgatgatgttttatattggctttggtgacccaacgttgaagtgacgattttgatactttgtacaacagactaactttcctcaagctacaattatagtatttgtagtgaacaaccgcgcgatgtcttacctctgcatcaatcatgataacgtgcgcgtataagggtataagtaaattggtatcaccaaaagaaaaataatactccctccctcttaatgggggtggtgtcagaccaaggagacgatgacgatcttaacatcatggtggtcaagaagacgcttaattctctgtgcatggttgtgtcgaggcaacagatctgctcaaggatccaaagcatggtactcttaatcaaccacgcagttgcagaggcatacttattcgcaaattttcatatcaccagatgcctcgatgatgtagactttgacgtgaagcagttgccgaacctggatcgaaacttttattacaggtgcatccttgcggtctcgacatccaacgttcgaaaggatacgctgggccagagcttgaaggatagcatggttgctttcaacgctctcaggcctgcaggctacgtaaaggtggacgttcgtccatggggacaggtaatcgcagacgtctcaatacaaatggcgacgatggcatgcaacagcgtctgggcaaacgtggacagggttgtaatcaagttcctgcgcttgaaatatccctcgtttaagaaacatttcaagaagattgtcaaagcggtggccagtattcagaatcggacgtcgacaaaatcatcccagcgggccttgtgcatgcgagccacatcaaagaggttgtcaggcacttgaggactctcttgccgctgccaagagggaagcagttcaacactagagcgcacctgacgatgcgactgttccatcacgtgcttacagagttgggggaggtcggacgagcggtgccaaaagaaaaaaaaacaaaaaaagtcgcccccgtctgtttagtatccttcctcgcaagagcggcttcacaatgtcttatgtccctatatcgtccatgacgctcatgaagcttctcagcatgggtgattcaccactcgagagcatctgtggcgatggacgtcacgcgaatcataacatgttgtggcgaaagtacttcaatgtccgaggtcttgagacgaaaatgtctcgctttgacaaccgaatcctcagcgacggtaaaggggtctcggtccagatgaagcagaagggtaaagatgatgtcgctgacgaaggagaaaacgcaggctatcccaaagacgcaggtatcgaagaatgcaaggacgcttctttgcgcatgggtgctctgcgagtcggagtcgaccctggtatgacagatatcgtcactgtagcatcttctgctggtcgcgtcaagtctttcagctccgctcgctttagcgaagctgcagggtacaagaccagcaagcgtcgcaccgacaaatggaatgccgagactgaagaactcgtgaagtccattccatcgccgactacgagcagtatgtcagacctgcgggaccatgccataggttacctcgcagcgctcccgatcctcctacaccaccgaggcagcagaggctaccgatcgatgcgattctttcgatacgttggcaaacagaagacgattgaaaaagtatgcgatgtgattgctccaagggcgcagacgaccgttgttggcttcggcaactggtacaaccagggatacggcatcagtcgttcatgttctgggcccgtgaaagagatcaggaagtgcctttctcgtcataagaatgttctgttcaaaaacgtcgacgaacgcaacacttcatgtacatgtcacggctgcttccagaggctagtcaacatgaaagcagacagtgtcgtttggcgcagagattacagagagtctcctatcgtagggactataacgtttgagaagcagaagacggtggtgaagaacgtcaaggtccacgaagtactgcactgtagagacagtgtcaaaagcgcatcatccaatgtgcgctgtggtgcaacctggaaccgagacgtgaacgctgccaagaaccttcttctgcttctgacaacgtggatggacgggagagagaggccggtggcattctgtgtgccctcgcctccccctgaaaccccagtttccagagaggcaagtgtgagtgctcaaccgaccgacccacatgggtctgtcagcagcttacattgttatcctttgggccagcttaactgctgaaatgcgggatgaagagcacaaaatgaaatcgcctttagctgacctacccattgggttcaagggtcaccggtaaggtgtcccacaatttgtgtctccgactgtataaaggttgcctgacgactgactgtattattcatttgaagcccagcccagcctaatgcgtgcgggaggagggggggtgctcaaggtcttgatcatcgataatacctccttgtcgaatgctgatgctgatcatttctacgaacgtttagaagaatggatcgctttgcaaccgcgtcacaaggaccaagccatacaaagcttgctttttcacgggctgcacgccgctcaaacgatcctgccagcagcatcaccgacgctcgcggtcctagacaaggaacgctccacggctgcatccgctctggagctggaaaagataaggtttgccgatgctctggagaaggaacgcgtgaagttcgccaatgctctagagaaggaaagaagagccgttacggtagccgtggagaaggagcggtttgagttagagcgtgtgctcgagacgcgagtgcgtgccggggtggcacaggggtgtgccgaggaacgagtgcagttgcaagccgttgaggcgctgctcgctgccttgcgcgaccgggaaatcgagaaggaggtggcacgtaggacagtcgacacaaaggtgttgcggatgcagctagcagatctcgaacgagagatggagatcctgcgtcgttctaacagtgcccggggcgctgtaggcgaggagcgtatttcgagtttccttagacgagagtggcctacgtcggaggtgcgcgacatgtcacagtctccccacacctgcgaactttggtggtactgcgcttccaacaaaggaggaggaggaggcgatagtttttgccgttcatccaacggctccaatggcacatctcctcatcggggccgtgttggtgagctgtcgctcggagaacatctccggcaaggggcctatcaaactggtgatgatgccatctcgcggggggggggggcagatcgataccgatgctgttcgcaggattcaacagcaccagtaaggacgatgatcgtgatggtggtggtgatttggtgtggctcaagggggtgcttaacgttttcctgacggtgacgcattacgagcacaatcgggcggcctcctcctcacgcgtttcttcctctgaagatgaggatcgccgtaagcacaacacgaaagcgatggtggccaggctctcaaaaatggtagagcatgtcggtagggttcgctcgttcgtgcacaacgtgcgtactacacacctcgcagcggcactcaaccttacggccaaggcggacgtggagctacgggagctgttctccaacttggcagacgtgtgcaaggagatggacaccgagtatctcgatggtgcggcgaacgttaagtctcccaaatgcgacgacacttcaaacacttctgccccctcatcctcatcctcctctatagtagtatgcgagggtcatgtttgtgaagagtgtggacgtttttcccgttcgtcgcgtggtatgtccatccacaagcgaacgtgccggtcgtgttcgattattcaaagcctcgttgggctgactcgcacaccgggcctgccgccacttaaaaaacagtacatcgcaaaattaactatatgttgagggagggtggggggatctcagccagtcagtaataatgatgagctcccccgctctgaggcctcagcgtcggcaatgaagctattaagttagcggagccatacacaatgaagtattgcgtccatataatgtatatataccttggtgtaacattattggactttaccgagtgtattatatacgtggtatgaaggtgtttgtagtgctcaccttgttcgtgggaatggcgctcatcatccacggcatttacgaagagaagttccaggaaatgaacaagaacgtcagggtcgagtacagattcctccctaggacgctctacgaagagcaactgagcaagcaagactccgctctcacggcaaagtttaagaacatgttccaggaggactcgccgtggaagtagaaggttgcaacagttgccgagtttgtttcccgaaaatgattaaacctaccacaataaaggattgttgtcggcaaacaaaaattgaatgcgattcgatcacatccatgacacacacacacacacacacacacacaactggatctatggacaagtacacgtccccacccattgtgatccatctcctcctctgcatcgccaatgtcgctaagaggaactgtcagaatcttgctcccaaattgccacaaatcgaccacaagatgtcgaaacttcgtgaacacctcaggaatatagaagagattgtcgattggctcagcgggtgggcgatgaagtgcactgaaaatgcagataatctcggcgcactcgttgacatcaagggtctgcttcacgtgcctgtgaaagctgcgtacaagtttcttgtggaaatcgaggtcattctcaacgggttccgctactacgaattcaaataccctgatctcttgcgcaagcacagaggaggaaagcttccccaagtaacgattgagaggcgcaccgcgtacctcctcgataccttggacatgtccttctgcccaccaaaaatccttgtttacaacaacagagtgttcttcttgtcccgtctgctgtgtgatactactatgcatctcaacgaagatgttgagaaagctgctgctatgaccgctgtgaacgctatgatccagtcatgcgatctcgacggcaacgccaaggcgttgattgccgagttcgagactgtttaccacaacaggatgttcaccgccttgacaggccgccgttctacgccttcgacttagaagaagtagagaagcacgtgagttcctcccccaggggggggacgacgtttacgtttttttcttccgaaaagtcattgctcttgtcgcacggaactatgctagccttgtaccggtagcaatgctggttgtagcggtatacgttcttctcaacatcctgaacattgggtgatttgatcacgatacaacggtcccccttgcaactctgtctgaatagtgcagccaacccgagaccgaatatgatcgaaatgattactgacccagtcttggtatcgaatgctttggtaatcatgtcactgtcacaacatcgtactgtcacgctccatatttttttaaagcgatgtgtggcattgcgttgcgttgcgtctcaaaaaggtgccgacccacgggcatccgcgaacttcatcatttcatcaagaactgacttgctataaccatctcctcctccatcattggcgacaactgcactgctacttctactactactactactactactactacttgatccaatagccggtctaggtaaaaggttgaaggaggaggcaccaccgctgtcattatgtgtcgtcgtcgcatcatatgtgatggcaaaaattgctccccccccctccccactgtcgtcaccactgtgtctttgaagatacaccattaaccagtacgtaagtcccgcagaaaggatgaatattgtcatagtgccaagtactaccgaagctaccgatcttcccgagcgcgtgttttttgttatgctactattgttgcacgcgtactgatgcgcgttcatcatagacatcggcccataacggctactatgatttgtattattatgctgaacgtcatcattgacgccccccaccccccccatcgttttcgccactttcgatgatgatgacgatgatatagacttactcgtgacgagcgcgaaaacaggaccgccgtcatggatcctacaaccaaagggacgatcacgttgccgcccaatatcatcccgtgaaaaatcattattatttaaagaatatttacacaatacaacactttttttgtattcattgaagcgtgaagcgtggggacaccagtctgtgtgtaacattattattattatttacttgacagagtgtacaatctcgggtacaacctaccaaatatggggactataagcatacatagagattatttgaatataattgatgcggatctcagtttacacgagaatttcaaagatgttattcataaagttattaaaagaatatggaaattgaaagaagacgatcaaactctaagagatgtggccaccgcagttcttgttttttttcagaaacacattaaaatatatacctatggtgatgatgatcaagaaggtgtatatgatggagttgcttttgcggtcgctgatgccgtttttcataaagctgaaactcacattgtcgaagcatgtgggcatgctgcatataatgcttacaacaacgatactaatattgatcatgataaattaacaggcattggagttaaagatggaattgaagttagagctgcacctcccccccatgtaactcttccggctgcacttcttacctctgtaactccttcatctgcacctcccccccctgtaactgttcctgctgcacctcttacctctgtaactcttccggctgcacctcttacctctgtaactccttcatctgcacctcccccccctgtaactcttccggctgcacctcttacctctgtaactcttccggctgcacctcttacctctgtaactccttcatctgcacctcccccccttgtaactcttccggctgcacctcccccccatggaactcctccaggtacacctcctacccccggaactcccgtagttgtatcagatgcttctacgtctactgaccagttgttggatgtctctggacatctacaaattgaggaagaggagcaaccttcagtttcgtcgaatgttgttgttaaagaaaacaacggttcggtcagtgtcgataagatcaaccctgtaatgatattgcgctttaagcgtgctttggacctaccgaatgaaatattggaacggattcttacccaccgaatgaaatattggaacggattgcttcgcatgatctgtatcaagggaccggtataacggacaagagtatagaaagtgtttcgtccattttgaatgaggcgaagttctcgattccgatttccgaagaaacctttggagcatggacaaccttcttcttggatggtgatggtataggagggaatgattcatacaagttaggttactttattaactatatttggttccgggtgctgagacgactaatgttatacaggttgcgagcaactgacaccgaagatcaaacgataatcgaagacacaatcagtcgtatcaccgtattccttagagatttcacagacaaattcaacaccctggaacaatcactagaactcgtcggtagcattgattggtcttcaatacatacggatgaagacttgatcggttttgaaattgataacggtgacttaaaaattatgcgatatgacggtgtattcaaacaataccaatcgacgttggcatcgtccgtgttgtatgataacctgcgattgcaacgaacacagcttgagtcagatatatcgtacttgcttggtggagaacaagtatctttgcatgcattcccccaccatgccttttctaccgagacgttcaaagcacttgcagtgtcaatagagaatttcaagacactcccagaccacgacaagttagatatattcagggaaatcaagtacaaattccattaccattctctgctcgaaccaaccaaggctatcacgaaggtgtccaatgatatacaacgcatattcaatgtaaccaaaatattggggtggacggtctttccgcttatttataacctcaaactaacagacgatgttatcagggagagagtaaatgctatgaatatcagcgacccaggtatcgttttgctcgaaattgcaaaaacactgaggccgtttgtcgatacacctttggacatttttgaaggactgaagaaatacactgtgaaccctgacaaaattgatcaggtttacaacatgatcatcaaccttcgacgtttcgagaacatcagcaagggcaaggatgacgaaacattcattccgtggtcttatgatatgtccaaaaactcgattgtgatcgagggtgcagaagaacgtattgtggatagagttgtcaaaaatgtagttttcaaggaagtggaagaggcacaaaccatcatgtcaaatgtcaattcgacagaagcacgaccttctcaaaatacagaagcatcgaacaaatttggaattattgccaacaccattggaaatatctttcgcaaagaagatgctgaatccagagctcccgccagcaatgagcaaaaacatgataaaaatgatgaaaatatggcagccgaagccgatggagcagcagacagttccgttgccgacaacgccgctggagccaataaaccacccgccgaggccgatggagatgttggagccggtggagccggtaaagtcaattccgaagcaagtcccgatgctaccggaaccaccaacgccaacgccagcaataaaaacaaagaacaaacaggtaatggaaccgctgctactgcagccaccagcgccagcaccaacgatggagctaacggaactccagcatcttcagctccactagatccgttgatgggtgaggctccaccggatacaaaaaataatttttggggaaatatttcaaatgctgcaataaataagttggttaaaagaaataaggagggaaaacaatcaataaaaaagttctttggatttggatcaaaaaagcagggagggagtggtggtcctccatatcttccggcggaatactaccaacatcgtcatcaacaagcgggcggtggtgtagcattttcgaatttgttgaagacccaacgtgagacggagctcaaaaaagttcgtggcaacttatcggccgctcgtatgcaacttttacatcatctgaaagatgttcgcaagaatttgatcacgatttcttaccctaccatcggcatttactcaagtatcctgcaagatttggtggactttcagcgtatagtggaccgcatcacagacaattacgtgagcgtcaatgtcgtggacgaggacggagatggtggtgacgaaggtgctggtggtggtcggtccgctttgattagcaaccgggggtcgacacgtctttcatcaaaggggttgttgacaatactgtcgactcgtgcatccattagtcaggttcacgtcgtttacatgatcaagctaatacgaacaataacacagttgttaatcttgtacgtcactgaacacgtatttgcagagcactacttgcgcaaggtgcatgtgaacacattgaacgaccccgatgccctagatgatgtgccgttgaagcatcccgaggcaagtctagtaagctttctcttcattttcttggtgctcgacattatcatccaggtcatcattcttgtagcactggtgattgtcatgtacacatatgccaagtcatcaaacacgtttgttatcaacagcgccttcatcaccgatatcatcatcgacttcggcatgcaaacgctcatcatgagcgtggtggggtttgtcattgccaaaatcatgatgaagaagaagttcttcgagtaccctacacgagggttggcggtttccaaggcatatcgcaacatgatgatgtccattgcagttgtgaccacagctatcccatacaccatgctcttgaagtaagaaggaagagtggatgggagaagaatactagacacatacatattttctacacttagggtgtggtgtcaccccccccccccccccaacttcaacgcgatgatgcgcaatatagacgcgatctcctgcaacaggttgttatcaactccaacacatgttgtagtagtagtagtagtagtactgttgctaacctcgacgatgcacaaatcggggtcgggagaatggtgggacatggtatcgtcatgttcgtcatcatgctcgacaacaacatctcccttatctcccggaccctctgtgttgttcttctcttggacgacgtcctggacgacgatcaacttctcctcctcctcctccttctggtcctcctccttgttcttcttcttggtattccatcgggaggatgatggcggtggggggggggggggggggggggcgaatgagtgtcacgatgttttcttttcggcgtacggcgggatgtttagggtttagggtttatggcttcaaagtcctccatgtctttcgcgttgcgtgcgctctcgaactcgtagtcatcaaagtccgagatacccttggtgagccaggcgcactggttggagatcggggggggggaggcggcgatggtgtgaccgctacgctgcagccttccgacaacacacacgatgcgcttgaacactgttcgcatatcgagctccgttcggcagatccatttaatcttgaacttttcgtcaaaaaagtcggatggcttcaatcctcgggtggcagcaggttccctcagcatatctaggtgcatgacactgctcatgtagtatccgtactcgtccagacgtttgcgccagatgacacatgtggaaatggccatattatgttcttgcggtgccttttcgaaccgaccgaccgatgttcgttcggtgatgacgttgagacacgacgagatgacgaaac

SEQ ID NO: 312 - DNA, 20597 bp, Chlamydomonas sp.
  source 1..20597: mol_type = other DNA
cgtggctgctgtcctttacgaacagggattttctgttcgaactgccttcatgaagatgccttcgggaatgacgatgccctcaagatggagttcgtgcgttgcttgtttcgcgcctacgatcacgatttctgcttcgacatgccccctccggcgtgtgtgtgtgtgtgtgtgtgtctgctggttgatgttacactgtgggctcccctccagtcgcccacccgctcggttcctcgcggactcctttgtgggggctcccctccggtcgcccccggtcgctccgctggggggaagaggttaaagaggctccgccacttgtctaatgcggtatggtggttctcatccatttacaagcagtttttaggttggttgcttgaggatgagaacaaccgtgatgtagaatgataggtttccctgaattttgttacttgcgttattttttgatgtggagggctatagcggcacctgtgccgacacaggtgccgccgtgatgagagtggtcgcaacctcggggtagcttcctcgtctgaaatgccggaagtttggcaggtgcggtgagaaggtgtggatggccaacctggttgggtccacaccggcctgaatccttctgcattggaaaaggtggcagtgttgtccagcattgcggcggcgaggaggagagaataaaaaaatgcactttttatataattggtgtgttcatgtggcatgagacatgcttcttgtggcacgagctggccagtcatatatctgcggtcgacatgtatgtattgtccttgacatgcaatgctgctaggaagtactacatgcgcaatctactccagcttgcggtacttgacgtcacagaactgtcattgcgaagtgcatggaccattctgtcgcatgtgcactgcaagcaggtagccattcccacgagcttgcgccaaactgagttcctacacaacaaaagagtattgacaacaggggctgactgggcagcacgcaagggacacttgcccctattgcaatggctgctgttgaatactgaggaggtttgcacgacttatgcattcgacttggcagcacgcaatgggcatatgaacgttctgttgtggctgcatgacaatggcttaggcggcactaggacatcggccgattgggcggcatttactggtcacctacatattgtaaaatggttgtatgacaacacaaactttaagtgttctgagaatgctaccatgattgctgcaggcaatggggaccttgaaatgttgctgtggttgcacgcgcaaggtgtcacatgtaacacgagttgtgcaaactttggattcgcctgcgagcatgaaggaatcctgcagttccttgaatccgtgggatgcaaacgatgcatagacgaagcaaacactaacatcataaaaaatattcgacacatcattgagtgtgagcgactaacatccgctcggaactgaagccggtacaaggaatcctgttgttgcacgagtgtacacacgacaatttgtttgactaagctttttcacatgtattttgaatgtggctcccgcgtccaatcaggcagctctggtcatgtatgatggcaaggaacctgacatgaagacgaaagaatgttccctaccttgtttttgccaagacggtccctcgtctagcctcatccggtggtagactaagtaggattcagtgccttgcacaactgctacttgtccagtcctcctgcgtacaatgaacacgaaaaaaattccttttctcctgccccatggattgctacaccattaggttacactccggtgtggccgtacactctcgaaaggtagaagaagaatagcgtacgagtcctcagtcacactcactgagcttcactgagcttcactgagcttcactgaaccttgaacaaatataaacccctcatcgtcgtctcatctaatcacgatgaagataccaacattgagcatgttatgcatgaagcagattccttccaacgtatggcgcagtttgacaatacacattcagagctgcctgtacccgcgccaatggagatctgcaatcacgtcactgcaagggcatttgctccgttgctcacgacgcaggatggcttcgttattgcaattgcaggaggaccaggatgcttgccattggtcgttggccccaacaaacaccgtcgtacacaacacagctctggctttcgagaccttacgccacggcgaccacgttgttgtgatgatcggggggtgtcgcaatggttatgcacaccatggcattgtatctcgccctcacaccagcgatacaccaagcatcgctaacttcagctcccccaccgggaatagcaaaatgcgcgatgccaaacttcagtttgtgcgctacgacgtgttcttagctggacaccgcacgtttggatgcgtgccttgcaggggtgaggaaggagacgaggcgatgcaacgtgagcgagcagtcaacattgccggtctgcttatccagttgccccatgcaatcttgcacgagtaccaccttatcagaaggaactgtgagtgtttcgcctggatgtgcaagacgggttgcgtgcatacatcatccgatcaggtggatcgcattctgcgcgccattacaacatattttaggaaaggggatagatcgttcattctgcagtcaggcatgatcgcatcaaaatcttgtgtagtgtcttagcccgcatatccacacgcaccctctcctggtattggttttgacccgggatctaatccaaaaatattggagcaaccaaatcattgctccatgacatgttgagccaagagcatgatggcctggctgaatgctaccgttgaatttaagctagtccgcgaggaaccgagtgggtgggcgaccggaggggggcccacagttcacatcaactacgtaacttttaagtcttacacaatgtgtaagttgtttgtaaaagattcttgggaggttgcaacagtagttgcctcgtttgctttccgaaaataactaagcggcggaacgctgtcgataccaaatggtggtcatgacaagcagagcccccgtattcatggaaaaaatacagagaatggggtctagttgacgtggttattaagtggccacgtctagttgacttggtttcgcacgatgaaaggcacgagcacgtgactgaccatgtgattccttctcctctggaggtgttcgcggtatcgctctgcgatcactcgaactgccttactgacgcgcagcccagatatgcaaatcacctggaagaagaactcctggatttctgtatcaaagtaagagatcgacagtgtatcggcgccaaagaagtcgatgttgatgtccttggatccaggtcggatgatgtacagcctctccaatatgaggtagatggtagatggtacttcggtcatacacaaggcttccagcgcaaacaacttgtgtctgttccttttgtccatatacaatttggagtcaaagcattcagacatgtccattccatagatcttacagtcggagacgcaatttgtgggacaccctaccggtgacccttgaacccaatgggtagatcagctaaaggcgagtacatatttttgcccttcatctctgtatttcagcatttaagctggcccaaaggataacaaggcaagctgctgacaaacccaggtggataggtcggtttagcgctcacactcgcctcgatggaaactgtggttttggggggaggcgagggaactcagaatgcctcaggtcgctctctcccgtccatacacgttgtcagaagcagaagaaggttcttggcagcgttcacgtctcggttccaggttgcaccacagcgcacattggatgatgcgcttttgacactgtctctacagtgcagtactttgtggaccttgacgttcttcaccaccatcttctgcttctcaacagttatagacccgtcgattggggactctttgcaaactccgcgccagactacgctgtctgccttcatgttgacaagcctctggaagcagccgtgacatttacaagaagtgttgcgttcgtcgacgtttttgaacaaaacattcttacgacgtgagaggcacctcctgatctctttgatgggcccagaacatgaacgactgataccatacccttggttggaccagttgccgaagccaacaacggtcgtctgtgcccttggtgcaatcatatcgcatacctttccaatcgtcttctgtttaccaacgtatcgaaagaatcgcatagatcggtagcctttgttggctctgtgttgtaggaggatcgggagcgctttgagataagctctgacatggtcctgcaggacgaccatgttgctcgtatttggcgatggaatggacttcacgaggtattgagtctcgtcattccatttgtaggtgcgacgcttgcttgtattgtacccagcaacttcgctaaagcgagccgagctgaaagactcgatgcgacctgcagaagatgctaccgtgacgatatctgtcattccagggtctactccgacacgcagcgcacccactgcgtccttgcactctacgatatttgcgtccttgggatagcctgcgttttctccttcttcaacgacctcttctttacccttctgcttcattgggacggatacccctttaccgtcgctgaggattcggttgtcaaagcgagaccttttcgtctcaagaccttggacattaaagtactttcgccacagcattgtatggttctcgtaacgtccattgccaaagacgctctcgagtggcgaatcacccatgctgagaagcttcatgaaagtcatggacgatatcgggacgtacgaaattgtgaagccgttcttgcgaggaaggatactgaacagacgggggtgacttttttttgtttttttatccttcggatccactcgtccgacctctcccaactctgtaagcacgtgatggaacaatcgcattgtcaggtgcgctctagtgttgaactgcttcccttttggcagcggaaagagagccctcaagttaatgacaacctctttgatgtggatcgcatgaacgaggccctctgggatgattgtgtcgattttcgattctgggtactggaccaccgctttgacaatcttcttgaaatgtttcttcagagagggatgtttcaagcgcaggtacttgataacgaccctgtcaacgtttgcccagacgctgttgcacgccatcgtcgccatttgtattgagacgtctgcgattatttgtccccaaggacgaatgtcctccttcacgtagcctgcaggtcttagggcgtcgaaagcaaccatggtatcattgaagctctggcccagagtatcctttcgaacattggaggttgataccgcaaggaggcacctgtaataaaagatccgatccaggtgtggtaactgcttgacgtcaaagtctccatcatcgaggcatcttgtgatatgaaagtttgcgaataagtatgcctctgcaactgcgtggttgattaagagtaccatgctttgtatccttgaggagatctgatgcctcgatacatccatgcacagagaattaagcgtcttcttgacgacgctgatgttaatatcgtcatctcctttgtcttgcactacccccattaagagggggtgagtattctttttcttttggtgatataatattgcacccacatttccttatacacatttcctacgttatcatgattgatgctgagataagacaccgagcggttgttcactacaaatactataatcgtagtttgaggaaagttagtttgctgtacaaagtatcaaaatcatcactccaacgttgggtcaccaaagccaatataaaacatcatcggaagaaaagggtgagtgtcattacagaagatatcgaggctgctatataacaactgattgactccaatcccttcttgacaatgtctcagcttgcagagggtgtgacttctctgtcctctgtcaagatgtctccaaaaacttgtggacgctacacacgcaaacttggttacacccgcaagcgcgcatacaaaacagttcggcacaagaatgaccacaaatcttctgtcgaccgtttttgtaaggagtatttagccgttccaacatcggatttgttaagcatcgatgatgcagaaacgtgcctttcatgtaagcgttacatgtgtcacatatgtatagatccgtcaaacgccccccccgatcatacattgacatacggacggtttgtagggttaggagacacgcaaaatgaatcgattacagagtggcgccaacgaatcgcgcaatggttggtagagaaccccaactgcagagcctggccgataccacacactataagccccgaaggcaatgccctagttgtcaaaagattcacatggtgcgccagatgtgacggttatacagcagtttgacttttcattctactttttgatacctcttcacccccccaacgtttcccaaaagcaacgatctgcagtctggatgattataaggtgtgtcccactttatttgagaaatacttgtaaggctccaccgacacctgtatgttagtcgaatgccggccttcattccatttcccccgatacagcagttcaggaacgtcctgaaagagttgccgtacgtcttcggaagcgcaatcccgcagacgctcaagttccgaggcacggtcaaactgcacgggacgcactcggacattgtgaggcacttcattactggaacccctgacttcgtcgacaccattcagtctcgaaacagaatcctgttagtcgacaacgacaaccaaggctgccacatgtttctgactgcgaagaagtactccgatctgttcgatcgtatccaagcgatccatggagcagatataagatcgaacatcgtcgtatgtggcgagtactgcggtaaaggtgtgcagagcaaggtggccctgtgtaagctcgccaagatgtttgtgatatttgcgatcagaatcgactatgaatgggttgacatgaccaagtacagcacggtgttctgtcaggaggaatggatcttcgacatctggaactttccgacgtacgaggtggaagtcgacatgagcgacacgcagcccgcgcaagactacatggcggatctcacgaacgccgtggatgcagagtgtccgttcgcgtaccagctggccggcgtcaagggttgtggcgagggcatcgtgtggacgtgcgtagaccacccatcgtctcgtctgtggttcaagacgaagggcaagacgcattgcaccgccgtcacgaagcaagcggtgccgttgcagacagagtacatcaagactgtgaccgagttcgtcgagtccgtcacgaccgagtctcggttgagccaaggcatcgagtgcctggttgaacagggcgtggagttgcggatacatagcgtctctgagttttcgtcatgggtgtgccgagacgtgttcaaggaggaacgagacactatcgaagaaaacggattcaatgtgaacgacgttcgtaaggcgttgtacaggaaagcagggaactggtacaaacaaagggtggcaaccgcataactcaatatctcgtgaagaagcgtaattgtgcatggtaagtaaattcaacttaaaagaaacctgccaaaatggtcagatgtagcatgagtctgtgctcttctcaatccgtcttgcgacaccccccctaccccattcttctcccacgctttccgcctgtttgtcacagtccatatgtagataccggctacatttaatatgaatacatatatttgcgttcgtgtggcatacttgacatgccatggtcatgcgtgtgcgtgtgcatgcatgcattgatgcattcggtcgatgtgccaaagagtttccgtcatcccaatggggctcctccttaggtatcagtgccttgcacaactgctgcttgtccagcccccctgcgtacaattaacacgaaacaaattgtgatgattagtaaaaatggatcctgagacggttgttctagttggtgctggcacaagtgacatgaaaatgctgaatatcggcttgtgtatgcagatgagtgattacaagacctgcatacaacaagcactaactttgtcatgctcactaaacaaactagagagtgtcctcgcactgatttctgcaggatcgcatccaactaataagacgagggcatgatcagaggaagcagcgcgtaattcccgggcctaaaccaataccgggttcaggggatgcgtgttgttgatgggcgacaaaaaaacatgatggtgttccactgcaatgtgggttgctacaccataaggttacaccataaggtgtaccgtacactccagaaagcggtttcattttagtattccgttgactgtaaataagatgcatatcgataacctgttcaaggtgtgcgacaatctttacctatcagggcaagaagcagctctcaaccaccaactttgtaaaacgttgcaattcaagcttgttgtgaactgcacaaaccacacaccgtacataaaaccaaggaaccacaacacaacatacattaaggttgctgttgaagacaactgcaggcaaaaagaggtcacgaaactcacatcccatctcccatatattgttgatgttatgcatggagtgttaagtcaaaacaatgccgtgcttgtgcattgtcggttgggaagacaacggtctgcaacagttgttgctgcttatctgatgtgggaaagatgcataacgatgacagatgcgatcaagcacattcaaaggttgaaccccgccgcattccaaccagaagccaactttcaacggtcccttgaaatgtttgaagttcacctgaggggcacggtcatccatggcggtgcatccttgtcccatcccgatgacaaccatgaacaagatcagcgtgaccatctctgatctgtatgcaaaaaagagcacacaacttatgggggcttcacgatgcgaaggcatacagctagggacatttgatattgggacaccttctattttggggattctgaaaagttgaccaattcaagatttgttaccgatcttgtcaatacagatactgtcttcaggtgattgacacaaaaaattcaaggcatctaaagacactgaatttacatgttcaaagtaccctgaaaagtcaaactgatggctaacatcgtgcgcatcaataatccttttcaaagcgttactgtaatcaaatatatctgctacatctggaattattgggcacatgcagcgatattttcgcttgagcaaactaaagacattctcaatagcgttaaactctggactgtaaggaggtacgaagagtggtcgtattcctacagaatcgaacatagaaatcgtctcctttgaatgatggaactggatattgtcaaggacagcgactgtaccccgctgtacatgtaactcagatacaaactgtaaaaagtcgactttcttgcaattgtgatcaaggatcttgtaatgaacgatacctttagcagaaacggcagcaattagtgtcaatttggacattcgcaatgtcctagaaatttggatatttaaacgtttgccgcgttgacagtaccctctgcgacaagtgtcaccaatgtaaaaacccgcctcatcgatgcataacaaatccgatgtcggaacggctaaatactccttacaaaaacggttgacagaagatttgtggtcattcttgtgccgaactgttttgtatgcgcccttgcgggtgtaaccaagtttgcgtgtgtagcgtccacaagtttttggagacatcttgacagaggacagagaagtcacaccctctgcaagctgagacattgtcaagaagggattggagtcaatcagttgttttatagcagcctggatatcttctgtaatgacactcacccttttcttccgatgatgttgtatattggctttggtgacccaacgttggagtgatgattttgatactttgtacagcaaactaactttcctcaaactacgattatagtatttgtagtgaacaaccgcgcggtgtcttatctcagcatcaatcatgataacgtaggaaatgtgtataaggaaatgtgggtgcaatattatatcaccaaaagaaaaagaatactcaccccctcttaatgggggtagtgcaagacaaaggagatgacgatattaacatcagcgtcgtcaagaagacgcttaattctctgtgcatggatgtatcgaggcatcagatctcctcaaggatacaaagcatggtactcttaatcaaccacgcagttgcagaggcatacttattcgcaaactttcatatcacaagatgcctcgatgatggagactttgacgtcaagcagttgccacacctggatcggaacttttattacaggtgcctccttgcggtatcgacctccaatgttcgaaaggatactctgggccagagcttcaatgataccatggttgctttcgacgccctaagacctgcaggctacgtgaaggtggacgttcgtccttggggacaagtaatcgcagatgtctcaatacaaatggcgacgatggcgtgcaacagcgtctgggcaaacgtggacagggtcgttatcaagtacctgcgcttgaaacatccctctctgaagaaacatttaatgggcgttcctgcctcccggccgatttttttaaatttctaatcaggatttagagcctcctgaacgactcgctagcttgagacatcagcaccaaggaatcacaaatccgctccataccatgtttcgcaaccagtcaaaatcggccgggaggcaggaacgcccattatttcaagaagattgtcaaagcggtggtccagtacccagaatcgaaaatcgacacaatcatcccagagggcctcgtgcatgcggtccacatcaaagaggttgccagtcacttgagggctctatttccgctgccaagagggaagcagttcaacactagagcgcacctgacaatgcgattgttccatcacgtgcttacagagttgggagaggtcggacgagtggatccgacagataaaaaacaaaaaaaagtcacccccgtctgttcagtatccttcctcgcaagaacggcttcacaatttcgtacgtcccgatatcgtccatgactttcatgaagcttctcagcatgggtgattcgccactcgagagcgtctttggcaatggacgttacgagaaccatacaatgctgtggcgaaagtactttaatgtccaaggtcttgagacgaaaaggtctcgctttgacaaccgaatcctcagcgacggtaaaggggtatccgtcccaatgaagcagaagggtaaagaagaggtcgttgaagaaggagaaaacgcaggctatcccaaggacgcaaatatcgtagagtgcaaggacgcagtgggtgcgctgcgtgtcggagtagaccctggaatgacagatatcgtcacggtagcatcttctgcaggtcgcatcgagtctttcagctcggctcgctttagcgaagttgctgggtacaatacaagcaagcgtcgcacctacaaatggaatgacgagactcaatacctcgtgaagtccattccatcgcctaatacgagcaacatggtcgacctgcaggaccatgtcagagcttatctcaaagcgctcccgatcctcctacaacacagagccaacaaaggctaccgatctatgcgattctttcgatacgttggtaaacagaagacgattgaaaaggtatgcgatgtgattgcaccaagggcacagacgaccattgttggcttcggcaactggtccaaccaagggtatggtatcagtcgttcatgttctgggcccatcaaagagatcaagaggtgcctctcacgtcgtaagaatgttttgttcaaaaacgtcgacgaacgcaacaccttgtaaatgtcacggctgcttccagaggcttgtcaacatgaaggcagacagcgtagtctggcgcggagtttgcaaagagtccccaatcgacggttctataactgttgagaagcagaagatggtggtgaagaacgtcaaggtccacaaagtactgcactgtagagacagtgtcaaaagcgcatcatccaatgtgcgctgtggtgcaaccttgaaccgagacgtgaacgctgccaagaaccttcttctgcttctgacaacgtggatggacgggagagagcgacctgaggcattctgtgttccctcgcctcccaccaaaaccacagtttccatcgaggcgagtgtcgtcggtatttagtacttctttgagggtcgtttgaagcaaagaaaatcctgtttgaattgttcgtttgattcattcttagattcaatcggagataaccttgattcaatcgatctttgtttcctttttgaatcagtcggccaccaaacctaccgattgagatccgtttgaaacaaggttggttgtttaaaacatgactcaaaccatgttcaaatagatcttaatcaagccgtcatcaacgtgccccttgaaaaaggtttgaaacaaggttggttgtttcaaacatgactcaaaccatgttcaaatagatcttaatcaagccgtcatcaacgtgccccttgaaaaaggtttgaaacaaggttggttgtttcaaacatgactcaaatgatgttcaaatagatctgttttttcgtaaagcaatgcaagcactgaagactgagggcgcatatttggacagcaggactcttggatctttgttacagaaatcgaaagcaccataatgaatgaatccttagatagttaaacatgatagtaattagtgattgaagagctagatatatatgctactaaggaagtgcagttggccacgaagtagttcctcaggtacgaattgacgaaactccagcatgctgtgcttcttgttcatcaacgacatcgtcttcagcctcaaggtcatcagcatccaggcgttctgacgcgagaccagtcgcaagagtgagacctgcagacaaatgttcgttggtgagcgttagttgagatacattggcagcaatgcgcattcttccgactttcaaatagcagccatggttcaaaccaaattcgctatctgaatgcgcacctgttttgcacctcgagcattggaactcttgcggctccatgatgagctggacgataggtcgacttgctgcagctgccttaatgcctgcggaacaactcgaaaaagcaagtcagtcaaagtcgagacaaattctggtcaagtaaggcaccacttgacgagacgcaaaacgcagtaccttaaccgcacgcgcgggggcggagaagcaggtcgctacagtcttgggttgaagcacaacgattcccaaagcaaagtaccgcggaagcaaagtgctcgcgcgtgtaggtattgacggatctcagaagtaattcgggaatggctgaagctatgaaagcaagctcagtccaagttaattcaaggaaagcaggcagcatgtcgctatctgactgcgcacctgtttcacacctcgagcattggaactcttgcggctccatgataggtcattttgctgcagctgccttaatgcctgcgacacaactctggtcaagtaaggcaccacttgacgaaacgaaaaatgcagtaccttaaccgcacgcgccggcgtgggcggagaagaaggttgctacagtcttgagttgaagcacaaccattcccaaagcaaagtgccgcggaagcaaagtgctcgcgcatgtaggtattgacggatctaggaagcaattcgggaatggctgaagctatgaatagatcagtccaagttaattcaaggaaagcaggcagcacggagcgctattctgcaggaatatcgctgagtcgagaaccaattgacgcgcagtgaacagtgaaagcttgcacagccgctaagttgaagcgctaacccattgcgctgaccagtttgaactgtacagcatgcagtaccgccgtaaccgcacgcgcatgggcggagaagcaggtcgccatatttgaatcggattctcggggcctgcgcctgcggtgcatgcgggatctgcgtcgcaggacctagacaaccctgatgggggtcatgctaatcaaacctgatgaacaatgggggataatgatcccgaaacttctcatgtacccaaatatgattattccgattctggaaaacaaacaacagagccttgtgatcgttgcctcgttagtgcaagctgctcctcgtagttacacgaggctagttcgacaaattgtacaagatttcggaaattacagaatccaagcaggggcaaatttggcccttcaggaagcgacagaggcctacttggtgggcctcttcgagaacactaatctggcggctatacatgccaagcgggtaaccattatgcccaaggatatgcaggtgcgctatctacaggggttgggggtggggtggggggtgggtgggcggggtggggggtaagagttggatccacacaaaatatgctgcagcttctgggcagatccctaggtgggcagttggcctttggtaaaaatatgctgcagctgctgggacccgtacacgacaaaacacaacagtacactacactacactacacaacagtacacaacactatacaacactacacaacactacacaacactacacaacactatagaacaagggggttgggagggggatggggggggggggggggggggggggactgagctacttgaaacactcactcattcactaactttgatgtctgtttccacttgcagctcgctcagaggattcgaggggagcgaaactaggacttggcaagaagttgtggtgagttatgttttcatgcctgaaccaccctcatgtaacaacttaatgaatgcatgttacttatcaataatatcataatatggcttagctgaacctacccatactgtagcccgaaaagcgcccttgaggctgcttgctacagaatgggcgggagatgcgatttgccttgtatggtatgccttaaccaccctcatgtaacaacttaattaatgcatgttacttatcaataatatcagaatatggcttagctgaacctacccatactgtagcccgataagcgcccttgaggctgcttgctacagaatgggcgggagatgcgatttgccttgtatggtatgcctgaaccaccctcatgtaacaacttaattaatgcacgttacttatcaataatatcataatatggcttagctgaacctacccatactgtagcccgataagcgcccttgaggctgcttgctacagaatgggcgggagatgcgatttgccttgtatggtatgccttaaccaccctcatgtaacaacttaattaatgcatgttactgatgaataatatcataatatggcttagctgaacctacccatactgtagcccgataagcgcccttgaggctgcttgctacagaatgggcgggagatgcgatttgccttgtatggtatgcctgaaccaccctcatgtaacaacttaattaatgcatgtcagtaataaaaaatatggcttagctgcacctgcccattatgtagccgcataagcgcccttgaggctgcttgctacaaaatgggtggtcaatgcgtttagccatgtatgcatccaccaccctctgcacacacttaagtcaccaacatgataagtgcagcacattctaagcagcattatcttactcattctaatgtttttcccttgcaggtcattcatgaatgctggctgttgggagcaagtaaaggacgaatatgcagtagtggagctgcctggaagctgccatcatgtggtgccaagcttagccaatgggatattaaggcatgttagtgccctgaatatatagtagcatggagcagtaatcatagggtgactttagtttgggttttgtttatgagggtttaaaggtactgcctgtccttgttgaccaggacaggcagtacctttaaaccctcatacaaaaaacccaaaaatttaatttgaaatttcaagcacagcagtagataggcctattatcccttccaccaccttggacaatagccgggcctggtagttgacaatatacagccttcttgtgcgatacccacgagagcactgtattgtattcatcaattgtgcgatacccacaacgatgaatactttcccgactcctgaattagacctaacttccagccagctccattaggttgtacagcttccagccatgggttgtacagcttccagctagctccttaggttgtagaacttccagccagcttcaatagacttttactttgtgtgacaggttgtacagcttctagccagatccattaggttgtacagcttccagccagctgcattaggttgtacagcttctagccagctccattaggttgtagagcttccagccagctccattagactttcacttgtgtggcaggttgtaaagcttccacccagctccattaggttgtacagcttccagccagctccataagactttcactttgtgtgccaggttgtatagcttccagccaggtccattaggctgtatctctgtatattaggttgttgtgtagcttcgagccagctaagccgtcctcagcaggaaaattaaatatatgataccaatttgttttctggcattatatttgtttcctttcttgtaaaagtttctttcctaccattgtccaaagtgcgagtacttaaacacgcacacacaccctacttgggctgtttccaaactcctacattcaacttcaacttggttacatagccagacttcaacttggttacatagccagacttcaacttggttacgtagccagacttcaacttggttacatagccagacttcaacttggttacatagccatttgtgacacttgagattacagccatcatcttgctagcacctacaccccaccctagatttttgtctagccaatgaaagcacaactaatgtactacaaggtatggatttgtgccggttatcgctaggcgctcgcccgcctcggattcaaagcttcctacctctcggcagcctacatatgggagcttagctacatttcgaagtgcaatatcttcgaccaccttgaattccgtttgatattgtcttgattgacttccgtctgattcaatgaataagctgcttgaattgaatcactgattcaaactgtttctcaaggtaccctgattcaaggggaaaaccgcttgataggggttcattgattcaaaccagttgattcaaacgatttcaaaggtctgcctaaataccgacgtttagccgttccgacatcggatttgttaagcatcgatgaggcgggtttttacattggtgacacttgtcgcagagggtactgtcaacgcggcaaacgtttaaatatccaaatttctaggacattgcgaatgtccaaattgacactaattgctgccgtgtctgctaaaggtatcgttcattacaagatccttgatcacaattgcaagaaagttgactttgtgcagtttgtatctgagttacatgtacagcggggtacagtcgctgtccttgacaatatccagttccatcattcaaaggagacgatttctatgttcgattctgtaggaatacgaccactctttgtacctccttacagtccagagtttaacgctattgagaatgtctttagtttgctcaagcgaaaatatcgctgcatgtgcccaataattccagatgtagcagatatatttgattacagtaacgctttgaaaaggattattgatgcgcacgatgttagccatcagtttgacttttcagggtactttgaacatgtaaattcagtgtctttagatgccttgaattttttgtgtcaatcacctgaagacagtatctgtattgacaagatcggttacaaatcttgaattggtcaacttttcagaatccccaaaatataaggtgtcccaatatcaaatgtccctagctgcatgaatttcttattacacatccgggggtccgggggacatgtagtaagaaagacaatgaattctccataggggtatcatagggctgctgtcctttagggattttctaatttctggataatctaatttctgttcgaactgccttcatctgtctccaaaagacaccacctccccatcaaaaaataacgaaagtaacaaaattctacatcacggttgttctcatcgtcaagcaaccaaaccaacctctaaactgcttgtcaatggatgagaaccaccgtaccacattaaacaagtggcggagccccttttacctcttccccccagcggagcgaccgggggcgaccggagggtagcccccacaaaggagtccgcgaggaaccgagcgggtgggcgaccggaggtgagcccacaggtcacatcaaccagcagacacactactgatttacacacacacgcgacgccgcggatgatagatgcaggcaggcaggggaggttgtccgtgctggggaggagggagcaagcaagacgcccgccgtcaggagaacaagagacacgcacgcactgacattgacatgcatgcactgacattgacatgcatgcactgacgagcttgtccatcgtaagcgtgctgccaacatagcaaagctcatggtggaaactcaaagtatggctctgcgcaagtatgacttgattcactggaattgaaccccgcgcgccaaatagactacgtttcgaaaaaaattgaaacgattttctccagaacaacaacaacaacaacaacaacacacgtaatcgccaaattcactcactgaaatacccgaaatgtctggatccacaacaacaacctctgacgcccgccgcatttgcgccgggaccaagaaggacggttacccatgttcccgggtcctaactaacggccgtgtatactgccaagaccacgtcaaggaatctttcaaggaggagtccaatgcgtctgaagagccgatgactgctacagtcgaagactacgatgcgctcctgctcgagctcgagaactgtcggatcaagaatcaaacacttatcaagcataacgatgagctaaagctcatctccgagactaccatgcatgagaatatcctgctgaagagtcagctagttccagagttgtccccgtaccactttggacacgacctgctcaccagcctcaatctgccattctacaatacgaagtgctgcatcgtcctgctcggtttgtccggagctagacagtgcaaaaataatcgccaggccactggcctgctgtgcaccacgcacgcgtcatcaccaaagcatatagcagaaaaggtcaacaaggcctacgctacacgctgtgtcgagagacacccgaaggtcatcagcgcatatcagacacagtctgagtgcgtagccacgtacaactctgcgtgcgaggacaagtacaactactctgcggctgctgctccggcgccgtcgtcgttctcatcatagttcgttcgttcgttcgttcgtgcatgcatacatacatacatgcacgagcgaaccaatactttttttctgcttaacaagaattgtaaataagaaagtagctacagtcggagacgcaatttgtgtttagatcagctaaaggcgagtacatatttttgcccttcatctctgtatttcattttttgtgtcaatcacctgaagacagtatctgtattgacaagatcggttacaaatcttgaattggtcaacttttcagaatccccaaaatataaggtgtcccaatatcaaatgtccctagctctatgtataacttgcgcaaccaaaacatacagctagggacatttgatattgggacaccttatattttggggattctgaaaagttgaccaattcaagatttgtaaccgatcttgtcaatacagatactgtcttcaggtgattgacacaaaaaattcaaggcatctaaagacactgaatttacatgttcaaagtaccctgaaaagtcaaactgatggctaacatcgtgcgcatcaataatccttttcaaagcgttactgtaatcaaatatatctgctacatctggaattattgggcacatgcagcgatattttcgcttgagcaaactaaagacattctcaatagcgttaaactctggactgtaaggaggtacaaagagtggtcgtattcctacagaaaatgggtgttcctgcctcccggccgatttttttaaatttctaatcaggatttagagcctcctgaacgactcgctagcttgagacatcagcaccaaggaatcacaaatccgctccataccatgtttcgcaaccagtcaaaatcggccgggaggcaggaacgcccattagaatcgaacatagaaatcgtctcctttgaaatcgtctccttggtgtcgcactggggtgcatgtttgatcaggaggtgctggtgacgtacgatgggctcgagacggcattggacaagtattggagtggggcgcaagtacggatgacgcacgctttccggggtgtgttcgggacgcccgctctcccgatgggttcttgttgcatcactacatgtaatgatgatgcgggttctgagtctgagtctgatgtggagttctgagtctgaggtgcctggggaagggttgcaacagttgactcgttttctttccgaaaataagtaaacttaacagagtggggagtgaagtgacgtccactttcttggatgtgaaagaggcgagaaaactcaatacattaaacccagagtgggtagagacgttgatggga

SEQ ID NO: 313 - DNA, 28 bp, synthetic construct
  source 1..28: mol_type = other DNA
tcatcaaaaagagtgaacgagactagaa

SEQ ID NO: 314 - DNA, 30 bp, synthetic construct
  source 1..30: mol_type = other DNA
tcatcaaaaagagtgaacgcgagactagaa

SEQ ID NO: 315 - DNA, 31 bp, synthetic construct
  source 1..31: mol_type = other DNA
tcatcaaaaagagtgaacgacgagactagaa

SEQ ID NO: 316 - DNA, 32 bp, synthetic construct
  source 1..32: mol_type = other DNA
tcatcaaaaagagtgaacgaacgagactagaa

SEQ ID NO: 317 - DNA, 15 bp, synthetic construct
  source 1..15: mol_type = other DNA
tcatcgagactagaa

SEQ ID NO: 318 - DNA, 20 bp, synthetic construct
  source 1..20: mol_type = other DNA
tcatcaaaacgagactagaa

SEQ ID NO: 319 - DNA, 22 bp, synthetic construct
  source 1..22: mol_type = other DNA
tcatcaaaaagagagactagaa

SEQ ID NO: 320 - DNA, 27 bp, synthetic construct
  source 1..27: mol_type = other DNA
tcatcaaaaagagtgacgagactagaa

SEQ ID NO: 321 - DNA, 17 bp, synthetic construct
  source 1..17: mol_type = other DNA
tcatcacgagactagaa

SEQ ID NO: 322 - DNA, 45 bp, synthetic construct
  source 1..45: mol_type = other DNA
cttagggacaagcccctggctttcgccatggggtatctgcnnnnn

SEQ ID NO: 323 - DNA, 46 bp, synthetic construct
  source 1..46: mol_type = other DNA
tgctttcacaagcccctgcctttaggcatggggtacctgacnnnnn

SEQ ID NO: 324 - RNA, 78 nt, synthetic construct
  source 1..78: mol_type = other RNA
tytgytgyggyyaygcgayaaygccyrgggyggtcayccygryryarrcaagcycttrrgyrrytgacnnnnnnnnnn

SEQ ID NO: 325 - protein, 60 aa, synthetic construct
  source 1..60: note = TnpB sequence
VVAVAYEHAADDSGRAETDPRAGGRAPGNPPPAHRMLQRRVRVWLAAPGEERRPAPPCHL

SEQ ID NO: 326 - protein, 43 aa, synthetic construct
  source 1..43: note = TnpB sequence
MVKLLPDKQQQEALIDTFVKFNEACNFVSRLAFERKLYNKVLL

SEQ ID NO: 327 - protein, 55 aa, synthetic construct
  source 1..55: note = TnpB sequence
LVLFYTSITRLTTVTVKLSPADPDGLRRTLQTANGACDWISEQAWHHQTFRHLAL

SEQ ID NO: 328 - protein, 48 aa, synthetic construct
  source 1..48: note = TnpB sequence
MKLIAQIKLLCSEVEKQALMDTMRLMNSTCDQISKAAWSARKFGRSSL

SEQ ID NO: 329 - protein, 66 aa, synthetic construct
  source 1..66: note = TnpB sequence
SRLARAIPSAPVPACGRRQGTRPRGAEECAWPRKARQEGIPAEKPSVPIRYDARTYALRAAKGYVS

SEQ ID NO: 330 - protein, 62 aa, synthetic construct
  source 1..62: note = TnpB sequence
QKLVYRDIRENFGLAAQLAIRVIAKVVETYKNDKTVMHEFREFGSIVYDQRVMSFKGLDTVS

SEQ ID NO: 331 - protein, 64 aa, synthetic construct
  source 1..64: note = TnpB sequence
HKLVYYQVRQRFGLSAQMAVRGIAKVVDAYALDKRTKRKFFRTDGAFPYDARILSWDLESETVS

SEQ ID NO: 332 - protein, 62 aa, synthetic construct
  source 1..62: note = TnpB sequence
QKLCYLDAKCNGLTAQMAIHATRKVADAYKKDKKTLRQFRPTGAITFDDRVLSWKPAQQTVS

SEQ ID NO: 333 - protein, 66 aa, synthetic construct
  source 1..66: note = TnpB sequence
LASVAGRLKVPFALDPHTQGILGQAVGFDSADMIHRKGRFWLHIVVTIPDVEFQPSGDVVGVDMGL

SEQ ID NO: 334 - protein, 64 aa, synthetic construct
  source 1..64: note = TnpB sequence
LNTVRGRVRIPMTIGKYRELPLDRIRGQCDLVRRNRIFYLMVVVEVPEEEAISASDVIGVDLGI

SEQ ID NO: 335 - protein, 63 aa, synthetic construct
  source 1..63: note = TnpB sequence
HKLVYYQVRQRFGLSAQMAVRGIAKVVDAYALDKRTKRKFRTDGAFPYDARILSWDLESETVS

SEQ ID NO: 336 - protein, 64 aa, synthetic construct
  source 1..64: note = TnpB sequence
IWTVAGRQTISYVCGDRQGALLSTRHGESDLVYRGGEFYLLATCDIEDVPLADTERFLGVDLGV

SEQ ID NO: 337 - protein, 66 aa, synthetic construct
  source 1..66: note = TnpB sequence
SRPAVCSHNRFFGKRRWKEIERRYFRLRRSLQRKGTRSAKRHLRKLAGKVNRFRRDCDHVLSRRIV

SEQ ID NO: 338 - protein, 66 aa, synthetic construct
  source 1..66: note = TnpB sequence
ENIAVDSSGHYYSGDRIAEAGTKHSSLRSRLQACGTRSAKRHLKKLSGKERRFARDVNHVISGEIA

SEQ ID NO: 339 - protein, 66 aa, synthetic construct
  source 1..66: note = TnpB sequence
ANVASDSDGRRYSGSEVKNVRWRNRKLRARLQAKQTRSAKRRFKKLAGGESRFARHVNHCISKQIV

SEQ ID NO: 340 - protein, 66 aa, synthetic construct
  source 1..66: note = TnpB sequence
VNIAVDSEGTIHRGNAVNNVRYRHRALRGKLQRKGTRSAKRKLKQLSGKESRFARDVNHCISKSIV

SEQ ID NO: 341 - protein, 65 aa, synthetic construct
  source 1..65: note = TnpB sequence
DSVQPGTVIVVENLVDIRTRTKQRGRESRRRLHSWSFARLRSFLAYKAAAKGCKVVGVDPRHTSQ

SEQ ID NO: 342 - protein, 65 aa, synthetic construct
  source 1..65: note = TnpB sequence
ERAKGTSSAIALEELKGIRKRTTVGKNRRYRHNSWSFCQLRTFIEYKALESGVPVIGVNAKNTSR

SEQ ID NO: 343 - protein, 64 aa, synthetic construct
  source 1..64: note = TnpB sequence
RTAKGTGRIRMEELNGIRTRVKVRHGERGVLHSWGFWQLRQMIVYKAALAGVLVEFVDPRNTSR

SEQ ID NO: 344 - protein, 65 aa, synthetic construct
  source 1..65: note = TnpB sequence
AKAQDTGKGIALEDLTHIRSRITARRSQRATLHSWSFGQLRAFISYKAEVLGLPVALVDPRNTSR

SEQ ID NO: 345 - protein, 66 aa, synthetic construct
  source 1..66: note = TnpB sequence
MCSRCGHVHRRNRRSQSRFLCRACGFELNADLNAARNIARKYLASGGMPAAGGPLSTGLACQPAQA

SEQ ID NO: 346 - protein, 64 aa, synthetic construct
  source 1..64: note = TnpB sequence
ECPDCHTVDKRNRPERSIFKCISCGFEGEADFVASLNIRNRAAASQPIVAGAIFDQPLIPQLQA

SEQ ID NO: 347 - protein, 66 aa, synthetic construct
  source 1..66: note = TnpB sequence
TCSECGHCEKGNRRNQSEFRCRSCGREAHADINAAENIRQGRSKPAERDVVENRLSHSFRFRRLSA

SEQ ID NO: 348 - protein, 53 aa, synthetic construct
  source 1..53: note = TnpB sequence
ECPECGHTYKDNRKTQSKFLCTSCGFAGIADVIAAGNIARRAEVSRPNVAEAA

SEQ ID NO: 349 - protein, 6 aa, synthetic construct
  source 1..6: note = TnpB sequence
PSVRVG

SEQ ID NO: 350 - protein, 7 aa, synthetic construct
  source 1..7: note = TnpB sequence
AVTSPRL

SEQ ID NO: 351 - RNA, 96 nt, synthetic construct
  source 1..96: mol_type = other RNA; note = Spu native small RNAseq
tagcttaggttttccgaaccggttgtcgcgcggttcaatccctggtgcgggtgctagggccaataccatcggctccgcactaagaactagaacgac

SEQ ID NO: 352 - RNA, 102 nt, synthetic construct
  source 1..102: mol_type = other RNA
atagagcgagagattggttagattagcctttccgagccggttgtcgcgcggttcaatccctggtgcgggtgctgtgccaatacccatcggctccgcactaac

SEQ ID NO: 353 - RNA, 26 nt, synthetic construct
  source 1..26: mol_type = other RNA
tagtgcggagccaatgggtattggca

SEQ ID NO: 354 - RNA, 26 nt, synthetic construct
  source 1..26: mol_type = other RNA
tagtgcggagccgatgggtattggca

SEQ ID NO: 355 - RNA, 84 nt, synthetic construct
  source 1..84: mol_type = other RNA; note = ncRNA
ggttttccgaaccggttgtcgcgcggttcaatccctggtgcgagggccaatacccatcggctccgcactaagaactagaacgac

SEQ ID NO: 356 - RNA, 84 nt, synthetic construct; identical to SEQ ID NO: 355
  source 1..84: mol_type = other RNA; note = ncRNA

SEQ ID NO: 357 - RNA, 84 nt, synthetic construct; identical to SEQ ID NO: 355
  source 1..84: mol_type = other RNA; note = ncRNA

SEQ ID NO: 358 - RNA, 84 nt, synthetic construct
  source 1..84: mol_type = other RNA; note = ncRNA
gttttccgaaccggttgtcgcgcggttcaatccctggtgcggagggccaatacccatcggctccgcactaagaactagaacgac

SEQ ID NO: 359 - RNA, 84 nt, synthetic construct; identical to SEQ ID NO: 358
  source 1..84: mol_type = other RNA; note = ncRNA

SEQ ID NO: 360 - RNA, 84 nt, synthetic construct
  source 1..84: mol_type = other RNA; note = ncRNA
gttttccgaaccggttgtcgcgcggttcaatccctggtgcggtagggccaatacccatcggctccgcactaagaactagaacct

SEQ ID NO: 361 - RNA, 84 nt, synthetic construct; identical to SEQ ID NO: 358
  source 1..84: mol_type = other RNA; note = ncRNA

SEQ ID NO: 362 - RNA, 84 nt, synthetic construct; identical to SEQ ID NO: 358
  source 1..84: mol_type = other RNA; note = ncRNA

SEQ ID NO: 363 - RNA, 84 nt, synthetic construct; identical to SEQ ID NO: 358
  source 1..84: mol_type = other RNA; note = ncRNA

SEQ ID NO: 364 - RNA, 91 nt, synthetic construct
  source 1..91: mol_type = other RNA; note = ncRNA
cytwtccgagcyggttgtcgcncggttcaatycctggtgcgggtgctsgtgccaatacccatcggctccgcactarmyanntmmmmkttwr

SEQ ID NO: 365 - RNA, 33 nt, synthetic construct
  source 1..33: mol_type = other RNA; note = ncRNA
tagtgcggagccgatgggtattggcactagtac

SEQ ID NO: 366 - RNA, 33 nt, synthetic construct
  source 1..33: mol_type = other RNA; note = ncRNA
tagtgcggagccaatgggtattggcactagcac

SEQ ID NO: 367 - RNA, 91 nt, synthetic construct
  source 1..91: mol_type = other RNA; note = ncRNA
cctttccgagccggttgtcgcgcggttcaatccctggtgcgggtgctagtgccaatacccatcggctccgcactaaccaactcccatttag

SEQ ID NO: 368 - RNA, 88 nt, synthetic construct
  source 1..88: mol_type = other RNA; note = ncRNA
cttatccgagctggttgtcgccggttcaattcctggtgcgggtgctagtgccaatacccatcggctccgcactagatataaacgttta

SEQ ID NO: 369 - RNA, 33 nt, synthetic construct; identical to SEQ ID NO: 365
  source 1..33: mol_type = other RNA; note = ncRNA

SEQ ID NO: 370 - RNA, 33 nt, synthetic construct; identical to SEQ ID NO: 366
  source 1..33: mol_type = other RNA; note = ncRNA

SEQ ID NO: 371 - RNA, 88 nt, synthetic construct; identical to SEQ ID NO: 368
  source 1..88: mol_type = other RNA

SEQ ID NO: 372 - RNA, 55 nt, synthetic construct
  source 1..55: mol_type = other RNA; note = ncRNA
ttcgtacgtaagtacgttgtaagtccctcggagatttaaccgggcgcgacattaa

SEQ ID NO: 373 - RNA, 56 nt, synthetic construct
  source 1..56: mol_type = other RNA; note = ncRNA
ttcgtacattagtacgttgttagttcttcgtgaattttaccgggcgggcgacgtcg

SEQ ID NO: 374 - RNA, 52 nt, synthetic construct
  source 1..52: mol_type = other RNA; note = ncRNA
tttgtacgttagtgcgttgtaagtccctcgtggattctcccaggcgtaattc

SEQ ID NO: 375 - RNA, 63 nt, synthetic construct
  source 1..63: mol_type = other RNA; note = ncRNA
ttcgtacgttagtacgttgtaagtcccttgtggattctcccaggcgctacccgcggaacgtat

SEQ ID NO: 376 - RNA, 52 nt, synthetic construct
  source 1..52: mol_type = other RNA; note = ncRNA
ttcgtacgttagtacgttgtaagtcccttgtggattcgcccaggcggcgaca

SEQ ID NO: 377 - RNA, 64 nt, synthetic construct
  source 1..64: mol_type = other RNA; note = ncRNA
ttcgtacggctagtacgttgtaagtctctcgtggattctcccaggcgcctcatagtgattattc

SEQ ID NO: 378 - RNA, 125 nt, synthetic construct
  source 1..125: mol_type = other RNA
gtggtggatcttccatttcttctagtttaagtggaggaaatggtcgactcgccatgatgggtcccggacccttcgtacgtaagtacgttgtaagtccctcggagatttaaccgggcgcgacatta

SEQ ID NO: 379 - RNA, 104 nt, synthetic construct
  source 1..104: mol_type = other RNA; note = ncRNA
tggctttcactctttgagtgtttgcttgcaagatcagcactttgttcgatttgtttgttttgttcaaattgttgatttaaataaaggcgttattgyttatcwaa

SEQ ID NO: 380 - RNA, 104 nt, synthetic construct
  source 1..104: mol_type = other RNA; note = ncRNA
tggctttcactctttgagtgtttgcttgcaagatcagcactttgttcgatttgtttgttttgttcaaattgttgatttaaataaaggcgttacagtatttgaaa

SEQ ID NO: 381 - RNA, 104 nt, synthetic construct
  source 1..104: mol_type = other RNA; note = ncRNA
tggctttcactctttgagtgtttgcttgcaagatcagcactttgttcgatttgtttgttttgttcaaattgttgatttaaataaaggcgacattcttcatctct

SEQ ID NO: 382 - RNA, 104 nt, synthetic construct
  source 1..104: mol_type = other RNA; note = ncRNA
tggctttcactctttgagtgtttgcttgcaagatcagcactttgttcgatttgtttgttttgttcaaattgttgatttaaataaaggcgttgttgcttgtttca

SEQ ID NO: 383 - RNA, 125 nt, synthetic construct
  source 1..125: mol_type = other RNA
tgcgttgggtcctttcccctggctttcactctttgagtgtttgcttgcaagatcagcactttgttcgatttgtttgttttgttcaaattgttgatttaaataaaggcgacattcttcatctctca

SEQ ID NO: 384 - RNA, 111 nt, synthetic construct
  source 1..111: mol_type = other RNA
attcatatctgttaaacgacagatacgacccaaatttttatagcgggtatatttttatgggattagacccccatttgaaatgtcactcgctgtaaatatattctttttatt

SEQ ID NO: 385 - RNA, 88 nt, synthetic construct; identical to SEQ ID NO: 368
  source 1..88: mol_type = other RNA

SEQ ID NO: 386 - RNA, 33 nt, synthetic construct; identical to SEQ ID NO: 365
  source 1..33: mol_type = other RNA

SEQ ID NO: 387 - RNA, 33 nt, synthetic construct; identical to SEQ ID NO: 366
  source 1..33: mol_type = other RNA

SEQ ID NO: 388 - RNA, 88 nt, synthetic construct; identical to SEQ ID NO: 368
  source 1..88: mol_type = other RNA; note = ncRNA

SEQ ID NO: 389 - RNA, 27 nt, synthetic construct
  source 1..27: mol_type = other RNA
aatacatagtgcggagccgatgggtat

SEQ ID NO: 390 - RNA, 27 nt, synthetic construct
  source 1..27: mol_type = other RNA
aatacatagtgcggagccgattggtat

SEQ ID NO: 391 - RNA, 23 nt, synthetic construct
  source 1..23: mol_type = other RNA
tagtgcggagccgatgggtattg

SEQ ID NO: 392 - RNA, 103 nt, synthetic construct
  source 1..103: mol_type = other RNA
gcgttgcctwagtagtagnttagttagcttttccgaaccggttgtcgccggtttattccctggtgtagtagtagtagctagtgcsactcggtatgcaactctc

SEQ ID NO: 393 - RNA, 103 nt, synthetic construct
  source 1..103: mol_type = other RNA
gcgtagaacgtagattggttagattaggttttccgaaccggttgtcgcgcggttcaatccctggtgccgccaatacccatcggctccgcactatgcaactctc

SEQ ID NO: 394 - RNA, 33 nt, synthetic construct; identical to SEQ ID NO: 366
  source 1..33: mol_type = other RNA

SEQ ID NO: 395 - RNA, 33 nt, synthetic construct; identical to SEQ ID NO: 365
  source 1..33: mol_type = other RNA

SEQ ID NO: 396 - RNA, 42 nt, synthetic construct
  source 1..42: mol_type = other RNA
ttgcctagtagtagcttagttagcttttccgaaccggttgtc

SEQ ID NO: 397 - RNA, 41 nt, synthetic construct
  source 1..41: mol_type = other RNA
tgcctagtagtagttagttagcttttccgaaccggttgtcc

SEQ ID NO: 398 - RNA, 42 nt, synthetic construct
  source 1..42: mol_type = other RNA
tgcctagtagtagcttagttagcttttccgaaccggttgtcg

SEQ ID NO: 399 - RNA, 42 nt, synthetic construct
  source 1..42: mol_type = other RNA
gcctagtagtagttagatagcttttccgaaccggttgtcgcc

SEQ ID NO: 400 - RNA, 42 nt, synthetic construct
  source 1..42: mol_type = other RNA
gcctagtagtagctagttagcttttccgaaccggttgtcgcc

SEQ ID NO: 401 - RNA, 42 nt, synthetic construct
  source 1..42: mol_type = other RNA
tagtagtagcttagttggcttttccgaaccggttgtcgccgg

SEQ ID NO: 402 - RNA, 42 nt, synthetic construct
  source 1..42: mol_type = other RNA
agtagtagcttagttggcttttccgaaccggttgtcgccggc

SEQ ID NO: 403 - RNA, 52 nt, synthetic construct
  source 1..52: mol_type = other RNA
gcgtagcatatagcttagcttttccgaaccggttgtcgccggtttattccct

SEQ ID NO: 404 - RNA, 42 nt, synthetic construct; identical to SEQ ID NO: 400
  source 1..42: mol_type = other RNA

SEQ ID NO: 405 - RNA, 42 nt, synthetic construct; identical to SEQ ID NO: 399
  source 1..42: mol_type = other RNA

SEQ ID NO: 406 - RNA, 42 nt, synthetic construct
  source 1..42: mol_type = other RNA
ggatagcttagttagttagcttttccgaaccggttgtcgccg

SEQ ID NO: 407 - RNA, 42 nt, synthetic construct
  source 1..42: mol_type = other RNA
cctagtagtagcttagttagcttttccgaaccggttgtcacc

SEQ ID NO: 408 - RNA, 42 nt, synthetic construct
  source 1..42: mol_type = other RNA
cctagtagtagttagatagcttttccgaaccggttgtcgccg

SEQ ID NO: 409 - RNA, 42 nt, synthetic construct
  source 1..42: mol_type = other RNA
cctagtagtggttagatagcttttccgaaccggttgtcgccg

SEQ ID NO: 410 - RNA, 42 nt, synthetic construct
  source 1..42: mol_type = other RNA
cctagtagtagcttagttagcttttccgaaccggttgtcgcc

SEQ ID NO: 411 - RNA, 42 nt, synthetic construct
  source 1..42: mol_type = other RNA
atcagtagtagttagatagcttttccgaaccggttgtcgcca

SEQ ID NO: 412 - RNA, 42 nt, synthetic construct
  source 1..42: mol_type = other RNA
ctagtagtagcttagttagcttttccgaaccggttgtcgccg

SEQ ID NO: 413 - RNA, 42 nt, synthetic construct
  source 1..42: mol_type = other RNA
tcagtagtagcttagttggcttttccgaaccggttgtcgccg

SEQ ID NO: 414 - RNA, 12 nt, synthetic construct
  source 1..12: mol_type = other RNA
tatgcaactctc

SEQ ID NO: 415-424 - skipped (10 entries)

SEQ ID NO: 425 - protein, 8 aa, Homo sapiens
PQPKKKPL

SEQ ID NO: 426 - RNA, 153 nt, unidentified
  source 1..153: mol_type = other RNA; note = Guillardia theta
cactatccggtaacgaaactaccggagacgggrraggaggtgacgacctctaaaacctagaacttagagtgcaaaaacgccattacgattgtgatgcctattcaagggtgtcccaagtgtaaaaagaaagcactctaagagcattaaactcta

SEQ ID NO: 427 - protein, 58 aa, synthetic construct
RNNNNNGSTKYCCMAMRTTWAAAMRSAAASMACTCTAAGAGCAYTAARMTMTAYKCTG

SEQ ID NO: 428 - RNA, 57 nt, unidentified
  source 1..57: mol_type = other RNA; note = Guillardia theta
agcttcgcttcccaacataaaaacgcaaacaactctaagagcactaagatatatgct

SEQ ID NO: 429 - RNA, 52 nt, unidentified
  source 1..52: mol_type = other RNA; note = Guillardia theta
ggtgtcccaagtgtaaaaagaaagcactctaagagcattaaactctactctg

SEQ ID NO: 430 - RNA, 93 nt, Batillaria attramentaria
  source 1..93: mol_type = other RNA
ttttccttggcccaaggattgccaaacaccactcaaatcctcgttcaggggcctcgagtggctgggcatatatgggttagcactgagacttcg

SEQ ID NO: 431 - RNA, 93 nt, Dreissena polymorpha
  source 1..93: mol_type = other RNA
attaggtcgatccatcctaagttcgaaagttgattgctgggcaattttctgccgaatgatatgggttatgacactacgttagtgattgtgtgc

SEQ ID NO: 432 - RNA, 77 nt, Dreissena polymorpha
  source 1..77: mol_type = other RNA
attaggtcgatccatcctaagttcgaaagttgattgctgggcaatttctgccgaatgatatgggttatgacactacg

SEQ ID NO: 433 - RNA, 106 nt, Mercenaria mercenaria
  source 1..106: mol_type = other RNA
agggctcgattctttgccttctcgatgcatttattgccacagattttgctaatgcagtttctgaggcaagaatgtgttcgggtaaaaaagagttaatgggcaaact

SEQ ID NO: 434 - RNA, 111 nt, Mercenaria mercenaria
  source 1..111: mol_type = other RNA
tcgggttcgattcgatccccagggtcgaatgcatttttgtcacagattttgccaatgcaagatctgggggcaagaatgtctccgggtgaaaagagtcaggctggaaagatt

SEQ ID NO: 435 - RNA, 125 nt, Mercenaria mercenaria
  source 1..125: mol_type = other RNA
gttcgattctatcccacttgactcgaagagtcagagggctcgaaggcattatthtcacagattttgccaatgcaagatctggggcaagaatgtctccgggtcaaaagagtcaagctggaaagatt

SEQ ID NO: 436 - RNA, 44 nt, Mercenaria mercenaria
  source 1..44: mol_type = other RNA
gctttyagctattaacacattcgacccgcatgacgtcttttctt

SEQ ID NO: 437 - RNA, 66 nt, Mercenaria mercenaria
  source 1..66: mol_type = other RNA
tcttcgtgttttccctttattagtttgttagttttaacacattcgacccgcatgacgacttttctc

SEQ ID NO: 438 - RNA, 43 nt, Mercenaria mercenaria
  source 1..43: mol_type = other RNA
cttttagctattaacacattcgacccgcatgacgccttttctt

SEQ ID NO: 439 - RNA, 43 nt, Mercenaria mercenaria
  source 1..43: mol_type = other RNA
ctttcagctattaacacattcgacccgcatgacgacttttcta

SEQ ID NO: 440 - RNA, 44 nt, Mercenaria mercenaria
  source 1..44: mol_type = other RNA
cttttagctattaacacattcgaccccgcatgacgccttttctt

SEQ ID NO: 441 - RNA, 41 nt, Mercenaria mercenaria
  source 1..41: mol_type = other RNA
ctngrggcaagaatgtstycgggtgaaaagagtcarkctgg

SEQ ID NO: 442 - RNA, 40 nt, Mercenaria mercenaria
  source 1..40: mol_type = other RNA
ctgaggcaagaatgtgttcgggtaaaaagagttaatgggc

SEQ ID NO: 443 - RNA, 40 nt, Mercenaria mercenaria
  source 1..40: mol_type = other RNA
ctggggcaagaatgtctccgggtcaaaagagtcaagctgg

SEQ ID NO: 444 - RNA, 41 nt, Mercenaria mercenaria
  source 1..41: mol_type = other RNA
ctgggggcaagaatgtctccgggtgaaaagagtcaggctgg

SEQ ID NO: 445 - RNA, 47 nt, Mercenaria mercenaria
  source 1..47: mol_type = other RNA
ccgatgttgtaatcagcatcgcgttgtgacgtaaaagatgggttccg

SEQ ID NO: 446 - RNA, 75 nt, unidentified
  source 1..75: mol_type = other RNA; note = Batrachochytrium salamandrivorans
ataacttatggcgtgtcaacccacgtcgrtatgacgtcgtggggcggtttattatttttgtgtcggcctcaaaat

SEQ ID NO: 447 - RNA, 71 nt, unidentified
  source 1..71: mol_type = other RNA; note = Parasitella parasitica
ttatccaccaaagttatcgctttggtcaattaatgcaggtaagcaacatccagcaaacagagctcgttcaa

SEQ ID NO: 448 - RNA, 86 nt, unidentified
  source 1..86: mol_type = other RNA; note = Parasitella parasitica
cattccgcttgagttatcgcttaagcaatttaatgcaggtaagcaacatccaacaaacagagcctgtccaaaaactaatttctttt

SEQ ID NO: 449 - RNA, 104 nt, unidentified
  source 1..104: mol_type = other RNA; note = Naegleria lovaniensis
tggctttcactctttgagtgtttgcttgcaagatcagcactttgttcgatttgtttgttttgttcaaattgttgatttaaataaaggcgttattgvttatcwaa

SEQ ID NO: 450 - RNA, 104 nt, unidentified; identical to SEQ ID NO: 380
  source 1..104: mol_type = other RNA; note = Naegleria lovaniensis

SEQ ID NO: 451 - RNA, 104 nt, unidentified; identical to SEQ ID NO: 381
  source 1..104: mol_type = other RNA; note = Naegleria lovaniensis

SEQ ID NO: 452 - RNA, 104 nt, unidentified; identical to SEQ ID NO: 382
  source 1..104: mol_type = other RNA; note = Naegleria lovaniensis

SEQ ID NO: 453 - RNA, 127 nt, unidentified
  source 1..127: mol_type = other RNA; note = Naegleria lovaniensis
tgcgttgggtcctttcccctggctttcactctttgagtgtttgcttgcaagatcagcactttgttctatttgtttgttttggttcaaattgttgatttaaataaaggccgacattcttcatctctca

SEQ ID NO: 454 - RNA, 134 nt, synthetic construct
  source 1..134: mol_type = other RNA
gcatgccttcttaaacatcacgagactgtaagaaaaggaaactgaaaacgggaaagtccctctctctaacctggcactgcgtcgctggcttggagacaggtgacggtccctgcgggcttgtcctgattggctgg

SEQ ID NO: 455 - RNA, 136 nt, synthetic construct
  source 1..136: mol_type = other RNA
gcatgccttcttaaacatcaacgagactctaagaaaaggaaactgaaaacgggaaagtccctctctctaacctggcactgcgtcgctggcttggagacaggtgacggtccctgcgggccttgtcctgattggctgg

SEQ ID NO: 456 - RNA, 101 nt, synthetic construct
  source 1..101: mol_type = other RNA
gcatgccttcttaaacatcacgagactctaagaaaaggaaactgaaaacgggaaagtccgccagggtgacggtccctgcgggccttgtcctgattggctgg

SEQ ID NO: 457 - RNA, 113 nt, synthetic construct
  source 1..113: mol_type = other RNA
gcatgccttcttaaacatcacgagactctaagaaaaggaaactgaaaacgggaaagtccctctctgcttggagacaggtgacggtccctgcgggccttgtcctgattggctgg

SEQ ID NO: 458 - RNA, 117 nt, synthetic construct
  source 1..117: mol_type = other RNA
gactgccttcttaaacatcacgagacctctaagaaaaggaaactgaaaacgggaaagtccctctctctaacttggagacaggtgacggtccctgcgggccttgtcctgattggctgg

SEQ ID NO: 459 - RNA, 116 nt, synthetic construct
  source 1..116: mol_type = other RNA
catgccttcttaaacatccgagactctaagaaaaggaaactgaaaacgggaaagtccctctctctaactgttggagacaggtgacggtccctgcgggccttgtcctgattggctgg

SEQ ID NO: 460 - RNA, 117 nt, synthetic construct
  source 1..117: mol_type = other RNA
atgccttcttaaacatcacgagactctaagaaaaggaaactgaaaacgggaaagtccctctctctaacaccttggagacaggtgacggtccctgcgggccttgtcctgattggctgg

SEQ ID NO: 461 - RNA, 123 nt, synthetic construct
  source 1..123: mol_type = other RNA
tgccttcttaaacatcacgagactctaagaaaaggaaactgaaaacgggaaagtccctctctctaaccggcttggagacaggtgacggtccctgcgggccttgtccttgtcctgattggctgg

SEQ ID NO: 462 - RNA, 116 nt, synthetic construct
  source 1..116: mol_type = other RNA
gccttcttaaacatcacgagactctaagaaaaggaaactgaaaacgggaagtccctctctctaacctggcttggagacaggtgacggtccctgcgggccttgtcctgattggctgg

SEQ ID NO: 463 - RNA, 118 nt, synthetic construct
  source 1..118: mol_type = other RNA
ccttcttaaacatcacgagactctaagaaaaggaaactgaaaaacgggaaagtccctctctctaacctgggcttggagacaggtgacggtccctgcgggccttgtcctgattggctgg

SEQ ID NO: 464 - RNA, 117 nt, synthetic construct
  source 1..117: mol_type = other RNA
ccttcttaaacatcacgagactctaagaaaaggaaactgaaaacgggaaagtccctctctctaacggtggcttggagacaggtgacggtccctgcgggccttgtcctgattggctgg

SEQ ID NO: 465 - RNA, 118 nt, synthetic construct
  source 1..118: mol_type = other RNA
cttcttaaacatcacgagactctaagaaaaggaaactgaaaacgggaaagtcccctctctctaacctggcacttggagacaggtgacggtccctgcgggccttgtcctgattggctgg

SEQ ID NO: 466 - RNA, 117 nt, synthetic construct
  source 1..117: mol_type = other RNA
ttcttaaacatcacgagactctaagaaaaggaaactgaaaacgggaaagtccctctctctaacctggtggcttggagacaggtgacggtccctgcgggccttgtcctgattggctgg

SEQ ID NO: 467 - RNA, 117 nt, synthetic construct
  source 1..117: mol_type = other RNA
cttaaacatcacgagactctaagaaaaggaaactgaaaacgggaaagtccctctctctaacctggcacggcttggagacaggtgacggtccctgcgggccttgtcctgattggctgg

SEQ ID NO: 468 - RNA, 118 nt, synthetic construct
  source 1..118: mol_type = other RNA
cttaaacatcacgagactctaagaaaaaggaaactgaaaacgggaaagtccctctctctaacctggcactgcttggagacaggtgacggtccctgcgggccttgtcctgattggctgg

SEQ ID NO: 469 - RNA, 117 nt, synthetic construct
  source 1..117: mol_type = other RNA
ttaaacatcacgagactctaagaaaaggaaactgaaaacgggaaagtccctctctctaacctggcactggcttggagacaggtgacggtccctgcgggccttgtcctgattggctgg

SEQ ID NO: 470 - RNA, 117 nt, synthetic construct; identical to SEQ ID NO: 469
  source 1..117: mol_type = other RNA

SEQ ID NO: 471 - RNA, 117 nt, synthetic construct; identical to SEQ ID NO: 469
  source 1..117: mol_type = other RNA

SEQ ID NO: 472 - RNA, 117 nt, synthetic construct; identical to SEQ ID NO: 469
  source 1..117: mol_type = other RNA

SEQ ID NO: 473 - RNA, 117 nt, synthetic construct
  source 1..117: mol_type = other RNA
taaacatcacgagactctaagaaaaggaaactgaaaacgggaaagtccctctctctaacctggcactgcgtttggagacaggtgacggtccctgcgggccttgtcctgattggctgg

SEQ ID NO: 474 - RNA, 117 nt, synthetic construct
  source 1..117: mol_type = other RNA
taaacatcacgagactctaagaaaaggaaactgaaaacgggaaagtccctctctctaacctggcacttggcttggagacaggtgacggtccctgcgggccttgtcctgattggctgg

SEQ ID NO: 475 - RNA, 116 nt, synthetic construct
  source 1..116: mol_type = other RNA
taaacatcacgagactctaagaaaaggaaactgaaaacgggaaagtccctctctctaacctggcactgcgttggagacaggtgacggtccctgcgggccttgtcctgattggctgg

SEQ ID NO: 476 - RNA, 122 nt, synthetic construct
  source 1..122: mol_type = other RNA
aaacatcacgagactctaagaaaaggaactgaaaacgggaaagtccctctctctaacctggcactgcgtcgctggcttggagacaggtgacggtccctgcgggccttgtcctgattggctgg

SEQ ID NO: 477 - RNA, 117 nt, synthetic construct
  source 1..117: mol_type = other RNA
aaacatcacgagactctaagaaaaggaaactgaaaacgggaaagtccctctctctaacctggcactgcgtcttggagacaggtgacggtccctgcgggccttgtcctgattggctgg

SEQ ID NO: 478 - RNA, 117 nt, synthetic construct
  source 1..117: mol_type = other RNA
aaacatcacgagactctaagaaaaggaaactgaaaacgggaaagtccctctctctaacctggcactgtggcttggagacaggtgacggtccctgcgggccttgtcctgattggctgg

SEQ ID NO: 479 - RNA, 117 nt, synthetic construct; identical to SEQ ID NO: 478
  source 1..117: mol_type = other RNA

SEQ ID NO: 480 - RNA, 117 nt, synthetic construct
  source 1..117: mol_type = other RNA
aaacatcacgagactctaagaaaaggaaactgaaaacgggaagtccctctctctaacctggcgctgcggcttggagacaggtgacggtcccctgcgggccttgtcctgattggctgg

SEQ ID NO: 481 - protein, 30 aa, synthetic construct
SNIRIVKRKAKGFFKCEDLVTIKDAVKAAH

SEQ ID NO: 482 - DNA, 25 bp, synthetic construct
  source 1..25: mol_type = other DNA
aatgacttctcttaaattgcccggg

SEQ ID NO: 483 - RNA, 30 nt, synthetic construct
  source 1..30: mol_type = other RNA
tatccggtaacctaccggagacgggttagg

SEQ ID NO: 484 - DNA, 13 bp, synthetic construct
  source 1..13: mol_type = other DNA
cccgggcatttaa

SEQ ID NO: 485 - protein, 30 aa, synthetic construct
RIMSDASILVRSYYLRWFQSSYPLDSDDKE

SEQ ID NO: 486 - RNA, 30 nt, synthetic construct
  source 1..30: mol_type = other RNA
aggtgacgacctctaaaacctagaacttag

SEQ ID NO: 487 - protein, 30 aa, synthetic construct
LELEHFHISMACSIVQGITRPPVRGVGPEQ

SEQ ID NO: 488 - RNA, 30 nt, synthetic construct
  source 1..30: mol_type = other RNA
agtgcaaaaacgccattacgattgtgatgc

SEQ ID NO: 489 - protein, 30 aa, synthetic construct
SVKIDVFNDMLDEYKRLYERAPNDKENETD

SEQ ID NO: 490 - RNA, 30 nt, synthetic construct
  source 1..30: mol_type = other RNA
ctattcaagggtgtcccaagtgtaaaaaga

SEQ ID NO: 491 - protein, 30 aa, synthetic construct
LSLSHVLAYSIDNLLTAYKNNIEAHFSKYV

SEQ ID NO: 492 - RNA, 23 nt, synthetic construct
  source 1..23: mol_type = other RNA
aagcactctaaggagaagtcatc

SEQ ID NO: 493 - protein, 30 aa, synthetic construct
KRFIRCDMLAKGFNKSEANRVAAIYTNAYI

SEQ ID NO: 494 - protein, 30 aa, synthetic construct
YSSLFPSKINKGGFPRVYDLKANPWVYLPK

SEQ ID NO: 495 - protein, 30 aa, synthetic construct
MVMINQALETDFSSVEHKERRLLNPLPFYS

SEQ ID NO: 496 - protein, 30 aa, synthetic construct
SFVPMHIRIDTSGLSQLLMTKDRLDDFKRS

SEQ ID NO: 497 - protein, 30 aa, synthetic construct
YLAEFGVSLNIKNKGDMLASFEKIFGRKAT

SEQ ID NO: 498 - protein, 30 aa, synthetic construct
SNREAGLYATEMWSFLTNLKTCRQWKELDG

SEQ ID NO: 499 - protein, 30 aa, synthetic construct
VVRKNDPKGTQWMFDNAVVTDGVSISFQVI

SEQ ID NO: 500 - protein, 30 aa, synthetic construct
DNSMFGRKAFSGREELKTSKLLGCDPGKRD

SEQ ID NO: 501 - protein, 30 aa, synthetic construct
ILAITDGIKTICYTKGQRDMDTHKTIRLRT

SEQ ID NO: 502 - protein, 30 aa, synthetic construct
SLKRRRGCGLEEYETQVMNRFQKRSCHPEM

SEQ ID NO: 503 - protein, 29 aa, synthetic construct
FRRYACSRKMEHMLLECYSHPVFREFKFL

SEQ ID NO: 504 - protein, 30 aa, synthetic construct
VYNKTKSSEHRFMHRVLETFKRPQTNLSKA

SEQ ID NO: 505 - protein, 30 aa, synthetic construct
RCASGVMRMNALKEVQRHGDIIIGWGNWGK

SEQ ID NO: 506 - protein, 30 aa, synthetic construct
NIRRRFESLFKTTTVPEHYTSQECPSCKGR

SEQ ID NO: 507 - protein, 30 aa, synthetic construct
CLRKATGNPIMRHHLLRCTNDSCCSRWWNR

SEQ ID NO: 508 - protein, 13 aa, synthetic construct
NVAGAFNILTRLL

SEQ ID NO: 509 - RNA, 12 nt, synthetic construct
  source 1..12: mol_type = other RNA; note = guide RNA
aaacttgtaagg

SEQ ID NO: 510 - RNA, 21 nt, synthetic construct
  source 1..21: mol_type = other RNA; note = guide RNA
agaatctcacgcgtgagattc

SEQ ID NO: 511 - RNA, 55 nt, synthetic construct
  source 1..55: mol_type = other RNA
ttcgtacgttagtacgttgtaagtccctcgtggattctcccaggcgcsacacngn

SEQ ID NO: 512 - protein, 7 aa, Simian virus 40
PKKKRKV

SEQ ID NO: 513 - protein, 16 aa, Simian virus 40
KRPAATKKAGQAKKKK

SEQ ID NO: 514 - protein, 9 aa, Homo sapiens
PAAKRVKLD

SEQ ID NO: 515 - protein, 11 aa, Homo sapiens
RQRRNELKRSP

SEQ ID NO: 516 - protein, 38 aa, Homo sapiens
NQSSNFGPMKGGNFGGRSSGPYGGGGQYFAKPRNQGGY

SEQ ID NO: 517 - protein, 41 aa, Homo sapiens
RMRIZFKNKGKDTAELRRRRVEVSVELRKAKKDEQILKRRN

SEQ ID NO: 518 - protein, 8 aa, Homo sapiens
VSRKRPRP

SEQ ID NO: 519 - protein, 8 aa, Homo sapiens
PPKKARED

SEQ ID NO: 520 - protein, 12 aa, Mus sp.
SALIKKKKKMAP

SEQ ID NO: 521 - protein, 5 aa, Influenza virus
DRLRR

SEQ ID NO: 522 - protein, 7 aa, Influenza virus
PKQKKRK

SEQ ID NO: 523 - protein, 10 aa, Hepatitis D virus
RKLKKKIKKL

SEQ ID NO: 524 - protein, 10 aa, Mus sp.
REKKKFLKRR

SEQ ID NO: 525 - protein, 20 aa, Homo sapiens
KRKGDEVDGVDEVAKKKSKK

SEQ ID NO: 526 - protein, 17 aa, Homo sapiens
RKCLQAGMNLEARKTKK

SEQ ID NO: 527 - protein, 4 aa, synthetic construct
  source 1..4: note = GlySer linker
GGGS

SEQ ID NO: 528 - protein, 5 aa, synthetic construct
  source 1..5: note = GlySer linker
GGGGS

SEQ ID NO: 529 - protein, 9 aa, synthetic construct
  source 1..9: note = GlySer linker
GGSGGSGGS

SEQ ID NO: 530 - protein, 15 aa, synthetic construct
  source 1..15: note = GlySer linker
GGGGSGGGGSGGGGS

SEQ ID NO: 531 - protein, 20 aa, synthetic construct
  source 1..20: note = GlySer linker
GGGGSGGGGSGGGGSGGGGS

SEQ ID NO: 532 - protein, 25 aa, synthetic construct
  source 1..25: note = GlySer linker
GGGGSGGGGSGGGGSGGGGSGGGGS

SEQ ID NO: 533 - protein, 30 aa, synthetic construct
  source 1..30: note = GlySer linker
GGGGSGGGGSGGGGSGGGGSGGGGSGGGGS

SEQ ID NO: 534 - protein, 35 aa, synthetic construct
  source 1..35: note = GlySer linker
GGGGSGGGGSGGGGSGGGGSGGGGSGGGGSGGGGS

SEQ ID NO: 535 - protein, 40 aa, synthetic construct
  source 1..40: note = GlySer linker
GGGGSGGGGSGGGGSGGGGSGGGGSGGGGSGGGGSGGGGS

SEQ ID NO: 536 - protein, 45 aa, synthetic construct
  source 1..45: note = GlySer linker
GGGGSGGGGSGGGGSGGGGSGGGGSGGGGSGGGGSGGGGSGGGGS

SEQ ID NO: 537 - protein, 50 aa, synthetic construct
  source 1..50: note = GlySer linker
GGGGSGGGGSGGGGSGGGGSGGGGSGGGGSGGGGSGGGGSGGGGSGGGGS

SEQ ID NO: 538 - protein, 55 aa, synthetic construct
  source 1..55: note = GlySer linker
GGGGSGGGGSGGGGSGGGGSGGGGSGGGGSGGGGSGGGGSGGGGSGGGGSGGGGS

SEQ ID NO: 539 - protein, 60 aa, synthetic construct
  source 1..60: note = GlySer linker
GGGGSGGGGSGGGGSGGGGSGGGGSGGGGSGGGGSGGGGSGGGGSGGGGSGGGGSGGGGS

SEQ ID NO: 540 - protein, 65 aa, synthetic construct
  source 1..65: note = GlySer linker
GGGGSGGGGSGGGGSGGGGSGGGGSGGGGSGGGGSGGGGSGGGGSGGGGSGGGGSGGGGSGGGGS

SEQ ID NO: 541 - protein, 70 aa, synthetic construct
  source 1..70: note = GlySer linker
GGGGSGGGGSGGGGSGGGGSGGGGSGGGGSGGGGSGGGGSGGGGSGGGGSGGGGSGGGGSGGGGSGGGGS

SEQ ID NO: 542 - protein, 75 aa, synthetic construct
  source 1..75: note = GlySer linker
GGGGSGGGGSGGGGSGGGGSGGGGSGGGGSGGGGSGGGGSGGGGSGGGGSGGGGSGGGGSGGGGSGGGGSGGGGS

SEQ ID NO: 543 - protein, 10 aa, synthetic construct
  source 1..10: note = GlySer linker
GGGGSGGGGS

SEQ ID NO: 544 - protein, 32 aa, synthetic construct
LEPGEKPYKCPECGKSFSQSGALTRHQRTHTR

SEQ ID NO: 545 - protein, 20 aa, synthetic construct
PKKKRKVEASSPKKRKVEAS

SEQ ID NO: 546 - protein, 9 aa, synthetic construct
  source 1..9: note = GlySer linker
GGSGGSGGS

SEQ ID NO: 547 - DNA, 27 bp, synthetic construct
  source 1..27: mol_type = other DNA
ggtggtagtggagggagcggcggttca

SEQ ID NO: 548 - protein, 21 aa, synthetic construct
  source 1..21: note = GlySer linker
GGSGGSGGSGGSGGSGGSGGS

SEQ ID NO: 549 - DNA, 72 bp, synthetic construct
  source 1..72: mol_type = other DNA
ggtggaggaggctctggtggaggcggtagcggaggcggagggtcgggtggtagtggagggagcggcggttca

SEQ ID NO: 550 - DNA, 48 bp, synthetic construct
  source 1..48: mol_type = other DNA
tcgggatctgagacgcctgggacctcggaatcggctacgcccgaaagt

SEQ ID NO: 551 - DNA, 192 bp, synthetic construct
  source 1..192: mol_type = other DNA
gtggataacaaatttaacaaagaaatgtgggcggcgtgggaagaaattcgtaacctgccgaacctgaacggctggcagatgaccgcgtttattgcgagcctggtggatgatccgagccagagcgcgaacctgctggcggaagcgaaaaaactgaacgatgcgcaggcgccgaaaaccggcggtggttctggt

SEQ ID NO: 552 - DNA, 108 bp, synthetic construct
  source 1..108: mol_type = other DNA
ggtggttctgccggtggctccggttctggctccagcggtggcagctctggtgcgtccggcacgggtactgcgggtggcactggcagcggttccggtactggctctggc

SEQ ID NO: 553 - DNA, 12 bp, synthetic construct
  source 1..12: mol_type = other DNA
acttgtttaagt

SEQ ID NO: 554 - protein, 229 aa, Rattus sp. [sequence omitted]

SEQ ID NO: 555 - protein, 236 aa, Homo sapiens
MTSEKGPSTGDPTLRRRIEPWEFDVFYDPRELRKEACLLYEIKWGMSRKIWRSSGKNTTNHVEVNFIKKFTSERDFHPSMSCSITWFLSWSPCWECSQAIREFLSRHPGVTLVIYVARLFWHMDQQNRQGLRDLVNSGVTIQIMRASEYYHCWRNFVNYPPGDEAHWPQYPPLWMMLYALELHCIILSLPPCLKISRRWQNHLTFFRLHLQNCHYQTIPPHILLATGLIHPSVAWR

SEQ ID NO: 556 - protein, 325 aa, Homo sapiens
MELKYHPEMRFFHWFSKWRKLHRDQEYEVTWYISWSPCTKCTRDMATFLAEDPKVTLTIFVARLYYFWDPDYQEALRSLCQKRDGPRATMKIMNYDEFQHCWSKFVYSQRELFEPWNNLPKYYILLHIMLGEILRHSMDPPTFTFNFNNEPWVRGRHETYLCYEVERMHNDTWVLLNQRRGFLCNQAPHKHGFLEGRHAELCFLDVIPFWKLDLDQDYRVTCFTSWSPCFSCAQEMAKFISKNKHVSLCIFTARIYDDQGRCQEGLRTLAEAGAKISIMTYSEFKHCWDTFVDHQGCPFQPWDGLDEHSQDLSGRLRAILQNQEN

SEQ ID NO: 557 - protein, 208 aa, Petromyzon marinus
MTDAEYVRIHEKLDIYTFKKQFFNNKKSVSHRCYVLFELKRRGERRACFWGYAVNKPQSGTERGIHAEIFSIRKVEEYLRDNPGQFTINWYSSWSPCADCAEKILEWYNQELRGNGHTLKIWACKLYYEKNARNQIGLWNLRDNGVGLNVMVSEHYQCCRKIFIQSSHNQLNENRWLEKTLKRAEKRRSELSIMIQVKILHTTKSPAV

SEQ ID NO: 558 - protein, 200 aa, Homo sapiens
MDSLLMNRRKFLYQFKNVRWAKGRRETYLCYVVKRRDSATSFSLDFGYLRNKNGCHVELLFLRYISDWDLDPGRCYRVTWFTSWSPCYDCARHVADFLRGNPYLSLRIFTARLYFCEDRKAEPEGLRRLHRAGVQIAIMTFKDYFYCWNTFVENHERTFKAWEGLHENSVRLSRQLRRILLPLYEVDDLRDAFRTLGLLD

SEQ ID NO: 559 - protein, 181 aa, Homo sapiens
MDSLLMNRRKFLYQFKNVRWAKGRRETYLCYVVKRRDSATSFSLDFGYLRNKNGCHVELLFLRYISDWDLDPGRCYRVTWFTSWSPCYDCARHVADFLRGNPNLSLRIFTARLYFCEDRKAEPEGLRRLHRAGVQIAIMTFKDYFYCWNTFVENHERTFKAWEGLHENSVRLSRQLRRILL

SEQ ID NO: 560 - protein, 9 aa, synthetic construct
IEVMYPPPY

SEQ ID NO: 561 - RNA, 25 nt, synthetic construct
  source 1..25: mol_type = other RNA; note = thrombin inhibitor aptamer
gggaacaaagctgaagtacttaccc

SEQ ID NO: 562 - DNA, 18 bp, synthetic construct
  source 1..18: mol_type = other DNA
gggtagggcgggttggga

SEQ ID NO: 563 - RNA, 12 nt, synthetic construct
  misc_feature 12: note = Iowa black quencher=/3IAbRQSp/
  misc_feature 1: note = Biotin Tag = /5Biosg/
  source 1..12: mol_type = other RNA
tctcgtacgttc

SEQ ID NO: 564 - RNA, 24 nt, synthetic construct
  misc_feature 1: note = Biotin Tag = /5Biosg/
  source 1..24: mol_type = other RNA
  misc_feature 24: note = Iowa black quencher = /3IAbRQS/
tctcgtacgttctctcgtacgttc

SEQ ID NO: 565 - DNA, 3008 bp, synthetic construct
  source 1..3008: mol_type = other DNA; note = plasmid construct
aattctgtggaatgtgtgtcagttagggtgtggaaagtccccaggctccccagcaggcagaagtatgcaaagcatgcatctcaattagtcagcaaccaggtgtggaaagtccccaggctccccagcaggcagaagtatgcaaagcatgcatctcaattagtcagcaaccatagtcccgcccctaactccgcccatcccgcccctaactccgcccagttccgcccattctccgccccatggctgactaattttttttatttatgcagaggccgaggccgcctctgcctctgagctattccagaagtagtgaggaggcttttttggaggcctaggcttttgcaaaaagctaacttgtttattgcagcttataatggttacaaataaagcaatagcatcacaaatttcacaaataaagcatttttttcactgcattctagttgtggtttgtccaaactcatcaatgtatcttatcatgtctgtataccgtcgacctctagctagagcttggcgtaatcatggtcatagctgtttcctgtgtgaaattgttatccgctcacaattccacacaacatacgagccggaagcataaagtgtaaagcctggggtgcctaatgagtgagctaactcacattaattgcgttgcgctcactgcccgctttccagtcgggaaacctgtcgtgccagctgcattaatgaatcggccaacgcgcggggagaggcggtttgcgtattgggcgctcttccgcttcctcgctcactgactcgctgcgctcggtcgttcggctgcggcgagcggtatcagctcactcaaaggcggtaatacggttatccacagaatcaggggataacgcaggaaagaacatgtgagcaaaaggccagcaaaaggccaggaaccgtaaaaaggccgcgttgctggcgtttttccataggctccgcccccctgacgagcatcacaaaaatcgacgctcaagtcagaggtggcgaaacccgacaggactataaagataccaggcgtttccccctggaagctccctcgtgcgctctcctgttccgaccctgccgcttaccggatacctgtccgcctttctcccttcgggaagcgtggcgctttctcatagctcacgctgtaggtatctcagttcggtgtaggtcgttcgctccaagctgggctgtgtgcacgaaccccccgttcagcccgaccgctgcgccttatccggtaactatcgtcttgagtccaacccggtaagacacgacttatcgccactggcagcagccactggtaacaggattagcagagcgaggtatgtaggcggtgctacagagttcttgaagtggtggcctaactacggctacactagaagaacagtatttggtatctgcgctctgctgaagccagttaccttcggaaaaagagttggtagctcttgatccggcaaacaaaccaccgctggtagcggtttttttgtttgcaagcagcagattacgcgcagaaaaaaaggatctcaagaagatcctttgatcttttctacggggtctgacgctcagtggaacgaaaactcacgttaagggattttggtcatgagattatcaaaaaggatcttcacctagatccttttaaattaaaaatgaagttttaaatcaatctaaagtatatatgagtaaacttggtctgacagttaccaatgcttaatcagtgaggcacctatctcagcgatctgtctatttcgttcatccatagttgcctgactccccgtcgtgtagataactacgatacgggagggcttaccatctggccccagtgctgcaatgataccgcgagacccacgctcaccggctccagatttatcagcaataaaccagccagccggaagggccgagcgcagaagtggtcctgcaactttatccgcctccatccagtctattaattgttgccgggaagctagagtaagtagttcgccagttaatagtttgcgcaacgttgttgccattgctacaggcatcgtggtgtcacgctcgtcgtttggtatggcttcattcagctccggttcccaacgatcaaggcgagttacatgatcccccatgttgtgcaaaaaagcggttagctccttcggtcctccgatcgttgtcagaagtaagttggccgcagtgttatcactcatggttatggcagcactgcataattctcttactgtcatgccatccgtaagatgcttttctgtgactggtgagtactcaaccaagtcattctgagaatagtgtatgcggcgaccgagttgctcttgcccggcgtcaatacgggataataccgcgccacatagcagaactttaaaagtgctcatcattggaaaacgttcttcggggcgaaaactctcaaggatcttaccgctgttgagatccagttcgatgtaacccactcgtgcacccaactgatcttcagcatcttttactttcaccagcgtttctgggtgagcaaaaacaggaaggcaaaatgccgcaaaaaagggaataagggcgacacggaaatgttgaatactcatactcttcctttttcaatattattgaagcatttatcagggttattgtctcatgagcggatacatatttgaatgtatttagaaaaataaacaaataggggttccgcgcacatttccccgaaaagtgccacctgagggcctatttcccatgattccttcatatttgcatatacgatacaaggctgttagagagataattagaattaatttgactgtaaacacaaagatattagtacaaaatacgtgacgtagaaagtaataatttcttgggtagtttgcagttttaaaattatgttttaaaatggactatcatatgcttaccgtaacttgaaagtatttcgatttcttggctttatatatcttgtggaaaggacgttttccgagccggttgtcgcgcggttcaatccctggtgcgggtgctagtgccaatacccaccggctccgcactacagtcttctctgaagaccatttttt

SEQ ID NO: 566 - RNA, 75 nt, synthetic construct
  source 1..75: mol_type = other RNA
gttttccgagccggttgtcgcgcggttcaatccctggtgcgggtgctagtgccaatacccaccggctccgcacta

SEQ ID NO: 567 - DNA, 3076 bp, synthetic construct
  source 1..3076: mol_type = other DNA; note = plasmid construct
aattctgtggaatgtgtgtcagttagggtgtggaaagtccccaggctccccagcaggcagaagtatgcaaagcatgcatctcaattagtcagcaaccaggtgtggaaagtccccaggctccccagcaggcagaagtatgcaaagcatgcatctcaattagtcagcaaccatagtcccgcccctaactccgcccatcccgcccctaactccgcccagttccgcccattctccgccccatggctgactaattttttttatttatgcagaggccgaggccgcctctgcctctgagctattccagaagtagtgaggaggcttttttggaggcctaggcttttgcaaaaagctaacttgtttattgcagcttataatggttacaaataaagcaatagcatcacaaatttcacaaataaagcatttttttcactgcattctagttgtggtttgtccaaactcatcaatgtatcttatcatgtctgtataccgtcgacctctagctagagcttggcgtaatcatggtcatagctgtttcctgtgtgaaattgttatccgctcacaattccacacaacatacgagccggaagcataaagtgtaaagcctggggtgcctaatgagtgagctaactcacattaattgcgttgcgctcactgcccgctttccagtcgggaaacctgtcgtgccagctgcattaatgaatcggccaacgcgcggggagaggcggtttgcgtattgggcgctcttccgcttcctcgctcactgactcgctgcgctcggtcgttcggctgcggcgagcggtatcagctcactcaaaggcggtaatacggttatccacagaatcaggggataacgcaggaaagaacatgtgagcaaaaggccagcaaaaggccaggaaccgtaaaaaggccgcgttgctggcgtttttccataggctccgcccccctgacgagcatcacaaaaatcgacgctcaagtcagaggtggcgaaacccgacaggactataaagataccaggcgtttccccctggaagctccctcgtgcgctctcctgttccgaccctgccgcttaccggatacctgtccgcctttctcccttcgggaagcgtggcgctttctcatagctcacgctgtaggtatctcagttcggtgtaggtcgttcgctccaagctgggctgtgtgcacgaaccccccgttcagcccgaccgctgcgccttatccggtaactatcgtcttgagtccaacccggtaagacacgacttatcgccactggcagcagccactggtaacaggattagcagagcgaggtatgtaggcggtgctacagagttcttgaagtggtggcctaactacggctacactagaagaacagtatttggtatctgcgctctgctgaagccagttaccttcggaaaaagagttggtagctcttgatccggcaaacaaaccaccgctggtagcggtttttttgtttgcaagcagcagattacgcgcagaaaaaaaggatctcaagaagatcctttgatcttttctacggggtctgacgctcagtggaacgaaaactcacgttaagggattttggtcatgagattatcaaaaaggatcttcacctagatccttttaaattaaaaatgaagttttaaatcaatctaaagtatatatgagtaaacttggtctgacagttaccaatgcttaatcagtgaggcacctatctcagcgatctgtctatttcgttcatccatagttgcctgactccccgtcgtgtagataactacgatacgggagggcttaccatctggccccagtgctgcaatgataccgcgagacccacgctcaccggctccagatttatcagcaataaaccagccagccggaagggccgagcgcagaagtggtcctgcaactttatccgcctccatccagtctattaattgttgccgggaagctagagtaagtagttcgccagttaatagtttgcgcaacgttgttgccattgctacaggcatcgtggtgtcacgctcgtcgtttggtatggcttcattcagctccggttcccaacgatcaaggcgagttacatgatcccccatgttgtgcaaaaaagcggttagctccttcggtcctccgatcgttgtcagaagtaagttggccgcagtgttatcactcatggttatggcagcactgcataattctcttactgtcatgccatccgtaagatgcttttctgtgactggtgagtactcaaccaagtcattctgagaatagtgtatgcggcgaccgagttgctcttgcccggcgtcaatacgggataataccgcgccacatagcagaactttaaaagtgctcatcattggaaaacgttcttcggggcgaaaactctcaaggatcttaccgctgttgagatccagttcgatgtaacccactcgtgcacccaactgatcttcagcatcttttactttcaccagcgtttctgggtgagcaaaaacaggaaggcaaaatgccgcaaaaaagggaataagggcgacacggaaatgttgaatactcatactcttcctttttcaatattattgaagcatttatcagggttattgtctcatgagcggatacatatttgaatgtatttagaaaaataaacaaataggggttccgcgcacatttccccgaaaagtgccacctgagggcctatttcccatgattccttcatatttgcatatacgatacaaggctgttagagagataattagaattaatttgactgtaaacacaaagatattagtacaaaatacgtgacgtagaaagtaataatttcttgggtagtttgcagttttaaaattatgttttaaaatggactatcatatgcttaccgtaacttgaaagtatttcgatttcttggctttatatatcttgtggaaaggacgttttccgagccggttgtcgcgcggttcaatccctggtgcgggtgctagtgccaatacccaccggctccgcactacagtcttctctgaagaccaggccggcatggtcccagcctcctcgctggcgccggctgggcaacatgcttcggcatggcgaatgggactttttt

SEQ ID NO: 568 - RNA, 75 nt, synthetic construct; identical to SEQ ID NO: 566
  source 1..75: mol_type = other RNA

SEQ ID NO: 569 - DNA, 3095 bp, synthetic construct
  source 1..3095: mol_type = other DNA; note = plasmid construct
aattctgtggaatgtgtgtcagttagggtgtggaaagtccccaggctccccagcaggcagaagtatgcaaagcatgcatctcaattagtcagcaaccaggtgtggaaagtccccaggctccccagcaggcagaagtatgcaaagcatgcatctcaattagtcagcaaccatagtcccgcccctaactccgcccatcccgcccctaactccgcccagttccgcccattctccgccccatggctgactaattttttttatttatgcagaggccgaggccgcctctgcctctgagctattccagaagtagtgaggaggcttttttggaggcctaggcttttgcaaaaagctaacttgtttattgcagcttataatggttacaaataaagcaatagcatcacaaatttcacaaataaagcatttttttcactgcattctagttgtggtttgtccaaactcatcaatgtatcttatcatgtctgtataccgtcgacctctagctagagcttggcgtaatcatggtcatagctgtttcctgtgtgaaattgttatccgctcacaattccacacaacatacgagccggaagcataaagtgtaaagcctggggtgcctaatgagtgagctaactcacattaattgcgttgcgctcactgcccgctttccagtcgggaaacctgtcgtgccagctgcattaatgaatcggccaacgcgcggggagaggcggtttgcgtattgggcgctcttccgcttcctcgctcactgactcgctgcgctcggtcgttcggctgcggcgagcggtatcagctcactcaaaggcggtaatacggttatccacagaatcaggggataacgcaggaaagaacatgtgagcaaaaggccagcaaaaggccaggaaccgtaaaaaggccgcgttgctggcgtttttccataggctccgcccccctgacgagcatcacaaaaatcgacgctcaagtcagaggtggcgaaacccgacaggactataaagataccaggcgtttccccctggaagctccctcgtgcgctctcctgttccgaccctgccgcttaccggatacctgtccgcctttctcccttcgggaagcgtggcgctttctcatagctcacgctgtaggtatctcagttcggtgtaggtcgttcgctccaagctgggctgtgtgcacgaaccccccgttcagcccgaccgctgcgccttatccggtaactatcgtcttgagtccaacccggtaagacacgacttatcgccactggcagcagccactggtaacaggattagcagagcgaggtatgtaggcggtgctacagagttcttgaagtggtggcctaactacggctacactagaagaacagtatttggtatctgcgctctgctgaagccagttaccttcggaaaaagagttggtagctcttgatccggcaaacaaaccaccgctggtagcggtttttttgtttgcaagcagcagattacgcgcagaaaaaaaggatctcaagaagatcctttgatcttttctacggggtctgacgctcagtggaacgaaaactcacgttaagggattttggtcatgagattatcaaaaaggatcttcacctagatccttttaaattaaaaatgaagttttaaatcaatctaaagtatatatgagtaaacttggtctgacagttaccaatgcttaatcagtgaggcacctatctcagcgatctgtctatttcgttcatccatagttgcctgactccccgtcgtgtagataactacgatacgggagggcttaccatctggccccagtgctgcaatgataccgcgagacccacgctcaccggctccagatttatcagcaataaaccagccagccggaagggccgagcgcagaagtggtcctgcaactttatccgcctccatccagtctattaattgttgccgggaagctagagtaagtagttcgccagttaatagtttgcgcaacgttgttgccattgctacaggcatcgtggtgtcacgctcgtcgtttggtatggcttcattcagctccggttcccaacgatcaaggcgagttacatgatcccccatgttgtgcaaaaaagcggttagctccttcggtcctccgatcgttgtcagaagtaagttggccgcagtgttatcactcatggttatggcagcactgcataattctcttactgtcatgccatccgtaagatgcttttctgtgactggtgagtactcaaccaagtcattctgagaatagtgtatgcggcgaccgagttgctcttgcccggcgtcaatacgggataataccgcgccacatagcagaactttaaaagtgctcatcattggaaaacgttcttcggggcgaaaactctcaaggatcttaccgctgttgagatccagttcgatgtaacccactcgtgcacccaactgatcttcagcatcttttactttcaccagcgtttctgggtgagcaaaaacaggaaggcaaaatgccgcaaaaaagggaataagggcgacacggaaatgttgaatactcatactcttcctttttcaatattattgaagcatttatcagggttattgtctcatgagcggatacatatttgaatgtatttagaaaaataaacaaataggggttccgcgcacatttccccgaaaagtgccacctgagggcctatttcccatgattccttcatatttgcatatacgatacaaggctgttagagagataattagaattaatttgactgtaaacacaaagatattagtacaaaatacgtgacgtagaaagtaataatttcttgggtagtttgcagttttaaaattatgttttaaaatggactatcatatgcttaccgtaacttgaaagtatttcgatttcttggctttatatatcttgtggaaaggacagatcaatgttggatggacacggtagaccagaagtgttcagcaggagtgttccagccgtagcgtagaacgtagattggttagattaggttttccgagccggttgtcgcgcggttcaatccctggtgcgggtgctagtgccaatacccaccggctccgcactacagtcttctctgaagaccatttttt

SEQ ID NO: 570 - RNA, 162 nt, synthetic construct
  source 1..162: mol_type = other RNA
agatcaatgttggatggacacggtagaccagaagtgttcagcaggagtgttccagccgtagcgtagaacgtagattggttagattaggttttccgagccggttgtcgcgcggttcaatccctggtgcgggtgctagtgccaatacccaccggctccgcacta

SEQ ID NO: 571 - DNA, 3134 bp, synthetic construct
  source 1..3134: mol_type = other DNA; note = plasmid construct
aattctgtggaatgtgtgtcagttagggtgtggaaagtccccaggctccccagcaggcagaagtatgcaaagcatgcatctcaattagtcagcaaccaggtgtggaaagtccccaggctccccagcaggcagaagtatgcaaagcatgcatctcaattagtcagcaaccatagtcccgcccctaactccgcccatcccgcccctaactccgcccagttccgcccattctccgccccatggctgactaattttttttatttatgcagaggccgaggccgcctctgcctctgagctattccagaagtagtgaggaggcttttttggaggcctaggcttttgcaaaaagctaacttgtttattgcagcttataatggttacaaataaagcaatagcatcacaaatttcacaaataaagcatttttttcactgcattctagttgtggtttgtccaaactcatcaatgtatcttatcatgtctgtataccgtcgacctctagctagagcttggcgtaatcatggtcatagctgtttcctgtgtgaaattgttatccgctcacaattccacacaacatacgagccggaagcataaagtgtaaagcctggggtgcctaatgagtgagctaactcacattaattgcgttgcgctcactgcccgctttccagtcgggaaacctgtcgtgccagctgcattaatgaatcggccaacgcgcggggagaggcggtttgcgtattgggcgctcttccgcttcctcgctcactgactcgctgcgctcggtcgttcggctgcggcgagcggtatcagctcactcaaaggcggtaatacggttatccacagaatcaggggataacgcaggaaagaacatgtgagcaaaaggccagcaaaaggccaggaaccgtaaaaaggccgcgttgctggcgtttttccataggctccgcccccctgacgagcatcacaaaaatcgacgctcaagtcagaggtggcgaaacccgacaggactataaagataccaggcgtttccccctggaagctccctcgtgcgctctcctgttccgaccctgccgcttaccggatacctgtccgcctttctcccttcgggaagcgtggcgctttctcatagctcacgctgtaggtatctcagttcggtgtaggtcgttcgctccaagctgggctgtgtgcacgaaccccccgttcagcccgaccgctgcgccttatccggtaactatcgtcttgagtccaacccggtaagacacgacttatcgccactggcagcagccactggtaacaggattagcagagcgaggtatgtaggcggtgctacagagttcttgaagtggtggcctaactacggctacactagaagaacagtatttggtatctgcgctctgctgaagccagttaccttcggaaaaagagttggtagctcttgatccggcaaacaaaccaccgctggtagcggtttttttgtttgcaagcagcagattacgcgcagaaaaaaaggatctcaagaagatcctttgatcttttctacggggtctgacgctcagtggaacgaaaactcacgttaagggattttggtcatgagattatcaaaaaggatcttcacctagatccttttaaattaaaaatgaagttttaaatcaatctaaagtatatatgagtaaacttggtctgacagttaccaatgcttaatcagtgaggcacctatctcagcgatctgtctatttcgttcatccatagttgcctgactccccgtcgtgtagataactacgatacgggagggcttaccatctggccccagtgctgcaatgataccgcgagacccacgctcaccggctccagatttatcagcaataaaccagccagccggaagggccgagcgcagaagtggtcctgcaactttatccgcctccatccagtctattaattgttgccgggaagctagagtaagtagttcgccagttaatagtttgcgcaacgttgttgccattgctacaggcatcgtggtgtcacgctcgtcgtttggtatggcttcattcagctccggttcccaacgatcaaggcgagttacatgatcccccatgttgtgcaaaaaagcggttagctccttcggtcctccgatcgttgtcagaagtaagttggccgcagtgttatcactcatggttatggcagcactgcataattctcttactgtcatgccatccgtaagatgcttttctgtgactggtgagtactcaaccaagtcattctgagaatagtgtatgcggcgaccgagttgctcttgcccggcgtcaatacgggataataccgcgccacatagcagaactttaaaagtgctcatcattggaaaacgttcttcggggcgaaaactctcaaggatcttaccgctgttgagatccagttcgatgtaacccactcgtgcacccaactgatcttcagcatcttttactttcaccagcgtttctgggtgagcaaaaacaggaaggcaaaatgccgcaaaaaagggaataagggcgacacggaaatgttgaatactcatactcttcctttttcaatattattgaagcatttatcagggttattgtctcatgagcggatacatatttgaatgtatttagaaaaataaacaaataggggttccgcgcacatttccccgaaaagtgccacctgagggcctatttcccatgattccttcatatttgcatatacgatacaaggctgttagagagataattagaattaatttgactgtaaacacaaagatattagtacaaaatacgtgacgtagaaagtaataatttcttgggtagtttgcagttttaaaattatgttttaaaatggactatcatatgcttaccgtaacttgaaagtatttcgatttcttggctttatatatcttgtggaaaggaccgagatatgctgtcaacctgcaacatgctattgattgtgagatcaatgttggatggacacggtagaccagaagtgttcagcaggagtgttccagccgtagcgtagaacgtagattggttagattaggttttccgagccggttgtcgcgcggttcaatccctggtgcgggtgctagtgccaatacccaccggctccgcactacagtcttctctgaagaccatttttt

SEQ ID NO: 572 - RNA, 201 nt, synthetic construct
  source 1..201: mol_type = other RNA
cgagatatgctgtcaacctgcaacatgctattgattgtgagatcaatgttggatggacacggtagaccagaagtgttcagcaggagtgttccagccgtagcgtagaacgtagattggttagattaggttttccgagccggttgtcgcgcggttcaatccctggtgcgggtgctagtgccaatacccaccggctccgcacta

SEQ ID NO: 573 - DNA, 3209 bp, synthetic construct
  source 1..3209: mol_type = other DNA; note = plasmid construct
aattctgtggaatgtgtgtcagttagggtgtggaaagtccccaggctccccagcaggcagaagtatgcaaagcatgcatctcaattagtcagcaaccaggtgtggaaagtccccaggctccccagcaggcagaagtatgcaaagcatgcatctcaattagtcagcaaccatagtcccgcccctaactccgcccatcccgcccctaactccgcccagttccgcccattctccgccccatggctgactaattttttttatttatgcagaggccgaggccgcctctgcctctgagctattccagaagtagtgaggaggcttttttggaggcctaggcttttgcaaaaagctaacttgtttattgcagcttataatggttacaaataaagcaatagcatcacaaatttcacaaataaagcatttttttcactgcattctagttgtggtttgtccaaactcatcaatgtatcttatcatgtctgtataccgtcgacctctagctagagcttggcgtaatcatggtcatagctgtttcctgtgtgaaattgttatccgctcacaattccacacaacatacgagccggaagcataaagtgtaaagcctggggtgcctaatgagtgagctaactcacattaattgcgttgcgctcactgcccgctttccagtcgggaaacctgtcgtgccagctgcattaatgaatcggccaacgcgcggggagaggcggtttgcgtattgggcgctcttccgcttcctcgctcactgactcgctgcgctcggtcgttcggctgcggcgagcggtatcagctcactcaaaggcggtaatacggttatccacagaatcaggggataacgcaggaaagaacatgtgagcaaaaggccagcaaaaggccaggaaccgtaaaaaggccgcgttgctggcgtttttccataggctccgcccccctgacgagcatcacaaaaatcgacgctcaagtcagaggtggcgaaacccgacaggactataaagataccaggcgtttccccctggaagctccctcgtgcgctctcctgttccgaccctgccgcttaccggatacctgtccgcctttctcccttcgggaagcgtggcgctttctcatagctcacgctgtaggtatctcagttcggtgtaggtcgttcgctccaagctgggctgtgtgcacgaaccccccgttcagcccgaccgctgcgccttatccggtaactatcgtcttgagtccaacccggtaagacacgacttatcgccactggcagcagccactggtaacaggattagcagagcgaggtatgtaggcggtgctacagagttcttgaagtggtggcctaactacggctacactagaagaacagtatttggtatctgcgctctgctgaagccagttaccttcggaaaaagagttggtagctcttgatccggcaaacaaaccaccgctggtagcggtttttttgtttgcaagcagcagattacgcgcagaaaaaaaggatctcaagaagatcctttgatcttttctacggggtctgacgctcagtggaacgaaaactcacgttaagggattttggtcatgagattatcaaaaaggatcttcacctagatccttttaaattaaaaatgaagttttaaatcaatctaaagtatatatgagtaaacttggtctgacagttaccaatgcttaatcagtgaggcacctatctcagcgatctgtctatttcgttcatccatagttgcctgactccccgtcgtgtagataactacgatacgggagggcttaccatctggccccagtgctgcaatgataccgcgagacccacgctcaccggctccagatttatcagcaataaaccagccagccggaagggccgagcgcagaagtggtcctgcaactttatccgcctccatccagtctattaattgttgccgggaagctagagtaagtagttcgccagttaatagtttgcgcaacgttgttgccattgctacaggcatcgtggtgtcacgctcgtcgtttggtatggcttcattcagctccggttcccaacgatcaaggcgagttacatgatcccccatgttgtgcaaaaaagcggttagctccttcggtcctccgatcgttgtcagaagtaagttggccgcagtgttatcactcatggttatggcagcactgcataattctcttactgtcatgccatccgtaagatgcttttctgtgactggtgagtactcaaccaagtcattctgagaatagtgtatgcggcgaccgagttgctcttgcccggcgtcaatacgggataataccgcgccacatagcagaactttaaaagtgctcatcattggaaaacgttcttcggggcgaaaactctcaaggatcttaccgctgttgagatccagttcgatgtaacccactcgtgcacccaactgatcttcagcatcttttactttcaccagcgtttctgggtgagcaaaaacaggaaggcaaaatgccgcaaaaaagggaataagggcgacacggaaatgttgaatactcatactcttcctttttcaatattattgaagcatttatcagggttattgtctcatgagcggatacatatttgaatgtatttagaaaaataaacaaataggggttccgcgcacatttccccgaaaagtgccacctgagggcctatttcccatgattccttcatatttgcatatacgatacaaggctgttagagagataattagaattaatttgactgtaaacacaaagatattagtacaaaatacgtgacgtagaaagtaataatttcttgggtagtttgcagttttaaaattatgttttaaaatggactatcatatgcttaccgtaacttgaaagtatttcgatttcttggctttatatatcttgtggaaaggacgtccacggactgctgggttgtaccaaccctaactgtttgcagcaagcctggacatcgggaatgcgctactggaatcgagatatgctgtcaacctgcaacatgctattgattgtgagatcaatgttggatggacacggtagaccagaagtgttcagcaggagtgttccagccgtagcgtagaacgtagattggttagattaggttttccgagccggttgtcgcgcggttcaatccctggtgcgggtgctagtgccaatacccaccggctccgcactacagtcttctctgaagaccatttttt

SEQ ID NO: 574 - RNA, 276 nt, synthetic construct
  source 1..276: mol_type = other RNA
gtccacggactgctgggttgtaccaaccctaactgtttgcagcaagcctggacatcgggaatgcgctactggaatcgagatatgctgtcaacctgcaacatgctattgattgtgagatcaatgttggatggacacggtagaccagaagtgttcagcaggagtgttccagccgtagcgtagaacgtagattggttagattaggttttccgagccggttgtcgcgcggttcaatccctggtgcgggtgctagtgccaatacccaccggctccgcacta

SEQ ID NO: 575 - DNA, 3284 bp, synthetic construct
  source 1..3284: mol_type = other DNA; note = plasmid construct
aattctgtggaatgtgtgtcagttagggtgtggaaagtccccaggctccccagcaggcagaagtatgcaaagcatgcatctcaattagtcagcaaccaggtgtggaaagtccccaggctccccagcaggcagaagtatgcaaagcatgcatctcaattagtcagcaaccatagtcccgcccctaactccgcccatcccgcccctaactccgcccagttccgcccattctccgccccatggctgactaattttttttatttatgcagaggccgaggccgcctctgcctctgagctattccagaagtagtgaggaggcttttttggaggcctaggcttttgcaaaaagctaacttgtttattgcagcttataatggttacaaataaagcaatagcatcacaaatttcacaaataaagcatttttttcactgcattctagttgtggtttgtccaaactcatcaatgtatcttatcatgtctgtataccgtcgacctctagctagagcttggcgtaatcatggtcatagctgtttcctgtgtgaaattgttatccgctcacaattccacacaacatacgagccggaagcataaagtgtaaagcctggggtgcctaatgagtgagctaactcacattaattgcgttgcgctcactgcccgctttccagtcgggaaacctgtcgtgccagctgcattaatgaatcggccaacgcgcggggagaggcggtttgcgtattgggcgctcttccgcttcctcgctcactgactcgctgcgctcggtcgttcggctgcggcgagcggtatcagctcactcaaaggcggtaatacggttatccacagaatcaggggataacgcaggaaagaacatgtgagcaaaaggccagcaaaaggccaggaaccgtaaaaaggccgcgttgctggcgtttttccataggctccgcccccctgacgagcatcacaaaaatcgacgctcaagtcagaggtggcgaaacccgacaggactataaagataccaggcgtttccccctggaagctccctcgtgcgctctcctgttccgaccctgccgcttaccggatacctgtccgcctttctcccttcgggaagcgtggcgctttctcatagctcacgctgtaggtatctcagttcggtgtaggtcgttcgctccaagctgggctgtgtgcacgaaccccccgttcagcccgaccgctgcgccttatccggtaactatcgtcttgagtccaacccggtaagacacgacttatcgccactggcagcagccactggtaacaggattagcagagcgaggtatgtaggcggtgctacagagttcttgaagtggtggcctaactacggctacactagaagaacagtatttggtatctgcgctctgctgaagccagttaccttcggaaaaagagttggtagctcttgatccggcaaacaaaccaccgctggtagcggtttttttgtttgcaagcagcagattacgcgcagaaaaaaaggatctcaagaagatcctttgatcttttctacggggtctgacgctcagtggaacgaaaactcacgttaagggattttggtcatgagattatcaaaaaggatcttcacctagatccttttaaattaaaaatgaagttttaaatcaatctaaagtatatatgagtaaacttggtctgacagttaccaatgcttaatcagtgaggcacctatctcagcgatctgtctatttcgttcatccatagttgcctgactccccgtcgtgtagataactacgatacgggagggcttaccatctggccccagtgctgcaatgataccgcgagacccacgctcaccggctccagatttatcagcaataaaccagccagccggaagggccgagcgcagaagtggtcctgcaactttatccgcctccatccagtctattaattgttgccgggaagctagagtaagtagttcgccagttaatagtttgcgcaacgttgttgccattgctacaggcatcgtggtgtcacgctcgtcgtttggtatggcttcattcagctccggttcccaacgatcaaggcgagttacatgatcccccatgttgtgcaaaaaagcggttagctccttcggtcctccgatcgttgtcagaagtaagttggccgcagtgttatcactcatggttatggcagcactgcataattctcttactgtcatgccatccgtaagatgcttttctgtgactggtgagtactcaaccaagtcattctgagaatagtgtatgcggcgaccgagttgctcttgcccggcgtcaatacgggataataccgcgccacatagcagaactttaaaagtgctcatcattggaaaacgttcttcggggcgaaaactctcaaggatcttaccgctgttgagatccagttcgatgtaacccactcgtgcacccaactgatcttcagcatcttttactttcaccagcgtttctgggtgagcaaaaacaggaaggcaaaatgccgcaaaaaagggaataagggcgacacggaaatgttgaatactcatactcttcctttttcaatattattgaagcatttatcagggttattgtctcatgagcggatacatatttgaatgtatttagaaaaataaacaaataggggttccgcgcacatttccccgaaaagtgccacctgagggcctatttcccatgattccttcatatttgcatatacgatacaaggctgttagagagataattagaattaatttgactgtaaacacaaagatattagtacaaaatacgtgacgtagaaagtaataatttcttgggtagtttgcagttttaaaattatgttttaaaatggactatcatatgcttaccgtaacttgaaagtatttcgatttcttggctttatatatcttgtggaaaggacgagtttgtggagaaaaaattcaaaacacgacctcattcaagaccttggcgccgtcgtgaaggcaagattgaaaaagtccacggactgctgggttgtaccaaccctaactgtttgcagcaagcctggacatcgggaatgcgctactggaatcgagatatgctgtcaacctgcaacatgctattgattgtgagatcaatgttggatggacacggtagaccagaagtgttcagcaggagtgttccagccgtagcgtagaacgtagattggttagattaggttttccgagccggttgtcgcgcggttcaatccctggtgcgggtgctagtgccaatacccaccggctccgcactacagtcttctctgaagaccatttttt

SEQ ID NO: 576 - RNA, 351 nt, synthetic construct
  source 1..351: mol_type = other RNA
gagtttgtggagaaaaaattcaaaacacgacctcattcaagaccttggcgccgtcgtgaaggcaagattgaaaaagtccacggactgctgggttgtaccaaccctaactgtttgcagcaagcctggacatcgggaatgcgctactggaatcgagatatgctgtcaacctgcaacatgctattgattgtgagatcaatgttggatggacacggtagaccagaagtgttcagcaggagtgttccagccgtagcgtagaacgtagattggttagattaggttttccgagccggttgtcgcgcggttcaatccctggtgcgggtgctagtgccaatacccaccggctccgcacta

SEQ ID NO: 577 - DNA, 3359 bp, synthetic construct
  source 1..3359: mol_type = other DNA; note = plasmid construct
aattctgtggaatgtgtgtcagttagggtgtggaaagtccccaggctccccagcaggcagaagtatgcaaagcatgcatctcaattagtcagcaaccaggtgtggaaagtccccaggctccccagcaggcagaagtatgcaaagcatgcatctcaattagtcagcaaccatagtcccgcccctaactccgcccatcccgcccctaactccgcccagttccgcccattctccgccccatggctgactaattttttttatttatgcagaggccgaggccgcctctgcctctgagctattccagaagtagtgaggaggcttttttggaggcctaggcttttgcaaaaagctaacttgtttattgcagcttataatggttacaaataaagcaatagcatcacaaatttcacaaataaagcatttttttcactgcattctagttgtggtttgtccaaactcatcaatgtatcttatcatgtctgtataccgtcgacctctagctagagcttggcgtaatcatggtcatagctgtttcctgtgtgaaattgttatccgctcacaattccacacaacatacgagccggaagcataaagtgtaaagcctggggtgcctaatgagtgagctaactcacattaattgcgttgcgctcactgcccgctttccagtcgggaaacctgtcgtgccagctgcattaatgaatcggccaacgcgcggggagaggcggtttgcgtattgggcgctcttccgcttcctcgctcactgactcgctgcgctcggtcgttcggctgcggcgagcggtatcagctcactcaaaggcggtaatacggttatccacagaatcaggggataacgcaggaaagaacatgtgagcaaaaggccagcaaaaggccaggaaccgtaaaaaggccgcgttgctggcgtttttccataggctccgcccccctgacgagcatcacaaaaatcgacgctcaagtcagaggtggcgaaacccgacaggactataaagataccaggcgtttccccctggaagctccctcgtgcgctctcctgttccgaccctgccgcttaccggatacctgtccgcctttctcccttcgggaagcgtggcgctttctcatagctcacgctgtaggtatctcagttcggtgtaggtcgttcgctccaagctgggctgtgtgcacgaaccccccgttcagcccgaccgctgcgccttatccggtaactatcgtcttgagtccaacccggtaagacacgacttatcgccactggcagcagccactggtaacaggattagcagagcgaggtatgtaggcggtgctacagagttcttgaagtggtggcctaactacggctacactagaagaacagtatttggtatctgcgctctgctgaagccagttaccttcggaaaaagagttggtagctcttgatccggcaaacaaaccaccgctggtagcggtttttttgtttgcaagcagcagattacgcgcagaaaaaaaggatctcaagaagatcctttgatcttttctacggggtctgacgctcagtggaacgaaaactcacgttaagggattttggtcatgagattatcaaaaaggatcttcacctagatccttttaaattaaaaatgaagttttaaatcaatctaaagtatatatgagtaaacttggtctgacagttaccaatgcttaatcagtgaggcacctatctcagcgatctgtctatttcgttcatccatagttgcctgactccccgtcgtgtagataactacgatacgggagggcttaccatctggccccagtgctgcaatgataccgcgagacccacgctcaccggctccagatttatcagcaataaaccagccagccggaagggccgagcgcagaagtggtcctgcaactttatccgcctccatccagtctattaattgttgccgggaagctagagtaagtagttcgccagttaatagtttgcgcaacgttgttgccattgctacaggcatcgtggtgtcacgctcgtcgtttggtatggcttcattcagctccggttcccaacgatcaaggcgagttacatgatcccccatgttgtgcaaaaaagcggttagctccttcggtcctccgatcgttgtcagaagtaagttggccgcagtgttatcactcatggttatggcagcactgcataattctcttactgtcatgccatccgtaagatgcttttctgtgactggtgagtactcaaccaagtcattctgagaatagtgtatgcggcgaccgagttgctcttgcccggcgtcaatacgggataataccgcgccacatagcagaactttaaaagtgctcatcattggaaaacgttcttcggggcgaaaactctcaaggatcttaccgctgttgagatccagttcgatgtaacccactcgtgcacccaactgatcttcagcatcttttactttcaccagcgtttctgggtgagcaaaaacaggaaggcaaaatgccgcaaaaaagggaataagggcgacacggaaatgttgaatactcatactcttcctttttcaatattattgaagcatttatcagggttattgtctcatgagcggatacatatttgaatgtatttagaaaaataaacaaataggggttccgcgcacatttccccgaaaagtgccacctgagggcctatttcccatgattccttcatatttgcatatacgatacaaggctgttagagagataattagaattaatttgactgtaaacacaaagatattagtacaaaatacgtgacgtagaaagtaataatttcttgggtagtttgcagttttaaaattatgttttaaaatggactatcatatgcttaccgtaacttgaaagtatttcgatttcttggctttatatatcttgtggaaaggacaagcgcaaccgcattgattgtttccttctcgacgagtacaagacctcatctgtttgccctcgctgttcctcatctgagtttgtggagaaaaaattcaaaacacgacctcattcaagaccttggcgccgtcgtgaaggcaagattgaaaaagtccacggactgctgggttgtaccaaccctaactgtttgcagcaagcctggacatcgggaatgcgctactggaatcgagatatgctgtcaacctgcaacatgctattgattgtgagatcaatgttggatggacacggtagaccagaagtgttcagcaggagtgttccagccgtagcgtagaacgtagattggttagattaggttttccgagccggttgtcgcgcggttcaatccctggtgcgggtgctagtgccaatacccaccggctccgcactacagtcttctctgaagaccatttttt

SEQ ID NO: 578 - RNA, 426 nt, synthetic construct
  source 1..426: mol_type = other RNA
aagcgcaaccgcattgattgtttccttctcgacgagtacaagacctcatctgtttgccctcgctgttcctcatctgagtttgtggagaaaaaattcaaaacacgacctcattcaagaccttggcgccgtcgtgaaggcaagattgaaaaagtccacggactgctgggttgtaccaaccctaactgtttgcagcaagcctggacatcgggaatgcgctactggaatcgagatatgctgtcaacctgcaacatgctattgattgtgagatcaatgttggatggacacggtagaccagaagtgttcagcaggagtgttccagccgtagcgtagaacgtagattggttagattaggttttccgagccggttgtcgcgcggttcaatccctggtgcgggtgctagtgccaatacccaccggctccgcacta

SEQ ID NO: 579 - DNA, 3434 bp, synthetic construct
  source 1..3434: mol_type = other DNA; note = plasmid construct
aattctgtggaatgtgtgtcagttagggtgtggaaagtccccaggctccccagcaggcagaagtatgcaaagcatgcatctcaattagtcagcaaccaggtgtggaaagtccccaggctccccagcaggcagaagtatgcaaagcatgcatctcaattagtcagcaaccatagtcccgcccctaactccgcccatcccgcccctaactccgcccagttccgcccattctccgccccatggctgactaattttttttatttatgcagaggccgaggccgcctctgcctctgagctattccagaagtagtgaggaggcttttttggaggcctaggcttttgcaaaaagctaacttgtttattgcagcttataatggttacaaataaagcaatagcatcacaaatttcacaaataaagcatttttttcactgcattctagttgtggtttgtccaaactcatcaatgtatcttatcatgtctgtataccgtcgacctctagctagagcttggcgtaatcatggtcatagctgtttcctgtgtgaaattgttatccgctcacaattccacacaacatacgagccggaagcataaagtgtaaagcctggggtgcctaatgagtgagctaactcacattaattgcgttgcgctcactgcccgctttccagtcgggaaacctgtcgtgccagctgcattaatgaatcggccaacgcgcggggagaggcggtttgcgtattgggcgctcttccgcttcctcgctcactgactcgctgcgctcggtcgttcggctgcggcgagcggtatcagctcactcaaaggcggtaatacggttatccacagaatcaggggataacgcaggaaagaacatgtgagcaaaaggccagcaaaaggccaggaaccgtaaaaaggccgcgttgctggcgtttttccataggctccgcccccctgacgagcatcacaaaaatcgacgctcaagtcagaggtggcgaaacccgacaggactataaagataccaggcgtttccccctggaagctccctcgtgcgctctcctgttccgaccctgccgcttaccggatacctgtccgcctttctcccttcgggaagcgtggcgctttctcatagctcacgctgtaggtatctcagttcggtgtaggtcgttcgctccaagctgggctgtgtgcacgaaccccccgttcagcccgaccgctgcgccttatccggtaactatcgtcttgagtccaacccggtaagacacgacttatcgccactggcagcagccactggtaacaggattagcagagcgaggtatgtaggcggtgctacagagttcttgaagtggtggcctaactacggctacactagaagaacagtatttggtatctgcgctctgctgaagccagttaccttcggaaaaagagttggtagctcttgatccggcaaacaaaccaccgctggtagcggtttttttgtttgcaagcagcagattacgcgcagaaaaaaaggatctcaagaagatcctttgatcttttctacggggtctgacgctcagtggaacgaaaactcacgttaagggattttggtcatgagattatcaaaaaggatcttcacctagatccttttaaattaaaaatgaagttttaaatcaatctaaagtatatatgagtaaacttggtctgacagttaccaatgcttaatcagtgaggcacctatctcagcgatctgtctatttcgttcatccatagttgcctgactccccgtcgtgtagataactacgatacgggagggcttaccatctggccccagtgctgcaatgataccgcgagacccacgctcaccggctccagatttatcagcaataaaccagccagccggaagggccgagcgcagaagtggtcctgcaactttatccgcctccatccagtctattaattgttgccgggaagctagagtaagtagttcgccagttaatagtttgcgcaacgttgttgccattgctacaggcatcgtggtgtcacgctcgtcgtttggtatggcttcattcagctccggttcccaacgatcaaggcgagttacatgatcccccatgttgtgcaaaaaagcggttagctccttcggtcctccgatcgttgtcagaagtaagttggccgcagtgttatcactcatggttatggcagcactgcataattctcttactgtcatgccatccgtaagatgcttttctgtgactggtgagtactcaaccaagtcattctgagaatagtgtatgcggcgaccgagttgctcttgcccggcgtcaatacgggataataccgcgccacatagcagaactttaaaagtgctcatcattggaaaacgttcttcggggcgaaaactctcaaggatcttaccgctgttgagatccagttcgatgtaacccactcgtgcacccaactgatcttcagcatcttttactttcaccagcgtttctgggtgagcaaaaacaggaaggcaaaatgccgcaaaaaagggaataagggcgacacggaaatgttgaatactcatactcttcctttttcaatattattgaagcatttatcagggttattgtctcatgagcggatacatatttgaatgtatttagaaaaataaacaaataggggttccgcgcacatttccccgaaaagtgccacctgagggcctatttcccatgattccttcatatttgcatatacgatacaaggctgttagagagataattagaattaatttgactgtaaacacaaagatattagtacaaaatacgtgacgtagaaagtaataatttcttgggtagtttgcagttttaaaattatgttttaaaatggactatcatatgcttaccgtaacttgaaagtatttcgatttcttggctttatatatcttgtggaaaggacggtgattggagcgacgctggtcgaactgcgagatttcagacctcatcaaagacaaaaggctggcgcaccctctttaagcgcaaccgcattgattgtttccttctcgacgagtacaagacctcatctgtttgccctcgctgttcctcatctgagtttgtggagaaaaaattcaaaacacgacctcattcaagaccttggcgccgtcgtgaaggcaagattgaaaaagtccacggactgctgggttgtaccaaccctaactgtttgcagcaagcctggacatcgggaatgcgctactggaatcgagatatgctgtcaacctgcaacatgctattgattgtgagatcaatgttggatggacacggtagaccagaagtgttcagcaggagtgttccagccgtagcgtagaacgtagattggttagattaggttttccgagccggttgtcgcgcggttcaatccctggtgcgggtgctagtgccaatacccaccggctccgcactacagtcttctctgaagaccatttttt

SEQ ID NO: 580 - RNA, 501 nt, synthetic construct
  source 1..501: mol_type = other RNA
ggtgattggagcgacgctggtcgaactgcgagatttcagacctcatcaaagacaaaaggctggcgcaccctctttaagcgcaaccgcattgattgtttccttctcgacgagtacaagacctcatctgtttgccctcgctgttcctcatctgagtttgtggagaaaaaattcaaaacacgacctcattcaagaccttggcgccgtcgtgaaggcaagattgaaaaagtccacggactgctgggttgtaccaaccctaactgtttgcagcaagcctggacatcgggaatgcgctactggaatcgagatatgctgtcaacctgcaacatgctattgattgtgagatcaatgttggatggacacggtagaccagaagtgttcagcaggagtgttccagccgtagcgtagaacgtagattggttagattaggttttccgagccggttgtcgcgcggttcaatccctggtgcgggtgctagtgccaatacccaccggctccgcacta

SEQ ID NO: 581 - DNA, 5723 bp, synthetic construct
  source 1..5723: mol_type = other DNA; note = Fanzor plasmid pMJ145_pCMV-HA-NLS-Hs_FZID16
cgttacataacttacggtaaatggcccgcctggctgaccgcccaacgacccccgcccattgacgtcaataatgacgtatgttcccatagtaacgccaatagggactttccattgacgtcaatgggtggagtatttacggtaaactgcccacttggcagtacatcaagtgtatcatatgccaagtacgccccctattgacgtcaatgacggtaaatggcccgcctggcattatgcccagtacatgaccttatgggactttcctacttggcagtacatctacgtattagtcatcgctattaccatggtgatgcggttttggcagtacatcaatgggcgtggatagcggtttgactcacggggatttccaagtctccaccccattgacgtcaatgggagtttgttttggcaccaaaatcaacgggactttccaaaatgtcgtaacaactccgccccattgacgcaaatgggcggtaggcgtgtacggtgggaggtctatataagcagagctggtttagtgaaccgtcagatccgctagcgctaccggactcagatcgccaccatgtacccctacgacgtgccagactacgcccctaagaagaagagaaaagtcggcggctctggcggcggaggatctggcggaggtggaagcggaggaccgcctaagaagaagcagaagctggaacggctgaagaaactggacaagcccacactgcacacctgtaacaagaccagcttcgccaaggccttcctgcctaacgagacataccggcagcggctgctggactatatcgccatcattcaccagctggccgaccacgcctctcacgccctgaagttttacatcctgagcacctccaccagcagcttccctgtggtgcacgaggataccatcgaggccatcctgtacctgctgaacaagggcgaagcctggcatcccagaaaagaggccaagaaggcctggcgggattgcctgctgccttacgtgcagagatactgccagatcgtgggcttcattcaccccaacctgagaggcgagcagcagagcatcaactacctgaccgtgtccatgatgaccaacctgaaagtgaacgtgcaagagcacttcatgcagatgctgctgcggtacatcaatctgcgcttcgacgtgaagggccagaagcagagactgcctcctaagagcgacgcccgcaaggcctttttcacccggctgagatacctgaagtccgtgttcctgttcgacgtggtgcccgagctggaattcctggacgatctgacccctctggaaagcgaggtgctggaagagatctggtccctggacctgccttttctgcccaacgatcctctggcctacgccatcgtggccgatcctatgagcttcttcccagcctactgcaagctgagcggcctgtacgagcagtacggcttccagcggtttagcgccattcctctgcggagaagcctgatccagtctcacgtgcggatcgacaccatcatcctgtatcagcacatcctgtgcatcaccagacgggacgccgagacagtggaaaaggacgacctgtggatgagagtgtgcaacctgtgcaccaaagccttccggtccagatgcggcatgcacttcgagggcagcatcacaacagatggcgccagcgtgtccgtgtacctgaaacaccctgaggccgataagtacggcaagagaggcgccagaaagtccgccaatactgtggccgccgaagtgaaggccctgtacgtggaaaacaacctgcctgcctgtagagccgccgagaacgtggtggtcatcgaccccaacaagcgggatatcctgtactgccaggacagcaacggcaccaccttcagatacaccgccaaccagagagccgtggaaaccggcagcagaagattcgccaagcggcgggaagccatgaaggaagaagccggcgttgacctgatcgagagcagaatccctagccacaagaccatgaacctgatggacttcaccagatacctgctcgtgcggagagccgactgggacagacggaaagagttctactctcaccccgctcacacccggtggaagtggcacagcttcatcaaccggcagaagtccgagagcgacctgatcagcaacatgcggaacaaatacggcgagaacttcaccgtggtcatgggcgattggagcgacgctggaagaaccgccagattccagaccagcagcaagaccaaaggctggcggaccctgttcaagcggaaccggatcgattgcttcctgctggacgagtacaagacctccagcgtgtgccctagatgcagcagcagcgagttcgtggaaaagaagttcaagacccggcctcacagcagaccctggcgaagaagagagggcaagatcgagaaggtgcacggcctgctgggctgcaccaatcctaattgtctgcagcaggcctggaccagcggcatgagatactggaaccgggacatgctgagcacatgcaacatgctgctgatcgtgcggtccatgctggatggccatggcagacctgaggtgttctctagatctgtgcctgccgtggcctgactagcataaccccttggggcgcactcctcaggtgcaggctgcctatcagaaggtggtggctggtgtggccaatgccctggctcacaaataccactgagatctttttccctctgccaaaaattatggggacatcatgaagccccttgagcatctgacttctggctaataaaggaaatttattttcattgcaatagtgtgttggaattttttgtgtctctcactcggaaggacatatgggagggcaaatcatttaaaacatcagaatgagtatttggtttagagtttggcaacatatgcccatatgctggctgccatgaacaaaggttggctataaagaggtcatcagtatatgaaacagccccctgctgtccattccttattccatagaaaagccttgacttgaggttagattttttttatattttgttttgtgttatttttttctttaacatccctaaaattttccttacatgttttactagccagatttttcctcctctcctgactactcccagtcatagctgtccctcttctcttatggagatccctcgacctgcagcccaagcttggcgtaatcatggtcatagctgtttcctgtgtgaaattgttatccgctcacaattccacacaacatacgagccggaagcataaagtgtaaagcctggggtgcctaatgagtgagctaactcacattaattgcgttgcgctcactgcccgctttccagtcgggaaacctgtcgtgccagcggatccgcatctcaattagtcagcaaccatagtcccgcccctaactccgcccatcccgcccctaactccgcccagttccgcccattctccgccccatggctgactaattttttttatttatgcagaggccgaggccgcctcggcctctgagctattccagaagtagtgaggaggcttttttggaggcctaggcttttgcaaaaagctaacttgtttattgcagcttataatggttacaaataaagcaatagcatcacaaatttcacaaataaagcatttttttcactgcattctagttgtggtttgtccaaactcatcaatgtatcttatcatgtctggatccgctgcattaatgaatcggccaacgcgcggggagaggcggtttgcgtattgggcgctcttccgcttcctcgctcactgactcgctgcgctcggtcgttcggctgcggcgagcggtatcagctcactcaaaggcggtaatacggttatccacagaatcaggggataacgcaggaaagaacatgtgagcaaaaggccagcaaaaggccaggaaccgtaaaaaggccgcgttgctggcgtttttccataggctccgcccccctgacgagcatcacaaaaatcgacgctcaagtcagaggtggcgaaacccgacaggactataaagataccaggcgtttccccctggaagctccctcgtgcgctctcctgttccgaccctgccgcttaccggatacctgtccgcctttctcccttcgggaagcgtggcgctttctcatagctcacgctgtaggtatctcagttcggtgtaggtcgttcgctccaagctgggctgtgtgcacgaaccccccgttcagcccgaccgctgcgccttatccggtaactatcgtcttgagtccaacccggtaagacacgacttatcgccactggcagcagccactggtaacaggattagcagagcgaggtatgtaggcggtgctacagagttcttgaagtggtggcctaactacggctacactagaagaacagtatttggtatctgcgctctgctgaagccagttaccttcggaaaaagagttggtagctcttgatccggcaaacaaaccaccgctggtagcggtggtttttttgtttgcaagcagcagattacgcgcagaaaaaaaggatctcaagaagatcctttgatcttttctacggggtctgacgctcagtggaacgaaaactcacgttaagggattttggtcatgagattatcaaaaaggatcttcacctagatccttttaaattaaaaatgaagttttaaatcaatctaaagtatatatgagtaaacttggtctgacagttaccaatgcttaatcagtgaggcacctatctcagcgatctgtctatttcgttcatccatagttgcctgactccccgtcgtgtagataactacgatacgggagggcttaccatctggccccagtgctgcaatgataccgcgagacccacgctcaccggctccagatttatcagcaataaaccagccagccggaagggccgagcgcagaagtggtcctgcaactttatccgcctccatccagtctattaattgttgccgggaagctagagtaagtagttcgccagttaatagtttgcgcaacgttgttgccattgctacaggcatcgtggtgtcacgctcgtcgtttggtatggcttcattcagctccggttcccaacgatcaaggcgagttacatgatcccccatgttgtgcaaaaaagcggttagctccttcggtcctccgatcgttgtcagaagtaagttggccgcagtgttatcactcatggttatggcagcactgcataattctcttactgtcatgccatccgtaagatgcttttctgtgactggtgagtactcaaccaagtcattctgagaatagtgtatgcggcgaccgagttgctcttgcccggcgtcaatacgggataataccgcgccacatagcagaactttaaaagtgctcatcattggaaaacgttcttcggggcgaaaactctcaaggatcttaccgctgttgagatccagttcgatgtaacccactcgtgcacccaactgatcttcagcatcttttactttcaccagcgtttctgggtgagcaaaaacaggaaggcaaaatgccgcaaaaaagggaataagggcgacacggaaatgttgaatactcatactcttcctttttcaatattattgaagcatttatcagggttattgtctcatgagcggatacatatttgaatgtatttagaaaaataaacaaataggggttccgcgcacatttccccgaaaagtgccacctgggtcgacattgattattgactagtaatagtaatcaattacggggtcattagttcatagcccatatatggagttccg

SEQ ID NO: 582 - DNA, 5723 bp, synthetic construct
  source 1..5723: mol_type = other DNA; note = Fanzor plasmid pMJ149_pCMV-Hs_FZID16-NLS-HA
cgttacataacttacggtaaatggcccgcctggctgaccgcccaacgacccccgcccattgacgtcaataatgacgtatgttcccatagtaacgccaatagggactttccattgacgtcaatgggtggagtatttacggtaaactgcccacttggcagtacatcaagtgtatcatatgccaagtacgccccctattgacgtcaatgacggtaaatggcccgcctggcattatgcccagtacatgaccttatgggactttcctacttggcagtacatctacgtattagtcatcgctattaccatggtgatgcggttttggcagtacatcaatgggcgtggatagcggtttgactcacggggatttccaagtctccaccccattgacgtcaatgggagtttgttttggcaccaaaatcaacgggactttccaaaatgtcgtaacaactccgccccattgacgcaaatgggcggtaggcgtgtacggtgggaggtctatataagcagagctggtttagtgaaccgtcagatccgctagcgctaccggactcagatcgccaccatgccgcctaagaagaagcagaagctggaacggctgaagaaactggacaagcccacactgcacacctgtaacaagaccagcttcgccaaggccttcctgcctaacgagacataccggcagcggctgctggactatatcgccatcattcaccagctggccgaccacgcctctcacgccctgaagttttacatcctgagcacctccaccagcagcttccctgtggtgcacgaggataccatcgaggccatcctgtacctgctgaacaagggcgaagcctggcatcccagaaaagaggccaagaaggcctggcgggattgcctgctgccttacgtgcagagatactgccagatcgtgggcttcattcaccccaacctgagaggcgagcagcagagcatcaactacctgaccgtgtccatgatgaccaacctgaaagtgaacgtgcaagagcacttcatgcagatgctgctgcggtacatcaatctgcgcttcgacgtgaagggccagaagcagagactgcctcctaagagcgacgcccgcaaggcctttttcacccggctgagatacctgaagtccgtgttcctgttcgacgtggtgcccgagctggaattcctggacgatctgacccctctggaaagcgaggtgctggaagagatctggtccctggacctgccttttctgcccaacgatcctctggcctacgccatcgtggccgatcctatgagcttcttcccagcctactgcaagctgagcggcctgtacgagcagtacggcttccagcggtttagcgccattcctctgcggagaagcctgatccagtctcacgtgcggatcgacaccatcatcctgtatcagcacatcctgtgcatcaccagacgggacgccgagacagtggaaaaggacgacctgtggatgagagtgtgcaacctgtgcaccaaagccttccggtccagatgcggcatgcacttcgagggcagcatcacaacagatggcgccagcgtgtccgtgtacctgaaacaccctgaggccgataagtacggcaagagaggcgccagaaagtccgccaatactgtggccgccgaagtgaaggccctgtacgtggaaaacaacctgcctgcctgtagagccgccgagaacgtggtggtcatcgaccccaacaagcgggatatcctgtactgccaggacagcaacggcaccaccttcagatacaccgccaaccagagagccgtggaaaccggcagcagaagattcgccaagcggcgggaagccatgaaggaagaagccggcgttgacctgatcgagagcagaatccctagccacaagaccatgaacctgatggacttcaccagatacctgctcgtgcggagagccgactgggacagacggaaagagttctactctcaccccgctcacacccggtggaagtggcacagcttcatcaaccggcagaagtccgagagcgacctgatcagcaacatgcggaacaaatacggcgagaacttcaccgtggtcatgggcgattggagcgacgctggaagaaccgccagattccagaccagcagcaagaccaaaggctggcggaccctgttcaagcggaaccggatcgattgcttcctgctggacgagtacaagacctccagcgtgtgccctagatgcagcagcagcgagttcgtggaaaagaagttcaagacccggcctcacagcagaccctggcgaagaagagagggcaagatcgagaaggtgcacggcctgctgggctgcaccaatcctaattgtctgcagcaggcctggaccagcggcatgagatactggaaccgggacatgctgagcacatgcaacatgctgctgatcgtgcggtccatgctggatggccatggcagacctgaggtgttctctagatctgtgcctgccgtggccggaggatctggcggaggcggctctggcggcggtggaagcggaggacctaagaagaagagaaaagtctacccctacgacgtgccagactacgcctgactagcataaccccttggggcgcactcctcaggtgcaggctgcctatcagaaggtggtggctggtgtggccaatgccctggctcacaaataccactgagatctttttccctctgccaaaaattatggggacatcatgaagccccttgagcatctgacttctggctaataaaggaaatttattttcattgcaatagtgtgttggaattttttgtgtctctcactcggaaggacatatgggagggcaaatcatttaaaacatcagaatgagtatttggtttagagtttggcaacatatgcccatatgctggctgccatgaacaaaggttggctataaagaggtcatcagtatatgaaacagccccctgctgtccattccttattccatagaaaagccttgacttgaggttagattttttttatattttgttttgtgttatttttttctttaacatccctaaaattttccttacatgttttactagccagatttttcctcctctcctgactactcccagtcatagctgtccctcttctcttatggagatccctcgacctgcagcccaagcttggcgtaatcatggtcatagctgtttcctgtgtgaaattgttatccgctcacaattccacacaacatacgagccggaagcataaagtgtaaagcctggggtgcctaatgagtgagctaactcacattaattgcgttgcgctcactgcccgctttccagtcgggaaacctgtcgtgccagcggatccgcatctcaattagtcagcaaccatagtcccgcccctaactccgcccatcccgcccctaactccgcccagttccgcccattctccgccccatggctgactaattttttttatttatgcagaggccgaggccgcctcggcctctgagctattccagaagtagtgaggaggcttttttggaggcctaggcttttgcaaaaagctaacttgtttattgcagcttataatggttacaaataaagcaatagcatcacaaatttcacaaataaagcatttttttcactgcattctagttgtggtttgtccaaactcatcaatgtatcttatcatgtctggatccgctgcattaatgaatcggccaacgcgcggggagaggcggtttgcgtattgggcgctcttccgcttcctcgctcactgactcgctgcgctcggtcgttcggctgcggcgagcggtatcagctcactcaaaggcggtaatacggttatccacagaatcaggggataacgcaggaaagaacatgtgagcaaaaggccagcaaaaggccaggaaccgtaaaaaggccgcgttgctggcgtttttccataggctccgcccccctgacgagcatcacaaaaatcgacgctcaagtcagaggtggcgaaacccgacaggactataaagataccaggcgtttccccctggaagctccctcgtgcgctctcctgttccgaccctgccgcttaccggatacctgtccgcctttctcccttcgggaagcgtggcgctttctcatagctcacgctgtaggtatctcagttcggtgtaggtcgttcgctccaagctgggctgtgtgcacgaaccccccgttcagcccgaccgctgcgccttatccggtaactatcgtcttgagtccaacccggtaagacacgacttatcgccactggcagcagccactggtaacaggattagcagagcgaggtatgtaggcggtgctacagagttcttgaagtggtggcctaactacggctacactagaagaacagtatttggtatctgcgctctgctgaagccagttaccttcggaaaaagagttggtagctcttgatccggcaaacaaaccaccgctggtagcggtggtttttttgtttgcaagcagcagattacgcgcagaaaaaaaggatctcaagaagatcctttgatcttttctacggggtctgacgctcagtggaacgaaaactcacgttaagggattttggtcatgagattatcaaaaaggatcttcacctagatccttttaaattaaaaatgaagttttaaatcaatctaaagtatatatgagtaaacttggtctgacagttaccaatgcttaatcagtgaggcacctatctcagcgatctgtctatttcgttcatccatagttgcctgactccccgtcgtgtagataactacgatacgggagggcttaccatctggccccagtgctgcaatgataccgcgagacccacgctcaccggctccagatttatcagcaataaaccagccagccggaagggccgagcgcagaagtggtcctgcaactttatccgcctccatccagtctattaattgttgccgggaagctagagtaagtagttcgccagttaatagtttgcgcaacgttgttgccattgctacaggcatcgtggtgtcacgctcgtcgtttggtatggcttcattcagctccggttcccaacgatcaaggcgagttacatgatcccccatgttgtgcaaaaaagcggttagctccttcggtcctccgatcgttgtcagaagtaagttggccgcagtgttatcactcatggttatggcagcactgcataattctcttactgtcatgccatccgtaagatgcttttctgtgactggtgagtactcaaccaagtcattctgagaatagtgtatgcggcgaccgagttgctcttgcccggcgtcaatacgggataataccgcgccacatagcagaactttaaaagtgctcatcattggaaaacgttcttcggggcgaaaactctcaaggatcttaccgctgttgagatccagttcgatgtaacccactcgtgcacccaactgatcttcagcatcttttactttcaccagcgtttctgggtgagcaaaaacaggaaggcaaaatgccgcaaaaaagggaataagggcgacacggaaatgttgaatactcatactcttcctttttcaatattattgaagcatttatcagggttattgtctcatgagcggatacatatttgaatgtatttagaaaaataaacaaataggggttccgcgcacatttccccgaaaagtgccacctgggtcgacattgattattgactagtaatagtaatcaattacggggtcattagttcatagcccatatatggagttccg

SEQ ID NO: 583 - DNA, 3008 bp, synthetic construct; identical to SEQ ID NO: 565
  source 1..3008: mol_type = other DNA; note = Fanzor plasmid pMJ162_pU6-ID16-empty

SEQ ID NO: 584 - DNA, 3076 bp, synthetic construct; identical to SEQ ID NO: 567
  source 1..3076: mol_type = other DNA; note = Fanzor plasmid pMJ168_pU6-HDV-ID16-empty

SEQ ID NO: 585 - DNA, 3095 bp, synthetic construct; identical to SEQ ID NO: 569
  source 1..3095: mol_type = other DNA; note = Fanzor plasmid pMJ169_pU6-ID16_RNA1-empty

SEQ ID NO: 586 - DNA, 3134 bp, synthetic construct; identical to SEQ ID NO: 571
  source 1..3134: mol_type = other DNA; note = Fanzor plasmid pMJ170_pU6-ID16_RNA2-empty

SEQ ID NO: 587 - DNA, 3209 bp, synthetic construct; identical to SEQ ID NO: 573
  source 1..3209: mol_type = other DNA; note = Fanzor plasmid pMJ171_pU6-ID16_RNA3-empty

SEQ ID NO: 588 - DNA, 3284 bp, synthetic construct; identical to SEQ ID NO: 575
  source 1..3284: mol_type = other DNA; note = Fanzor plasmid pMJ204_pU6-ID16_RNA4-empty

SEQ ID NO: 589 - DNA, 3359 bp, synthetic construct; identical to SEQ ID NO: 577
  source 1..3359: mol_type = other DNA; note = Fanzor plasmid pMJ205_pU6-ID16_RNA5-empty

SEQ ID NO: 590 - DNA, 3434 bp, synthetic construct; identical to SEQ ID NO: 579
  source 1..3434: mol_type = other DNA; note = Fanzor plasmid pMJ206_pU6-ID16_RNA6-empty

SEQ ID NO: 591 - DNA, 1917 bp, synthetic construct
  source 1..1917: mol_type = other DNA; note = Fanzor Ortholog
atgccgcctaagaagaagcagaagctggaacggctgaagaaactggacaagcccacactgcacacctgtaacaagaccagcttcgccaaggccttcctgcctaacgagacataccggcagcggctgctggactatatcgccatcattcaccagctggccgaccacgcctctcacgccctgaagttttacatcctgagcacctccaccagcagcttccctgtggtgcacgaggataccatcgaggccatcctgtacctgctgaacaagggcgaagcctggcatcccagaaaagaggccaagaaggcctggcgggattgcctgctgccttacgtgcagagatactgccagatcgtgggcttcattcaccccaacctgagaggcgagcagcagagcatcaactacctgaccgtgtccatgatgaccaacctgaaagtgaacgtgcaagagcacttcatgcagatgctgctgcggtacatcaatctgcgcttcgacgtgaagggccagaagcagagactgcctcctaagagcgacgcccgcaaggcctttttcacccggctgagatacctgaagtccgtgttcctgttcgacgtggtgcccgagctggaattcctggacgatctgacccctctggaaagcgaggtgctggaagagatctggtccctggacctgccttttctgcccaacgatcctctggcctacgccatcgtggccgatcctatgagcttcttcccagcctactgcaagctgagcggcctgtacgagcagtacggcttccagcggtttagcgccattcctctgcggagaagcctgatccagtctcacgtgcggatcgacaccatcatcctgtatcagcacatcctgtgcatcaccagacgggacgccgagacagtggaaaaggacgacctgtggatgagagtgtgcaacctgtgcaccaaagccttccggtccagatgcggcatgcacttcgagggcagcatcacaacagatggcgccagcgtgtccgtgtacctgaaacaccctgaggccgataagtacggcaagagaggcgccagaaagtccgccaatactgtggccgccgaagtgaaggccctgtacgtggaaaacaacctgcctgcctgtagagccgccgagaacgtggtggtcatcgaccccaacaagcgggatatcctgtactgccaggacagcaacggcaccaccttcagatacaccgccaaccagagagccgtggaaaccggcagcagaagattcgccaagcggcgggaagccatgaaggaagaagccggcgttgacctgatcgagagcagaatccctagccacaagaccatgaacctgatggacttcaccagatacctgctcgtgcggagagccgactgggacagacggaaagagttctactctcaccccgctcacacccggtggaagtggcacagcttcatcaaccggcagaagtccgagagcgacctgatcagcaacatgcggaacaaatacggcgagaacttcaccgtggtcatgggcgattggagcgacgctggaagaaccgccagattccagaccagcagcaagaccaaaggctggcggaccctgttcaagcggaaccggatcgattgcttcctgctggacgagtacaagacctccagcgtgtgccctagatgcagcagcagcgagttcgtggaaaagaagttcaagacccggcctcacagcagaccctggcgaagaagagagggcaagatcgagaaggtgcacggcctgctgggctgcaccaatcctaattgtctgcagcaggcctggaccagcggcatgagatactggaaccgggacatgctgagcacatgcaacatgctgctgatcgtgcggtccatgctggatggccatggcagacctgaggtgttctctagatctgtgcctgccgtggcctga

SEQ ID NO: 592 - DNA, 1917 bp, synthetic construct
  source 1..1917: mol_type = other DNA; note = Fanzor Ortholog
atgccgccaaagaagaagcaaaagcttgaaaggctcaaaaaactcgacaaacccaccttacatacctgcaacaagacgtcctttgcaaaggctttcttgcctaatgagacctaccggcagcgtcttctagattacatcgccatcatccatcaactcgctgaccatgcttcccacgctctcaaattctacatcctctctacatccacatcgtctttcccggttgttcacgaagatacaatcgaagccattctctatcttctcaacaagggggaggcttggcatccaagaaaggaagcaaagaaggcatggcgggattgtttgttgccatatgttcaacggtactgccaaatcgtcggcttcattcatccaaatctacgaggcgagcagcagtcaattaattacctgacagtgagtatgatgacgaacctgaaagtcaacgttcaagagcatttcatgcagatgctgctccggtacattaatctgcggttcgacgtgaagggacagaagcagcgactgccaccgaaaagcgatgcgcgaaaggctttctttactcggctacgctacttgaagtcggttttcctttttgatgtggtgcccgagttggagttcctggatgacttgacaccattggagagcgaggttcttgaagagatttggtcattggatctcccattccttcctaacgatccccttgcctacgccattgttgctgatccgatgtcattttttcccgcgtactgcaaactctctgggctgtatgaacaatatggcttccaacggttcagtgcgatacctctgcgccgctcgctcattcaaagtcacgtgcgaatcgacaccatcatcctgtaccagcatatcctttgcatcacgcggcgagacgcagaaactgtcgaaaaggatgatctgtggatgcgcgtctgcaatctatgtaccaaggcttttcggtctcgctgtggtatgcattttgaaggctcaatcaccacggatggagcctcggtgtctgtatacctaaagcacccagaagcagacaagtatggaaagcgcggagcgagaaagtcagcaaacacggtggctgcagaggttaaagcgctttatgtggagaacaacttacctgcttgtcgagcagcagagaatgtcgtcgttatcgacccaaacaagcgcgacattctctactgccaagacagcaatggtacgacatttcgctacaccgccaaccagcgagccgtggagactggaagccggcggtttgcaaagagacgagaagcaatgaaggaagaagctggagttgatctcatagaatcacgaataccatcccacaaaacaatgaacctcatggacttcactcgctaccttctcgttcgccgcgctgattgggatcgtcgcaaggaattctattcgcatcctgctcatactcgatggaaatggcactccttcataaaccgtcagaagagcgaatcagacctcataagtaacatgcgcaacaagtacggtgaaaactttactgttgtgatgggtgattggagcgacgctggtcgaactgcgagatttcagacctcatcaaagacaaaaggctggcgcaccctctttaagcgcaaccgcattgattgtttccttctcgacgagtacaagacctcatctgtttgccctcgctgttcctcatctgagtttgtggagaaaaaattcaaaacacgacctcattcaagaccttggcgccgtcgtgaaggcaagattgaaaaagtccacggactgctgggttgtaccaaccctaactgtttgcagcaagcctggacatcgggaatgcgctactggaatcgagatatgctgtcaacctgcaacatgctattgattgtgagatcaatgttggatggacacggtagaccagaagtgttcagcaggagtgttccagccgtagcgtag

SEQ ID NO: 593 - protein, 452 aa, Mercenaria sp.
MNRKRSLSPLTLWKAAHVFKHQNLECWFQFAKDGESHNKVFASDFERTRKRAKLEDEKTFMTTFSVGIRPTRNQKRVLNEMLRVSNHAYNWCNYLVCEKNLKPKEYDLQKYVSKTNSSDVPTDFRMNNNDDWYFNNKMTKIRDAACKDFCTMYKSALTNQRKKKKYIKTVSLKDKDDMNPSHGAFEIQKALIRKLKETDSDDYDILNNCLSVMADNFTMRRKDVRNRFLRLSKPVSKLPPLEHAVKIVKTAKGKFVLHIPCEPTYTRSKRYDEPFDSLCGIDPGGRTFLTIYDPSKPRAFQIASRCKAPSKPVRKRTKKKGEKWHRKKKSQRRVGSTIDKIDSLHAKKDYVNSKMQAAIRRKQPQAKKDRQRQLQKVYYQLGNVIRWVHLRCTYNLMQYSYVAIGKIGIPSIIRRQCNGKRRRINKKSVRHLTVWNHCKFRERLVYRAKGTK

SEQ ID NO: 594 - protein, 478 aa, Mercenaria sp.
MKRKREQMTLWKAAFVNGRETFKSWIDKARMLELNCDISSASSTHYSDLDLKSKCAKIEDKFMCTFSVGIRPTSKQNRTLNQMLKVSNYAYNWCNHLVKEKDFKPKQFDLQRVVTKTNSHDVPAEYRLPGDDWFFDNKMSSIKLTACKNFCTMYKSARTNQKKTKVDLRNKDTALLREGSFEVQRQYVRLLTEKDIPDERIRQSRIALMADNFSKSKKDWKERFLRLSKNVSKIPPLNHDMKVCKRPNGKFILQIPCDPICTRQIQVHTSDSICSIDPGGRTFATCYDPSNIKTFQIGPEADKKEIIHKFHNKIDNVHRLLSYAQKKKQTQAVQDRIGQLKKLHLKLKTYVDDVHLKLCSYLVKNYKLVVLGRISVSSIVRKDRPNHLAKKGNRDLLCWQHFRFRQRLLHRVRGTDCEAIAQDERYTSKTCGNCGVQNNKLGGNETFHCKSCNYKTHRDVNGARNILCKYLGHFPFAT

SEQ ID NO: 595 - protein, 498 aa, Mercenaria sp.
MLFFLVPIKPVALRFSPHFRMKRKREQMTLWKAAFVNGQETFKSWIDKVRMLELNCDISSASSTHYSDLNLKTKCAKTEDKFMCTYSVGIRPTSKQKRTLNQMLKVSNYAYNWCNYLVKEKDFKPKQFDLQRVVAKTNSTDVPAEYRLPGDDWSFDNKMSGIKLTACKNFCTMYKSAQTNQKKTKVDLRNKDIVQLREGSFEVQSKYVRLLTEKDIPGERIRQSRIALTPDSFSKSKKDWKERFLRLSKNVSKIPPLSHDMKVCKRPNGKFILQISCDPICTRQIQVQTSDSICSIDPGGRTFATCYDPSNIKTFQIGPEADKKEIIHEFHNKIDYVHRLLSHAQEKKQTQAVQDRIGQLKKLHLKLKTYVDDVHLKLCSYLVKNYKLVVLGKISVSSIVRKDRQNHLPKSANRDLLCWQHYRFRQRLLHRVRGTDCEAVAQDERYTSKTCGNCGVKNNKLGGKETFHCKSCNYITHRDVNGARNILCKYLGLFPFAA

SEQ ID NO: 596 - protein, 478 aa, Mercenaria sp.
MKRKREQMTLWKAAFVNGQETFKSWIDKARMLELNCDVSSASSTHYSDLNLKTKCAKTDDKFMCNYSVCIRPTSKQKRTLNQMLKVSNYAYNWCNYLVKEKDFKPKQFDLQRIVAKTNSTDVPAEYRLPGDDWFFDNKMSSIKLTACKNFCTMYKSTQTNQKKTKVDLRNKDIVQLREGSFEVQSKYVRLLTEKDIPGERIRQSRIALMPDSFSKSKKDWKERFLRLSKNVSKIPPLSHDMKVCKRPNGKFILQISCDPICTRQIQVQTSDSICSIDPGGRTFATCYDPSNIKTFQIGPEADKKEIIHEFHNKIDYVHRLLSHAQEKKQTQAVQDRIGQLKKLHLKLKTYVDDVHLKLCSYLVKNYKLVVLGKISVSSIVRKDRPNHLAKSANRDLLCWQHYRFRQRLLHRVRGTDCEVIIQDERYTSKTCGNCGEKNNKLGGKETFTCESCNYKTHRDVNGARNILCKYLGLFPFAA

SEQ ID NO: 597 - protein, 463 aa, Mercenaria sp.
MKRKREQMTLWKAAFVNGRETFKSWIDKVRMLELNCDISSASSTHYSDLNLKTKCAKTEDKFMCTYSVGIRPTSKQKRTLNQMLKVSNYAYNWCNYLVKEKDFKPKQFDLQRVVAKTNSTDVPAEYRLPGDDWSFDNKMSGIKLTACKNFCTMYKSAQTNQKKTKVDLRNKDIVQLREGSFEVQSKYVSLLTEKDIPGERIRQLRIALMPDSFSKSKKDWKERFLRLSKNVSKIPPLSHDMKVCKRPDGKFILQIPCDPICTRQIQVQTSDSICSIDPGGRTFATCYDPSNIKAFQIGPEADKKEIIHEFHNKIDYVHRLLSHAQEKKQTQAVQDRIGQLKKLHLKLKTYVDDVHLKLCSYLVKNYKLVVLGKISVSSIVRKDRPNHLGKKGNRDLLCWGHYRFRQRLLHRVRGTDCEAITQDERYTSKTCGNCGVKNNKLGGKETFTYMKNKHLNVLDKTLT

SEQ ID NO: 598 - protein, 463 aa, Dreissena sp.; identical to SEQ ID NO: 597

SEQ ID NO: 599 - protein, 478 aa, Dreissena sp.
MKRKREDLTLWDAANVHKHKSMWYWWEYIRRKDMVNYEKTDCDVIQLLQSASVKKQKTQSDKFLTSFSVGIRPTKHQKRVLNEMLRVSNYTYNWCLWLVNEKGIRPHQFELQKIVCKTNANDVDPQYRIENDDWFFNNRMTSVKTTSCKNFYTSYKAAKSLKSKLKRPMSVSNIVQGSFCVPKLFIRNLSSKDVSIDNINMLNRYICMIPENFEKRSKPKERFLKLAKPITKIPPFDHDVKIVKRADGMFILNIPCDPKYTRRNASNDTIDKRVCGIDPGGRTFATVYDPIDCCVFQVGIKEDKQYVISKLHNKIDHAQMHLRKAQNKKQQQAARERIVSLKKTHLKLKTFVDDIHLKLSSHLVKEYQFVALGKINVAPLVKKKHLSKRAKRDLLYWQHYRFRQRLTHRTTNTECILDVQNEAYTSKTCGVCGTINKNLEKSETFYCDNCKYNTHRDVNGARNILLKSLRMFPFVNSQ

SEQ ID NO: 600 - protein, 482 aa, Dreissena sp.
MKRKREDLTLWDAAHVHKHKSMWYWWEYIRRKDMVNHEKTDCDVIQLLQSASVKKQKTQSDKFFTSFSVGIRPTKHQKRVLNEMLRVSNYTYNWCLWLVNEKGIEPHQFELQKIVCKTNANDVDPQYRMENDDWFFNNKMTSVKTTSCKNFYTSYKAAKSLKSKLKRPMSVSNIVQGSFCVPKLFVRNLSSKDVSIDNINMLNRYICMIPENFEKRSKPKERFLKLAKPITKIPPFDHDVKIVKRADGMFILNIPCDPKYTRRNASNDTIDKRVCGIDPGGRTFATVYDPIDCSVFQVGIEEDKQYVISKLHNKIYHAHKHLTKAQNKKQQQAASERIVSLKKTHLKLKTFVDDIHLKLSSHLVKEYEYVALGKINVAQLVKTDRPKPLSPRAKRDLLYWQHYRFRQRLTHRTTNTECILDVQNEAYTSKTCGVCGTINKNLEKSETFFCDQCKYNTHRDVNGARNILLKSLRMFPFEKQQQ

SEQ ID NO: 601 - protein, 482 aa, Dreissena sp.
MKRKRENFTLWDAANVHKHKSMWYWWEHIRRKDMVNHEKTDCDVIQLLQSASVKKQKTQSDKFLTSFSVGIRPTKHQKRVLNEMLRVSNYTYNWCLWLVDEKGQRPHLFELQKIVCKTTANDVDPYYRMENDDWFFNNKMSTIKLTSCKNFCTSYKSAKSLKSKLKRPMSVSNIIQGSFCVQKLFIRRLSDKDVSIDNTQMQNRYICMMPDNFEKRSNPKERFLKLAKPITKIPPIDHDVKIVKRADGMFIMNIPCDPKYTRRNASNNTIEKRVCGIDPGGRTFATVYDPIDCCVFQVGIKEDKQYVISKLHNKIDHAHMHLTKAQNKKQQQAARERIVSLKKTHLKLKTFVDDIHLKLSSHLVKEYEYVALGKINVAQLVKTDRPKPLSPRAKRDLLYWQHYRFRQRLTHRTTNTECILDVQNEAYTSKTCGVCGTINKNLEKSETFYCDNCKYNTHRDVNGARNILLKSLRMFPFVNSQL

SEQ ID NO: 602 - protein, 479 aa, Dreissena sp.
MKRKREDLTLWDAANVHKHKSMWYWWEYIRRKDLINHEKTDCDVIQLLQSASVKKQKTHSDDFLTSFSVGIRPTKHQKQVLNEMLRVSNYTYNWCLWLVNEKGLRPHQFELQKIVCKTNARDVDPQYRMENDDWFFNNKMTRVKGTSCKNFCTSYKSAKALKSKLKRPMPISNIIEGSFGVPNLYIRLLSSKDVCTHETNMQNRYICMMPDNFEKRSNPKERFLKLAKRITNIPPINHDVKIVKRADGMFIMNIPCDPKYTRRNASNDTIEKRVCGIDPGGRTFATVYDPIDCCVFQVGIKEDKQYVISKLHNKIDHAHMHLTKAQNKKQQQAARERIVSLKKTHLKLKTFVEDIHLKLSSHLVKEYHYVALGKINVAPMVKKKHLSKRAKRDLLYWQHYRFRQRLTHRTTNTDCIFEVQNEAYTSKTCGVCGKINENLEKSETFYCDQCKYNTHRDVNGARNILLKSLNMFPFEKKQQ

SEQ ID NO: 603 - protein, 482 aa, Dreissena sp.
MKRKREQLTLWDAANVHKHKSMWYWWQSIRRKDLVNHDKTACDVMELLQSASHKKQNTQSDKFLTSFSVGIRPTKHQKRVLNEMLRVSNYTYNWCLWLVNEKGLKPLQFTLQKIVCKTNAGDVDPQYRIENDEWFFNNKMSTIKLTSCKNFCTSYKSAKSLKSKLKRPMSVSNIVQGSFCVQKVLLRHLSGKDVFTNNANMQNQYICMMPDNFEKRSNPKERFLKLAKRITKIPPIDHDVKIVKRANGTFVLNIPCDPTYTRRNTSNDTIEKRVCGIDPGGRTFATVYDPIDCSVFQVGIEEDKQYVMSKLHNKINHAHKHLTKAQNKQQQQAAQERIVSLKKIHFKLKTFVDDIHLKLSSHLVKEYQYVALGKINVAQLVKTDRPKPLSPRSKRDLLNWQHFRFRQRLTHRTTNTDCILEVQNEAYTSMTCGVCGKIKKNLEKSETFYCDQCKYNTHRDVNGARNILLKSLHMFPFEKQQQ

SEQ ID NO: 604 - protein, 480 aa, Dreissena sp.
MKRKRENFTLWDAANVHKHKSMWYWWEHIRRKDMVNHEKTDCDVIQLLQSASVKKQKTQSDKILTSFSVGLRPTKHQKQVLNEMLRVSNYTYNWCLWLVDEKGQRPHLFELQKIVCKTTANDVDPYYRMENDDWFFNNKMSNIKLTSCKNFCTSYKSAKSLKSKLIRPMSVSNIIQGSFCVQKVLLRHLSDKDVSTDNMLNRYICMMPDNFEKRSKPKERFLKLAKPITKIPPIDHDVKIVKRADGMFIMNIPCDSKYTRRNASNDTIEKRVCGIDPGGRTFATVYDPIDCCVFQVGIKEDKQYVIRKLHDKIDHAHKHLTKAQKKKQQKAAQERIVSLKKIHFKLKTFVDDIHLKLSSHLVKEYKYVALGKINVAQLVKTDRPKPLSKRAKRDLLSWQHYRFRQRLTHRTTNTDCILEVQNEANTSKTCGVCGEKDDNLGKSETYYCIKCEYNTHRDVNGARNILLKSLHMFPFVNSQQ

SEQ ID NO: 605 - protein, 442 aa, Dreissena sp.
MVNHEKTDCDVIQLLQSASVKKQKTQSDKFLTSFSVGIRPTKHQKRVLNEMLRVSNYTYNWCLWLVNEKGIRPHQFELQKIVCKTNASDVDPQYRMANDDWFFNNKMTSIKTTSCKNFFTSYKAAKSLKSKLKRPMCVSNIIQGSFCVRKEFIRHLSGKDVSTDNMLNRYICMMPDNFEKRSKPKERFLKLAKPITNIPPINHDVKIVKRADGMFIMNIPCDPKYTRRNASNDTIEKRVCGIDPGGRTFATVYDPIDCCVFQVGIKEDKQYVISKLHNKIDHAHKHLTKAQNKKQQQAASERIVSLKKTHLKLKTFVEDIHLKLSSHLVKEYQYVALGKINVAQLVKTDRPKPLSKRAKRDLLSWQHYRFRQRLTHRTTNTDCILEVQNEANTSKTCGVCGEKDDNLGKSETYYCIKCEYNTHRDVNGARNILLKSLHMFPF

SEQ ID NO: 606 - protein, 352 aa, Dreissena sp.
MANDDWFFNNKMTSIKTTSCKNFFTSYKAAKSLKSKLKRPMCVSNIIQGSFCVRKEFIRHLSGKDVSTDNMLNRYICMMPDNFEKRSKPKERFLKLAKPITNIPPINHDVKIVKRADGMFIMNIPCDPKYTRRNASNDTIEKRVCGIDPGGRTFATVYDPIDCCVFQVGIKEDKQYVISKLHNKIDHAHKHLTKAQNKKQQQAASERIVSLKKTHLKLKTFVEDIHLKLSSHLVKEYQYVALGKINVAQLVKTDRPKPLSKRAKRDLLSWQHYRFRQRLTHRTTNTDCILEVQNEANTSKTCGVCGEKDDNLGKSETYYCIKCEYNTHRDVNGARNILLKSLHMFPFKKHQK

SEQ ID NO: 607 - protein, 337 aa, Dreissena sp.
MGCCKRPQTQSMWYWWQSIRRKDLVNHDKTACDVMELLQSASHKKQNTQSDKFLTSFSVGIRPTKHQKRVLNEMLRVSNYTYNWCLWLVNEKGLKPLQFTLQKIVCKTNAGDVDPQYRIENDEWFFNNKMSTIKLTSCKNFCTSYKSAKSLKSKLKRPMSVSNIVQGSFCVQKVLLRHLSGKDVFTNNANMQNQYICMMPDNFEKRSNPKERFLKLAKRITKIPPIDHDVKIVKRANGTFVLNIPCDPTYTRRNTSNDTIEKRVCGIDPGGRTFATVYDPIDCSVFQVGIEEDKQYVMSKLHNKINHAHKHLTKAQTNSNNKQHRNELYHCRKYTLS

SEQ ID NO: 608 - protein, 306 aa, Dreissena sp.
MKRKREDLTLWDAANVHKHKSMWYWWEYIRRKDLINHEKTDCDVIQLLQSASVKKQKTQSDKFLTSFSVGIRPTKHQKQVLNEMLRVSNYTYNWCLWLVNEKGLKPHQFELQKIVCKTNARDVDPQYRMANDDWFFNNKMTRVKGTSCKNFCTSYKSAKALKSKLKRPMPISNIIEGSFGVPNLYIRLLSSKDVCTHETNMQNRYICMMPDNFEKRSNPKERFLKLAKRITNIPPINHDVKIVKRADGMFIMNIPCDPKYTRRNASNDTIEKRVCGIDPGAVCHVRGSTIAANGVAKFRVTAKTEE

SEQ ID NO: 609 - protein, 282 aa, Dreissena sp.
MLNRYICMIPDNFEKRSKPKERFLKLAKPITKIPPIDHDVKIVKRADGMFIMNIPCDPKYTRRNASNDTIDKRVCGIDPGGRTFATVYDPIDCSVFQVGIEEDKQYVISKLHNKIYHAHKHLTKAQNKKQQQAASERIVSLKKTHLKLKTFVEDIHLKLSSHLVKEYQYVALGKINVAQLVKTDRPKPLSKRAKRDLLSWQHYRFRQRLTHRTTNTDCILEVQNEANTSKTCGVCGEKDDNLGKSETYYCIKCEYNTHRDVNGARNILLKSLSMFPFEKKQQ

SEQ ID NO: 610 - protein, 284 aa, Dreissena sp.
MTSVKGTSCKNFSTSYKSATSLKLKQKRPMSVSNIFQGSFCVPKKFIRHLSGSDVSIDNTNMQNRYICMMPDNFEKRSNPKERFLKIAKPITKIPPIDHDVKIVKRADGTFIMKIPCDPKYTRRNASNDSIEKRVCGIDPGGRTFATVYDQIESSVFQVGIEEDKQYLISKLHNKIDHAHMHLTKAQNKKQQQAARERIVSLKKTHLKLKTFVEDIHLKLSAHLVKEYQYVALGKINVAQLVKKNRPKPLSPRANRFAMLATLQISPKAYSPNYEHRMHIGCSK

SEQ ID NO: 611 - protein, 481 aa, Batillaria sp.
MKRTYSATKSSLTLWTAASVKTTSAPKVVTTFSGWMKKILPTRAETSLTLINPADIADPSPPKKKAKKTTPATPKPTLRIYKIGLRPSPAQRKTLNACIVAANFAYNQCVHLVQHKVCKPHLYDLQKIVAKMKTPEDINHRYAPDRDGWFWKSSTIVRLLATKDFCAAYKAIVSNKKKDVAVIKYKTYDDPEAINPLSGLFGCQKQYATVTQAGLRLLPRLFGKDPIPLVKKKPKVATIDHDFKIEKTSKGKFVLCLTVECSLLRRVKPPAPLFEDGYIHACGIDPGVRSFVTVYDPTRQDCYQFGTSAQKAERLDPITNAIDNWNSFVDQHRDKAPPTAIESWSRKTKKLWYKLKNQVRSLHDQVIAHLLGAYNFISLGKLDVSCFRRGTTAKSTNRWLRIYRHFEFRTKLLARVEGTDNCRVEITDERWTSKTCGMCRSIHRELGAKELFECPNCHYTCHRDVHGARNILLRSFGQFPV

SEQ ID NO: 612 - protein, 481 aa, Batillaria sp.
MKRTYSATKSSLTLWTAASVKTTSAPKVVTTFSGWMKKILPTRAETSLTLINPADIADPSPPKKKAKKTTPATPKPTLRIYKIGLRPSPAQRKTLNACIVAANFAYNQCVHLVQHKVCKPHLYDLQKIVAKMKTPEDINHRYAPDRDGWFWKSSTIVRLLATKDFCAAYKAIVSNKKKDVAVIKYKTYDDPEAINPLSGLFGCQKQYATVTQAGLRLLPRLFGKDPIPLVKKKLKVATIDHDFKIEKTSKGKFVLCLTVECSLLRRVKPPAPLFEDGYIHACGIDPGVRSFVTVYDPTRQDCYQFGTSAQKAERLDPITNAIDNWNSFVDQHRDKAPPTAIESWSRKTKKLWYKLKNQVRSLHDQVIAHLLGAYNFISLGKLDVSCFRRGTTAKSTNRWLRIYRHFEFRTKLLARVEGTDNCRVEITDERWTSKTCGMCRSIHRELGAKELFECPNCHYTCHRDVHVARNILLRSFGQFPV

SEQ ID NO: 613 - protein, 472 aa, Batillaria sp.
MKRTYSATKSSLTLWTAASVKTTSAPKVVTTFSGWMKKILPTRAETSLTLINPADIADPSPPKKKAKKTTPATPKPTLRIYKIGLRPSPAQRKTLNACIVAANFAYNQCVHLVQHKVCKPHLYDLQKIVAKMKTPEDINHRYAPDRDGWFWKSSTIVRLLATKDFCAAYKAIVSNKKKDVAVIKYKTYDDPEAINPLSGLFGCQKQYATVTQAGLRLLPRLFGKDPIPLVKKKLKVATIDHDFKIEKTSKGKFVLCLTVECSLLRRVKPPAPLFEDGYIHACGIDPGVRSFVTVYDPTRQDCYQFGTSAQKAERLDPITNAIDNWNSFVDQHRDKAPPTAIESWSRKTKKLWYKLKNQVRSLHDQVIAHLLGAYNFISLGKLDVSCFRRGTTAKSTNRWLRITDTLNFGQNCSLEWRELTTVEWRSPTNAGPQRRVACADPSTANLGQKNYSSAPTATTPATETCTELETSC

SEQ ID NO: 614 - protein, 457 aa, Elysia sp.
MAEKLRKTLWIPGNEPDSDCTVSITGKLNELVNSIDPAPEALGIYKVKFKLTRHQHNVLKDLLAASNLAWNWTKWLIEDKGIKRKDEKTLQSIVAKKSIEDPLMAPREVHDNAKLLHKTSTIRLTGMKSYLSALKSSMTLHKGRMEKFDVDYKELYPASGTFTVQKLFIKKFDISMVNKGVRSKVPEAFYRLSITPDSFGNRNEFTERFLRISKKRSYDRMPPINHDSQIQLRKDGHWLLLIPCDRSYLRCKQPESIEKSVVGVDPGGRTFQTTYDPIKREVKEFHSNKGAEFRYIELMKVKAKRHEEHAKNVKSFPKYKEHKAAARKYWHKYETKRNDLHRKLSSKMVRENKLIVIGDLSTKNACKKGGKLHKKSKDDLYTWAHYEFRQRLIDRARGTNTKVIVQDESYTSMTCGNCGHRKTDLGGDKVYNCTECGCSIGRDVNGGRNILIKAMIE

SEQ ID NO: 615 - protein, 459 aa, Elysia sp.
MAEIIRKQLWYPGYKPENLSGVVEKLKEVGASNDESALGTFKIKLRPTAYQKACLKRVLAASNLAWNWTKWLIEEKGVSWKDKKTMQAIVVKKSIESLENQDMVAPEVRANQQLLSKTTSVRLTAMCSFVAATKSSMTLHKGCTRKFDVGYKELYPRSGTFGVQKPYIRKFEESMLPAKMPTEARKNFNRLRLSILPNSFAAKGNPNERFLRIGKRRSWESMPPISHDCKVEMRKDGSWLLLIPCDRSYLRFSKPVAEKNHAVSLDPGVRTFQTEYNPFKQETRNHGSQRDKDRINFFKTKAQRHEVLAKTNKKEYVRKEHKRQADKYWHKHGKYRDNIHRELASKLVNENDLVIVGDFSSSRCAAKRAGSKLTKQTRAEMYSWAHYRFKQRLIERARGTGTRVHFQDESYTSKTCGNCGNIKEDLGGNKTYACEVCGVVMDRDVNGARNIMIKSLTKN

SEQ ID NO: 616 - protein, 720 aa, Contarinia sp.
MLFERSVQMTEVAALASLSILFILNEALDNDDRAFFLKPHPSLFIADCFRAVLNQHVNNINSQYRILPEFRFMVERNSEEQFRWPDDEKLGNGLRYFYKQYITNIQTNTNTWCEKRLENFFRMRCWYRNRFHNGSRFDNIDIRNAKEFSYRFKNLTNGNNVDPQRVEKFNILMRDLTEIGWSGTVSMKFFAKYRWFESLWLFGQMQRQIEVYHSHAEQWYTIHEMFRNNPNFQEPTINRPPKISSFALIPLCDYHLKNVRLDITDLYNKIVNELDLVPSFLNTQTNRMNKRNLKYYTQTDRSGLWNMLFDVGKINKLGKSKPFHHQILTDSVSISIMYKKPQRQQRPQRQQRPQQTTQANRGPEKLIGKKYIIGIDPNEKSWLTVVRRNIQKTPDEPAVEENIIIPNQRFHWETQQKKRDKEAKKLAGWFDIEEKEHLKTYPYRPPSPRNSTWKSYIEYRIKMLRKGMAAYATREYARLDLDHHIRSTRVNDQIAVRVTNNKPSLVQFGAWAMKPDRPFGIKKRKRCPGSRKFRVSIKKLGHSEVEMQDEWGTSQTCANCQERFPRHTKDDRFKVCYDCRAKKIDGLPDSVAGLPDIIVSTVNRRVLRRKRAIIKRQIIDGNREAVNEKIRTGRLMSKVKVTYKNWPLNVDDDDVVPQTVTWHRDIVAAKCIMLKGMNQLETEYSLFNVFALNYIGLCRIFDVPLPVSLLRPPDYNNNVN

SEQ ID NO: 617 - protein, 766 aa, Contarinia sp.
MDDDELDDNQPEESKYVVIKCGLQTILRQQHERIERVGEVVTKMLFERSVQMTEVAALASLSILFILNEALDNDDRAFFLKPHPSLFIADCFRAVLNQHVNNIRSQYRILPEFRFMVERNSEEQFRWPDDEKLGNGLRYFYKQYITNIQTNTNTWCEKRLENFFRMRCWYRNRFHNGSRFDNIDIRNAKEFSYRFKNLTNGNNGNNVDPQRVEKFNILMRDLTEIGWSGTVSMKFFAKYRWFESLWLFGQMQRQIEVYHSHAEQWHTIHEMFRNNPNFQEPTINRPPKISSFALIPLCDYHLKNVRLDIKDLYYKIVNELDLVPSFLNTRTNRMNKRNLKYYTQTDRSGLWNMLFDVGEINKLGKSKSFHHQILTDSVSISIMYKKPQRQQRPQRQQRPQQTTQANRGPEKLIGKKYIIGIDPNEKSWLTVVRRNIQKTPDEPAVEENIIIPNQRFHWETQQKKRDKEAKKLAGWFDIEEKEHLKTYPYRPPSPRNSTWKSYIEYRIKMLRKGMAAYATREYARLDLDHHIRSTRVNDQIAVCVTNNKPSLVQFGAWAMKPDRPFGIKKRKRCPGSRKFRVSIKKLGHSEVEMQDEWGTSQTCANCQERFPRHTKDDRFKVCYDCRAKKIDGLPDSVAGLPDIIVSTVNRRVLRRKRAIIKRQIIDGNREAVNEKLQTGRLMSKVKVTYKNWPLNVDDDDVVPQTVTWHRDIVAAKCIMLKGMNQLETEYSLFNVFALNYIGLCRIFDVPLPVSLLRPPDQNNNVN

SEQ ID NO: 618 - protein, 766 aa, Contarinia sp.
MDDDELDDNQPEESKYVVIKCGLQTILRQQHERIERVGEVVTKMLFERSVQMTEVAALASLSILFILNEALDNDDRAFFLKPHPSLFIADCFRAVLNQHVNNINSQYRILPEFRFMVERNSEEQFRWPDDEKLGNGLRYFYKQYITNIQTNTNTWCEKRLENFFRMRCWYRNRFHNGSRFDNIDIRNAKEFSYRFKNLTNGNNGNNVDPQRVEKFNILMRDLTEIGWSGTVSMKFFAKYRWFESLWLFGQMQRQIEVYHSHAEQWYTIHEMFRNNPNFQEPTINRPPKISSFALIPLCDYHLKNVRLDIKDLYNKIVNELDLVPSFLNTRTNRMNKRNLKYYTQTDRSGLWNMLFDVGEINKLGKSKSFHHQILTDSVSISIMYKKPQRQQRPQRQQRPQQTTQANRGPEKLIGKKYIIGIDPNEKSWLTVVRRNIQKTPDEPAVEENIIIPNQRFHWETQQKKRDKEAKKLAGWFDIEEKEHLKTYPYRPPSPRNSTWKSYIEYRIKMLRKGMAAYATREYARLDLDHHIRSTRVNDQIAVRVTNNKPSLVQFGAWAMKPDRPFGIKKRKRCPGSRKFRVSIKKLGHSEVEMQDEWGTSQTCANCQERFPRHTKDDRFKVCYDCRAKKIDGLPDSVAGLPDIIVSTVNRRVLRRKRAIIKRQIIDGNREAVNEKIRTGRLMSKVKVTYKNWPLNVDDDDVVPQTVTWHRDIVAAKCIMLKGMNQLETEYSLFNVFALNYIGLCRIFDVPLPVSLLRPPDYNNNVN

SEQ ID NO: 619 - protein, 766 aa, Contarinia sp.
MDDDELDDNQPEESKYVVIKCGLQTILRQQHERIERVGEVVTKMLFERSVQMTEVAALASLSILFILNEALDNDDRAFFLKPHPSLFIADCFRAVLNQHVNNIRSQYRILPEFRFMVERNSEEQFRWPDDEKLGNGLRYFYKQYITNIQTNTNTWCEKRLENFFRMRCWYRNRFHNGSRFDNIDIRNAKEFSYRFKNLTNGNNGNNVDPQRVEKFNILMRDLTEIGWSGTVSMKFFAKYRWFESLWLFGQMQRQIEVYHSHAEQWHTIHEMFRNNPNFQEPTINRPPKISSFALIPLCDYHLKNVRLDIKDLYYKIVNELDLVPSFLNTRTNRMNKRNLKYYTQTDRSGLWNMLFDVGEINKLGKSKSFHHQILTDSVSISIMYKKPQRQQRPQRQQRPQQTTQANRGPEKLIGKKYIIGIDPNEKSWLTVVRRNIQKTPDEPAVEENIIIPNQRFHWETQQKKRDKEAKKLAGWFDIEEKEHLKTYPYRPPSPRNSTWKSYIEYRIKMLRKGMAAYATREYARLDLDHHIRSTRVNDQIAVCVTNNKPSLVQFGAWAMKPDRPFGIKKRKRCPGSRKFRVSIKKLGHSEVEMQDEWGTSQTCANCQECFPRHTKDDRFKVCYDCRAKKIDGLPDSVAGLPDIIVSTVNRRVLRRKRAIIQRQIIDGNREAVNEKLQTGRLMSKVKVTYKNWPLNVDDDDVVPQTVTWHRDIVAAKCIMLKGMNQLETEYSLFNVFALNYIGLCRIFDVPLPVSLLRPPDQNNNVN

SEQ ID NO: 620 - protein, 607 aa, Bradysia sp.
MYETNFKNNVKTHAQKRIVRLFKLWFIEANGVKPSSRHMKVLKNAATFMFKRKSTVPRNPYLTQRLMMYMPPQIVAMVANSNERGFMNKLHNAFNWFRMVPLYLRIQSDIDQYQATCRAADEPIHVRNFHVVPLHNSKTKYIRIDSATLKLMLQHLKIHPTKPSLKQPNKRVCLTNAEFEDAVDPTGTFNPNWFNYFKWSAVKKMQRHKEFDYQFLTNGVAVSLQFIVDQPPEPETFEKVMEKQKIKYRKFGQRFNNNQYKTIIGIDPGYKLYLAAVSKDMRTNEETLFRLTSRKFHNMCQQNIRDRKAKRYTSQLETEMAHDREVNFGGTIASPMSATNYMLFIDHRLKHFNSCIALYTQNKYTELAFHKYVHTQKAMDGIVNELLPSSRSHERSLLVIGGTEFNPSAPIKKYRRCPGVRQLVKFVRKRTGCDIVYADEYNTSQVCGRCQRRFKTSDDETIQHKRWERKGARMRLCSNCTPNDNIIPLPTTINTRMSPRAQHLHRLAITNRLFFNVAAYSMEDAKRESDNIHYIAENCCYDVSHDKHTFDPNDRTTQLKCVWNRDISAARNILIKGVASITGIPAPRTLYRQTQINEENSSDESMD

SEQ ID NO: 621 - protein, 1288 aa, Bradysia sp.
MKNTKELSDSDTDIEKRQRKWQHQRQQKGNKKPKKRGQSNGNGNGKDSDDDFVSTKKVYNSPPKLPNVAAVGRRKNVIPKKPPVSSNVNVNVLDSPPKLPNVAAAPKKPPVSSAAINAALLNATTKDRSSSPSNATAASNPAINITSHRNTTSSIIGSGRTGSTQEVAHPLPIRQSPPPMEYGSEWDTDGEATIAQLKQMQRKRPSKKAHSTSTKPEVKQTPVQSNRKRAASTDEASDAVEATTKRSTSTKRSKASKRSKATKTQQDSADEAGDADEETTKRSTSTKRSKASKRSKVTKTQQDSADEAGDADEATTKRSTSTKRSKASKAQQRKDDDENGNRAVIQTQLEEIIFLGNVFDKSIRRFTCPFATCNVNYSTFLNLKNHVKKTHEETLQKPIETDTNNWRRIQNANNRFDITTVKQKLRPLIIDGETIIKKQRVLEPLATEKTEVATKVFDIMNKQAVELSKLAILFSSLVYFDVYNTISDPENGNEIDRIFEEEFNWKEMILEFKQFQRNTAKAKKPRPDKHNTFFDLCRKYDVETYFTETSQNAWNSIVDTFATNFKTNITTHLYSRIRKWLAFKLRDGKKKKDVCGKENRKDINNKIYHTIKFLFDSEKCTQAEEVQHELICELQKICQFPNFNHGGRSYFERLRYDFKEDGDDDLGKPKRKRKCAAPKKTTKKSKKKKKKTQNNGPRLNWFQMVPAMVRLQRRIYEINLSRKQTLIDAGIIKEKKKRKRKRKRKRKRKNESKPEPSSTENKRQAGGTKKKREIDPEATHYAKLPNFIVVPQNSFHTMHFPIDTKALFDILKNLPQFMAILNQAEFLELQIDDDPNRKTTNPFWYFLFNIQKMETATKKFGGRITTNGSDVSIQYCKLRKEKELTKAEILEMASNRKRKHDVIDSDSESESEDDDDDDDDNAKTIKTDPAIVSALTNITNMEDLSVSGVDLGVRNVAATVIRKWSKSSDGYEVHESNVLHKSKDYHYKAGFARRQRKGKKLHGEFDERYQKDRQSQPIEPSQRSPDYIKFLDSRLKWFNEGTATYMQRVVTNVKFDKFRSTQKQMMAMAKEIVGDINVHDKATTQPSKIRVVFVGNCSTPANSTIKGHRRSPGNAPIVRYLKQIPQTYVDATIDEYCTTKKCSRCYETLDDVEFSKERLKLCHNCKLAENSTSTNLVSTYQRKKVIAEAMIPITEDYPKPTQFERAQRVAMERTKRWSFGDKMRMAARIKLKSTTYTVNTTATLKHLYWNRDGNAARNIMQLGLCQYNDCLPIEFNKDEAFQRPKKKD

SEQ ID NO: 622 - protein, 1289 aa, Bradysia sp.
MKNTKELSSDSDTDIEKRQRKWQHQRQQKGNKKPKKRGQSNGNGNGKDSDDDFVSTKKVYNSPPKLPNVAAVGRRKNVIPKKPPVSSNVNVNVLDSPPKLPNVAAAPKKPPVSSAAINAALLNATTKDRSSSPSNATAASNPAINITSHRNTTSSIIGSGRTGSTQEVAHPLPIRQSPPPMEYGSEWDTDGEATIAQLKQMQRKRPSKKAHSTSTKPEVKQTPVQSNRKRAASTDEASDAVEATTKRSTSTKRSKASKRSKATKTQQDSADEAGDADEETTKRSTSTKRSKASKRSKVTKTQQDSADEAGDADEATTKRSTSTKRSKASKAQQRKDDDENGNRAVIQTQLEEIIFLGNVFDKSIRRFTCPFATCNVNYSTFLNLKNHVKKTHEETLQKPIETDTNNWRRIQNANNRFDITTVKQKLRPLIIDGETIIKKQRVLEPLATEKTEVATKVFDIMNKQAVELSKLAILFSSLVYFDVYNTISDPENGNEIDRIFEEEFNWKEMILEFKQFQRNTAKAKKSRPDKHNTFFDLCRKYDVETYFTETSQNAWNSIVDTFATNFKTNITTHLYSRIRKWLAFKLRDGKKKKDVCGKENRKDINNKIYHTIKFLFDSEKCTQAEEVQHELICELQKICQFPNFNHGGRSYFERLRYDFKEDGDDDLGKPKRKRKCAAPKKTTKKSKKKKKKTQNNGPRLNWFQMVPAMVRLQRRIYEINLSRKQTLIDAGIIKEKKKRKRKRKRKRKRKNESKPEPSSTENKRQAGGTKKKREIDPEATHYAKLPNFIVVPQNSFHTMHFPIDTKALFDILKNLPQFKAILNQAEFLELQIDDDPNRKTTNPFWYFLFNIQKMETATKKFGGRITTNGSDVSIQYCKLRKEKELTKAEILEMASNRKRKHDVIDSDSESESEDDDDDDDDNAKTIKTDPAIVSALTNITNMEDLSVSGVDLGVRNVAATVIRKWSKSSDGYEVHESNVLHKSKDYHYKAGFARRQRKGKKLHGEFDERYQKDRQSQPIEPSQRSPDYIKFLDSRLKWFNEGTATYMQRVVTNVKFDKFRSTQKQMMAMAKEIVGDINVHDKATTQPSKIRVVFVGNCSTPANSTIKGHRRSPGNAPIVRYLKQIPQTYVDATIDEYCTTKKCSRCYETLDDVEFSKERLKLCHNCKLAENSTSTNLVSTYQRKKVIAEAMIPITEDYPKPTQFERAQRVAMERTKRWSFGDKMRMAARIKLKSTTYTVNATATLKHLYWNRDGNAARNIMQLGLCQYNDCLPIEFNKDEAFQRPKKKD

SEQ ID NO: 623 - protein, 1289 aa, Bradysia sp.
MKNTKELSSDSDTDIEKRQRKWQHQRQQKGNKKPKKRGQSNGNGNGKDSDDDFVSTKKVYNSPPKLPNVAAVGRRKNVIPKKPPVSSNVNVNVLDSPPKLPNVAAAPKKPPVSSAAINAALLNATTKDRSSSPSNATAASNLAINITSHRNTTSSIIGSGRTGSTQEVAHPLPIRQSPPPMEYGSEWDTDGEATIAQLKQMQRKRPSKKAHSTSTKPEVKQTPVQSNRKRAASTDEASDAVEATTKRSTSTKRSKASKRSKATKTQQDSADEAGDADEETTKRSTSTKRSKASKRSKVTKTQQDSADEAGDADEATTKRSTSTKRSKASKAQQRKDDDENGNRAVIQTQLEEIIFLGNVFDKSIRRFTCPFATCNVNYSTFLNLKNHVKKTHEETLQKPIETDTNNWRRIQNANNRFDITTVKQKLRPLIIDGETIIKKQRVLEPLATEKTEVATKVFDIMNKQAVELSKLAILFSSLVYFDVYNTISDPENGNEIDRIFEEEFNWKEMILEFKQFQRNTAKAKKPRPDIHNTFFDLCRKYDVETYFTETSQNAWNSIVDTFATNFKTNITTHLYSRIRKWLAFKLRDGKKKKDVCGKENRKDINNKIYHTIKFLFDSEKCTQAEEVQHELICELQKICQFPNFNHGGRSYFERLRYDFKEDGDDDLGKPKRKRKCAAPKKTTKKSKKKKKKTQNNGPRLNWFQMVPAMVRLQRRIYEINLSRKQTLIDAGIIKEKKKRKRKRKRKRKRKNESKPEPSSTENKRQAGGTKKKREIDPEATHYAKLPNFIVVPQNSFHTMHFPIDTKALFDILKNLPQFKAILNQAEFLELQIDDDPNRKTTNPFWYFLFNIQKMETATKKFGGRITTNGSDVSIQYCKLRKEKELTKAEILEMASNRKRKHDVIDSDSESESEDDDDDDDDNAKTIKTDPAIVSALTNITNMEDLSVSGVDLGVRNVAATVIRKWSKSSDGYEVHESNVLHKSKDYHYKAGFARRQRKGKKLHGEFDERYQKDRQSQPIEPSQRSPDYIKFLDSRLKWFNEGTATYMQRVVTNVKFDKFRSTQKQMMAMAKEIVGDINVHDKATTQPSKIRVVFVGNCSTPANSTIKGHRRSPGNAPIVRYLKQIPQTYVDATIDEYCTTKKCSRCYETLDDVEFSKERLKLCHNCKLAENSTSTNLVSTYQRKKVIAEAMIPITEDYPKPTQFERAQRVAMERTKRWSFGDKMRMAARIKLKSTTYTVNTTATLKHLYWNRDGNAARNIMQLGLCQYNDCLPIEFNKDEAFQRPKKKD

SEQ ID NO: 624 - protein, 1110 aa, Bradysia sp.
MEYGSEWDTDGEATIAQLKQMQRKRPSKKAHSTSTKPEVKQTPVQSNRKRAASTDEASDAVEATTKRSTSTKRSKASKRSKATKTQQDSADEAGDADEETTKRSTSTKRSKASKRSKVTKTQQDSADEAGDADEATTKRSTSTKRSKASKAQQRKDDDENGNRAVIQTQLEEIIFLGNVFDKSIRRFTCPFATCNVNYSAFLNLKNHVKKTHEETLQKPIETDTNNWRRIQNANNRFDIATVKQKLRPLIIDGETIIKKQRVLEPLATEKTEVATKVFDIMNKQAVELSKLAILFSSLVYFDVYNTISDPENGNEIDRIFEEEFNWKEMILEFKQFQRNTAKAKKSRPDKHNTFFDLCRKYDVETYFTETSQNAWNSIVDTFATNFKTNITTHLYSRIRKWLAFKLRDGKKKKDVCGKENRKDINNKIYHTIKFLFDSEKCTQAEEVQHELICELQKICQFPNFNHGGRSYFERLRYDFKADGDDDLGKPKRKRKCAAPKKTTKKSKKKKKKTQNNGPRLNWFQMVPAMVRLQRRIYEINLSRKQTLIHAGIIKEKKKRKRKRKRKRKRKNESKPEPSSTENKRQAGGTKKKREIDPEATHYAKLPNFIVVPQNSFHTMHFPIDTKALFDILKNLPQFKAILNQAEFLELQIDDDPNRKTTNPFWYFLFNIQKMETATKKFGGRITTNGSDVSIQYCKLRKEKELTKAEILEMASNRKRKHDVIDSDSESESEDDDDDDDDDNAKTIKTDPAIVSALTNITNMEDLSVSGVDLGVRNVAATVIRKWSKSSDGYEVHESNVLHKSKDYHYKAGFARRQRKGKKLHGEFDERYQKDRQSQPIEPSQRSPDYIKFLDSRLKWFNEGTATYMQRVVTNVKFDKFRSTQKQMMAMAKEIVGDINVHDKATTQPSKIRVVFVGNCSTPANSTIKGHRRSPGNAPIVRYLKQIPQTYVDATIDEYCTTKKCSRCYQTLDDVEFSKERLKLCHNCKLAENSTSTNLVSTYQRKKVIAEAMIPITEDYPKPTQFERAQRVAMERTKRWSFGDKMRMAARIKLKSTTYTVNTTATLKHLYWNRDGNAARNIMQLGLCQYNDCLPIEFNKDEAFQRPKKKD

SEQ ID NO: 625 - protein, 1139 aa, Leptopilina sp.
MEKKNDNVNSDRSPPSRQENEIRRVEELNNFHRRAVSRPFIQVLPSSNPLPQFNLTSNRSLELENRPPQQTSARIQRTVSSPFIPVLPFESNEGRVRRPLFDPTSMEEASSSTSGITEEEVSLDEIPSNVQIEKFQFFDENTRMSEGSGVDYCKSKEHDFDDDTTLSWQRNLGLMNIVSSSSFKDSSTPMDIDNEEKEEETTSSPTPKKRYKLNLKEEKLVEDVFSQQSTSKEQKLGRKTPLKKKKSLSPIPSTSRQADENDYLQSLNLQEEKDSTFKIPEPLATPSNMKKTTKSTARKEKQQQQQQTKFTIKTGFESFCPNEQIRTIVNDQVQMLSRMFILISLLVNFALRHPTNTFLLDEWSKNGPDYLTITYLFKEKEPVKSTKNAFLKKLREEFVPEFSEYMGRPFEKFDCTNLTSQVQQMAAQMNTNFTTNLTTHCRNRLAKFFKNELLKKSPSYKERKSRVIDEKSIEERDMKRKEEKRKRARKNKKKRIKWDKKKRMKRKSGRQKRIEKHNKCRNLYPNNKKMRDKLINIQSKTEQKSRNVDLRKIVYDARKTIGRNRGKKKSSKKPRIQPPKTTPKNKTCRNLQKEITPENETSDETSATIEKDKAEEEEEEEKEGYTIKTLIDNLLLNKCESEKLNQMNLEKLNFGDIEDKNTCHKFLPFYIRLQKYFVDEKIKGFMLVPIMKPGLKYICYTNTALSDLEIVFKKKQNKTEEKTPTKKMTRAEISKQEAEHKKLISPVKEKHKKLSSDKKILTRDIKLIKSEKNPYNKKRLAELQLKLKVLNEDLSIINSELKNISENHKKVVTERNQDKYLENERRWERLFNFSKLRVNKKKYKFSGTIMTDGIAVSVIYNVIKPKKIIDFSPTEQENVRDKTKYKILKGLDPGLKLAFGGVEREMQQDFDINSKDKPIKIPTATFRFETQECKRRSILYKVGNDPKTYYENLLETPEFKDNVNHRDPSLIIPCTKFLLRTFYDQQPNMENKKIARLRWDKYMLVQRETDYLADYLVGNREKKQLIAIGSPKISPWMRGHVRMPLKKVVRRLAEEQDKYKNLRLVFVDEFNTTKMCSTCDQKMKILRNRTAYCSSCRIAWNRDVNAGRNILNLALVRLGIIQKEQLPDSTKFRAIAEIE

SEQ ID NO: 626 - protein, 693 aa, unidentified
MRLKVRTPQLLLRRLIGARKQACTMESIMDGVTEPNLSIRVDSNAAGTGTIFGSITDEHLVLLFVLLRANPSRRPASGSSFSFFAMSGKRTKVDPPDKKTKRQCSDVGQRKARNKNTECSIVKCSLKSFCQKSASVLPWDSVLKDTNKAVAEAYILANLRVVRLCEAGRPIPALDQEFYYQCLSAVSVGLTARKKVDDEDLRQSVELYKSWRDPNVSFASSAHISYGWFQNASSQMATNASNHVVVNFYRRIQKYVKQRVGITGKERYELLRDVLAPTYAGSDERVLGFRRWIPRNAEGYIDKEKPHLILPVTYRFLQFIEQENYRKREGPRYEQLRSFSLLPMKRGFECSHFKMCKLGLYALLRRAGIQIPEIKRKEGQPCWNDVVDEWWHRLFKITKCETENRKFAGEISTDGKAVSIVLRKPKLPEPEKSPSLKKDPKQYNFGEVWGLDPGRRDLFVATNNFGETIACSTREFYEDAKYTSSNMTTRYWIDHNPKILEAIRNMPSPKTCSLQKLEAYVRFLSPRLDRLLDFRMAKPFRKLKFRRYIFMKNKLRELCAKLTARAGANTLIGFGDWSATDYGGFIKKCPTGPVKKLEKELKRYCIVDSVPEFRTSKLHADCRRELTYQYALRTCKDGIVRRVKVYSVLHYPHNGCFGMTVNRDQNASKNILLLTLPHFLGQDRHPACCRQGT

SEQ ID NO: 627 - protein, 605 aa, unidentified
MSCKRKKKADVPGKAKRQRPDVRERIKRNKTTEISVVKCSLNSFCNESARALPWESVLKDMNKAVKEAFILANIRVLHLCNVNRPIPPLDQVFYYNCLSAVSVDLRARRKIDDADLRQSVELYKSWLDSAVQYSSSAYISSGWFENASLQMATNASNHIVVNFYRRFQKYVKQRFGITGKDRYELLRDVLAPNYEDNNQLVTELRGWIPRNEDGFIDKANPHLMLPVMYRFLQFIEAENDSHHDDLEFQQLRTFSLLPLKRGFECSHFKMCKLGLHALLQRAGISIPPLQAKDGLVWNDVVNEWWYKLFKIAKFETEYRKFAGEILTDGKAVSIVLRKPKRPLQEKQTKKDSKTYNFSEVWGLDPGRRDLFVATNNFGQTISCSSREFYEEAKYKSSNKTTHYWIEHDPKILEAIRNMPSPKTCSLQILEMYVRFLIPRIDLLLDFRMAKPFRKLKFRRYIFMKKKLRELCQKLTARAGRNTLIGFGDWSATDYGGLIKKCPGGPVRKLEKELKHYCTVDSIPEFRTSKLHADCHRELTYQFALRKCKDEVVRLVKIYSVLHCRHNGCFGMTVNRDQNASKNILLLTLPHFFGQDRHPAFCRQRS

SEQ ID NO: 628 - protein, 690 aa, unidentified
  source 1..690: note = Cryptophycea
MSNIRIVKRKAKGFFKCEDLVTIKDAVKAAHRIMSDASILVRSYYLRWFQSSYPLDSDDKELELEHFHISMACSIVQGITRPPVRGVGPEQSVKIDVFNDMLDEYKRLYERAPNDKENETDLSLSHVLAYSIDNLLTAYKNNIEAHFSKYVKRFIRCDMLAKGFNKSEANRVAAIYTNAYIYDSSLDLEPDFMERLGLEATSYSSLFPSKINKGGFPRVYDLKANPWVYLPKMVMINQALETDFSSVEHKERRLLNPLPFYSSFVPMHIRIDTSGLSQLLMTKDRLDDFKRSYLAEFGVSLNIKNKGDMLASFEKIFGRKATSNREAGLYATEMWSFLTNLKTCRQWKELDGVVRKNDPKGTQWMFDNAVVTDGVSISFQVIDNSMFGRKAFSGRKKRVACQEANDEEDSKQVTREELKTSKLLGCDPGKRDILAITDGIKTICYTKGQRDMDTHKTIRLRTSLKRRRGCGLEEYETQVMNRFQKRSCHPEMFRRYACSRKRMEHMLLECYSHPVFREFKFLVYNKTKSSEHRFMHRVLETFKRPQTNLSKARCASGVMRMNALKEVQRHGDIIIGWGNWGKNPNALRCSAGPTPGIGIRRRFESLFKTTTVPEHYTSQECPSCKGRCLRKATGNPIMRHHLLRCTNDSCCSRWWNRNVAGAFNILTRLLDGQTLSGNETTGDGLGGDDL

SEQ ID NO: 629 - DNA, 2073 bp, unidentified
  source 1..2073: mol_type = other DNA; note = guillardia
atgtcaaacattaggattgtaaaacgaaaggcgaagggcttcttcaagtgtgaggacctagtcacaatcaaggatgctgtcaaggcagctcataggatcatgtcagatgcgtccatactcgtccggtcatattatctgcgatggttccagagctcatatccccttgattcagatgacaaggaacttgagcttgagcacttccatatatccatggcctgcagcatagtccagggtataacaaggcctccagtccgtggtgttggtcctgaacaatctgtcaagatagacgtcttcaatgacatgttagatgagtataagaggctgtacgagcgtgctccaaatgataaagagaacgaaacggacctctctctatcgcatgtcttagcatattccatcgacaaccttcttaccgcgtataaaaacaacatcgaagcccatttctcaaaatatgtcaaacgcttcatccgatgtgatatgttggctaagggcttcaataagtctgaggcaaacagagtggcggcaatatataccaatgcctatatttatgactcatccctcgacctggaaccagactttatggaaagattaggccttgaggcaacaagttattcatctctattcccctctaagataaataagggcggttttccaagggtctatgacctgaaggccaacccttgggtctatcttccaaagatggtcatgataaatcaggccttagagacagacttctcttctgtagagcataaggagaggaggctgctcaatccactgcccttctattcatcgtttgttccgatgcacatacggattgatacatccggcttatcgcagctgctgatgactaaggataggcttgatgatttcaagagatcttatcttgctgagtttggagtaagtctaaatataaagaacaagggtgatatgctagcaagttttgagaagatctttggccggaaggcaacatccaatagagaggccggattgtatgcaacagagatgtggagcttcttgacaaacctgaagacatgccgtcaatggaaggagcttgatggggttgttcgtaagaacgatcccaagggaacacaatggatgtttgacaatgctgttgtaacggacggtgtttcaatctcattccaggtgatcgataacagcatgtttggacggaaggccttctctggcaggaagaagagggtagcatgtcaggaggccaatgatgaagaagatagcaagcaggtaacaagagaagagctaaagacatcgaagctcttgggatgtgaccctgggaagagagacatcctagcaataacagatggcataaagactatctgttacaccaaggggcagagagacatggacacgcataagacaataaggttgagaaccagtctgaagaggcgccgaggctgcggcctagaggagtatgagacacaggtgatgaaccggttccagaaacggtcatgccatcctgagatgtttcgacgctatgcctgttccaggaagaggatggaacacatgctgcttgaatgttattctcatccagtctttagagagttcaaattcttggtttacaacaagactaagagctccgaacataggttcatgcatagggtgttggaaacattcaaacggccgcaaacaaacctgagcaaggcgaggtgtgcgtcaggagttatgcgtatgaatgccttgaaggaggtccaaaggcatggagatatcattatagggtggggcaactggggaaagaatccaaacgcgctacgatgctcggcaggaccaaccccaggcattggaataaggagaaggtttgaatcgctgttcaaaacaacaacagtgccagaacactacacctcccaagaatgtccgagttgtaagggacgatgcctaagaaaggcaactggcaacccgatcatgagacaccatctgcttcgttgtacaaacgatagttgctgtagcaggtggtggaatcggaatgtagccggggcgttcaacatcctaacaaggctgttggatggacaaacactatccggtaacgaaactaccggagacgggttaggaggtgacgacctctaa

SEQ ID NO: 630 - RNA, 153 nt, synthetic construct
  source 1..153: mol_type = other RNA
cactatccggtaacgaaactaccggagacgggttaggaggtgacgacctctaaaacctagaacttagagtgcaaaaacgccattacgattgtgatgcctattcaagggtgtcccaagtgtaaaaagaaagcactctaagagcattaaactcta

SEQ ID NO: 631 - DNA, 1437 bp, Mercenaria sp.
  source 1..1437: mol_type = other DNA
atgaagagaaaacgagaacagatgactttgtggaaagccgcgttcgtcaatggacgggaaacgttcaagtcatggattgacaaggcacgaatgctggaattgaactgtgacatctcttctgcaagctcgacacattactcggatctggatttgaaaagcaagtgtgctaagatagaagacaagtttatgtgtacattttctgtcggcattcgacctacttctaagcaaaaccgaactttgaaccagatgctgaaagtgagcaactacgcctacaattggtgtaatcacctagttaaggagaaagacttcaaacctaagcagttcgacttgcaaagagtggttactaaaacgaattcgcacgacgttccggccgagtacagacttcccggagacgactggtttttcgacaacaagatgtcttctatcaagttgaccgcctgtaagaacttttgcaccatgtacaagtctgctcgaaccaatcagaagaaaacaaaggtcgatctcagaaacaaagacactgctttgttacgcgaaggatcgttcgaagtgcagagacaatacgtgaggttgctaacggaaaaagacataccagacgaacgaattcggcaatcgagaatagccttaatggcagacaacttttcgaaatccaagaaggactggaaagaaaggtttctccgactttcgaaaaatgtgtctaagatacctcctttaaatcacgacatgaaagtgtgcaaacgtccgaacggaaaattcatactgcaaattccatgcgatccaatatgtacgcgacagatacaagtgcacacctcggactcgatatgttccatcgatcctggaggcaggacgttcgcgacgtgctacgatcctagcaatataaagacatttcaaatcggacctgaggcagacaagaaggaaatcattcacaaattccacaacaagatcgataatgttcaccgtctcttgtcatatgctcaaaagaaaaagcagacgcaagcagtgcaagacagaatcggacagctgaagaagctgcacttgaaactgaaaacgtacgtcgatgacgtgcacttgaaactgtgctcgtacctggtcaagaattacaaactggtcgttcttggcaggatatcggtttcgtccatcgtgagaaaagacagaccgaaccatttggccaaaaaaggcaacagggacttgctgtgttggcaacatttcagattcagacagagactgttacatagagttcgtggcacggactgcgaagcgatcgctcaagacgaacggtacacttcaaagacatgtggtaactgtggagtgcaaaacaacaaactgggtggaaatgaaacgtttcattgtaaaagttgcaactacaaaactcacagggacgtcaacggagcgagaaacattctttgcaaatacttgggacattttccatttgctacataa

SEQ ID NO: 632 - RNA, 109 nt, synthetic construct
  source 1..109: mol_type = other RNA
ttagggctcgattctttgccttctcgatgcatttattgccacagattttgctaatgcagtttctgaggcaagaatgtgttcgggtaaaaagagttaatgggcaaactat

SEQ ID NO: 633 - DNA, 1437 bp, Mercenaria sp.
  source 1..1437: mol_type = other DNA
atgaagagaaaacgagaacagatgactttgtggaaagccgcgtttgtcaacgggcaggaaacgttcaagtcctggattgacaaggcacgaatgctggaattgaactgtgacgtctcttctgcaagctcgacacattactctgatctgaacttgaagacaaagtgtgccaagacagacgacaaatttatgtgtaattattctgtctgcatacgaccgacttctaagcagaagcgaacgttgaaccagatgctcaaggtgagcaactatgcttacaattggtgcaattacctagttaaggagaaagacttcaaaccgaagcagttcgacttgcaaagaattgtcgctaaaacgaattcaacagacgttccggccgaatacaggcttccaggagacgactggtttttcgacaacaagatgtcctctatcaagttgaccgcctgtaagaacttttgcaccatgtacaagtctactcaaaccaaccagaagaaaacaaaggtcgatctcagaaacaaagacattgttcagttacgcgaaggatcgtttgaagttcaaagcaagtacgtgagattgctaacggaaaaagacataccaggcgaacgaattcggcaatcgagaattgctttgatgccagacagtttttcgaaatcaaagaaggactggaaagaaaggtttctcaggctttcgaaaaatgtatctaagataccacctttgagtcacgacatgaaggtatgcaaacgtccgaatgggaaattcatactgcagatttcatgcgatccaatatgtactcgacagatacaagtgcaaacttcagattcgatatgttcaatcgatccgggaggcaggacttttgcgacatgctatgatcctagcaatataaagacatttcagatcggacccgaggcagacaaaaaggaaatcattcacgaatttcacaacaagatcgattatgttcaccgtctcttgtcgcatgctcaggagaaaaagcagacgcaagcggtgcaagacagaatcggacaactgaagaagctgcacctcaaactgaaaacgtacgtcgacgacgtgcacttgaaattgtgctcgtacctggtcaagaactacaaactggtcgttctcggcaagatatcggtttcgtccatcgtgagaaaagacaggccgaaccatcttgccaaaagcgctaacagggacttgctctgttggcagcactacagattcagacagagattgttacacagagtccgtggcacggactgcgaagtgatcatacaagacgaacgttacacttccaagacctgtggtaattgcggtgagaagaacaacaaactcggtggaaaggaaacgtttacttgtgaaagttgcaattacaaaactcatcgagacgtcaacggagcgagaaacattctgtgcaaatacttgggactttttccatttgcagcgtaa

SEQ ID NO: 634 - RNA, 113 nt, synthetic construct
  source 1..113: mol_type = other RNA
ttcgggttcgattctatccccagggctcgaatgcatttttgtcacagattttgccaatgcaagatctgggggcaagaatgtctccgggtgaaaagagtcaggctggaaagatt

SEQ ID NO: 635 - DNA, 1495 bp, synthetic construct
  source 1..1495: mol_type = other DNA
atctcaacgaatgaagagaagtagagaggatgaacctactcatcctcctactaatccatctcttgcacacggcatcattccattctgggatgagtactcacaacaagtatcggatgaactttgggcatgttcaagagattcctttcatgagtttaatcagtacaacaacaagggatgcactgacagatggttcaaattttctcaattcactgtgattgaatcaaagccagtgtttgatgttccactcaatgttcattactctataacagaaaatgtggcttttgataactctaaaaagccacctcagctcaagaaggcaaagaagaatcaaaagacgccccaaaaatttcaagcagacaaatcattgaaaattcgtctctaccccaatgaacaagaaaggacaacattgaatcagtggatgggaactgctcgttggatctacaacaagtgtttagaattcaccaacaaatccaaaggtgtcaagaaaaataagaagaatttcagaacgtttgtggtgaacaacgataattatcagacagaaaatcagtgggttgtaaatactccttatgacgtaagagatgctgccgctaatgaattgttgactgcatttaaaacaaattttgaaaagaagaaagctggaatgattgacaagttcatgatccgtttcaggcgaaagaaagacagaaaagatcatttcgttctacattgcaagcactggaagaaaaagactggactgtattcttttataaggaacatcaagagtgccaaacctttgcctgaggagcttcagtacgattccatcattattaagaacaagttgaaccattattatttatgtattccacaagtactggacattaggggtgagaaccaagcccctcaacattcaggacaagttgtagcattggatccaggagtaagaacatttcagaccacctttgatttgaatggttattcaaccaaatggggctcaggaggtgccgaaagaattggtagattgtgttgcgcgtatgacaagttgcaatcgaagtggtctcaaccagaagtcagacattgcaaaagatacaagtacaagagagcaggaagaagaattcaacaaaagattagaaatattgtggatgatcttctcaagaaactgtgtttgtggctgtgtcgaaactaccaagtgattttacttccttcgtttgagactcagaaaatggtaaagaaactccataggagaattaatagcaagacagcaagaaaaatgttgacttggtcacattacagattcaagcaaagattgcttcacaaagctagagagcatccgtggacacacatttatattgtcaacgaagcgtatacatccaaaacttgctcatgttgtggacatgtttatacggttggatcatctgaagtgtttcgttgtccatcatgtggctcaatttttgacagagatatcaatggagcaagaaatattcttcttcgattccttactactcatagaattagtttt

SEQ ID NO: 636 - protein, 495 aa, synthetic construct
MKRSREDEPTHPPTNPSLAHGIIPFWDEYSQQVSDELWACSRDSFHEFNQYNNKGCTDRWFKFSQFTVIESKPVFDVPLNVHYSITENVAFDNSKKPPQLKKAKKNQKTPQKFQADKSLKIRLYPNEQERTTLNQWMGTARWIYNKCLEFTNKSKGVKKNKKNFRTFVVNNDNYQTENQWVVNTPYDVRDAAANELLTAFKTNFEKKKAGMIDKFMIRFRRKKDRKDHFVLHCKHWKKKTGLYSFIRNIKSAKPLPEELQYDSIIIKNKLNHYYLCIPQVLDIRGENQAPQHSGQVVALDPGVRTFQTTFDLNGYSTKWGSGGAERIGRLCCAYDKLQSKWSQPEVRHCKRYKYKRAGRRIQQKIRNIVDDLLKKLCLWLCRNYQVILLPSFETQKMVKKLHRRINSKTARKMLTWSHYRFKQRLLHKAREHPWTHIYIVNEAYTSKTCSCCGHVYTVGSSEVFRCPSCGSIFDRDINGARNILLRFLTTHRISF

SEQ ID NO: 637 - DNA, 1446 bp, synthetic construct
  source 1..1446: mol_type = other DNA
agagaagtagagaggatgaacctactcatcctcctactaatccatctcttgcacacggcatcattccattcatgggcatgttcaagagattcctttcatgagtttaatcagtacaacaacaagggatgcactgacggatggttcaacttttctcaattcactgtgattgaatcccagccagtatttgatgttccactcaatgttcatcactctataacagagaatgtggcttttgataactctaaaaagccacctcagctcaagaaggcaaagaagggtcagaagactccccaaaaatttcaagcggacaaatcaatgaaaattcgtctctaccccaatgaacaagaaaggacaacattgaatcagtggatgggaactgctcgttggatctacaacaagtgtttagaattcaccaacaaatccaaaggtgtcaagaaaaataagaagaatttcagaacgtttgtggtgaacaacgataattatcagacagaaaatcagtgggttgtaaatactccttatgacgtaagagatgctgccgctattgaattgttaactgcgttcaacactaattttgaaaagaagaaggctggaacgattgacaagttcatgatccgtttcaggcgaaagaaagacagaaaagatcatttcgttctgcgttgcaagcactggaagaaaaagagtggaatgtattcttttataaggaacatcaagagcgccgaacctttgcctgaggagcttcagtatgattccatcattattaagaacaagttgaaccattattatttatgtattccacaagtactggatattaggggtgagaaccaagcccctcaacattcaggacaagttgtagcattggatccaggagtaagaacatttcagaccacctttgatttgaatggttattcaaccaaatggggctcaggaggtgccgaaagaattggtagattgtgttgcgcgtatgacaagttacaatcgaagtggtctcaaccagaagtcagacattgcaaaagatacaagtacaagagagcaggaagaagaattcaacaaaagattagaaatattgtggatgatttacacaagaaactgtgtttgtggctgtgtcgaaactaccaagtgatcttacttccttcgtttgagactcagaaaatggtaaagaaactccacaggagaattaatagcaagacagcaagaaaaatgttgacttggtcacattacagattcaagcaaagattgcttcacaaagctagagagcatccgtggacacacatttatattgtcaacgaagcgtatacatccaaaacttgctcatgttgtggacatgtttatacggttggatcatcggaagtgtttcgttgtccatcatgtggctcaatttttgacagagatatcaatggagccagaaatattcttcttcgattccttactactcatagaattagtttt

SEQ ID NO: 638 - protein, 477 aa, synthetic construct
MNLLILLLIHLLHTASFHSWACSRDSFHEFNQYNNKGCTDGWFNFSQFTVIESQPVFDVPLNVHHSITENVAFDNSKKPPQLKKAKKGQKTPQKFQADKSMKIRLYPNEQERTTLNQWMGTARWIYNKCLEFTNKSKGVKKNKKNFRTFVVNNDNYQTENQWVVNTPYDVRDAAAIELLTAFNTNFEKKKAGTIDKFMIRFRRKKDRKDHFVLRCKHWKKKSGMYSFIRNIKSAEPLPEELQYDSIIIKNKLNHYYLCIPQVLDIRGENQAPQHSGQVVALDPGVRTFQTTFDLNGYSTKWGSGGAERIGRLCCAYDKLQSKWSQPEVRHCKRYKYKRAGRRIQQKIRNIVDDLHKKLCLWLCRNYQVILLPSFETQKMVKKLHRRINSKTARKMLTWSHYRFKQRLLHKAREHPWTHIYIVNEAYTSKTCSCCGHVYTVGSSEVFRCPSCGSIFDRDINGARNILLRFLTTHRISF

SEQ ID NO: 639 - DNA, 1494 bp, synthetic construct
  source 1..1494: mol_type = other DNA
tctcaacgaatgaagagaagtagagaggatgaacctactcatcctcctactaatccatctcttgcacacggcatcattccattctggaatgagtactcacaacaagtatcggataaactttgggcatgttcaagagattcctttcatgagtttaatcagtacaacaacaagggatgcacagacggatggttcaacttttctcaattcactgtgattgaatccaagccagtgtttgatgttccactcaatgtccatcactctataacagagaatgtggcttttgataactctaaaaagccacctcagctcaagaaagcaaaaaagaatcaaaagacgccccaaaaattgcaagcagacaaatcattgaaaatccgactctaccccaatgaacaagaaaggacaacattgaatcagtggatgggaactgctcgttggatctacaacaagtgcttagaatttacacacaatttcaaagatgtcaagaaaaataagaagaatttcagaacgtttgtggtgaataacgataattatcagacagaaaatcagtgggttgtgaatactccttatgacgtaagagacgctgccgctattgaattgttgactgcgttcaacactaattttgaaaagaagaaggctggaatgattgacaagttcatgatccgtttcaggcgaaagaaagacagaaaagatcattttgttctacattgcaagcactggaagaaaaagagtggactgtattcttttataaggaatatcaagagtgccgaacctttgcctgaggagcttcagtatgattccatcattattaagaacaagctgaaccattattatttatgtattccacaagtactggatattaggggtgagaaccaagcccctcaacattcaggacaagttgtagcattggatccaggagttagaacatttcagaccacctttgatttgaacggttattcaaccaaatggggctcaggaggtgccgaaagaattggtagattgtgttgcgcgtatgacaagttacaatcgaagtggtctcaaccagaagtcagacattgcaaaagatacaagtacaagagagcaggaagaagaattcaacaaaagattagaaatattgtggatgatttacacaagaaactgtgtttgtggttgtgtcgaaactaccaagtgatcttacttccttcgtttgagactcagaaaatggtaaagaaactccataggagaattaatagcaagacagcaagaaaaatgttgacttggtcacattacagattcaagcaaagattgcttcacaaagctagagagcatccgtggacacacatttatattgtcaacgaagcgtacacatccaaaacttgctcatgttgtggacatgtttatacggttggatcatctgaagtgtttcgttgtccatcatgtggctcaatttttgacagagatatcaatggagccagaaatattcttcttcgattccttactactcatggaattagtttt

SEQ ID NO: 640 - protein, 495 aa, synthetic construct
MKRSREDEPTHPPTNPSLAHGIIPFWNEYSQQVSDKLWACSRDSFHEFNQYNNKGCTDGWFNFSQFTVIESKPVFDVPLNVHHSITENVAFDNSKKPPQLKKAKKNQKTPQKLQADKSLKIRLYPNEQERTTLNQWMGTARWIYNKCLEFTHNFKDVKKNKKNFRTFVVNNDNYQTENQWVVNTPYDVRDAAAIELLTAFNTNFEKKKAGMIDKFMIRFRRKKDRKDHFVLHCKHWKKKSGLYSFIRNIKSAEPLPEELQYDSIIIKNKLNHYYLCIPQVLDIRGENQAPQHSGQVVALDPGVRTFQTTFDLNGYSTKWGSGGAERIGRLCCAYDKLQSKWSQPEVRHCKRYKYKRAGRRIQQKIRNIVDDLHKKLCLWLCRNYQVILLPSFETQKMVKKLHRRINSKTARKMLTWSHYRFKQRLLHKAREHPWTHIYIVNEAYTSKTCSCCGHVYTVGSSEVFRCPSCGSIFDRDINGARNILLRFLTTHGISF

SEQ ID NO: 641 - DNA, 1494 bp, synthetic construct
  source 1..1494: mol_type = other DNA
tctcaacgaatgaagagaagtagagaggatgaacccactcatcctcctactaatccatctcttgcacacggcatcattccattctgggatgagtactcacaacaagtatcggataaactttgggcatgttcaagagattcctttcatgagtttaatcagtacaacaacaagggatgcactgacggatggttcaacttttctcaattcactgtgattgaatccaagccagtgtttgatgttccactcagtgtccatcactctataacagagaatgtggcttttgataactctaaaaagccacctcagctcaagaaagcaaaaaagaatcaaaaggtggcccaaaaatttcaagcagacaaatccttgaaaatccgactctaccccaaagaacaagaaaggacaacattgaatcagtggatgggaactgctcgttggatctacaacaagtgtttagaatttacacacaacttcaaaggtgtcaagaaaaataagaagaatttccgaacggttgtggtgaacaatgataattatcagacagaaaatcagtgggttgtaaatactccttatgacgtaagagatgctgctgctattgaattgttgactgcgtttaaaacaaactttgaaaagaagaaagctggaacaattgacaagttcatgatccgtttaaggcgaaagaaagacagaaaagatcatttcgttctacattgcaagcactggaagaaaaagaatggactgtattcttttataaggaacatcaagagtgccgaacctttgcttgaggagcttcagtacgattccatcattattaagaacaagttgaaccgttattatttatgtattccacaagtactggaaattaggggtgagaaccaagcccctcaacattcaggacaagttgtagcgttggatccaggagtaagaacatttcagaccacctttgatttgaatggttattcaaccaaatggggctcaggaggtgccgaaagaattggtagattgtgttgcgcgtatgataagttacaatcgaagtggtctcaaccagaagtcagacattgcaaaagatacaagtacaagagagcaggaagaagaattcaacaaaagattagaaatattgtggatgatctacacaagaaactgtgtttgtggttgtgtcgaaactaccaagtgatcttacttccttcgtttgagactcagaaaatggtaaagaaactccataggagaattaatagcaagacagcaagaaaaatgttgacttggtcacattacagattcaagcaaagattgcttcacaaagctagagagcatccgtggacacacatttatattgtcaacgaagcgtacacatccaaaacttgctcatgttgtggacatgtttatacggttggattatctgaagtgtttcgttgtccatcatgtggctcaatttttgacagagatatcaatggagcaagaaatattcttcttcgattccttactactcatagaattagcttt

SEQ ID NO: 642 - protein, 495 aa, synthetic construct
MKRSREDEPTHPPTNPSLAHGIIPFWDEYSQQVSDKLWACSRDSFHEFNQYNNKGCTDGWFNFSQFTVIESKPVFDVPLSVHHSITENVAFDNSKKPPQLKKAKKNQKVAQKFQADKSLKIRLYPKEQERTTLNQWMGTARWIYNKCLEFTHNFKGVKKNKKNFRTVVVNNDNYQTENQWVVNTPYDVRDAAAIELLTAFKTNFEKKKAGTIDKFMIRLRRKKDRKDHFVLHCKHWKKKNGLYSFIRNIKSAEPLLEELQYDSIIIKNKLNRYYLCIPQVLEIRGENQAPQHSGQVVALDPGVRTFQTTFDLNGYSTKWGSGGAERIGRLCCAYDKLQSKWSQPEVRHCKRYKYKRAGRRIQQKIRNIVDDLHKKLCLWLCRNYQVILLPSFETQKMVKKLHRRINSKTARKMLTWSHYRFKQRLLHKAREHPWTHIYIVNEAYTSKTCSCCGHVYTVGLSEVFRCPSCGSIFDRDINGARNILLRFLTTHRISF

SEQ ID NO: 643 - DNA, 1494 bp, synthetic construct
  source 1..1494: mol_type = other DNA
tctcaaacaatgaagagaagtagagaggatgagcccactcatcctcctactaatccatctcttgcacacggcatcattccattctgggatgagtactcacaacaagtatcggataaactttgggcatgttcaagagattcctttcatgagtttaatcagtacaacaacaagggatgcacagacggatggttcaacttttctcaattcactgtgattgaatccaagccagtgtttgatgttccactcaatgtccatcactctataacagagaatgtggcttttgataactctaaaaagccacctcagctcaagaaagcaaaaaagaatcaaaaggtggcccaaaaatttcaagcagacaaatccttgaaaatccgactctaccccaatgaacaagaaaggacaacattgaatcagtggatgggaactgctcgttggatctataacaagtgtttagaattcactaacaaatccaaaggtgtcaagaaaaataagaagaatttcagaacgtttgtggtgaacaacgataattatcagacagaaaatcagtgggttgtgaatactccttatgacgtaagagatgctgccgctattgaattgttgactgcgttcaacactaattttgaaaagaagaaggctggaacgattgacaagttcatgatccgttttaggcgaaagaaagacagaaaagatcatttcgttctacattgcaagcactggaagaaaaagagtggactgtattcttttataaggaacatcaagagttccgaacctttgcctgaggagcttcagtacgattccatcattattaagaacaagttgaaccattattatttatgtattccacaagtactggatattaggggtgagaaccaagcccctcaacattcaggacaagttgtagcattggatccaggagtaagaacatttcagaccacctttgatttgaatggttattcaaccaaatggggctcaggaggtgccgaaagaattggtagattgtgttgcgcgtatgacaagttacaatcgaagtggtctcaaccagaagtcagacattgcaaaagatacaagtacaagagagcaggaagaagaattcaacaaaagattagaaatattgtggatgatttacacaagaaactgtgtttgtggttgtgtcgaaactaccaagtgattttacttccttcgtttgagactcagaaaatggtaaagaaactccacaggagaattaatagcaagacagcaagaaaaatgttgacttggtcacattacagattcaagcaaagattgcttcacaaagctagagagcatccgtggacacacatttatattgtcaacgaagcgtatacatccaaaacttgctcatgttgtggacatatttatacggttggatcatccgaagtgtttcgttgtccatcatgtggctcaatttttgacagagatatcaatgcagcaagaaatattcttcttcgattccttactactcatagaattagtttt

SEQ ID NO: 644 - protein, 495 aa, synthetic construct
MKRSREDEPTHPPTNPSLAHGIIPFWDEYSQQVSDKLWACSRDSFHEFNQYNNKGCTDGWFNFSQFTVIESKPVFDVPLNVHHSITENVAFDNSKKPPQLKKAKKNQKVAQKFQADKSLKIRLYPNEQERTTLNQWMGTARWIYNKCLEFTNKSKGVKKNKKNFRTFVVNNDNYQTENQWVVNTPYDVRDAAAIELLTAFNTNFEKKKAGTIDKFMIRFRRKKDRKDHFVLHCKHWKKKSGLYSFIRNIKSSEPLPEELQYDSIIIKNKLNHYYLCIPQVLDIRGENQAPQHSGQVVALDPGVRTFQTTFDLNGYSTKWGSGGAERIGRLCCAYDKLQSKWSQPEVRHCKRYKYKRAGRRIQQKIRNIVDDLHKKLCLWLCRNYQVILLPSFETQKMVKKLHRRINSKTARKMLTWSHYRFKQRLLHKAREHPWTHIYIVNEAYTSKTCSCCGHIYTVGSSEVFRCPSCGSIFDRDINAARNILLRFLTTHRISF

SEQ ID NO: 645 - DNA, 1164 bp, synthetic construct
  source 1..1164: mol_type = other DNA
tctcaaacaatgaagagaagtagagaggatgaacctactcatcctcctactaatccatctcttgcacacggcatcattccattctgggatgagtactcacaacaagtatcggatgaactttgggcatgttcaagagattcctttcatgagtttaatcagtacaacaacaagggatgcactgacggatggttcaacttttctcaattcactgtgattgaatccaagccagtgtttgatgttccactcaatgttcaccactccataacagagaatgtggcttttgataactctaaaaagccacctcagctcaagaaagcaaaaaagaatcaaaaggtggcccaaaaatttcaagcagacaaatccttgaaaatccgactctaccccaatgaacaagaaaggacaacattgaatcagtggatgggaactgctcgttggatctacaacaagtgcttagaatttacacacaacttcaaagatgtcaagaaaaacaagaagaatttcagaacgtttgtggtgaacaacgataattatcagacagaaaatcagtgggttgtgaatactccttatgacgtaagagatgctgccgctattgaattgttgactgcgttcaacactaattttgaaaagaagaaggctggaatgattgacaagttcatgatccgtttcaggcgaaagaaagacagaaaagatcattttgttctccactgcaagcactggaagaaaaagagtggactgtattcttttataaggaacatcaagagtgccgaacctttgcctgaggagcttcagtacgattccatcattattaagaacaagttgaaccattattatttatgtatcccacaagtactggatattaggggtgagaaccaagcccctcaacattcaggacaagttgtagcattggatccaggagtaagaacatttcagaccacctttgatttgaatggttattcaaccaaatggggctcaggaggtgccgaaagaattggtagattgtgttgcgcgtatgataagttgcaatcgaagtggtctcaaccagaagtcagacattgcaaaagatacaagtacaagagagcaggaagaagaattcaacaaaagattagaaatattgtggatgatcttcacaagaactgtgtttgtggctgtgtcgaaactaccaag

SEQ ID NO: 646 - protein, 385 aa, synthetic construct
MKRSREDEPTHPPTNPSLAHGIIPFWDEYSQQVSDELWACSRDSFHEFNQYNNKGCTDGWFNFSQFTVIESKPVFDVPLNVHHSITENVAFDNSKKPPQLKKAKKNQKVAQKFQADKSLKIRLYPNEQERTTLNQWMGTARWIYNKCLEFTHNFKDVKKNKKNFRTFVVNNDNYQTENQWVVNTPYDVRDAAAIELLTAFNTNFEKKKAGMIDKFMIRFRRKKDRKDHFVLHCKHWKKKSGLYSFIRNIKSAEPLPEELQYDSIIIKNKLNHYYLCIPQVLDIRGENQAPQHSGQVVALDPGVRTFQTTFDLNGYSTKWGSGGAERIGRLCCAYDKLQSKWSQPEVRHCKRYKYKRAGRRIQQKIRNIVDDLHKNCVCGCVETTK

SEQ ID NO: 647 - DNA, 990 bp, synthetic construct
  source 1..990: mol_type = other DNA
tctcaaacaatgaagagaagtagagaggatgaacctactcatcctcctactaatccatctcttgcacacggcatcattccattctgggatgagtactcacaacaagtatcggatgaactttgggcatgttcaagagattcctttcatgagtttaatcagtacaacaacaagggatgcactgacggatggttcaacttttctcaattcactgtgattgaatccaagccagtgtttgatgttccactcaatgttcatcactctataacagagaatgtggcttttgataactctaaaaagccacctcagctcaagaaagcaaaaaagaatcaaaaggtggcccaaaaatttcaagcagacaaatccttgaaaatccgactctaccccaatgaacaagaaaggacaacattgaatcagtggatgggaactgctcgttggatctacaacaagtgtttagaattcaccaacaaatccaaaggtgtcaagaaaaataagaagaatttcagaacgtttgtgaacaacgataattatcagacagaaaatcagtgggttgtgaatactccttatgacgtaagagatgctgccgctattgaattgttgactgcgttcaaaacgaacttcgaaaagaagaaggctggaacgattgacaagttcatgatccgttttaggcgaaagaaagacagaaaagatcattttgttctccactgcaagcactggaagaaaaagaacggactgtattcttttattaggaacatcaagagtgccgaacctttgcctgtggagcttcagtacgattccatcattattaagaacaagttgaaccattattatttatgtattccacaagtactggatattaggggtgagaaccaagcccctcaacattcaggacaagttgtagcattggatccaggagtaagaacatttcagaccacctttgatttgaatggttattcaaccaaaatggggctcaggaggtgccgaaagaattgg

SEQ ID NO: 648 - protein, 327 aa, synthetic construct
MKRSREDEPTHPPTNPSLAHGIIPFWDEYSQQVSDELWACSRDSFHEFNQYNNKGCTDGWFNFSQFTVIESKPVFDVPLNVHHSITENVAFDNSKKPPQLKKAKKNQKVAQKFQADKSLKIRLYPNEQERTTLNQWMGTARWIYNKCLEFTNKSKGVKKNKKNFRTFVNNDNYQTENQWVVNTPYDVRDAAAIELLTAFKTNFEKKKAGTIDKFMIRFRRKKDRKDHFVLHCKHWKKKNGLYSFIRNIKSAEPLPVELQYDSIIIKNKLNHYYLCIPQVLDIRGENQAPQHSGQVVALDPGVRTFQTTFDLNGYSTKMGLRRCRKNW

SEQ ID NO: 649 - protein, 214 aa, synthetic construct
NTLSFILEEFKSDEEVIQSFCKYKTLLRNENVLETAEALFNELNSIDLTHIFISHKKLETISSALCDHWDTLRNALYERRISELTGKITKSAKEKVQRSLKHEDINLQEIISAAGKELSEAFKQKTSEILSHAHAALDQPLPTTLKKQEEKEILKSQLDSLLGLYHLLDWFAVDESNEVDPEFSARLTGIKLEMEPSLSFYNKARNYATKKPYS

SEQ ID NO: 650 - protein, 222 aa, synthetic construct
NLRNIPRFFGESKKEQFNKFINKSLPTIDVGLKILEDIRNALETVSVRKPPSITEEYVTKQLEKLSRKYKINAFNSNRFKQITEQVLRKYNNGELPKISEVFYRYPRESHVAIRILPVKISNPRKDISYLLDKYQISPDWKNSNPGEVVDLIEIYKLTLGWLLSCNKDFSMDFSSYDLKLFPEAASLIKNFGSCLSGYYLSKMIFNCITSEIKGMITLYTRD

SEQ ID NO: 651 - protein, 177 aa, synthetic construct
PVVERRENEVDWWNTINEVKKLIDAKRDMGRVFWSGVTAEKRNTILEGYNYLPNENDHKKREGSLENPKKPAKRQFGDLLLYLEKKYAGDWGKVFDEAWERIDKKIAGLTSHIEREEARNAEDAQSKAVLTDWLRAKASFVLERLKEMDEKEFYACEIQLQKWYGDLRGNPFAVEAE

SEQ ID NO: 652 - DNA, 4145 bp, Spizellomyces punctatus
  source 1..4145: mol_type = unassigned DNA; note = fz 1179..3092
aatgaacatggatgggctttttgtaaaaactcactcatgtcatccttcatatccatctttgtattctcttccccaaattgcatcatggttttctgtaattgtcctaaatcggtagccttgtttgatgccgccatgacacgggtagccgaactcattgccttggctgtggctgcttgtgaggccatcgtctaccaagtaatctatcagcatctatgcaaaaaagatcggcacatttctcatcttgcttacagtcgctttgactcggagtcctccaacctgggcattgacacgggtgtttttttcaatgtgctttcgaagctggaggagttgttttgctagggtttttgcttcggctgttcgcccttgttttgcagcctttttgatgtccgcgatctgttatggtgaatgcagcgtgagaaacgttgctggaaagatagtttccaacactctctagcctcccatcgataaccaccgtttgcagcagttacggtaatacatctcccacccctcgttttgctatgtgccgaaaaatactcacaatctgcttctcttggcgctccaatccgctacgatctttccccagctctcgctgaatggtccgtacttcgcgactggttgcccgtacctgatctatttccagtcagcatataagtattcccattgcaaaaagacttggcaggaaacacggcagcagaccttttacattcggctttttttgtagcaaattcattatggttgtgttttgaagagtgagtgaaataaagtgcactcagtccatgcaagcaggtggaatgatgtcaagaaaagcttggcaagtggttccgaggttgaccctcaaatatccctaggatctgtgatgacgatgcttacataatgccccgttttcgcacacatcacaccagtattgagaaaataaaacgagttcaaaggataacatagtgcggagccgatgggtattggccctagtgcaatgattccaaccaatttaatcataattttactcgatttaggcaaatgaactatggtgcgatgcataaaagatgctccaccattgaaaaacgggtccaatatgtgcgggaattttcgcagttgccacatttctatataaacccctccactatcgtctctccctgcccattttcccaggctttctttcatctttttccacagatatcatcatgccgccaaagaagaagcaaaagcttgaaaggctcaaaaaactcgacaaacccaccttacatacctgcaacaagacgtcctttgcaaaggctttcttgcctaatgagacctaccggcagcgtcttctagattacatcgccatcatccatcaactcgctgaccatgcttcccacgctctcaaattctacatcctctctacatccacatcgtctttcccggttgttcacgaagatacaatcgaagccattctctatcttctcaacaagggggaggcttggcatccaagaaaggaagcaaagaaggcatggcgggattgtttgttgccatatgttcaacggtactgccaaatcgtcggcttcattcatccaaatctacgaggcgagcagcagtcaattaattacctgacagtgagtatgatgacgaacctgaaagtcaacgttcaagagcatttcatgcagatgctgctccggtacattaatctgcggttcgacgtgaagggacagaagcagcgactgccaccgaaaagcgatgcgcgaaaggctttctttactcggctacgctacttgaagtcggttttcctttttgatgtggtgcccgagttggagttcctggatgacttgacaccattggagagcgaggttcttgaagagatttggtcattggatctcccattccttcctaacgatccccttgcctacgccattgttgctgatccgatgtcattttttcccgcgtactgcaaactctctgggctgtatgaacaatatggcttccaacggttcagtgcgatacctctgcgccgctcgctcattcaaagtcacgtgcgaatcgacaccatcatcctgtaccagcatatcctttgcatcacgcggcgagacgcagaaactgtcgaaaaggatgatctgtggatgcgcgtctgcaatctatgtaccaaggcttttcggtctcgctgtggtatgcattttgaaggctcaatcaccacggatggagcctcggtgtctgtatacctaaagcacccagaagcagacaagtatggaaagcgcggagcgagaaagtcagcaaacacggtggctgcagaggttaaagcgctttatgtggagaacaacttacctgcttgtcgagcagcagagaatgtcgtcgttatcgacccaaacaagcgcgacattctctactgccaagacagcaatggtacgacatttcgctacaccgccaaccagcgagccgtggagactggaagccggcggtttgcaaagagacgagaagcaatgaaggaagaagctggagttgatctcatagaatcacgaataccatcccacaaaacaatgaacctcatggacttcactcgctaccttctcgttcgccgcgctgattgggatcgtcgcaaggaattctattcgcatcctgctcatactcgatggaaatggcactccttcataaaccgtcagaagagcgaatcagacctcataagtaacatgcgcaacaagtacggtgaaaactttactgttgtgatgggtgattggagcgacgctggtcgaactgcgagatttcagacctcatcaaagacaaaaggctggcgcaccctctttaagcgcaaccgcattgattgtttccttctcgacgagtacaagacctcatctgtttgccctcgctgttcctcatctgagtttgtggagaaaaaattcaaaacacgacctcattcaagaccttggcgccgtcgtgaaggcaagattgaaaaagtccacggactgctgggttgtaccaaccctaactgtttgcagcaagcctggacatcgggaatgcgctactggaatcgagatatgctgtcaacctgcaacatgctattgattgtgagatcaatgttggatggacacggtagaccagaagtgttcagcaggagtgttccagccgtagcgtagaacgtagattggttagattaggttttccgagccggttgtcgcgcggttcaatccctggtgcgggtgctagtgccaatacccaccggctccgcactatctataggttatgaaatcaaattacaaataaatacatcaatgagacgagtgccctggtgcaagatctaccatctgcactactcttctcaataatcttgccattaattatcttagcagaccaactattccgtttgccttctttgggccacaaccgcggttgcctgaggcatcatatcgggaaaccatttcggccatacatatccatacatgacaacccaaaaagccaagcctgcaattgttcctgcaattttctcttgccacgtgtggaaataaacgctcgtcgcgatgagcatcgtgtaccagagaaggaggaggaaaatgagaacgctggataggattgcggttgcgtttgcgtatcgtggacggacgacttgaggtctgactaggagttgaagttcttcgtaaataaagagggacatgtggataagaatgctgtaaatgggaaaaggtgagccgtgacattcgtataccatcatccaaaccctgtcaaaatactcacaaacaatgccctgacgtatcaaacccaatccactctcccccattccgaacacaaatccgtggatgtccgtgcccatcaatgctgcacgttccagacactagtaatacgcggtcaaatagcgaatgtccaaacgcccactgagcaaacaacacccagtagctcgttgctgccgtccagcgtatgacggcacgtcgacggtatcccggtggcgaggcaaagagggcaaacaaaaggagggtgacgcctgtccaaaactgtgcgtaaaaaaggctattgggttaggggtttgtcaccacaggcgcaaaacgacgtgtagcaactttacccatccacgcttggcaaagtatacattgagaggatttcgtttattcgagaagacagatggtggtggtggggcaaaagtgtgaagaatggagccaacgagtacagtcaaagaatagaataaaaggaggttt

SEQ ID NO: 653 - protein, 210 aa, Spizellomyces punctatus
  source 1..210: note = CDS = join(complement(697..730),complement(539..630), complement(250..393),complement(35..188)); note = XP_016604939.1 - uncharacterized protein
MNLLQKKPNVKDQVRATSREVRTIQRELGKDRSGLERQEKQIIADIKKAAKQGRTAEAKTLAKQLLQLRKHIEKNTRVNAQVGGLRVKATTMASQAATAKAMSSATRVMAASNKATDLGQLQKTMMQFGEENTKMDMKDDMINDVLDSMMDEEGDQEESQNIMNAVFDEIGLDLTTKAAQVPRTRLDATQSVQREDESDALMKRLAQLKS

SEQ ID NO: 654 - protein, 638 aa, Spizellomyces punctatus
  source 1..638: note = CDS = 1179..3092, XP_016604940.1 - uncharacterized protein
MPPKKKQKLERLKKLDKPTLHTCNKTSFAKAFLPNETYRQRLLDYIAIIHQLADHASHALKFYILSTSTSSFPVVHEDTIEAILYLLNKGEAWHPRKEAKKAWRDCLLPYVQRYCQIVGFIHPNLRGEQQSINYLTVSMMTNLKVNVQEHFMQMLLRYINLRFDVKGQKQRLPPKSDARKAFFTRLRYLKSVFLFDVVPELEFLDDLTPLESEVLEEIWSLDLPFLPNDPLAYAIVADPMSFFPAYCKLSGLYEQYGFQRFSAIPLRRSLIQSHVRIDTIILYQHILCITRRDAETVEKDDLWMRVCNLCTKAFRSRCGMHFEGSITTDGASVSVYLKHPEADKYGKRGARKSANTVAAEVKALYVENNLPACRAAENVVVIDPNKRDILYCQDSNGTTFRYTANQRAVETGSRRFAKRREAMKEEAGVDLIESRIPSHKTMNLMDFTRYLLVRRADWDRRKEFYSHPAHTRWKWHSFINRQKSESDLISNMRNKYGENFTVVMGDWSDAGRTARFQTSSKTKGWRTLFKRNRIDCFLLDEYKTSSVCPRCSSSEFVEKKFKTRPHSRPWRRREGKIEKVHGLLGCTNPNCLQQAWTSGMRYWNRDMLSTCNMLLIVRSMLDGHGRPEVFSRSVPAVA

SEQ ID NO: 655 - protein, 230 aa, Spizellomyces punctatus
  source 1..230: note = XP_016604941.1 - uncharacterized protein CDS
NLLLFYSLTVLVGSILHTFAPPPPSVFSNKRNPLNVYFAKRGWFWTGVTLLLFALFASPPGYRRRAVIRWTAATSYWVLFAQWAFGHSLFDRVLLVSGTCSIDGHGHPRICVRNGGEWIGFDTSGHCFILIHMSLFIYEELQLLVRPQVVRPRYANATAILSSVLIFLLLLWYTMLIATSVYFHTWQEKIAGTIAGLAFWVVMYGYVWPKWFPDMMPQATAVVAQRRQTE

SEQ ID NO: 656 - DNA, 4726 bp, Spizellomyces punctatus
  source 1..4726: mol_type = unassigned DNA; note = fz 1432..3270
tgaagaaagagttgatacccactggtatgatctcaaggacatctgtgaaattctttgaaaagtctgcggatgtatgacggacggatgaaaacgatggtgatgtaggggatgatgcattgggactactcaggggtagccgggttgtcagccagtctcctattagctcaacaatatattcataatccacttcatctctttcatatctgatttcgatatctcccctcaacagcagcacattgcagagtgcgaggagcggacaaggtccattgcgattttgcgtgataatcttgagtcttcgtggggtatccgtccttggatccaagtacgtgatcggtttaagtctgtaagatttatcagccgattgctgtgcgggaagatcggactgcgggggagggtgcggcgaaggtgacggaagggatgagcgacgaggaccaacaggcggacgctgaggctcatgttgttcttgggacgtcccatctgctacagttggagcgtttcccgtgttctctgctgtattttcaatggattgacttgttgctgtgtgtgaacgtgtctcaacctctttcgtagagtcggttatttctggatggtgtgatgtggttggggtggaagctagcagctcagttggcaaagactgcgattgtgacggtacagattccaactttgagacattcaatagggtagcttcatgcagagaggacacgcccggttcctcttgtgatagcgactcttgtgctctttctgctggtgcttggcgctcctcaaggagacccacatgcttctccggcacgatagagtcgttcgcgttcgcagcctgtgtggtatttgccgtaggctctacgggaggcgcttgtacatccttgtcgtttatagcagcaacgtcagatggtggagagctgactgtgcgttcaatttcgcctgccgcggttgaagagaggttgatatcctggggttgttcatgttcgacggttgtgtcgctcgctttggcatcgctaccagcccgcgaggatggtgacttttgctctgggccgtcatgtatctcgtatgaatatgggtcgtcgtcgtctgctgctgctgtgagctgctgctgctgctgctgctctgacattgttcaacccaaaagcccaaactccttcagccctcgtcgtgcacacaaaagactgtttatcaagaaagcacgcgctctgaacgctggttacgtgtttaacgcctgctatgccaactacatagtgcggagccgatgggtattggcactagtacagtgattccaaccaattgaatcataattttactcgatttagactcatgaactatggtttgatccaaaaatcctatataagtcatcgtgcccattttcccaggctttcatctttttccacagatatcatcatgccatcaaagaaaaagcaaaaactcgaaaaactcgacaaacctacttgcttacatacctgcaacaagactccctttgcaaaagctttcctgccaaacgagatctaccgccaacggcttctagattacatcgccatcatccatcaacttgctgaccacgcttcccacgctctcaaattctacatcctatctgcaccatccttcaccgtgaacgaggagaccatcgaagcgattctctatcttctcaacaaaggagaggcatggcaaccaaaaactgatgcaaagaaggcgctacgcagatgcttgttgccatacattcaacggtactgccacatcatcggcttcgttcatccaaatctacaaaaagagcagcaatcagtcaattacctgacagtgagtatgatgacgaacctgaaagtcaacgttcaagagcatctcatgcagatgctcctttggtatatcaatctgcagcttgacgtgaagggacagaagcagcgactgccactgaaaagcgatgcgcggaaagctttctttactcggctacgctacttgaagtcggttttccttttcgaaacaatgccagaatcgctggatgacctgagcattcttgaaaacgagattttagaagagatctggacacttaacctgccatttcctgatcaagacaagccgcttgcctacctcattgccatcgacgcgatgtccttctttcctgcatactgccgactgtcaaagttgttcgagcagcaaggctttcgacagttcagcgcgatacctctgcgccgctctctcatccaaagccatgtgcggattgacaccgtcatcctctactctcatgttctttgcatcacgcgacgagaagcagaagccgtagagaaggtcgatttatggttgcgcgtctgtaatctacgtaccaaagcttttcggtctcgctgtggtatgcattttgaaggctcgatcacgacggacggtacctcggtgtcagtttacttgaaacatcctgaagctgacaagtatggaaaacgcagcggagggaaaaagtcagcaaacacgatggaggcagaggttaaagcgctttatgtggaaaacaacttatctgcttgtcaagagaactttgttgttatcgacccaaacaagcgcgatcttctctactgccaagacagcattggtacgacgttccgttacaccgccaaccagcgagccgtggagacaggtagccggcgatttgcaaagagacgagaagcaatgaagaaagaagctggagttgacctcatagaatcacgtatcccaagccacaagatgatgaacgtcatggactttactcgctaccttctcgttcgtcgcgcagattcggatcgtcgcaaggaattctactcccaccctgcccacacacggtggaagtggcatgcatttataaaccgtcagaagagtgaatcgaacctcatatccaacatgcacaacaagtttgggaggaactttaccattgtgatgggtgattggagcgacgccggtcgaactacgagatttcagacctcatcaaagacaaaaggctggcgcaccctctttaagcgcaaccgcattgattgtttccttctcgacgagtacaagacctcatctgtctgccctcactgttcctctgacgttgaaaaaggcttcaaaacacgacctcattcaagaccttatcgacgacgagaaggcaagattgaaaaagtccacggattgctgggttgtaccaaccctaactgtcagcaagactggacgatgcgctactggaatcgagatacgctgtcaacctgcaacatgctgatgatcgtgcaatcaatgttggatgggcactgtagaccagaggtgttcagcaggaggagtgttccagccgtagcatagagcgagagattggttagattagcctttccgagccggttgtcgcgcggttcaatccctggtgcgggtgctagtgccaatacccatcggctccgcactaaccaactcccatttagcgatagcacccttcttgaaactcggaatcctgctcgtttccttcctttctggacaacgacctgcgccttatttggaccaaaaagcctccataccagataacaaaaacgcaaagtcctttgctgagcagcctatccaagaagacctgtagatcagacgcgaccacatgtcttctggaagcgaatcgtcgccgtcagagagctcctactttagccgcaagaatggagtggagaacatatccttgacccggttacccaatctcgcctctcccaggttaatgacaccaacttcgcaactcgcagagactgctgtgggagtgagggaagctgcaaaatgcataggtatttgacattttgctgacagagccttggcgcattttcacaaagacttcaccatgaacttttcttattggggtcaacgctcccccaaccttgccagagatagtagtaatcccttttttcttttaggacgtgccttggtgaagttggagcgcccgcaaactgtcatgctcgtggcaaaagcactagacgcaaagattatcaaattcacccggcaattagcctgccatcttatcgacaccccccgaacgtcttgcggacacaaggggttaactgtgtaggttgcaagagtgtaattccaaacccggcgattgattgggcacattgttaacaagcgctaatttccctttagatatattgattccaaatttcgcactcatcctgcattcagctttgaccggctactggcttctcatccccactatgccgatcagctcaagttttggacgccagaactgtgcgcaacgcaaacagatcacatcgatttcatcatcactcttggcggagacggaacggtaatctacacgtcgtggctcttccagcacgcgcaagtacctccagttgttcccttcgatctgggttcgcttggatttttgaccaacttcaacatcacaaacatacgcgatgttctgcagcgagtgattgggtgccgtggtgctggagttagggtgaacttgcgtatgagacttagctgcacggtttggaggtcggactttaaaagcaaaaataaagaggtcttagaaggtcggacggctgagaaaaagagacgggaagatttgtgtagtatcaagggcgacgaggaagaagcagatggccgttcaaagatagggagacgagcttcgagtcagcaacctgatcctggcactacactgaatgggttacccgcctattcttccgacgacctaatatctaccactcccgcaccacgactgaacgatgaacatgcgacttccgatattggcgacttattagatgagatctctttgcaattgatgtcaaaagtt

SEQ ID NO: 657 - protein, 660 aa, Spizellomyces punctatus
  source 1..660: note = CDS - complement(23..1108); note = XP_016608970.1 - uncharacterized protein CDS
MSEQQQQQQLTAAADDDDPYSYEIHDGPEQKSPSSRAGSDAKASDTTVEHEQPQDINLSSTAAGEIERTVSSPPSDVAAINDKDVQAPPVEPTANTTQAANANDSIVPEKHVGLLEERQAPAERAQESLSQEEPGVSSLHEATLLNVSKLESVPSQSQSLPTELLASTPTTSHHPEITDSTKEVETRSHTATSQSIENTAENTGNAPTVADGTSQEQHEPQRPPVGPRRSSLPSPSPHPPPQSDLPAQQSADKSYRLKPITYLDPRTDTPRRLKIITQNRNGPCPLLALCNVLLLRGDIEIRYERDEVDYEYIVELIGDWLTTRLPLSSPNASSPTSPSFSSVRHTSADFSKNFTDVLEIIPTLQTGLDVNVRFDSPFSFEVTSSLLVFDLFKIILCHGWTVDPQDEETYRVVVSECGSYNQVVEKVIEGEIAAAHQAKGKEKMVTEEEYEEASRKRDQLIHEGLVCKGFLDATASQLTYHGLQTLCETLEPNSLAVLFRNNHFCTLFKRVGKDGTIALYTLVTDQGFVGAEAVVWETMDNVEGDSSFVDGCFNRFETSGESEHIPSANLSGGQQPSMIGLEDYVDVGGQGREATQASSDLALALSLQEEENVRHDAYVRRQQEAEYASHSHGRAGQGDTSRRSSGSAKGDKKKDKCLVM

SEQ ID NO: 658 - protein, 627 aa, Spizellomyces punctatus
  source 1..627: note = 1390..3273, XP_016608971.1 - uncharacterized protein CDS
MPSKKKQKLEKLDKPTCLHTCNKTPFAKAFLPNEIYRQRLLDYIAIIHQLADHASHALKFYILSAPSFTVNEETIEAILYLLNKGEAWQPKTDAKKALRRCLLPYIQRYCHIIGFVHPNLQKEQQSVNYLTVSMMTNLKVNVQEHLMQMLLWYINLQLDVKGQKQRLPLKSDARKAFFTRLRYLKSVFLFETMPESLDDLSILENEILEEIWTLNLPFPDQDKPLAYLIAIDAMSFFPAYCRLSKLFEQQGFRQFSAIPLRRSLIQSHVRIDTVILYSHVLCITRREAEAVEKVDLWLRVCNLRTKAFRSRCGMHFEGSITTDGTSVSVYLKHPEADKYGKRSGGKKSANTMEAEVKALYVENNLSACQENFVVIDPNKRDLLYCQDSIGTTFRYTANQRAVETGSRRFAKRREAMKKEAGVDLIESRIPSHKMMNVMDFTRYLLVRRADSDRRKEFYSHPAHTRWKWHAFINRQKSESNLISNMHNKFGRNFTIVMGDWSDAGRTTRFQTSSKTKGWRTLFKRNRIDCFLLDEYKTSSVCPHCSSDVEKGFKTRPHSRPYRRREGKIEKVHGLLGCTNPNCQQDWTMRYWNRDTLSTCNMLMIVQSMLDGHCRPEVFSRRSVPAVA

SEQ ID NO: 659 - DNA, 5016 bp, Spizellomyces punctatus
  source 1..5016: mol_type = unassigned DNA; note = Fz = 1296..3128
ttgcgttataacgtggttgaaggttgggtgaagaagagagggcgagtggggctggtacgtgggaggcggtacgcaaatgtgggattgaaggaacgtccggagttcctctgggataggaacaacactggggctatcttgtcgtaaaaaggtgtcaaagattagtcgagcttttgtgtcgagagcttcgtgtaaggagtcgatcggcatgttctctagcttgatgctctctttcttctcggtctttgaagggaacggaccacggacggcggtttggtcggttccagctgaagttgagcgtcgaccttgaataacattcatataggtaccccaatctgattgctccaaagcgatattactttgagccgctggcaacgtatttgacgagctgggcttttcaccgcttgcgttctccacgtcactttccgtcaaagcacacaatctgccttcttcgctgagacactccgtgtccttccctttctccttctcccgttcccgttctctagcctctctgttctccttttccttccttgctctctccgccactcgagcctggtgttcccgctcaatctgtccggccgaccactgtcggtacagcagaacatacccaagaacagcctcataaaattcgatgtattgtccctgcccctctcgattcatatactgcgcaaagtcagtataactaataggcgggcaggtttgcccgcttaggacggctttcagcgttacggggggttcttccggtgatgacttgaacatgatcatgcagactctttggatcactaacgacagacagactcagacgttcgccctaaatattgctgggctcagaacaagaatcaaaagttgctcatggagcagagaccagccactgttagaatgaataagctcggaaggctcttgcggacagaagtttcgaagttcttccggtaatttgaagccacataagtatgccaaactattagtcgtttgacagagccgtggggctctgcgaaagatagtcataatattgttgttatttttagtacgcggagcatgaaccgtggcgaacagcggagattgaagctgacgtaatcttgtgacagcttccatagtgcggagccgattggtattggcactagtacatagattccaaccaatttaatcataattttactcgatttagactcatgaactatggtttgatccaaaaaatcctatataagttgtcgtcgcccattttcccaggctttcatcttttcccacagatatcatcaatgccaccaaaaaagaagcaaaagcttgaaaaactcgacaaacccaccttacatacctgcaacaagacttcctttgcaaaagctttcttgcctaatgagacctaccggcagcgtcttctagattacatcgccatcatccatcaactcgctgaccatgcttcccacgctctcaaattctacatcctatatgcaccaacctttcccacggtaaatgaagatacaatcgaagcgattctctatcttctcaacaagggggaggcttggcatccaagaaaggaagcaaagaaggcactacgcggatgcttgttgccatacattcgtcggtactgccaaatcgtcggcttcattcacccaaatctacgaggcgagcagcagtcaatcaattacctgacagcgagtatgatgacaaacctgaaagtcaacattcaagagcatttcatgcagatgctgctccggtatatcaatctgcggctcaacgtgaagggacgggggcgactgccactgaaaagcgatgcgcggaaagctttctttgctcgtcttcgctacttgaagtcaatttttctttttgatgtcatgcccgagtcactggatgacttgactgctgaggagagtgagcttctagaagagatgtggtccttcattcccctttctgaccagccgctcgcatattcggttgctgttgaccctctcgctttctttcctgcttactgcaaactctctgtgctgtatgaacgacatggcttccgtcggttcagcgcaatacctcttcgtcggtctctgatgcagtcccatattcgcatcgacaccgtcatcctgtaccagcatatcctttgcatcacacgacgagaagcggaaactgtcgaaaaggtcgatttatggttgcgcgtgtgcaacctgcggaacaaggcttttcggtctcgccgcggtatgcagtttgaaggctcgatcagtacagatggaacctcggtgtctgtatacctaaagcacccagaagcagacaagtatggaaagggagcgagaaagtcagcaaagagtttagaggacgaagttaaagtgcaatacatggagaaaaacttacctgcttgtcgggcagcagaaaacattgtcgtcattgacccaaacaagcgcgatattctctactgccaagacagcaatggtacaacgttccgttacaccgcaaaccagcgagccatggagacaggcagccgtcggcagcgaaaggaacgacagcagatgaagaaggaagcgggaattgacctcatagaatcacgtatcccaagccacaagacgatgaacctcatggactttactcgctaccttcttgttcgccgcgcagattcggatcgtcgcaaggaattctactcccaccctgcccacacgcgatggaaatggcacgcattcataaaccgtcagaagagcgaatcagacctcatatccaacatgcacaacaagtttgggaactttaccattgtgatgggagattggagcgatgccggtcgaactgcgagatttcagacctcatcaaagacgaaaggctggcgcaccctctttaagcgcaacaggatcaactgcttccttctcgacgagtacaagacctcatctgtctgccctcactgtttggcctcatccgctgacttccttgaaaaaggcttcaaaacacgacctcattcaagaccttggcgccgtcgcgaaggcaagattgaaaaagtccatggattgctgggttgtaccaaccctaactgtcagcaagcctggacgatgcgctactggaacagggacacgctgagcacctgcaacatgctgatgatcgtgcaatcaatgttagatggacacggtagaccaaaagtgttcagcaggggtgttccagccgtagcgtagattagttagattaccttttccgaactggttgtcgccggttcaatccctggtgcgggtgctagtgccaatacccatcggctccgcactatattaagcttgttctacaaagcggaacgacgttcacatgcaaagagtctttgacaaagcacacaataatagttaaatacaaatacaagatttccaaattcttttctagtgtttgcatttgcgtcccatgtcacccaaacaaactcaagattttaacaaaagtggtggtaagaaggtagttactattttaaactcttgtgcaagccgcaaaatcccagtgtgaccaattggcagagcataattcggttgtggtccagaaaggatgggaggattaacacaggacatagctgccgtgcaaactaaatcaaaagctcagattattgctgagcatacaaacttttacgagacagatcttggcaacatattcacactatgcacattttgggagactaaagcataaagcaagaacaagaagtaataaaaccaaccaacaaccaaactaagctaaattccactacaaaagtaaaaagtacaagcaaggaggatggacactaaaagctctatctgatgatagtatgtgtggtccgaagcagagaacaacaaagtggattatgaaatgtgttcggtgcatgcgtttgatgtcaacatctgaatcgcgagtgcgtttgggttgacggaacgtatctagacgtgcaatcttgccatgcgacgctccgcggttaacgcgtgacgaccaaagatgtttgatctggcctgcctcttgtttccgccattgttgtttccttgcccattgttgccaccttggtttctgttgtcacggttgtttccttgttgcttcccagtaccagcgttttccacgttgatacgaatgcaatcgtcctgggcgccacgctgcgccacaggcatgataaccggctggtgggcatccgagctgctaagggagcagatacggtagaggccattggtcttgaatgttcctccgggaacggtgacagagagagtgcgaccatcagcggcacggtcattgagacctttgaaaaaggcaaaagcttgtgggtctggagcagatcgcgttgacttgagttcttgaattgtaatgtgggagtggccctgaatgatgccttgggcgctcagagtctgggggacaatgtagtattgagtttgcgggtctgtgaaaatgttataagtatacatggcacgaatttttaaaatcttctggttgcgcagcctaccagagaaaaaaccggtgtccaagtttcggtagtcggtggtaatggtcaaatccttgctggcgtcgatccttgcaccgttctcgggctcaatgatgatgctcgacacctttaaagacactctgtgagactacaaaaaactaatggaaattggcgacattgcaaacgcaccatcttttcgacggcggggatggcacccattggagtcgacgaacaggcgcctgtcctgatctgagtaccatccgagggcgtcaggccagtgtccttgcaaaattgggtttccgggaaaggccccacattgcggttgatgtcaccaccactagtggccccgccgacgcccgcctggttgccagtgttggcagtggtgccgttgttaccgttgctgccggtattgccgttgttgccgttattaccattgttgccattgttttgcttgtttccattattggatcgctttccggcctgctgcctctgcgcagtgacagagaaaacgaggcaaagcaaaagaagagcgtagataaaggtgtatcgcatgattcaaagatttataaaatggcgggaatagggcgatgcgcagagggaaacgtgtgtgtgttgctgggaggggaagcgatgggatggggatgtgt

SEQ ID NO: 660 - protein, 254 aa, Spizellomyces punctatus
  source 1..254: note = CDS = complement(<1..762), XP_016612697.1 - uncharacterized protein CDS
MIMFKSSPEEPPVTLKAVLSGQTCPPISYTDFAQYMNREGQGQYIEFYEAVLGYVLLYRQWSAGQIEREHQARVAERARKEKENREAREREREKEKGKDTECLSEEGRLCALTESDVENASGEKPSSSNTLPAAQSNIALEQSDWGTYMNVIQGRRSTSAGTDQTAVRGPFPSKTEKKESIKLENMPIDSLHEALDTKARLIFDTFLRQDSPSVVPIPEELRTFLQSHICVPPPTYQPHSPSLLHPTFNHVITQ

SEQ ID NO: 661 - protein, 625 aa, Spizellomyces punctatus
  source 1..625: note = CDS = 1254..3131, XP_016612696.1 - uncharacterized protein
MPPKKKQKLEKLDKPTLHTCNKTSFAKAFLPNETYRQRLLDYIAIIHQLADHASHALKFYILYAPTFPTVNEDTIEAILYLLNKGEAWHPRKEAKKALRGCLLPYIRRYCQIVGFIHPNLRGEQQSINYLTASMMTNLKVNIQEHFMQMLLRYINLRLNVKGRGRLPLKSDARKAFFARLRYLKSIFLFDVMPESLDDLTAEESELLEEMWSFIPLSDQPLAYSVAVDPLAFFPAYCKLSVLYERHGFRRFSAIPLRRSLMQSHIRIDTVILYQHILCITRREAETVEKVDLWLRVCNLRNKAFRSRRGMQFEGSISTDGTSVSVYLKHPEADKYGKGARKSAKSLEDEVKVQYMEKNLPACRAAENIVVIDPNKRDILYCQDSNGTTFRYTANQRAMETGSRRQRKERQQMKKEAGIDLIESRIPSHKTMNLMDFTRYLLVRRADSDRRKEFYSHPAHTRWKWHAFINRQKSESDLISNMHNKFGNFTIVMGDWSDAGRTARFQTSSKTKGWRTLFKRNRINCFLLDEYKTSSVCPHCLASSADFLEKGFKTRPHSRPWRRREGKIEKVHGLLGCTNPNCQQAWTMRYWNRDTLSTCNMLMIVQSMLDGHGRPKVFSRGVPAVA

SEQ ID NO: 662 - protein, 317 aa, Spizellomyces punctatus
  source 1..317: note = CDS = join(complement(4559..4921), complement(4391..4496), complement(3843..4327)), XP_016612695.1 - uncharacterized protein
MRYTFIYALLLLCLVFSVTAQRQQAGKRSNNGNKQNNGNNGNNGNNGNTGSNGNNGTTANTGNQAGVGGATSGGDINRNVGPFPETQFCKDTGLTPSDGTQIRTGACSSTPMGAIPAVEKMVSSIIIEPENGARIDASKDLTITTDYRNLDTGFFSDPQTQYYIVPQTLSAQGIIQGHSHITIQELKSTRSAPDPQAFAFFKGLNDRAADGRTLSVTVPGGTFKTNGLYRICSLSSSDAHQPVIMPVAQRGAQDDCIRINVENAGTGKQQGNNRDNRNQGGNNGQGNNNGGNKRQARSNIFGRHALTAERRMARLHV

SEQ ID NO: 663 - DNA, 5638 bp, Spizellomyces punctatus
  source 1..5638: mol_type = unassigned DNA; note = fz = 1514..3070, fz = 3040..3357
gccacatggaggaacgcaagcggaggcatcagtctcatagaatatctatgctgcttgatatctcacatgaatgtattgaacatcttgcaagtgacattcggcaatgagccaagaaacgtttacatttcctcgatagattcagtcaacccctattagtgaccgatcatgcaatccgcactttattagtactgtcccgccaaaggtctcagacagcgacacccatcctatacttgtatgaatagctcttgtgaatgaatagtcgtgtcctccatcgcacatgaaaatcactaggctatggcccatgcatatctgacctgcaaataaactccaaacatcaaaaccttcaacttcacgcacgcaaacaaacgttatccaaaacacacaactctctccctacgtcacccttaccttctctctctccacaaaagccgtttcgtggccgcgactttccgcttgcctccattcgtggcgcccacctcagctgcgcaaatcacgtgcttctcttgtccgaaaaaagcaaatgaaaaatgacacgggctataaaatcgccccacagtggtttccttcatctcatcatctttgttttttgagcaccatgaagtacctcctccccctcctcatcctccttcccacgaccctcgcccaattcgcaacggattgtggtccatcccttcaaacaacattcaatcaatgcgcgtcgaattcgcttacagatgggaatggccaacctgctccagcaggaagttcggtcgaacaggcatgtgcatccgtgcaagccaatcaggcggcgtattactgctgtttgtgtaaaggatttaccgggatccaaggatggtgagtattgtttggttgttgagttggtgataccgtagctgattgagagttatgtacagtattgcgaattactgcccgcaatcggcctcagcaccttcgattggtcagtctgttgcgcaattttgtggtgcgtgtcaacctgccagctctagtacggtctcgcgggtcagtgcgagcaatgttcccttccctacgttgagtgggggattgccctctgcgagtgctaccccttctgctacgcctgccccgacagctgggacgcaggccaagggagccgctgcgggattgggtgttcagtgggggattgccgtgatgggtgttgttggtggagctgttgcgttggtgtaagtgagctttggcacaagcaacaaattattgaacttgggcgtgcgccctaaagtggtgaatgtggggaccatataaggtcgtgtacttaggtgttaaaagccctgtatctgaagaaatgtgaaatatagtgcggagccgatgggtattggcactagtacatagattccaaccaatttaatcataattttactcgatttagactcatgaactatggtttgtttgatccaaaaatcctatgtaagttgtcgtcgcccattttcccaggctttcatctttttcgacagatacagatatcatcatgccgccaaagaaaaagcaaaagcttgaaaaacctacttgcttacatacctgtaacaagacttcctttgcaaaagctttcctgccaaactaccaccaacggcttctagattacatcgccatcatccatcaactcgccgaccacgcttcccacgcgctgaaattctacatcctatctgcaccatccttcaccgtgaacgaggagaccatcgaagcgattctctatcttctcaacaagggggaggcttggcatccaagaaaggaagcaaagaaggcatggcgggattgtttgctgccatatgttcaacggtactgccaaatcgtcggcttcgttcatccaaatctacgaggcgagcagcaatcagtcaattacctgacagcgagtatgatgacgaacctgaaagtcaacattcaagagcattgcatgacgatgctgctccgatatatcaatctgcggcttgacgtgaagggacggaaagggcaactgccaccgaaaagcgatgcgcgaaaagctttctttactcggctacgctatttaaagtcagtttttctttttgatatcgtgcccgagtcgctggatgacttgaccgctgaagagagtgagcttctagaagagatctggacacttaacctgccatttcctgatcaagacaagccgcttgcctacctcattgccattgacgcaatgtccttctttcctgcatactgtcggttgtcaagcctatatgaaaagcatggatttcgacggttcagtgcgatacctctgcgccgctcgctcatccaaagcaacattcgcatcgactctaaaatcctgtaccagcatatcctttgcatcacgcagcgagaagcagaagccgtagagaaggtcgatttatggttgcgcgtctgtaatctacgtaccaaagcttttcggtctcgctgtggtatgcattttgaaggctcgatcacgacggacggaacctcggtgtctgtatacctaaagcacccagaagctgacaagtatggaaagcgcagtggtgggaaaaagtcagcaaacatgatggaggcagaggttaaagtgcaatacgtggagaaaaacttacctgcttgtcgggcagcagaaaacattgttgtcattgacccaaacaagcgcgatattctctactgccaagacagcaatggtacgacgttccgttacactgccaaccagcgagccatggagacaggtagccggcgatttgcaaagagacgggaagcaatgaagaaaaaagcgggaattgacctcatagaatcacgaataccatctcacaagacgatgaatctcatggacttcactcgctaccttctcgttcgccgcgctgattgggatcgtcgcaagtacttctattcgcatcctgcccacacgcggtggaagtggcatgcatttataaaccgtcagaagagtgaatcgaacctcatatccaacttgcgcaacaagtacggtgaaaactttaccattgtgatgggagattggagcgatgccggtcaaactgcaagatttcagacctcatcaaagacgaaaggttggcgcaccctctttacaaccgcattgattgttttcttcttgatgaacacaagacctcatctgtttgccctcgctgttcatcctctgagtttgttgagaaaggcttcaaagaacgacctcattcaagaccttggcggcgacatgaaggcaaggttgaaaaagtccatggattgctgggttgtaccaaccctaactgtttgcagcaagcctggatgatgcgctactggaatcgagatacactgtcaacctgcaatatgctaacgatcgtgccatcaatgttggatgggcactgtagaccagaggtgttcagcaggaggagtgttccagccgtagcgtagcatagattagttagattagcttttccgaactggttgtcgccggttcaatccctggtgcgggtgctagtgccaatacccatcggctccgcactaaatagtaatatcaagaatgttatgttacaaccgtcccatcgcctgctgcgcaccaatgcgtgtatgtcatcctttgttgccatagcaccagcctacccagatccgcccctcaccgacggttgcctgcattcgccttgtgcgatgcctgtccctccccgactgtcccttctcctccagtcccctgtgcgatggaagagacatgcgagtacttttgcccagacgataggaacaacagcaacaacatcatgcaacacctcaaaacgaagagcctggattgtaaccgccggaaagccaggaaacgatcgccaagccatagcactagcaaaagggctaggatgtaccattgaaatgaaacacattgttccacattccagtaagaacacacatatacatcatctactacacaaaacaatttctaaaagacatgtgtaggcatcaaatggctttttccagtctttcaaaaacatttcctcgattaccggtcccaaacctttggtccccacagcgcacccaccgatctccccttttacctcacctctccaaagcatgatacacttgctccaccctacccagatctaatcctaagtacctgcgccgaaacaaccctcgcatcactacatttaaaaaaaacgactcaaacaccggcagtccatattggactcccgtttgtcagtgttgaggaatttaatgttgttgttgtgtggaagtatgcgtggcctgttttggggatgaggcgggatgagagggttgttggtgttgatgtgcttttgggagaggttttggagggtgaggagagcgaagagtgtgttttgggggttttggtttcgggggttcggggacgggagtttgggtggggggttgaggatgggtcgaggtttgttaggaggttggaggtaaggttgctttgtgatgttttggattggattgggtttattgattgatggttcttttttgtttgtagaggcttttacgacatgcgaatccaccccgtattcttcttgtgacttgtcaatcgacaccacaagcactcgtacaaaccctccagaaatggtacacctccctcccaccgtccaaagcctcgcaaatcactctcctcccatcaacaaaacacgaccacgttttacggcatgcgacgcactttgccgtattcggagatgacgttgcgacactatcggaatgccttgggtacaagaaacccgtgtatgtgattgggatgcagaattgtcggggggctttacggaggttttatggggatttagtagccaaggctcgggtacgagtttttgttcctgctgcacatgctggggatggggatgtgtttagtgatgttggggagcatccagagtggaggtttgagggggggtgtttggagggggttgttgcggaggttgggaggaggttgtggggggatgggtggagatgatttattgtatggtgtgtgttgttaatttattgtgggaaaacatacaataaatattggaaaagatagatgtagagaaatgcgagtctgttctatacactcccataaactttgtaaacgactttttgtctatccactcgcaacaggactattatcttcctctgatccacgcctggagaccccctccaacacaatactctcaacatccacatcccgattcgtaatcaccaaattatccctatgaacaacacacccagaatcaacgtaccccaacaacccctcaatttccgagcttttgtggcccttgatacgcaaacactctgcaaacgaataattgacaaggccctttccgatttcaatgacggtttctgtatcgtttttgtgaatgatggtgaggagtcggacgcattgttgggcattaaatgttccttcgacgcgggcgacaccagctgcaaataaagaggatcggtgtctgttcatgacggcgcggacggcgcccttgtcgaggtaaatggcgccaaaggatttaagaccatggaggatccaccattttcgatccatcatggcgttggggcggggtaaaaagtgggttccgtgggttggacaaaatggggtattcggggtatgggattggatttcggcgagaatggtgggaatgagaggggggtgggagagtgtgatgatggttgtgcatcctgccgctgttgcaagatcggctgcaacgagtttggtcaccatcccccctgtacccagatgagagccagg

SEQ ID NO: 664 - protein, 175 aa, Spizellomyces punctatus
  source 1..175: note = CDS = join(596..834,894..1182), XP_016609660.1 - uncharacterized protein; note = CDS = join(596..834,894..1182), XP_016609660.1 - uncharacterized protein
MKYLLPLLILLPTTLAQFATDCGPSLQTTFNQCASNSLTDGNGQPAPAGSSVEQACASVQANQAAYYCCLCKGFTGIQGCIANYCPQSASAPSIGQSVAQFCGACQPASSSTVSRVSASNVPFPTLSGGLPSASATPSATPAPTAGTQAKGAAAGLGVQWGIAVMGVVGGAVALV

SEQ ID NO: 665 - protein, 593 aa, Spizellomyces punctatus
  source 1..593: note = CDS = join(1481..3174,3230..3317), XP_016609663.1 - uncharacterized protein
MPPKKKQKLEKPTCLHTCNKTSFAKAFLPNYHQRLLDYIAIIHQLADHASHALKFYILSAPSFTVNEETIEAILYLLNKGEAWHPRKEAKKAWRDCLLPYVQRYCQIVGFVHPNLRGEQQSVNYLTASMMTNLKVNIQEHCMTMLLRYINLRLDVKGRKGQLPPKSDARKAFFTRLRYLKSVFLFDIVPESLDDLTAEESELLEEIWTLNLPFPDQDKPLAYLIAIDAMSFFPAYCRLSSLYEKHGFRRFSAIPLRRSLIQSNIRIDSKILYQHILCITQREAEAVEKVDLWLRVCNLRTKAFRSRCGMHFEGSITTDGTSVSVYLKHPEADKYGKRSGGKKSANMMEAEVKVQYVEKNLPACRAAENIVVIDPNKRDILYCQDSNGTTFRYTANQRAMETGSRRFAKRREAMKKKAGIDLIESRIPSHKTMNLMDFTRYLLVRRADWDRRKYFYSHPAHTRWKWHAFINRQKSESNLISNLRNKYGENFTIVMGDWSDAGQTARFQTSSKTKGWRTLFTTALIVFFLMNTRPHLFALAVHPLSLLRKASKNDLIQDLGGDMKASLDDALLESRYTVNLQYANDRAINVGWAL

SEQ ID NO: 666 - protein, 585 aa, Spizellomyces punctatus
  source 1..585: note = CDS = 1481..3238, XP_016609662.1 - hypothetical protein, variant 1 CDS
MPPKKKQKLEKPTCLHTCNKTSFAKAFLPNYHQRLLDYIAIIHQLADHASHALKFYILSAPSFTVNEETIEAILYLLNKGEAWHPRKEAKKAWRDCLLPYVQRYCQIVGFVHPNLRGEQQSVNYLTASMMTNLKVNIQEHCMTMLLRYINLRLDVKGRKGQLPPKSDARKAFFTRLRYLKSVFLFDIVPESLDDLTAEESELLEEIWTLNLPFPDQDKPLAYLIAIDAMSFFPAYCRLSSLYEKHGFRRFSAIPLRRSLIQSNIRIDSKILYQHILCITQREAEAVEKVDLWLRVCNLRTKAFRSRCGMHFEGSITTDGTSVSVYLKHPEADKYGKRSGGKKSANMMEAEVKVQYVEKNLPACRAAENIVVIDPNKRDILYCQDSNGTTFRYTANQRAMETGSRRFAKRREAMKKKAGIDLIESRIPSHKTMNLMDFTRYLLVRRADWDRRKYFYSHPAHTRWKWHAFINRQKSESNLISNLRNKYGENFTIVMGDWSDAGQTARFQTSSKTKGWRTLFTTALIVFFLMNTRPHLFALAVHPLSLLRKASKNDLIQDLGGDMKARLKKSMDCWVVPTLTVCSKPG

SEQ ID NO: 667 - protein, 568 aa, Spizellomyces punctatus
  source 1..568: note = CDS = join(1481..3174,3226..3238), XP_016609661.1 - hypothetical protein, variant 2 CDS
MPPKKKQKLEKPTCLHTCNKTSFAKAFLPNYHQRLLDYIAIIHQLADHASHALKFYILSAPSFTVNEETIEAILYLLNKGEAWHPRKEAKKAWRDCLLPYVQRYCQIVGFVHPNLRGEQQSVNYLTASMMTNLKVNIQEHCMTMLLRYINLRLDVKGRKGQLPPKSDARKAFFTRLRYLKSVFLFDIVPESLDDLTAEESELLEEIWTLNLPFPDQDKPLAYLIAIDAMSFFPAYCRLSSLYEKHGFRRFSAIPLRRSLIQSNIRIDSKILYQHILCITQREAEAVEKVDLWLRVCNLRTKAFRSRCGMHFEGSITTDGTSVSVYLKHPEADKYGKRSGGKKSANMMEAEVKVQYVEKNLPACRAAENIVVIDPNKRDILYCQDSNGTTFRYTANQRAMETGSRRFAKRREAMKKKAGIDLIESRIPSHKTMNLMDFTRYLLVRRADWDRRKYFYSHPAHTRWKWHAFINRQKSESNLISNLRNKYGENFTIVMGDWSDAGQTARFQTSSKTKGWRTLFTTALIVFFLMNTRPHLFALAVHPLSLLRKASKNDLIQDLGGDMKASKPG

SEQ ID NO: 668 - protein, 384 aa, Spizellomyces punctatus
  source 1..384: note = CDS = join(3595..3826,3886..4346,4415..4876), XP_016609664.1 - uncharacterized protein
MPVPPRLSLLLQSPVRWKRHASTFAQTIGTTATTSCNTSKRRAWIVTAGKPGNDRQAIALAKGLGCTIEMKHIVPHSSIKWLFPVFQKHFLDYRSQTFGPHSAPTDLPFYLTSPKHDTLAPPYPDLILSTCAETTLASLHLKKTTQTPAVHIGLPFVSVEEFNVVVVWKYAWPVLGMRRDERVVGVDVLLGEVLEGEESEECVLGVLVSGVRGREFGWGVEDGSRFVRRLERLLRHANPPRILLVTCQSTPQALVQTLQKWYTSLPPSKASQITLLPSTKHDHVLRHATHFAVFGDDVATLSECLGYKKPVYVIGMQNCRGALRRFYGDLVAKARVRVFVPAAHAGDGDVFSDVGEHPEWRFEGGCLEGVVAEVGRRLWGDGWR

SEQ ID NO: 669 - protein, 211 aa, Spizellomyces punctatus
  source 1..211: note = CDS = complement(5003..>5638), XP_016609665.1 - glutamate 5-kinase CDS
PGSHLGTGGMVTKLVAADLATAAGCTTIITLSHPPLIPTILAEIQSHTPNTPFCPTHGTHFLPRPNAMMDRKWWILHGLKSFGAIYLDKGAVRAVMNRHRSSLFAAGVARVEGTFNAQQCVRLLTIIHKNDTETVIEIGKGLVNYSFAECLRIKGHKSSEIEGLLGYVDSGCVVHRDNLVITNRDVDVESIVLEGVSRRGSEEDNSPVASG

SEQ ID NO: 670 - DNA, 5845 bp, Spizellomyces punctatus
  source 1..5845: mol_type = unassigned DNA; note = Fz = 2119..3978
gaacagtacttggtagattgctacaaagagagaattgcctatagagctgctacgtgggaatttcttctcttgttgttggggcgtctattccttatttctacaacacactagtcatttgattgttttgattgataagatggaaacacgtcatttgattttttatctttttattattactcttcttgtactattctcattcttattcttattctagagtgggattcatgctatggagagtgtagtcgctgtatcatatgtatgcacacatttcatacacacatacaatgcacaaacacacattgcacacacatacccgcccacgtacacattgcacacacacacgcatgcacacacaaacgtgcacactgcccgatattcaaccgcaaatggcaaatcaatccctccatgaatcattcttatcagcaaatggctttcaaacgagaaaaacggctgtttttaaaacatttttcactcctcaaatttatcccttttttaacccttctgtctctcatcacacaaaccactgatctgcgcaatttgccgtcatttggtcacgtgggagcagccatactcgtattatttcatgactgtgcctttaaactatcggacaggcggactggagagcgggggcagagtgttctcttcaatcttgtggttcgggttgatttcgggtttgaaattgagcgctcggatttagcgttgcgtgtttagcatttgggtcgagggctaacgctcgtcgtggagatatacaattggagagactgaccatttcagcaatgggcaatggagagagggagctctatcgttgatgcatttgcactctgcccaactctctaccattctagacagctcttatcaagaatcaaaattatgatctgaaacccacttttgtctctcaaatcttttgtcaactcgatcagagagagaggcagatatggcggcattgcaaaaatctctgctagtcacgaccgccaggcaaaaatgttttatatttccttggttacatttgtttattcagttgggggtgcatgagattccgagagcatcgaagtacaaaagcaacacctagaatcaattaaaaaaaataaacaaaacatgaaaagacatgaatcatccagcaaacaaagtatcgcacgcacctagaagccaacaaggcaacatcctgcaaacaaaacggacactttttcgtatccggcaactgaactcgtaaccgaaaataccatctcaaccccctcaaaaaccaatacaccgccatcccaaccgtaaaaaaattgagtgtctgatgaatgaatcggcctaggttgactgtcacggctccatcggtcgcggcttcttcaatcgttttgggacgacggccggttttgcctcggcggagaacaaaaaagatgttgatgaggcggtggccggtgacgagtgtaagagggggtaccatgacatcgttgacaaaactacgcacaaaatcttggaatctatataatgatggaccgaattggcaaaatgctctcgttctggcaaatctcttataaatacatacgcctgaccaacaataacacccacacccgtctccaagacccgattctgcaatacaaaaagcttgaattcccggaaaaatgcgtctgttttttcgagtgctgctgtcgtgaggtcttcaatgtctgtttcgtatgggtcgtggaggattggggtgggagaaaagagggctggtgatggtggggttggtggaggtggtggggtgcttggttggcgggatgtgctggggcgcactgcgctagtcgagtgacgggccattttgcaaaatgtcaaacagacaatagttgaagtgggaatcacagcgggaatcacagccagaagcgtgttgcttagctgcgtggacagtcgcgtgtgactcagcgtccgatatcttacaaggtacatagtgcggagccgatgggtattggcactagtacaaagattccaaccaatttaatcataattttactcgatttagactcatgaactctggtttgatccaaaaagtcctatataagttgtcgtgcccattttcccaggctttcgtctttttccacagatatcatcatgccaccaaagaaaaagcaaaaactcgaaaaactcgacaaacctacttgcttacatacctgcaacaagacttcctttgcaaaagctttcctgccaaacgagatctcccgccaacggcttctagattacattgccatcatccatcaactcgccaaccatgcttcccacgcactgaaattctatctcctttcatcagcaccagcttttcccacggtaaatcaagagacgattgaagtcatcctctatcttctcaacaaaggtgaatcgtggcaaccaaaaactgatgcgaagaaggcgttacgtgaatgcttgtggccatatgttcgacggtactgccgcatcgttgatttttctcatccaaacctgcgaggcgagcaacaatcagtcaattacctgacagcgagtatgatgacgaatctgaaggtcaatgtccaggaacacttcatgatgatgctgctccggtacattaatctgcggcttgatctgaagggacagaagcagcgactaccactgaaaagcgatgcgcgaaacgctttctttgctcgtcttcgctacttgaagtcaattttcctttttgatatcgtgcctgagtcgctcgatgatttgactgctgaagagagtgaacttctagaagagatctggtcattggatctcccattccttcccgacaatccccttgcctacgccattgttgctgatccgatgtcattttttcctgcgtactgcaaactctctgggctgtatgaacgacatggcttccgacggttcagcgcgatacctcttcgccggtctctcattcaaagccatgtccggattgacaccgtcattctctacacccacattctttgcatttttcgcagagaggcagaagcggtcgaaaaggatgatctgtggttgcgcgtctgcaatctacgcacgaaggcttttcggtctcgccgcggcggcggtatgcagtttgaaggctcgatcacgacggacggaacctcggtgtctgtgtatttgaaacaccctgacgccgacaagtacggaaagcgcggaggaaagaagaagtcggcaaagactctagcagctgaggtgaaggcagtatatgtggaaaaaaacttgcctgcttgtcgagcagcagagaacgtcgtcgttatcgacccaaacaagcgcgacgttctctactgccaagacaacaagggcaccatcttccgttacaccgccaatcaacgctgcaaggagactggaagccgtcggcagcaaaaggaacggcagtggatgaagaaggaagcgggaatggaccttatagaatcgcgaataccatctcacaagacgatgaacctcatggatttcctccgctacctcctcgtccgtcgtgtcgactggaaccgccgcaaggacttctattcgcatcctgctcatactcgatggaaatggcactccttcataaaccgtcagaagagcgaatcagacctcataagtaacatgcgcaacaagtacggtgaaaaccttactgttgtaatgggtgattggagcgacgccggtcgaactgcaagatttcagacctcatcaaagacaaaaggctggcgcaccctctttaagcgcaaccgcattgattgtttccttctcgacgagtacaagacctcatctgtttgccctcgctgttcctcatctgagtttgtggagaaaaaattcaaagaacgacctcattcaagaccttatcgacgacgagaaggcaagattgaaaaagtccatggattgctgggttgtaccaaccctaactgtttgcagcaagcctggacgatgcgctactggaatcgagatacgctgagcacctgcaatatgctaacgatcgtgcaatcaatgttggatggacacggtagaccagaagtgttcagcaggggtgttccagccgtagcttagattggttagattaggttttccgagccggttgtcgcgcggttcatccctggtgcgggtgctagtgccaatacccaccggcgtccgcactatccatcatcttgtattctctggacaggcttgtttatcccatacacattctatatgccctatctcgacaaatgcctctaggcaacgatggcacacattattcgacacgtccttgtcctttctaatgtcccatcatggacctcacatctaccatcattccccgcattcccattctactcgtacccgctcccatcctctcatcccacgccgttctcacaaactcatcaccatcatcgccatcatcaccacgcaatcacacatatcacaaatcctctcgtcgcaatttctgataataactcgcctacacatgaacaaattaccatcgcatgaaccaccagtacaatccacacacacaaaaaacatacctttgtcacaacatacgtgtacaaactctttagatcgtgaccttgatcgtattcttcaatcagtttaccgttattgtatctatgccatgtcatcagccatcatttacaacacccaacaaaataattgcaaaaataacgtacagatgaagtgttggatacccatccacaccctcctcttcacaaaactctgtattaaagaaaatcgatatcaaccctcttgtctttttctttaaagatccactctttccaaaacctaccttcttgatccgtgcaatccacttttcccatcttgatcccctgcaccgcatcgagcacccgctcctgaatcgtcaaccaagtcggcgacaacctaaaccgcccaacacttcaactcccattctaaagctaccaaacaaaacattgaaaacctactgtttacaatacttgcaccacctcgccccaaaaaacaccaaccaggtcccatcggatatcgtctgcttgaacaccgtgtgggggataaatgtaatgttttggtcggcttgggtggcgagtttggtgagttcggattgggaaatgtgttttatggtttgggaggtcgttagtgtgaggatgcttaggagcgacaagaggaatgggaaatgtaaatgcattgtttttggaattgtgttcaaaagtggatttggggaggatgtttgattacgctgttaaacggcaccgtgtgtatgtcatgtgatggggttgttgttatgggaatagtgtcacccatttgggtgacctcagcatagcatcccaagaacttgtgcatttttggatgtgtgtgtgcgtagatggctatgctacgtatggttcttgtaaagttattctcggttttcttctccataaagaccaggacctcttaccccaccaaccccgttcatcccacagcatgacgattaaattatatccaggaagataaaagaggagattgaaaaaataagtggattgtcagagaacggaattttacagcatgatgagatatcgggaatggagcatttacgtttttcagtaagtattgctatctagttactcgactctcaccattcttcagcaatgaaaatgatacacatccaaacatcatggtaaccatcacaaacaataaactcgtaaagcatcccaacataaccaataaaatattctacatttacaatcagtccctatccacaaccctccaaacatacaaataatacaaaacaaccaaaacaaaaccaaccaaataggcaaaaaaaaatacgatcataatatcatcacaacgtattcaacctcgatttttgagtaggcgacacccgtttctttccatcctctacttttttccgtccttctgcttcctttttccgtttttctaatctggctttttcgttcgacttgtcaccaccactttgagaatcaccttctat

SEQ ID NO: 671 - protein, 212 aa, Spizellomyces punctatus
  source 1..212: note = CDS = join(complement(1535..1788),complement(1140..1469), complement(1011..1065)), XP_016611116.1 - large conductance mechanosensitive channel protein
MARHSTSAVRPSTSRQPSTPPPPPTPPSPALFSPTPILHDPYETDIEDLTTAALEKTDAFFREFKLFVLQNRVLETGVGVIVGQAFQDFVRSFVNDVMVPPLTLVTGHRLINIFFVLRRGKTGRRPKTIEEAATDGAVTVNLGRFIHQTLNFFTVGMAVYWFLRGLRWYFRLRVQLPDTKKCPFCLQDVALLASRCCFCTSMLSESHAPPTE

SEQ ID NO: 672 - protein, 113 aa, Spizellomyces punctatus
  source 1..113: note = CDS = complement(3139..3480), XP_016611115.1 - uncharacterized protein
MSRMRIEVLAAVPVDTTDEEVAEEIHEVHRLVRWYSRFYKVHSRFLLHPLPFLLLPTASSLLAALIGGVTEDGALVVLAVENVALVWVDNDDVLCCSTSRQVFFHIYCLHLSC

SEQ ID NO: 673 - protein, 157 aa, Spizellomyces punctatus
  source 1..157: note = CDS = join(complement(4845..5062),complement(4691..4782), complement(4575..4620),complement(4434..4512), complement(4331..4369)), XP_016611114.1 - uncharacterized protein
MHLHFPFLLSLLSILTLTTSQTIKHISQSELTKLATQADQNITFIPHTVFKQTISDGTWLVFFGARWCKYCKQLSPTWLTIQERVLDAVQGIKMGKVDCTDQEEFCEEEGVDGYPTLHLYNNGKLIEEYDQGHDLKSLYTYVVTKASYYQKLRREDL

SEQ ID NO: 674 - protein, 49 aa, Spizellomyces punctatus
  source 1..49: note = CDS = complement(5696..>5845), XP_016611113.1 - uncharacterized protein
IEGDSQSGGDKSNEKARLEKRKKEAEGRKKVEDGKKRVSPTQKSRLNTL

SEQ ID NO: 675 - DNA, 5340 bp, Spizellomyces punctatus
  source 1..5340: mol_type = unassigned DNA; note = Fz = 1256..1336, fz = 1338..3095
atgtcattgctaaagcgtgtgcttagactctctggtctaggaggctttgaagatgaggaaacggagcaagaaacttcgaatagcattgtaaccgacgctagaggtaactgcggcgatctgagccggcccgacggcaactgactggcacgagaacacgcgagcatgaatctaaagatatcctggtctcctttttgcagctgcggagagtcagacatttccgaatgatggggaagaagtagacgaaaaagaacccgacggagctgaagtgtggtcggaagacgaagcgacacaggacgtggctcctccgacggtttctgtaacggtcaaagaggcagttgaaagatttgaaagtctgacaggaaaagggcagctaacaacagctgcccaacatttcgtcagccttgctgtcaaaaagagtccaaagccagggtcgatacagagttcagctcagggtacgcattccaagattgtgtccgtcgaagcggtgccgtcaggggtagaaacttggtcgcaggaagacgggcttgtcaatatcctagacgctacaggtgtgctcggtctgggacatgaacgctttcggctccagaaggctcatgttgtctactattcgtccgttcagcgtcttcaccgttgaattcagaagaaactgttacccttgctgatagctccggtgcgctgcgtacaaaacaaacgaacccaacaagttcgatattaggtagggctacgggaacatcctcgtcaccccgccgaatagctgcttctcgaacgacaagcgttttggttgatatcacaccaaaaactttacgaaggccattaaaacacctcgctccctctgtacaaagcgcggaaaatcctagtctcccttcatcgcctttaacgctaccacagtcggagccgatcaccgaacagtctgctgaaggtcgaagaccggaggttactccatcaaagagaacaggcgatgcttcatcaaccgcgtcgccggtgagcccgcggcagcaaaggcagacatcaggactgggcgaaggacgttatgcagaaggggctaaatcaacgtatccgaacggcaaacccggggtgtacgataaggttgtcacgcggccttacaaaaaatggcaacatacgacaccgctgccagacaaacgacgatcgcttctcagcaagcagtcgtcacccggagggatggttatggtagaaggcattgacctaacgcaaagtcagggagatgagcccttgcttggggaggttgctttcataaacgacgggtgagtggtcccgtaattagagtcataatcattggcactttggagttgacgtaatcgcttatttttcagtatggactcttcacgtaacgtatcattaaaccccacctctcctgtacttgtcgcggaggaaccagaaggtatggactatactgccttggcggcgaacatcgcaactcaaagtccgcattgtagaacaatatacgcttgaggattttttatcgcctggacaagacgattatagcggtccggtaattgaggactttgccgtgggcgccaaatatcaggtttcttacaatccacaatggtctaaacgtcgacgcgatggcgggaccgagacagatcgaatgaagaagatacggcaaggttgaggatataaacggcgaatatttcatgatttggaaactccgatgtttgcattattgtagtatattttttgcagatatgcgtgcatgtagatatctaatttctctgtcaacttggtctttgcgagtaaaaggcagaatcaatagcgagaatatatgttcgggccattctttcccattatatcaaattgtggcaatattcttctgttgaatctcagctcattagggcactaacatataggacactagcgtcagacgtagttacttgaacatcaaatatctagcaagaagactccaatggcagcgcatgcagataacttggaaaatcaccacgatgtgtagatacatagtgcggagccgatgggtattggcactagtacatagattccaaccaatttaatcataattttactcgatgtagactcatgaactatggtttgatccaaaaaatcctatataagttgtcgtgcccattttcccaggctttcatctttttcagatatcatcatgccgccaaagaaaaagcaaaagctcgaaaggctcgaaaaactcgacaaacccaccttacatacctgcaacaagacgtcctttgcaaaggctttcttgcctaatgagacctaccggcagcgtcttctagattacatcgccatcatccatcaactcgcttcccacgcttcccacgctctcaaattctacaccctatctgcaccatccttcaccgtgaatgaggagaccatcgaagcgattctctaccttctcaacaagggggaggcttggcatccaagaaaggaagcaaagaaggcatggcgggattgtttgctgccatatgttcaacggtactgccaaatcgtcggctttgttcacccaaatctacgaggcgagcagcaatcagtcaattacctgacagtgagtatgatgacgaacctgaaagtcaacgttcaagagcatttcatgcagatgctccttcggtatatcaatctgcggctcgacgtgaagggacggaaagggcctccaaagagtgaagcgcggaaagctttctttgctcggctacgctacttgaagtcaattttcctttttgatattgtgcccgagtcacttgatgacttgactgctaaagagagtgaacttctagaagagatgtggtccttcattcccctttctgaccagcagctcgcatattcggttgctgtagaccctctcgctttctttcctgcatactgcaaactctctgggctgtatgaacgacatggcttccgtcggttcagtgcaatccctcttcgtcggtctctgattcagtcccatattcgcatcgacacggtcattctctacgcccacatcctctgcatcacccgccaagaagcagaagccgtagagaaggtcgatttatggttgcgcgtctgtaatctgcagaacaaggcttttagatctcgtcgtagaatgtggtttgaaggctcgatcacgacggacggaacctcggtgtctgtatacttaaagcacccagaagcagacaagtatggaaagcgcagcggagggaaaaagtcagcaaacacgatggaggcagaggttaaagcgctttatgtggaaaacaacttatctgcttgtcaagagaactttgtcgttattgacccaaacaagcgcgatcttctctactgccaagacagcaatggtacaacgtttcgctacaccgcaaaccagcgagccatggagacaggcagccggcgatttgcaagggagcgggaagcaatgaaagccggcggtattgacctcatagaatcacgtatttcaagccacaagacgatgaacctcatagacttcatgcgttaccttctcgttcgccgcgctgattgggatcgtcgcaaggaattctatgcccaccctgctcatactcgatggaaatggcatgcatctataaaccgtcagaagagcgaatcgaacctcatatccaacttgcacaacaagtacggtgaaaacttcaccattgtgatgggtgattggagcgacgccggtcgaactgcgagatttcagatctcatcaaagacgaaaggttggcgcaccctctttaagcggaacaggatcaactgcttccttctcgacgagtacaagacctcatctgtttgccctcgctgtttggcctcatccaacgacttcctcaaaaaaggcttcaaaacacgagctcattcaagaccttatcgacgacgagaaggcaaggttgaaaaagtccacggattgctgggttgtaccaaccctaactgtttgcagcaagcctggacatcgggaatgcgctactggaatcgagatacgctgtcaacctgcaacatgctaatgattgtgagatcaatgttggatgggcactgtagaccagaagtgttcagcaggaggagtgttccagccgtagcgtagaacgtagattggttagattaggttttccgaaccggttgtcgcgcggttcaatccctggtgccgccaatacccatcggctccgcactatgcaactctcataaattatcattatcagtcaaaagctacctcaaactacccgtaaatgcatgattaaatcgatcactaacttcaacagctcagcaagctcctctcccataccggcaccactaacctagaattttacgacctttttctttgaagacttcctagtacctggctttgtagtctcagccgccttttctttgtcaccttgcatcttatgtagcgctacgaacacatcgtcatcgtcaccaccttgcttgagatcgatggtgcctagcgtggtaatcccagcttctagaaacgatacccggacagagattgagttaagcctgtgattcatgtaccatgcacaacaaccatttacgtaccctgcaacgcaggcttacagtccctcgccaagtgcctaactgaaccacagtatttgcaaccgcctccgttcggatacagaccccgttcattttttgggcataaacttgccaagtggccttgctgatcgcaaacaaaacagtgcgcaaaaggatatgggttctctaaaataaggtgaccgccaaacatgattaaattgtcctggtgtgtaattgtatgagtaaattagctattgtataaggacacttactaggatccaccatttttttgcattctgatgatttgtgggcagtagaaccgcacttgtaacaaattccggatacggcttgtttatcttgttccgtagctttcggacagaattttatggagtgccccatgcttctgcaaaggtagcagaccttgaaagcaatcgatatcagggtgtcttcataagaataaagatcgttactggcataccattttcttctccctcattgcttctctccttgttcgtcttctgagggcttccctctctaaaaaccacccaccatttagtcggctgctctcggtcggcctcataggtatgtacggatactaaccatactttgatagaccatcctcggctacttttcccttaccccgctttcccccagatgtaccggcaccctgtgtcgactcagcttttgatcgatggcgcatcttctttttcttttgagcggatccacctgtagatggagcagctggagtgttgtctgtctgtctctcaccaaccgcagggctattgtcctctccttttctcttcttattcggcttgggcgtcttttcgctgacttctgtactatccgctaccttcggaccgtcactcgttccctccggagattttttttcct

SEQ ID NO: 676 - protein, 194 aa, Spizellomyces punctatus
  source 1..194: note = CDS = join(complement(267..364),complement(15..177)), XP_016612092.1 - ribosomal protein L7/L12 CDS
MGDDRVSRLVHLSVRSFWRSGRTVNGGRALPKTHHTTCNPILPATVRTFASTPSTRQEQVDPKITKIVDQIAALTLLETAGLVSSLKARLNIQDIAMPVAVPAAAGNAAAAAAPVAEEKPAEKTEFKVKLEKFDAASKAKIIKEIKGMIPGANLVEAKKFVESVPKVIRENVNKEDAEKMKKTLEALGATVILE

SEQ ID NO: 677 - protein, 84 aa, Spizellomyces punctatus
  source 1..84: note = CDS = join(712..795,857..1027), XP_016612093.1 - uncharacterized protein
MTIRRTGLQRDVLDLYRSLLRVVRTKPESSRDHFYKYIRSQFRQDASSVSQRDISTIEFMLRKGRRQLEVLKSDSVVDISPPSY

SEQ ID NO: 678 - protein, 106 aa, Spizellomyces punctatus
  source 1..106: note = CDS = complement(2045..2365), XP_016612094.1 - uncharacterized protein
MSRLFGSITTTFSAVRQAGKFFSMYCAFTSSSKLFADFLAPRFPYLSASGCFRYTDTEVPSVVIEPSNCILRRDRKALVRRLQTRNHKSTFSTASASWRVMQRMWA

SEQ ID NO: 679 - protein, 205 aa, Spizellomyces punctatus
GDYAEEMGYGFAAGDPVNGFISCTLIHCGIEGCWTHLVDVWRSGFFDALKIYIPVHLLPALIFHRRRFFSNQFPSTVLHVATNALRSSTFLATFIAGVWAPICVVRNVSRQDTTLGPLLGSFLCGFSLLLERKSRRREIGLYCLPKALESSWWRITHALGMGGIKIPGGDVALFAMGMGYLLSAYQYHHKALRPAVRGLLGFFLV

SEQ ID NO: 680 - DNA, 5710 bp, Spizellomyces punctatus
  source 1..5710: mol_type = unassigned DNA; note = Fz = 2001..3839
accctccttctgtcctcccagatcctcaaaagagcagtcctatccgtctatgcttctgattggtaagttgattcgacactgagagcgaatgagactcaacgaaccttgccatggtgggtcatgggaatgtcatctataaaaaatacataatccggtcgcgcatagaaaggaagggttttttcgagcagctggccaatagcatgtctcaattgcactgggttccggtctctgcactgggctaccacaaatgctacaagagtagtaggacaaaagctccgggtacggtccacatagatggccctattcattacaaaggttaagtatattctgaaaatgtgtgatgaagcaggtactcactcgctgcgaactacccccggaacaacatcaatcgctcctgcaataacttccagatttattcggtaacctagccgtttaattgaattgctcgttcgccccatataggtcattacattcgtaagagaatcaatgtgaacaaggtcaccagtaggcctaaggctgctccgtgtaagatgttggaatcaacgaagtagctttggcgtcctacctttcccctttgacttcgtctcctacataacatatccgcttcggtcctccaatccataattcgccagtgttcctctgcatgtttggcacacatatttctgtatcgtctaaagcctctccaatgctgaccggcgttttatcgaccttttgtaaagtcgcccagacggagcactccgtagtgccatatatattccacaaattcaccagtgaagatcttcgctcgttcactaaactaattgggaatggctctcccccaagaatgatgtcgcggacagtcgtctcagccgccagcaattttgattggtctgccgaatcaaattgcatgaatagcgacggagtcatgaacagatgggtcactgcagttcttcgaatcatatcgaacagcattggcggattcaagagtgtgtcgtggagaggaatgacaatggtgcctttcgtggttaagggaagtagcatttctaccaaagatgggtcaaacgtcggggcggaaacttgcaaggtcacaataggagtagagtttccgtttagacgcttgctgatgaggaatttagtcctatacgttcggcagataatcgcggatctatcgcacgcaccctatggcggttatatttccggcaatacacttatgtggcacccgaactggcatgcctcttccattcctggtagttccggaagtttggatgatgtaggcgagatttactgactcaaaggcttcctcatggtctggcccaataggctcattaaactttagatcccaagtaatacactcgagaactcctgtacctttgatcacttcatctcgcaccaaaaggcagtatccaggaagtgagaagacgttttcaatgcgtactcgctcgatttccttggggaccctctacgccaacatcaaacacttgccgaatcgatgaggatcaatcaagacttacttccgccgtggaacgtttacatagtacatatcgtaacttgggcatccgttgtatcgtagccgcgctatgaattagcgagcgagtgtgtgcagataaagggaaatacgtagcacccagctggaaaagactgcacgaataagggatttttgccaccaagttgacgaagaggaccgcccaggcttaccttaatagcgtgatgacaagtgagtaggagctgctcattatcgttgcgacatagctgaagcgttgaatctggatgttctgttattttaatgtcgcccctcgtcagtctctggtccactcaccccaaaccgcttgaattctaacgataattgttcaacttgtgagacaacatcccggtaggtaagcttgacaagccgctgatgtgcatcgccagtagtctcttcttccgcaataaccgctacattattcggacatattcccgcatttgttaatatttttgcataaagagtcatatgcttttccttaaaactcgaaaaactcgacaaacccaccttacatacctgtaacaaaacgtcctttggaaaggctttcttgcctaatgagacctaccggcagcgtcttctagattacattgccatcatccatcaaattgctgaccacgcttcccacgctctcaaattctacatcctatctgcaccaacctttcccacagtaaatcaagagacaattgaagccatcctctatcttctcaacaaaggtgaatcatggcaaccaaaaaccggtgcgaagaaggcgttacgcgaatccttgttgccatacatccaacggtactgcaacatcgtcggcttcgttcatccaaatgtacaaaaagagcagcaatcagtcaattatctgacagcgagtatgatgacgaatctgaaggtcaatgtccaggaacacttcatgatgatgctgctccggtacattaatctgcggcttgatgtgaagagacagaagcagcgactgccactgaaaagcgatgcgcgaaacgctttctttgctcgtcttcgctacttgaagtcaattttcctttttgatatcgtgcctgagtcgctcgatgacttgactgctgaagagagtgaacttctagaagagatttggtcccttagcattcccctttctgacgaccagccactcgcatattcggttgctgtagaccctctcgccttctttcctgcatactgcaaactctcccgactctatgagcatcacggatttcgacggtttagcgccatacctcttcgtcgctcgctcattcaaagtcacgtgcgaatcgacaccatcatcctctactctcaccttctttgcatcacgcgacgagaagcggaaactgtcgaaaaggtcgatttatggttgcgcgtctgtaatctgcagaacaaggcttttagatctcgtcgtggaatgtgttttgaaggctcgatcacgacggacggaacctcggtgtcagtttacttgaaacatcctgaagctgacaagtatggaaagcgcagcggcagagggaaaaagtcagcaaaggctctagcagctgaggtgaaggcgctgtatgtggaaaacaacttatctgcttgtcaagagaacattgtcgttatcgatccaaacaagcgcgacattctctactgccaagacaacaagggcaccatcttccgttacaccgccaatcaacgctgcaaggagactggaagccgtcgatttgcaaaagaacggcagcggatgaaaaccggcggcattgacctcatagaatcacgtatcccaagccacaagacgatgaacctcatggactttactcgctaccttctcgttcgtcgcgcagattcggatcgtcgcaaggaattctactcccaccctgcccacacacggtggaagtggcatgcatttataaaccgtcagaagagtgaatcgaacctcatatccaacttgcgcaacaagtttgggaactttaccattatgatgggagattggagcgatgccggtagaactgcgagatttcagacctcatccaagacaaaaggctggcgcaccctctttaagcgcaaccgcattgattgttttcttcttgatgaacacaagacctcatctgtttgccctcgctgttcatcctctgagtttgtcgagaaagaattcaaagaacgacctcattcaagaccttggcgccgtcgcgaaggcaagatggaaaaagtccacggattgctgggttgtaccaaccctaactgtttgcagcaagcctggacgatgcgctactggaaccgagatatgctggcaacctgtaatatgctgacaatcgtgcaatcaatgttggatggacacggtagaccaaaagtgttcagcaggggtgttccagccgtagcgtagattagttagattaccttttccgaaccggttgtcgccggttcaatccctggtgcgggtgctagtgccaatacccatcggctccgcactaaagagtcatattagatatcgctgctgcaaaatctgcactgtcggtgatgacaagttaattgatttaccagccacctggtgtactacatttttccagtccaagctttcggctctcaaatggcctcctccagagatggatgtgacggcgctcaactattctctccacccctatggattcagaggagggcactggtttcacatatattgaagaataatggagtgcagtcggtacgtgctttcatttactagttgtccacctcaatggcagctgactgtcattgacccaggtcctagatcttgggtgtggagaaggggcgcttctcgaaatccttctcaatgaccctacattcagtaaactggctggggttgacattgacggggaatccctccgttacgcttctgttaattgtgcgcctaccgactatgacaggcagtaccttagagagcttcccgtagagttcaatttatacgagggtgcgactacgttcgaggagttgcgatagtttttgaatatgtcctattaagatccattgcatctgctcaggctcggttgatcaattggataagagtctcaccgggttcgatgcgattacgagtgtagaagtgtgagttgtcttaaggaaattgagtttaacaatgtactctgatcttactttctcacagaatcgagcacttggacccacctgtattggcagcctttcccgcggttacgctcgggggctacaggccgcggatcatggtcgtaactacgccaaacggcgacttcaacgttaactttccggatctgaaatggggtacaccggaagcaggcttccgtcactatgatcatcggtttgagtggacacgagatgaatttcaacgctggttcgttgcgctctcaatggcagatctgatgaggtgttaacagatggcggtagggcaaatagtgccgcaacgaaatttggttataccgtttcctttgatggagttggtatcctatcatccaaacctggcgacctctccgtcggtcactgttcgcaagtggcaattttcattcgtcaacgttgcgactatgactcgccgctcagtagtctcgatgactgtcccgccctttcggaaagtccatacaagcattatgcaaaaattgaattcccttacttcaccgaaagcggatttagtagcgaggctatcacccaggaactgaaggagaaaacatttccactgatatggaacgagtggtattcaatgatcgaagatgcaaaacgagatcaacttgctgcgaagctttcttggcctgccgtggggacatggtgtcttcctttcgaacggtattggagcatactgcgaatacgacaattatgtaagacgcggggtcgtcttgaggaggtctttacgtcgtcggcggccaaggagagttttatttggaatgatgaagaaagaaaagtggtgatcctctttgagataccgaaggaacatgaatcagaggaggatggaaccgaggacgcagactggggctacgggagtcctgcgtacgatgactgggatgatgatagcgcctggaaggacactaaatggaaggcttctcgggatagcgacggagagggctggggcactgcacacatcactgcagagtgggattgccaagcaggttggggtgaagagattgctatatatggaagtgccgcaaatcctccaccaaagaaggtgcggttgctggaggatcctggggggaacgacgggatcactatctgattctaattttatttgcgtattcttcctgtacatattgatagtaaattggc

SEQ ID NO: 681 - protein, 493 aa, Spizellomyces punctatus
  source 1..493: note = CDS = 2361..3842, XP_016607575.1 - uncharacterized protein
MTNLKVNVQEHFMMMLLRYINLRLDVKRQKQRLPLKSDARNAFFARLRYLKSIFLFDIVPESLDDLTAEESELLEEIWSLSIPLSDDQPLAYSVAVDPLAFFPAYCKLSRLYEHHGFRRFSAIPLRRSLIQSHVRIDTIILYSHLLCITRREAETVEKVDLWLRVCNLQNKAFRSRRGMCFEGSITTDGTSVSVYLKHPEADKYGKRSGRGKKSAKALAAEVKALYVENNLSACQENIVVIDPNKRDILYCQDNKGTIFRYTANQRCKETGSRRFAKERQRMKTGGIDLIESRIPSHKTMNLMDFTRYLLVRRADSDRRKEFYSHPAHTRWKWHAFINRQKSESNLISNLRNKFGNFTIMMGDWSDAGRTARFQTSSKTKGWRTLFKRNRIDCFLLDEHKTSSVCPRCSSSEFVEKEFKERPHSRPWRRREGKMEKVHGLLGCTNPNCLQQAWTMRYWNRDMLATCNMLTIVQSMLDGHGRPKVFSRGVPAVA

SEQ ID NO: 682 - protein, 457 aa, Spizellomyces punctatus
  source 1..457: note = CDS = join(4047..4157,4217..4403,4474..4534,4593..4793,4847..5660 ), XP_016607574.1 - uncharacterized protein
MASSRDGCDGAQLFSPPLWIQRRALVSHILKNNGVQSVLDLGCGEGALLEILLNDPTFSKLAGVDIDGESLRYASVNCAPTDYDRQYLRELPVEFNLYEGSVDQLDKSLTGFDAITSVEVIEHLDPPVLAAFPAVTLGGYRPRIMVVTTPNGDFNVNFPDLKWGTPEAGFRHYDHRFEWTRDEFQRWANSAATKFGYTVSFDGVGILSSKPGDLSVGHCSQVAIFIRQRCDYDSPLSSLDDCPALSESPYKHYAKIEFPYFTESGFSSEAITQELKEKTFPLIWNEWYSMIEDAKRDQLAAKLSWPAVGTWCLPFERYWSILRIRQLCKTRGRLEEVFTSSAAKESFIWNDEERKVVILFEIPKEHESEEDGTEDADWGYGSPAYDDWDDDSAWKDTKWKASRDSDGEGWGTAHITAEWDCQAGWGEEIAIYGSAANPPPKKVRLLEDPGGNDGITI

SEQ ID NO: 683 - DNA, 4560 bp, Spizellomyces punctatus
  source 1..4560: mol_type = unassigned DNA; note = Fz = 1141..2961
gcccaatgctggcggctagagcgagagacagagccccacccatgctagacgaggaggactattagcattgaatgcggctgttgagtcaagtatgttacgcaccaaaatcctattgaaccaatttttctgctcaagaaaagtcattcgtacaaagtcttgcattttttgcagtgtacagccgtgggaactgtaccttttaccatcctttctcaaatccttgaccaatttcgatagctcatctatggctccgggccaatccaattcgtctcttagatgtgccgcttcctgacaatcattttcgagtattcaccacatagcattgacgatggatcacaaaacgacgtagtatctcttacagcggcgtcgagtgcttgcttcccccgatacagatcaggaacaattgcgattgctccagtatcatttgcaaggtgttgcgcgtgtgcttttatttgctcgttgatgccccaccattccttgcaggaccaatgtatgttaacaaaagcagtaaagatatcgtcccctccgctgcatataaagaagcacaatcgcaagtccttacctgcaagacaataataactggttcaggaacaaaagagccttctgtattgaggtcgtgctcgacttctccttgtggttgaaactcgagaacgggaagtgacgacttgtgcaaacgggaaccggccgaaaaccagcgtccctttagtgctgggtttagcagaggagcgcgagcgtggaggccacgaaggactctgaagggagtttgtaggaaaggcatgtcaggctacaagcttctgttgggggagtattcagatgaaaaggtctaaagttgaaggaccaaggcgagcatgactcatatcacgtcacgcgttgtcgacaccagccagtgcgaacaagtagccaagaaaactgttgttggattccagagggagcaacatagtgcggagccgatgggtattggcactagtacaaagattccaaccaatttaatcataattttactcgatttagactcatgaactatggtttgatccaaaagatcctatataagttgtcgtgcccattttcccaggctttcatctttttccacagatatcatcaatgccaccaaaaaagaagcaaaaactcgaaaaactcgacaaacctacttgcttacatacctataacaagacttcctttgcaaaagctttcctgccaaactaccaccaacggcttctagattacatcgccatcatccatgaactcgcttcccacgctctcaaattctacatcctatctgcaccatcctttcccacggtagatcaagatacaatcgaagcgattctctatcttctcaacaaaggagaggcttggcatccaagaaaggaagcaaagaaggcatggcgggattgtttgctgccatatgtttaacggtactgccaaatcgtcggcttcgttcacccaaatctacgaggcgagcagcaatcagtcaattacctgacagcaagtatgatgacaaacctgaaggtcaacgttcaagagcatttcatgcagatgctccttcggtatatcaatctgcggctcgacgtgaagggacagaagcagcgactgccactgaaaagcgatgcgcggaaagctttctttactcgactacgctacttaaagtcagtttttctttttgatactgtacctgagttgctggatttaacaccattggagagcgaggttcttgaagagatttggtcgctcgatctgccttttcttgttgacaatccactcgccttcgcagttgtcgtggatccaatgtcctttttccctgcttactgtcggttgtcaagcctatatgaaaagcatggatttcgacggttcagtgcaatcccacttcgccgctccctcatccaaagccacattcgtatcgacacggttattctgcaccagcatatcctctgcatcacccgccaagaagcagaagccgtagcgaaggtcgatttatggttgcgcgtctgtaatctgcagaacaaggcttttagatctcgtcatggaatgtgttttgaaggctcgatcacgacggacggaacctcgatgtctgtatacctaaagcacccagacgcagacaagtatggaaagcgcggagcgagaaagtcagcaaagactctagaagctgaggtgaaggcagtatatgtggagaacaacttgcctgcttgtcgagcagcagaaaatgtcatcgttatcgacccaaacaagcgcgacattctctactgccaagacagcaatggtacgacgttccgctacaccgccaatcaacgctgcaaggagacaggtagccgccgaattgcaaagagacgagaagcaatgaaagccggcggcattgacctcatagaatcacgtatcccaagccacaagacgatgaacctcatggactttactcgctaccttctcgttcgtcgcgcagattcggatcgtcgcaaggaattctactcccaccctgcccacacacggtggaagtggcatgcatttataaaccgtcagaagagtgaatcgaacctcatatccaacttgcgcaacaagtttgggaactttaccattgtgatgggagattggagcgatgccggtcgaactgcgagatttcagacctcatccaagacaaaaggctggcgcaccctctttaagcgcaaccgcattgattgtttccttctcgacgagtacaagacctcatctgtctgccctcactgttcctctgacgttgaaaaaggtttcaaaacacgacctcattcaagaccttatcgacgacgagaaggcaagattgaaaaagtccacggattgctgggttgtaccaaccctaactgtttgcagcaagcctggacgatgcgctactggaatcgagatacgctgtcaacctgcaatatggtaacgatcgtgcaatcaatgttggatggacacggtagaccagaggtgttcagcaggaggagtgttccagctgtagcgtagcgtagattggttagattaggttttccgagccggttgtcgcgcggttcaatccctggtgcgggtgctagtgccaatacccatcggctccgcactacatatgaagagggcaggcaaaataactactgttcggtaacactcctacttctacattacgtgttcactaaaattaaaacagccttccggaccagccggtggactgctacttacgcacccaagacccattttccaatgaacgcatcgaatcccatatcattgacaacaatatcaccatacaactctcgtaactctagacttgtaaagctctccaaggctgctctgtgtcttgatgtagatacagaaggtctcggcgttgacagctttgagtacgcgcaatcatcactatcttccacatccgagcttggctccgcaagccgtaggacagaacccttgagctcgctgaatcgatgaacggatcgagcatactccactgcggcctgaaatgttgcaaagaggtttagatcaaaagctgttcatcaaccatttggaggaaaaccatacctcgggggtcaagtctctgacagaaacatttcccactgatgcctgaccaaagctgtccacactgatattgtttgtcacccaccagcggggtaagtggctatttttacgacgaatccaaagggttttccacccgccatcggtgtcctctccaccggtttcagtctttcctcgacgaatggagaagatcctttcaatgggactgacgccagagtttcctcgtccatttgctcgtaatctcgtcaatggcctcactggagccaccgactcccgtttttgacgtggtccatcatcatccgctactcgggcaacattgcgaacgctgttttgcttgagccagcggaccggagcggaaaagactcgtttaatctttccccaattgatcaacgttttgcgatttgccttttgctgttgctcctccccatacttaaaatctcgggggatcgtagaatgtctatgggattggctgagcgtcgtgccgccagcggcaggggcggaagcaccttcagcgaccgctacccaattacgagcagtccatagagcttcctccagtagaacttctactggtgtcactgttgagggacaggactcccttgttggggttaacggctgaggactatcccggttgggtgcgtaattctctagccatgcatcagagtcaagaaacggaatctccagtggtatgcgaggcaaggacggaaggacatatttgttgtaaccggtgacttcatatagttcaggttttgtgtcattctgtagaggtgtccgattcggaagttcaggcggcgattcattaggtatgttcaactccatggtcgtgaatctggagtccacagaaagatgagccatgtacgttcgtgcagtcagcaaggacgattccgtttgtgctgtctgaatgcctttatccactttatctatatggtctgcattctcgacagtactggctgcagcaagcttttttgctgctgggtcggtagtactgaagtttgtggcgtcttctttggcgctgtcgttttcgatatcagtatttgatggtggtctcgacgcttcgacatgctcaga

SEQ ID NO: 684 - protein, 164 aa, Spizellomyces punctatus
  source 1..164: note = CDS = join(complement(560..775),complement(357..473), complement(194..285), complement(103..126), complement(<1..44)), XP_016610424.1 - uncharacterized protein
MPFLQTPFRVLRGLHARAPLLNPALKGRWFSAGSRLHKSSLPVLEFQPQGEVEHDLNTEGSFVPEPVIIVLQEWWGINEQIKAHAQHLANDTGAIAIVPDLYRGKQALDAAEAAHLRDELDWPGAIDELSKLVKDLRKDGKRKIGSIGFCMGGALSLALAASIG

SEQ ID NO: 685 - protein, 492 aa, Spizellomyces punctatus
  source 1..492: note = CDS = 1486..2964, XP_016610425.1 - uncharacterized protein
MMTNLKVNVQEHFMQMLLRYINLRLDVKGQKQRLPLKSDARKAFFTRLRYLKSVFLFDTVPELLDLTPLESEVLEEIWSLDLPFLVDNPLAFAVVVDPMSFFPAYCRLSSLYEKHGFRRFSAIPLRRSLIQSHIRIDTVILHQHILCITRQEAEAVAKVDLWLRVCNLQNKAFRSRHGMCFEGSITTDGTSMSVYLKHPDADKYGKRGARKSAKTLEAEVKAVYVENNLPACRAAENVIVIDPNKRDILYCQDSNGTTFRYTANQRCKETGSRRIAKRREAMKAGGIDLIESRIPSHKTMNLMDFTRYLLVRRADSDRRKEFYSHPAHTRWKWHAFINRQKSESNLISNLRNKFGNFTIVMGDWSDAGRTARFQTSSKTKGWRTLFKRNRIDCFLLDEYKTSSVCPHCSSDVEKGFKTRPHSRPYRRREGKIEKVHGLLGCTNPNCLQQAWTMRYWNRDTLSTCNMVTIVQSMLDGHGRPEVFSRRSVPAVA

SEQ ID NO: 686 - DNA, 5306 bp, Spizellomyces punctatus
  source 1..5306: mol_type = unassigned DNA; note = Fz = 1596..3449
cgacccaggaccagtctgtccatgcaggaggcggggttggaggcgggcgaaggagagctgtgatgtgaggagagagaggtgtggccgtcattccattgtccaacgtggcagagtgctttgtaaacgtttcttcttctgtcgttgccaatgtccctgtggaggcaaggtcttcgagtcgttcaatcagcgtaggtcgatacggcggcggcgtatgcatgtgtgtgtttttgtgtgtgtgtaaatgtgtatatatgtgtgtttgggaaaaacagtcaaaaaacacaagaataacgacgatgatgacgggaacgagtggcatatgtcacattacaagtcacattatccagccctcctgtacgaccgtatcatgagataagattcaatttcatattaaaaatagatgcagccactggatcgaatgagatgaaatgcaagatgcctcccttgattttcaaatgaatggtttgcattatatgcagccatgaacggattgcaattactatcccttgcggccatctatgagaggaactactctcctgtagcagttgccacctgcatgacgctccatgactcaatatatcgactcagtttttctatataaacccccctcttcccccatcttgtttcttcctccctcgactctcgaagcatctgcccaatgctcaagtcccatcatgagaatgccgctctggtgccgaggacctcgtccgcccgacaaatacaacataaccccttgcaaacgctgctatattgctacgatcgcaggtatatcttgctgatttttcccacgtgcatattcccagtccaattctgatttgactagtatctgaaacgtcctccgactaagaatttcggaatcaaagggctagtaggatttctctcgtggtggtgggcgctagttacccggttgaccaaccgttatcgcatgtgtaattgttagcgatagtttttttacttgtaaggacttggttagctagttggcttttccgaaccggttctcgccggttcattccctggtgtgcgcggcacgacatcggttttttgctcgcacactattcaatccgttaagcgtcattcccttttcaaatgcaaacgttcaattgaagggagataaaagtcttgtgatgactatgattgagtaagcaatatctccattttaggaaggctttcacgtgaacactattgagtggttcctttttggaacggagatccctgcacatgtgtaggatcctttttgtagtttttaggtaggagtcgtagctggcagtagcggtagtaatgtctctgcttccccaatggctgcctagaggctgcctaatggctccctgatggctgcctaatggccgtctatcatagtctatacgagtccatcctagtctatcctagtccatagtgcggagccgatgggtattggcactagtacatagattccaaccaatttaatcataattttactcgatttagactcatgaactatggtttgatccaaaaaatcctatataagttgtcgtgcccattttcccaggctttcatcttttcccacagatatcatcatgccgccaaagaaaaagcaaaagcttgaaaaactcgacaaacctacttgcttacatacctgcaacaagacttcctttgcaaaagctttcttgccaaacgagacctaccggcagcgtcttctagattacatcgccatcatccatcaactcgctgaccacgcttcccacgctctcaaattctacatcctatctgcaccaacctttcccacggtaaatgaagatacaatcgaagcaattctctatcttctcaacaaaggagaggcttggcatccaagaaaggaagcaaagaaggcatggcgggattgtttgctgccatatgttcaacggtactgccaaatcgtcggctttgttcacccaaatctacgaggcgagcagcaatcagtcaattacctgacagcgagtatgatgacgaacctgaaagtcaacgttcaagagcatttcatgcagatgctccttcggtatatcaatctgcggctcgacgtgaagggacagaagcagcgactgccactgaaaagcgatgcgcggcaagctttctttactcggctacgctacttgaagtcggttttccttttcgaaactatgccagaatcactggatgacttgagcattcttgaaaacgagattttagaagagatctggacacttaacctgccatttcctgatcaagacaagccgcttgcctacctcattgccatcgacgcgatgtccttctttcctgcatactgccgactgtcaaagttgttcgagcagcaaggttttcaacagttcagcgcgatacctctgcgccgctctctcatccaaagccatattcgcatcgacacggtcattctctacgcccacatcctctgcatcacccgccaagaagcagaagccgtagagaaggtcgatttatggttgcgcgtctgtaatctacgtaccaaagcttttcggtctcgctgtggtatgcattttgaaggctcgatcacgacggacggaacctcggtgtctgtatacctaaagcacccagaagctgacaagtacggaaagcgcggagcgagaaagtcagcaaaggctctagcagctgaggtgaaggcgctgtatgtggaaaacaacttacctgcttgtcgagcagcagagaatgtcgtcgttatcgacccaaacaaacgcgacattctctactgccaagacagtaatggtacaacgtttcgctacaccgccaatcaacgctgcaaggagactggaagccgtcgatttgcaaaagaacggcagcggatgaaagctggcggtattgacctcatagaatcacgtatcccaagccacaagacgatgaacctcatagacttcatgcgttaccttctcgttcgccgcgctgattgggatcgtcgaaaggagttctactcccaccctgctcatactcgatggaaatggcacgcattcataaaccgtcagaagagcgaatcagacctcatatccaacatgcgcaacaagtacggcgaaaacttcaccattgtgatgggtgattggagcgacgccggtcgaactgcgagatttcagacctcatcaaagacgaaaggttggcgcaccctcttaaagcggaacaggatcaactgcttccttctcgacgagtacaagacctcatctgtctgccctcgctgtttggcctcatctgatgacttccttgaaaaggacttcaaaacacgacctcattcaagaccttggcgccgtcgcgaaggcaagattgaaaaagtccatggattgctgggttgtaccaaccctaactgtcagcaagcctggacgatgcgctactggaacagggacacgctgagcacctgcaacatgctgatgatcgtgcaatcaatgttggatggacacggtagaccagaggtgttcagtcggaggagtgttccagccgtagcgtagattagttagattaccttttccgaaccggttgtcgccggttcaatccctggtgcgggtgctagtgccaatacccatcggctccgcactacgatagtctacgctcgtccatggctgtgtgtccattcaatcttgtagtgtagaaagagccgctggttttggggggctgacgtctgtggctgtgccatgctgtgggatggcgcaggttgctaaactcatgtgacacgcgtatgaatcaatttttaactttaaggaaagagcgacaaaaagtagaaggaccgtttcccgttatctttcccgctatttgacgttcgagcgccatttcccaactttcaagcatctcgagggcaggcaatgatgaaggcactgcttttcatcgccttggtctctggtggagcgtgggctcaaagtatgtactgggtgatgcagcgagcagtcttgtttgaatttgtatactgacaaattcacccacttttcaggcccatgcgagcttacggacagaatatgtctgactcaaaccactctgcaaatcggatcgcctttctccctttacctctatttcgctggatttcaacaaaaggatccggccaaatggacaatatccctttttaagggagacttgcgggcaaaccctcaaaccgatccttgccgtcccggccaacaattgatttacaagtgggaagcacccccgtttaccgtcgtatcgacaaatgttgccaaaggggatttggtaattgatccaaaggttgtgaataccattgctggcgacaatcagtacttttttcaagccacggatgggacgcaaggagtttgtcccatggggccctttgcaggggtgacgcacgtccaactgggtgagtacatttagactggaaaaagttggcacacgacgctaggcaagcattgccagccttctagtaggaaaacaatgctgcataagagtacggtgacacgagtgcaaacctcttatgttcaggttttctcacgcgggaacgaaaggatcgcatgtttttgcaagacattgaattttatcgtgatggctatcgctgtatatttccgcctgcatagctaggcgctattttatacaaggtactaacgtactggctgtggttgatagctcttgcgactacctcctccacaacagcaccagcaacatcgaccacgtcgaccgccgcacccaccaccgttaaggaagctccagcccaaacaccgccagcaggtgtcttcccgactgggcctactgctcccgccactgcaagcagctcctcgtcgtcatcaccaaacgttggattaattgtgggtgtcattttcgtcgcattgataatattatccgctggcggactcttcttctttcgacgaaaacgaaagaacaagcgaaactggggaatggagggcggcgcaggtgctgctgctgcgtctgccgcagttgtgggatcgtccaagccaaacatgtcagaacgaaaggagactattggatcattggctccatccgaaagtgcctcgcttgccaggctcgtttctatacacccagatccagaagacgaaatttttgttggaccgccaatacctgcctcattggctagaccgcaatcagcagcagctttggcagccgaatcaacagccaccgctcctctccttccatctttgaccactcaaccagaaatcgccacaccccgcctcagctccgcaaccgacccattctcggatgttcatgcagatcccttctccgatcccattccaccaccacaacctccaccatcgtcatcacaccgccgttccattctggcgtcgctccacttggaccgtgacttggtctctaaaactcctgtgtcttccagcagcacgtctgcaaacgat

SEQ ID NO: 687 - protein, 106 aa, Spizellomyces punctatus
  source 1..106: note = CDS = complement(<1..319), XP_016605586.1 - uncharacterized protein
MPLVPVIIVVILVFFDCFSQTHIYTHLHTHKNTHMHTPPPYRPTLIERLEDLASTGTLATTEEETFTKHSATLDNGMTATPLSPHITALLRPPPTPPPAWTDWSWV

SEQ ID NO: 688 - protein, 632 aa, Spizellomyces punctatus
  source 1..632: note = CDS = 1554..3452, XP_016605587.1 - uncharacterized protein
MPPKKKQKLEKLDKPTCLHTCNKTSFAKAFLPNETYRQRLLDYIAIIHQLADHASHALKFYILSAPTFPTVNEDTIEAILYLLNKGEAWHPRKEAKKAWRDCLLPYVQRYCQIVGFVHPNLRGEQQSVNYLTASMMTNLKVNVQEHFMQMLLRYINLRLDVKGQKQRLPLKSDARQAFFTRLRYLKSVFLFETMPESLDDLSILENEILEEIWTLNLPFPDQDKPLAYLIAIDAMSFFPAYCRLSKLFEQQGFQQFSAIPLRRSLIQSHIRIDTVILYAHILCITRQEAEAVEKVDLWLRVCNLRTKAFRSRCGMHFEGSITTDGTSVSVYLKHPEADKYGKRGARKSAKALAAEVKALYVENNLPACRAAENVVVIDPNKRDILYCQDSNGTTFRYTANQRCKETGSRRFAKERQRMKAGGIDLIESRIPSHKTMNLIDFMRYLLVRRADWDRRKEFYSHPAHTRWKWHAFINRQKSESDLISNMRNKYGENFTIVMGDWSDAGRTARFQTSSKTKGWRTLLKRNRINCFLLDEYKTSSVCPRCLASSDDFLEKDFKTRPHSRPWRRREGKIEKVHGLLGCTNPNCQQAWTMRYWNRDTLSTCNMLMIVQSMLDGHGRPEVFSRRSVPAVA

SEQ ID NO: 689 - protein, 390 aa, Spizellomyces punctatus
  source 1..390: note = CDS = join(3804..3858,3929..4303,4567..>5306), XP_016605588.1 - LPXTG-domain-containing protein cell wall anchordomain CDS
MMKALLFIALVSGGAWAQSPCELTDRICLTQTTLQIGSPFSLYLYFAGFQQKDPAKWTISLFKGDLRANPQTDPCRPGQQLIYKWEAPPFTVVSTNVAKGDLVIDPKVVNTIAGDNQYFFQATDGTQGVCPMGPFAGVTHVQLALATTSSTTAPATSTTSTAAPTTVKEAPAQTPPAGVFPTGPTAPATASSSSSSSPNVGLIVGVIFVALIILSAGGLFFFRRKRKNKRNWGMEGGAGAAAASAAVVGSSKPNMSERKETIGSLAPSESASLARLVSIHPDPEDEIFVGPPIPASLARPQSAAALAAESTATAPLLPSLTTQPEIATPRLSSATDPFSDVHADPFSDPIPPPQPPPSSSHRRSILASLHLDRDLVSKTPVSSSSTSAND

SEQ ID NO: 690 - DNA, 4892 bp, Spizellomyces punctatus
  source 1..4892: mol_type = unassigned DNA; note = Fz = 1496..3337
tctttcgcgtcccgacaattgcgacagagactgctagagcaagaaattgctaatgcagatagtaccgagaatgatgcaatcacaaacccggatactggactatagtctaccttgatcctataaaaaaagaaatgtctctctagcgagtctttttcactcgcgccttggctatcgcttccttcacgttgtgagccgtactccactgcctcaagacctttgacattcccaatgtcgcaatcaaaaagctcgaaaaaatcgcaatgccgccgatcggccgcaaccaatttgtatccactctgtgcaccatgatgtgcatcggattcactccgggtggtgggacgatattcaaatgaaggagtcccaaaacgcatgccatcttgagagacttgcttttgtccagcctgaggtttttagcggttgccgcccacaacccaagcgaaaagactgcttccatcgaccaagcactccagggatgtgtttcccacaactctgtcccaaatttgagagtcgacccgggatacattgccaaatccttttgatgcacagagtaatccaagacccaatgtgacacgacagcgccaaacgcaagcaaagcggccgtgttgcggtgctccttgttcaccatcgtgcgaaccatgacagcatacatggccccccatgcaatgcatgccaataaggaatgatcatagtcgatgaaatcgagggtcacgccgagggagaggtgaggggcaggtgagatgcgatccacggataacaagagcaagatgccattgattagatcaatgaatgctgagcccacgagggggatctcggggggaagggatggatagagggagtagaggaaaagcccaagggcaatatggcctgtaaacatttgtgtgtgtgtgttcaagtatgagcgccctccactactatagaagtaagacaaaatagaatcaagagaaaaaggaaatgattctggggcgtttattacgtaaccacatctgtgtgagcatccacagtcaaagaggttgatctctacacgaacaaagaacctttgctagcgtgtgatagaagcaatgtgttaatatccattggcgaatgcaaactcgatcaacctattcatataattttactcgatttagactcatgaactatgatttgataatggttcgatgcacaaacgatgctccaccattaaaaacgggtccaatatgtgcggcaatgaacggattgaatattctgcagttgctccaccattgaaaaacgggtccaatatgtgcggcaatgaacgaattgaatattctgcagttgctccaccattgaaaaacgggtccaatgcgcagttgtcatatctctatataaacccgccttctctgcccatttcccaggttttcatcattctctgccgataggctttcatcattctctgcccattttccaggctttcatccatttttctattccaatcatcatgccgccaaagaaaaagcaaaagcttgaaaaactcgacaaacccaccttacatacctgcaacaaaacttcctttgcaaaagctttcctgcctaatgagacctaccaccaacggcttctagattacatcgccatcatccatcaactcgccgaccacgcttcccacgctctcaaattctacatcctatctgcaccaacctttcccacggtaaatgaagatacaatcgaagcaattctctatcttctcaacaagggggaggcttggcatccaagaaaggaagcaaagaaggcacggcgggattgtttgctgccatatgttcaacagtactgccgcatcgttgattttcctcatccaaacctacacggcgagcagcagtcaatcaattacctgacagcgagtatgatgacaaacctgaaagtcaacgttcaagaacatttcatgcagatgctccttcggtacattaatctgcggctcgacgtgaagggacacaagcagcgactgcccccgaaaagtgatgcgcgaaaagctttctttactcggctacgctacttaaagtcagtttttctttttgatatcatgcccgagtcgctggatgacttgaccgctgaagagagtgagcttctagaagagatgtggacacttaacctgccatttcctgatcaagacaagccgctcgcatattcagttactgtagaccctctcgccttcttccctgcctactgtcggttgtcaagcctatatgaaaagcatggatttcgacggttcagtgcaatcccacttcgccgctccctcatccaaagccatgtgcggatcgacaccgtcatcctctactctcatatcctttgcatcacgcggcgagacgcagaagccgtcgagaaggtcgatttatggatgcgcatctgtaatctacgtaccaaagcttttcggtctcgccgcggtatgcagtttgaaggctcgatcaccacggatggaacctcggtgtctgtatacctaaagcacccagaagcagacaagtatgggaagcgcagcggtgggaaaaagtcagcaacaactcttacagctgaggtgacggcgctttatgtggagaaaaacttacctgcttgtcgagcagcagagaatgtcattgttatcgacccaaacaagcgtgacattctctactgccaagacggcaatggtacgtttcgctacaccgccaaccagcgagccgtggagactggaagccgtcgatttgcaaaagaacggcagcggatgaaagccggcggtattgacctcatagaatcacgaataccatctcacaagacgatgaacctcatggactttactcgctatctcctcgttcgccgtgccgactggaaccgccgcaaggacttctattcgcatcctgcccacacgcggtggaagtggcatgcatttataaaccgtcagaagagtgaatcgaacctcatatccaacttacgcaacaagtacggtgaaaactttaccattgtgatgggagattggagcgatgccggtcgaactgcaagatttcagacctcatcaaagacgaaaggttggcgcaccctctttaagcgcaacaggatcaactgcttccttctcgatgagtataaaacctcatctgtctgccctcactgttcatccgatgacttccttgaaaaaggtttcaaaacacgacctcattcaagaccttggcgacgacgagaaggcaagattgaaaaagtccatggattgctgggttgtaccaaccctaactgtcagcaagcctggacgatgcgctactggaatcgagatacgctgagcacctgcaatatgctgataatcgtgcaatcaatgttggatggacacagtagaccagaagtgttcagcaggagtgttccagccgtagcttagattggttagattaggttttccgagccggttgtcgccggttcaatccctggtgcgggtgctagtgccaatacccaccggctccgcactatatatagaatacttttaatgattcaattggttggaatcactgtactagtgccaatacccaccggctccgcactatgaacaatatattacatctgacaatgttcatccatcatgtatccataaagggagagaaagctcccctagtaaaagccaaaagaagaaacccccctttgcaacagagagaatgtcattcacatgactaacgcgtgttgtcttgtgtgtgtgtgtgagtgtgtgagtgaggagaagaaagcgtttcaatttgcaacatgaaactctctctctctctctctctctctctttgtgtgagaataataataattaatgtgattaaatgtgtgtgggataaaacaatgataacccccgttttgaaagtttattcccacactcttacaattgaacgtgggaatattcacaactgtttttacttttgagttttcttgttttttaacttgggtgcagaacaaccttgtattggcacatacacacaacgttaaccatgtccacttcatcggacggggagaatcctgacggtggaaagaggttacaagagcatggacggtcagcgtctgtatcgtcatcatcgtcatcatcgtcaataggacaagaacgacgaggtgacggaaaagagaggagaaacagtgcattgtcggtatcgtcaatatcatccatgcaagaaaccattgtcgatcgaccattggattgctttgatcgacagcgagcaaagacaagaggacgggcatggccgttccttgcaaagttgatcacattttggatacccaatgtcattctgcgatgggtgggcttcaaaacggattcccaacgtcaagcatggagggaaaaagtcctattattttccatcgtgttggtggcttctggtgcgtttgtcgcggtcgtggaaatcgctggtagattcctcgctccccctcgtacaaacttttcgacttccgatctggccgatacgaattttgtggcagtcaatggccgtgtagcggatttttcaacgtcacaggatccaatgggtaaagccattaataaacaagtctcgccttatgcgggtcaagatgtctcgacaatgtttcccacgtttgcgctcttatcccgcccgctcaacttttctcgactcgtggatcccgatttgaatgccgtggcgacgagtatgggtgccgtggacaattggttaaacacccgattgatgcaggagccgggatacgttgtaaatgcctcgcgtcaaatgctgcagaattgtcccacaccggatagacagagcgggaatgatgccttgtgttttacgtcgagtacagagagggttattagcgagagtgtagttggatgtaagtgaacggtattacacaggttcaggcgggcatcccattctcacgccatgtttgtttggtcaacagatgtgctccataatgcagaggagatcagtgtacaaaacaacaaccttgacaccagcgccgca

SEQ ID NO: 691 - protein, 244 aa, Spizellomyces punctatus
  source 1..244: note = CDS = complement(140..874), XP_016605007.1 - uncharacterized protein
MFTGHIALGLFLYSLYPSLPPEIPLVGSAFIDLINGILLLLSVDRISPAPHLSLGVTLDFIDYDHSLLACIAWGAMYAVMVRTMVNKEHRNTAALLAFGAVVSHWVLDYSVHQKDLAMYPGSTLKFGTELWETHPWSAWSMEAVFSLGLWAATAKNLRLDKSKSLKMACVLGLLHLNIVPPPGVNPMHIMVHRVDTNWLRPIGGIAIFSSFLIATLGMSKVLRQWSTAHNVKEAIAKARVKKTR

SEQ ID NO: 692 - protein, 592 aa, Spizellomyces punctatus
  source 1..592: note = CDS = join(1454..3002,3111..3340), XP_016605006.1 - uncharacterized protein
MPPKKKQKLEKLDKPTLHTCNKTSFAKAFLPNETYHQRLLDYIAIIHQLADHASHALKFYILSAPTFPTVNEDTIEAILYLLNKGEAWHPRKEAKKARRDCLLPYVQQYCRIVDFPHPNLHGEQQSINYLTASMMTNLKVNVQEHFMQMLLRYINLRLDVKGHKQRLPPKSDARKAFFTRLRYLKSVFLFDIMPESLDDLTAEESELLEEMWTLNLPFPDQDKPLAYSVTVDPLAFFPAYCRLSSLYEKHGFRRFSAIPLRRSLIQSHVRIDTVILYSHILCITRRDAEAVEKVDLWMRICNLRTKAFRSRRGMQFEGSITTDGTSVSVYLKHPEADKYGKRSGGKKSATTLTAEVTALYVEKNLPACRAAENVIVIDPNKRDILYCQDGNGTFRYTANQRAVETGSRRFAKERQRMKAGGIDLIESRIPSHKTMNLMDFTRYLLVRRADWNRRKDFYSHPAHTRWKWHAFINRQKSESNLISNLRNKYGENFTIVMGDWSDAGRTARFQTSSKTKGFKTRPHSRPWRRREGKIEKVHGLLGCTNPNCQQAWTMRYWNRDTLSTCNMLIIVQSMLDGHSRPEVFSRSVPAVA

SEQ ID NO: 693 - DNA, 4892 bp, Spizellomyces punctatus
  source 1..4892: mol_type = unassigned DNA; note = Fz = 1507..3405
aacttaactctcaccaatgactggttgatccacgatcttaccttggctgaaattaaaacactccgtctcaacgtcgttgggggaggcccggacaatcggaacatgcggaaacctgccttctttgacggcatgtttacgatccccacgtttgaagagtacctcgacttggtccatgcagattctgccaaacttggacgtgaaatcggtattatacccgagatcaagcatcctgcctggcacaatgagcactacaagaaccagaaccctcattttatggaagataagctgttggctatcctcgacaagtacggatacccatcaaacggaaagacgcgtggtcccgtcatgatccagtcctttgaggcaggagccgccaaatacattggcacaaagtccaagcttcccgtcgttcagcttatttatggcaatgtggatctgcttactccaaagggtctggacgacgtggcaaaatacgccgccgcaatcgggccatggaaggagctttacactgtcggagcggagaatatgtacaagtacgaagtgcttgcacctattcccgctgacgttcagactcggattaaagccaatggaggactgattgcaccccaaaatttgagtaaggagatcaaaaagcgaggattgaagcaaactccgtacacgttctacagcagctatgaaaaggccctgttgaactgtgatcgagtccaaggatgcccaccgacacaggaccggcgcgtagaattgttttactttatgcgactgggcatggatgggctctttgtggagaatgtagcagaagcagttgccattcggcaacagtatgctgatctgattgatcccttcaagaccgggacaacatctattgtaaattttaagcagaacagtacgtttgcgcggagagacggagcggaatggatggacattctgcgacaagagttagtgcggacctatcccgaccggcttgccgcaggaggtcgtcgttaatgggtttagaaaaacagacgttggcgagtcataatagtttgcagatgtaaaatttaggccccatattatcataatacattcatttgattattctggtcataaaagacgtatcaagacgagcaaaaaaggcacgctggagatgaacagcaatgaaatgcaatgggtggagatccccgatggtgttggaggcttcacccagagagccgaactgacggccgcgtgatatcacgagaccgatgcacgtgcaatctcatcgcggggaattcatccaatcggataagctgaaatgattttgtaagccttcctggattgtgattccgacaccggaatgatggagatcgatgacaatgcggacataatgcggagccgatgggtattggcactagtacaaagattctaaccaatttaatcataattttactcgatttagactcatgaactatggtttgatccaaaaaatcctatataagtcatcgtccattttcccaggctttcatcttttccacagatacagatatcatcatgccaccaaagaagaagcaaaagctcgaaagactcgaaaaactcgacaaacctacttgcttacatacctgcaacaagacttcctttgcaaaagctttcctgccaaacgacatctactgccaacggcttttagattacatcgccatcatccatcaactcgccgaccacgcttcccacgcgctgaaattctatctcctttcatcatcagcgccagtttttcccacagtaaatcaagagacgattgaagccatcctctatcttctcaacaaaggtgaatcatggcaaccaaaaaccggtgcgaagaaggcgttacgcgaatccttgttgccatacatccaacggtactgcaacatcgtcggcttcgttcatccaaatctacaaaaagagcagcaatcagtcaattatctgacagcgagtatgatgacgaatctgaaggtcaatgtccaggaacacttcatgatgatgctgctccggtacattaatctgcggcttgatgtgaagggacagaagcagcgactgccactgaaaagcgatgcgcgaaacgctttctttgctcgtcttcgctacttgaagtcaattttcctttttgatatcgtgcctgagtcactcgatgacttgaccgctgaagagagtgagcttctagaagagatgtggtccttcattcccctttccgaccagctgctcgcatattcagttgctgtagaccctctcgccttcttccctgcttattgtcagttgtcaagcctatatgaacagcatggattccgacagttcagcgcaatacctctgcgccgctctctcatccaaagccatgtgcggatcgacaccgtcatcctctactctcacgttctttgcatcacgcgacgagaagcggaaactgttgaaaacgtcgatttatggttgcgcgtctgtaatctgcagaacaaggcttttagatctcgtcatggaatgtgttttgaaggctcgatcacgacggacggaacctcggtgtctgtatacctaaagcacccagaagcagacaagtatggaaagcgcagcggaggaaaaaagtcagcaaacacgatggaggcagaggttaaagcgctttatgtggagaaaaacttacctgcttgtcgagcagcagagaatgtcattgttatcgacccaaacaagcgtgacattctctactgccaagacagcaatggtacagcgtttcgctacaccgcaaaccagcgagccatggagacaggcagccggcgatttgcaaagagacgagaagcaatgaagaaagaagctggagttgacctcatagaatcacgaataccatctcacaagacgatgaacctcatggactttactcgctaccttcttgttcgccatcatgcagattcggatcgtcgaaaggagttctactcacatcctgcccacacgcggtggaagtggcactctttcatcaatcggcagcgaagtgaatcggacctcataagcaacatgcgcaacaagtatggcgaaaactttactgttgtgatgggtgattggagcgacgccggtcgaactgcaagatttcagacctcatcaaggacgaaaggctggcgcaccctctttaagcgcaacaggatcaactgcttccttctcgacgagtacaagacctcatctgtttgcccttgctgttcctctggcgttgaaaaaggcttcaaaacacgacctcattcaagaccttggcggcgacgcgaaggcaagattgaaaaagtccacggattgctgggttgtaccaaccctaactgtttgcagcaagcctggacgatgcgctactggaatcgagatacgctgagcacctgcaatatggtaacgatcgtgcaatcaatgttggatggacacggcagaccagaggtgttcaggaggggtgttccagcggtagcgtagcgtagattggttagattaggttttccgaaccggttgtcgcgcggttcaatccctggtgcgggtgctagggccaatacccatcggctccgcactaagaactagaacgacaagcccatgcgtaatttcacaacgacgacgacgacggcaacgaggacaacgacgccgtcatggcttctccgtcagattccagaaaagatactttccgcttcaagacaatgcacattgccatattcacagcggcgacggtccttcctggaagtttactcgtatccgcctatgttatgtttaaagggggcaagtgttggtcacaagtgtgtccagagaaggagcacttgaatacggagatgcgtaacaggtaagagagataatgaatttgtgccagcccacacaattctctaactgtttacaactcgttggttgtccagtctcgtcgcattctatggttggcttgcggttgttgctgtcgtatttgctctggcgcaacgaacctcatggggtcatgggcactcttggaaacatcgttacatatccctctctcgcagaacaaagtggtcctatgcagagattatcgtgtggctgttggtactgggacatcagctctttcaattttgttattggtatacgcaataccattcccgctcttcttcaagttctccgacccagcgaatgtggcgagctacctacaaagccattgctttcaatgccggcattcaactgtccttgaccctattgccgacatcccgcaatggattgctatccacgttgtttggaatcggatacgaccattctctctcctttcatagatggtctggagcactgacggtgctactggctggggcgcatgttggtgcattcgcagcctactgcctcgctcgaagcggatgggcccagttttggaaaacaacgctgctgattggagcgtcacatgagaggatcgcttcgtatagaggctggttggggccggtgggactcgtggctctactcctctttctctgggtctctttgaattcgttcgagtctatccgccgaacacggttcaattggttctggttcaatcatttcgcggtgttgggggccatccttttgtcattcgtgcatgcttcgcccatgctctactatgctttgccgactttgacattgtatatcatcgattcatgcgtacgagtgttcaatcgacgtcgagcgtataatgtcacatcattgacgatggaggattgcggatatgtgcgattggatatcgcagattgtcacattcctgctgcccccggacagtgggtctccatctgcgtaccagccgtctcaaacgtggaatggcatccgtttactgtcgcaaacagctctcctccacgtcgaaggggcggacctcctgagatggaatatttgttggcgaggtccactcctgttgcacctggactgagtttgatcatcaaaccgcaggcgcacgatgcttcgtggacgcaatcgcttgtgcggacatggcaaga

SEQ ID NO: 694 - protein, 327 aa, Spizellomyces punctatus
  source 1..327: note = CDS = <1..984, XP_016608332.1 - uncharacterized protein
NLTLTNDWLIHDLTLAEIKTLRLNVVGGGPDNRNMRKPAFFDGMFTIPTFEEYLDLVHADSAKLGREIGIIPEIKHPAWHNEHYKNQNPHFMEDKLLAILDKYGYPSNGKTRGPVMIQSFEAGAAKYIGTKSKLPVVQLIYGNVDLLTPKGLDDVAKYAAAIGPWKELYTVGAENMYKYEVLAPIPADVQTRIKANGGLIAPQNLSKEIKKRGLKQTPYTFYSSYEKALLNCDRVQGCPPTQDRRVELFYFMRLGMDGLFVENVAEAVAIRQQYADLIDPFKTGTTSIVNFKQNSTFARRDGAEWMDILRQELVRTYPDRLAAGGRR

SEQ ID NO: 695 - protein, 580 aa, Spizellomyces punctatus
  source 1..580: note = CDS = join(1507..2987,3055..3316), XP_016608331.1 - uncharacterized protein
MPPKKKQKLERLEKLDKPTCLHTCNKTSFAKAFLPNDIYCQRLLDYIAIIHQLADHASHALKFYLLSSSAPVFPTVNQETIEAILYLLNKGESWQPKTGAKKALRESLLPYIQRYCNIVGFVHPNLQKEQQSVNYLTASMMTNLKVNVQEHFMMMLLRYINLRLDVKGQKQRLPLKSDARNAFFARLRYLKSIFLFDIVPESLDDLTAEESELLEEMWSFIPLSDQLLAYSVAVDPLAFFPAYCQLSSLYEQHGFRQFSAIPLRRSLIQSHVRIDTVILYSHVLCITRREAETVENVDLWLRVCNLQNKAFRSRHGMCFEGSITTDGTSVSVYLKHPEADKYGKRSGGKKSANTMEAEVKALYVEKNLPACRAAENVIVIDPNKRDILYCQDSNGTAFRYTANQRAMETGSRRFAKRREAMKKEAGVDLIESRIPSHKTMNLMDFTRYLLVRHHADSDRRKEFYSHPAHTRWKWHSFINRQRSESDLISNMRNKPHQGRKAGAPSLSATGSTASFSTSTRPHLFALAVPLALKKASKHDLIQDLGGDAKARLKKSTDCWVVPTLTVCSKPGRCATGIEIR

SEQ ID NO: 696 - DNA, 8565 bp, Spizellomyces punctatus
  source 1..8565: mol_type = unassigned DNA; note = Fz = 2177..4021
ctttactcaaacgccgatttgatagtcactgaaaattccgcaacgaattgaaatcggcgtaaccttatttgagtgagaccggattgtaggtgatatgttaaatgtacagttgcaagcttcagcgaagcccgttgcggtgaggaattcatcatcggtaatatgatggcattttgttggcgtttggggctagggggtaagcagggcagcccacagtgaagaaatgagcgggagtttgccggcgttctggtacaaggtgatggagaaggatcaacctgacgaagtgcaagaaaacagtctacactgcttccagtattgttttgtttcttacttcgagcgccaatgaagcaacatgcgcacccggggtaactggcaactgcaaaacggtagagtcgcggaccattcgcccttcatgaaagacggtcttatatgtgggaaagatgcaagtgcctcgaatatgcggtcttcgtccgtcttcttcaggtctaacacaagaacactgcatcaacgccggtcatgtcatttatcatctgacctttgttcctgtcaatttcgtttatttctgtgctcaatcttggatacctcgaggtccttgaagtccgtcatgccggcgacaaacagtgccaatacgactgcgaagcggctcggtcgggagattgcggatgaccatagaacctgtcgcgagaagggtcggtttcttattattgctttcttccttcttacatgcgtacaactgcagaaaatgtaacggcataccgataaggctcagcgatgttaaccggattcggacatggtgggcggaaaagggatactcgaattgataaaaaaaaggtatcagatccctttgcatatcccaagacaggcatcgaaatcacaattgactcttgtatcaatattgtcaagggaaaacaaaactacaatgcagttattttcgaaagtaccctgttgacctcgagtgacgaacggcggttgttcgcatacgcaggatcgcaaaagacttgccctcagttgattttggtcaaaatagcctaaatgcccgtaactaagagagctagacatattggcggctttggctagtcgtggtgggcagcattcgatcgattcctatgaatccgatcaaagtttcgccctgcagatgtatgacatgacttggacgtcgtgcttgttctcccgctttcctctgtccatagattgtttctggagcaaggtgtcccactgatgacagattgtgagagtcccacatgcacgcaacaagaacaacggaaaagagcaatctctaccaggttgcacagacgaagagactcgacgaaatcgccaaggacgtttccttcttctgtaatgggtttcgcgtatgtatttccttgcgtctcatatccttcgaacagttgctcttcttgactgcgatcttttagggcagattgcgcaagggttcttttctctgcccagtaacgaactcggacatcttcgatcggctggtccaaaatgataccctctcctcggatcctgcgattcaaaagatctctcagacgtcggaaagttcgtaaccactctggcaaactctggtaaagcattcatcttactgtttggttaaatgattggttgatagtcactcttctgttcgacatatctcttcgacttctttaccattcccgaatggatcgatggtgctcactcaggccacctcaaggttttgttcctgtgcctcggtcagcgtccggaattatttaccaatgaagttaaggccgctttaagttagtacccatgtagtgttttaattagaagacccatggaactagtcgtattgcagcggcaaagaataaagatggtttattgcagcataacatcagtgagttcctagtaagtccgtaagaagaagaaaggccagtaaactgaagcactgcaagcaagagcactggcaagttcgatccaaaataccaagatattacaatagagagggatggctgacgcagatcatagtgcggagccgatgggtattggcactagtacatagattccaaccaatttaatcataattttactcgatttagactcatgaactatggtttgatccaaaaaatcctatataagttgtcgtgcccattttcccaggctttcatcttttcccacagatatcatcatgccgccaaagaaaaagcaaaagcttgaaaaactcgacaaacctacttgcttacatacctgcaacaagacttcctttgcaaaagctttcttgccaaacgagacctaccggcagcgtcttctagattacatcgccatcatccatcaactcgctgaccacgcttcccacgctctcaaattctacatcctatctgcaccaacctttcccacggtaaatgaagatacaatcgaagcaattctctatcttctcaacaaaggagaggcttggcatccaagaaaggaagcaaagaaggcatggcgggattgtttgctgccatatgttcaacggtactgccaaatcgtcggctttgttcacccaaatctacgaggcgagcagcaatcagtcaattacctgacagcgagtatgatgacgaacctgaaagtcaacgttcaagagcatttcatgcagatgctccttcggtatatcaatctgcggctcgacgtgaagggacagaagcagcgactgccactgaaaagcgatgcgcggcaagctttctttactcagctacactacttgaagtcggttttccttttcgaaactatgccagaatcactggatgacttgagcattcttgaaaacgagattttagaagagatctggacacttaacctgccatttcctgatcaagacaagccgcttgcctacctcattgccatcgacgcgatgtccttctttcctgcatactgccgactgtcaaagttgttcgagcagcaaggttttcaacagttcagcgcgatacctctgcgccgctctctcatccaaagccatattcgcatcgacacggtcattctctacgcccacatcctctgcatcacccgccaagaagcagaagccgtagagaaggtcgatttatggttgcgcgtctgtaatctacgtaccaaagcttttcggtctcgctgtggtatgcattttgaaggctcgatcacgacagacggaacctcggtgtctgtatacctaaagcacccagaagctgacaagtacggaaagcgcggagcgagaaagtcagcaaaggctctagcagctgaggtgaaggcgctgtatgtggaaaacaacttatctgcttgtcaagagaacattgtcgttatcgatccaaacaagcgcgacattctctactgccaagacaacaagggcaccatcttccgttacaccgccaatcaacgctgcatggagactggaagccgtcgatttgcaaaagaacggcagcggatgaaagctggcggtattgacctcatagaatcacgtatcccaagccacaagacgatgaacctcatagacttcatgcgttaccttctcgttcgccgcgctgattgggatcgtcgaaaggagttctactcccaccctgctcatactcgatggaaatggcacgcattcataaaccgtcagaagagcgaatcagacctcatatccaacatgcgcaacaagtacggcgaaaacttcaccattgtgatgggtgattggagcgacgccggtcgaactgcgagatttcagacctcatcaaagacgaaaggttggcgcaccctctttaagcggaacaggatcaactgcttccttctcgacgagtacaagacctcatctgtctgccctcgctgtttggcctcatctgatgacttccttgaaaaggacttcaaaacacgacctcattcaagaccttggcgccgtcgcgaaggcaagattgaaaaagtccatggattgctgggttgtaccaaccctaactgtcagcaagcctggacgatgcgctactggaaccgagatacgctggcaacctgtaatatgctgacaatcgtgcaatcaatgttggatgggcacggtagaccagaggtgttcagcaggggtgttccagccgtagcgtagattggttagattagcttatccgagctggttgtcgccggttcaattcctggtgcgggtgctagtgccaatacccatcggctccgcactagatataaacgtttaacagaagaccaccatagttcatgtttgaatatcacatggactcttagttgcagcactaccctattattgtattctgcatttaaccttcgtcatcagcccatgtatttctactttaaaggaatgtgcttgaagaatagggatgccaatagaccggcacaggtaatggcggcaatgatgtagaaaatgctacggaaagcctaagcatttccacgctcctagaagaagaataccaacaaatgaatttttgcttttaaaaaaagatgaagggagtttaccggagaagtagggtagcgaatctgctaacttgtgactttagtcaggagcgagcatgtttggagaacaatcaagtcttgttctggtgggcttgttgcgccaagaggtaatgcatctgcgcatgctttttttttttggcgtagatgtcgtccgttaaatctgccccagtggtaaaaagtggtttgatactgtatgtaattctgtctcccataacagctttaattatctaatgaatcagacattattagaaagtagaccaaatccaagtatgtggaaggaacccgaatttgcggtatcagtaggagtgccgtggcacaccgccaagttgttccatccactcgtcctcgtcaagtgaaatcttccattatatccattatataacaaagcatcacctctctgtgtagcatgcttgcagccatatgcgaaaggagaaaaaggcaaaatgaagaagaccggatttgctgcaattgcaatactgtgaaccgccacaataccaaatagacctgccaacgacgtatcttcgctttcacattgctctcagctatggtgaatgaatgtggaggtccctgtcaggcagatagacatgtcaacatcgaggacactacattcagcatgagatacatgtctgttccttcataaacaattaatatccagaagaaaacgtcatattgggtttacttccgatcaggagcagaaaaggtacgggaagtccaatgcgcgttccgacagtggtaaaccgtcgccgtatgcgttataaacgactgatcttcgtactaataggggtagtactagtagctagtactgtaggcagggcggaatgttcccgtcacggacagaaacgtcgaccagctggtctttgatacggagccgctgagcaatgagaaaccttcgggttttgatgctcatgtcacggagtgcggaacgccagctttgctggcagattattttcgcactcgtatagaaattctgttcagatggcgaggtcagttccagggatcgaccagccctcgcagacttgttggacattagagacaccacaaaatgatataaagtttagtgaatccaaggcagaaattaaactgctcagcaaaagtctcctcaccagtcctgggaatggtcaggtttgcttaccgacctgatgtaccaactaccaaaaaatgcaggccggactatcccaagttgagcccaaatttggctacgacgcagtcgtctcaaaaatgcttctcgaatgccaaaccgtcactgatgaggctcgacgggagcgaagttatccaatcatgtcaaagtacacagcagcgatgtttcttacgttcgcgtacgttgttcggaaacatacatggccatcgaactttgcgaaggcatattgatgggtaggttgacggttgaggcgaaaccggtgctcaacaccaaaagagtgcgggcacatagagttacatatctggtctgtgatatggcttatcataagcatctgacaaagaatgctgactcgctccacgacctttttcttagatgctcctactacaccaggcgtatgctaaccgtatctgcgtgttgttaatcttccactacaggctggctcatctagggcactttgacccattcccaaagaacatcctcaattgtgcttgctttgttcgctttctcccaaagatcgcttactaggagaaacgatccttctccatgctcgccaactttgttccgcatctgaataacgtgacgacgacacttttttattgttgtggaagggcaagctccaaacttccttgatagcggatatctctggctcccaagctcccataatcagaaaatgtttacatccgacactttagctctggcggaatagcagctccggaagattccaaagattttgggaagtctcaaggtcgcaggactacaatttctcaagaaggagctggaggaatctacttgggtgcagctatcatcatcttgtaaatggtgctcatagagttgtgccactggtctacatccgtcaccggaaagagccgcgcaatagaacgtcattgaagatgattccatccctcctcgctcgaaatgcgagccaccatacgcctataacgaagcagaaggagcctgcccccctattgagcttttgagcaacttgcgaacgtcacccgccgtcattattgcaggcaacagtctcaatgctcttcgagctgactcggttacgtcgatctggaaaccccaccagtcacaccagtcactgcccggacaatgacagattcgtcgaatcagtctcccagatccgtctcgacgacatactgtgtgtcaacactgtgcaacaccgagaacttccctggaatcgtcctgacgataatggaggtcccgactgaagagttaatgcaaatatttctggaatatgaatcacttgcgccccagtcagggaattgtccgaaacggatggagggagtgaatttacaggatgattcgtgtcgacctttcatcggattattatatgtcagtgatgaagacggactgcgctggtatcatttgaccttctttgaattgcagagatgtcgggttgtttttgggtgggacaatggacagtgacgatatatgacaaccgtcgtatctagatattccatatctaacctgaaaggatgtcgactggatggtcgatatacataaccaaatacaatgcgacatcaattcgtcagtgcatatcatgtagagatgtatgtactcacagttacgtacaagttggagttcccctcagatcccacctgaagacgccgatgaaacgcataggagtctttgtctatgagtgacttgcacacccgaccttgcagtagactatcctatccttgggcagaacaagtacttgacatcttgtgctgtctgtgcatacgatattcgtcttcatctcgtttggcaaggaccgtgggaaaatcaagataaacaaatgactcgcttcacgcgtttacataatcttgactcgcgcgccgtgtgcaaggggaatgaacgcacgccaggaggtctgccaggaggtggaaacgacgacgatgattgggccttcatggcgtgctcagaagaatgacgtacgcaggataacgttatcttccgccgagaattccgaatgcaaaaaaaaagcgcagtcccccagggttataaaaaggcaccctctcccacatccccccactctctcttcatctttccttccgcctcgggatggcataaaactcgctccagccatgggtactcggtccaaaagtataccggataactttaaaggccgttgtagtaatgcaacgtgataacctctttgaggtgggcgcctgggactgatcgtttgcgcgcgccagaaatggaaggagcaacgactcgccggagccttcgggtgatgatggcatcctcttcgggggaagggcctgtgataaaggatgaaaaggatgaaaatgagaaaatgatagcaaaccaaactccctttgaaatcctattcagacactgtattctcagtggttcttccagtcagcagcttacgcgatatcgcctacaaggcaacgctcactttgtggaacaatgacagaagagccatgatttatattgtaagcatccattcggggttaggtgaaaagtccaaggatccgaaatttcatacaatgctaccgatttcatcctcttcgggcgcatcaactacgttgacacggcttataagccaagatgcgtagataaccgacgcctctaaaagatcatgatctgtcagcagccaacaggctgcaaacatcctcccttggacagcgaatcaagagttcgtgtaggtagcacaaggacttggatgatgtgattatcgtgcataatgcgcgcaaaatgcaagctttcgacttgtggccaacagcatactgctagttccaagtctgaggcggtcaaactttgattcttggggccatatgcgcaattctcatcgaagcaaatctagtccttggtgacctaccctgcgtcgtgccgatgctgtaaatgtctgggtcctgtttggccaacttgtccatcagtagtttggccaaagtatcagaaggaaatccgcccgggaaaaaatcctaggattattggtgacatctaattaaatatcctacaccatttattattctaattacgtattgtcatagtgatcttccttagttaacaaaaagtaactagatattaggtccatg

SEQ ID NO: 697 - protein, 629 aa, Spizellomyces punctatus
  source 1..629: note = CDS = 2135..4024, XP_016605988.1 - uncharacterized protein
MPPKKKQKLEKLDKPTCLHTCNKTSFAKAFLPNETYRQRLLDYIAIIHQLADHASHALKFYILSAPTFPTVNEDTIEAILYLLNKGEAWHPRKEAKKAWRDCLLPYVQRYCQIVGFVHPNLRGEQQSVNYLTASMMTNLKVNVQEHFMQMLLRYINLRLDVKGQKQRLPLKSDARQAFFTQLHYLKSVFLFETMPESLDDLSILENEILEEIWTLNLPFPDQDKPLAYLIAIDAMSFFPAYCRLSKLFEQQGFQQFSAIPLRRSLIQSHIRIDTVILYAHILCITRQEAEAVEKVDLWLRVCNLRTKAFRSRCGMHFEGSITTDGTSVSVYLKHPEADKYGKRGARKSAKALAAEVKALYVENNLSACQENIVVIDPNKRDILYCQDNKGTIFRYTANQRCMETGSRRFAKERQRMKAGGIDLIESRIPSHKTMNLIDFMRYLLVRRADWDRRKEFYSHPAHTRWKWHAFINRQKSESDLISNMRNKYGENFTIVMGDWSDAGRTARFQTSSKTKGWRTLFKRNRINCFLLDEYKTSSVCPRCLASSDDFLEKDFKTRPHSRPWRRREGKIEKVHGLLGCTNPNCQQAWTMRYWNRDTLATCNMLTIVQSMLDGHGRPEVFSRGVPAVA

SEQ ID NO: 698 - DNA, 5057 bp, Spizellomyces punctatus
  source 1..5057: mol_type = unassigned DNA; note = Fz 1533..3383
gtgtgattgcatccatgtgctgcaagttgaaaaaagtgagcaagtttgtagtagacgcttgatggcagatacaaaatacttacgaacacggagagccgtctgcacattctttccgggcactccaacaggaggcacacatgtaacgtgtccatgtatgctctgcacggcggcagtagccaggacaaggagagttgcgatagtcttgaacatgataactactaagaggtttctgtgtgtgtgtgtgtgtgttgggatgggcaaagaacgcgagggttttatgcaagtgggcgactggagggagggagagggcaaaaacccctcgcctttaaataagccgcgacaaggactctaaaaacactttatgaaacgatggaaaaggcgccaatcatgtttcaatgaggcgtttatgcggaggagatcatgactgtgccaccactatctctccaatcgcaaatttctcgcacttttggggaaaggcagcgttgtgtttttgggcgtacggcgagagacggggcatggggggccacggcggccgtgacaaccccacacactcttgtggagtttgatgatggacaaacacgagggtagagagggtttgaatggggagtgcattttgataaacaaggtgacaatgggtttcaatcctattgtggacgtgtgatggtgaaagtgatccatcacctctgtagccagacaaacagttgcaaattgtcgtacctgagccatgcccattgcacaaacattgcactgcagatgcaccaagctatccggcatgctcacttttgtcggtcctggttgctcccgaaaagaaaagatcatgctgtgacagtacatgggtgcgtgtagaactagattcgcaccagagagcacccaatatgcaatgccatgatcgcagtgacacgatggtgatcgaccaccccttgtggctggtgctttcatttaaccatttctgactgttgtcgttgccatgtccctctgaacgcagcagaccaagacgaacaaatcacgattgctttcatactgggcaagacggccactaggtcaagtttgcatgtccccaagcatcctgcgcatgggcagatatttatagatattgtatgtaatagttacatttcagaaaaaaagaatccgattgaaatcatagtgcggagccggtggactttggcactagtacagtgattgcaaccaattcaatcataattttactcgatttaggcacatgaactatggttcgatatggttcgatgcaaacgatgctccaccattgaaaaacgggtccaatatgtgcggcaataaatgattgaatattctgcagttgccacacgggtccaatatgtgcggcaataaatgattgaatattctgcagttgctccaccattgaaaaacgggtccaacgtgcgcagttgtcatatttctatataaccccccccccatatcattctctgcccatttcccaggcgttcatccatttttctattccaatcatcatgccaccaaacaagaagcaaaaactcgacaatcgacctacctgtctgcattcatgcaacaagacttcctttgcaaaggctttcttacctaatgagacctaccggcagcgtcttctagattacatcgccatcatccatcaactcgccgaccatgcttcccacgcgctgaaattctatctcctttcagcaccaacctttcccacggtaaatgaagatacaatcgaaggcatcctgtatcttctcaacaagggggaggcttggcatccaagaaaggaagcgaagaaggcatggcgggatagtttgctgccatacgttcaacggtactgccaaatcgtcggcttcgttcatccaaatctacgaggcgagcagcagtcaatcaattacctgacagcgagtatgatgacaaacctgaaagtcaacgttcaagagcattttatgacgatgctgctccgatatatcaatctacggctggacgtgaagggacggaaagggcaatttcctccaaagagtgaagtgcggaaagctttctttgctcggctacgctacttgaagtcgattttcctttttgatgtcgtgcccgagtcactggatgacttgactgctgaagagagtgagcttctagaagagatgtggtcattggatctcccattccttcccaacaatccccttgcctacgccattgttgctgatccgatgtcattttttcccgcgtactgcaaactctctgggctgtatgaacgatatggcttccgacggttcagtgcaatacctctgcgccgctcgctcattcaaagtcacgtgcgaatcgacaccatcatcctgtaccagcatatcctttgcatcacacgtccagaagcagaagcggtcgaaaaggatgatctgtggttgcgggtctgtaatctatgtaccaaggcttttcggtctcgccgcggtatgcagtttgaaggctcgatcacgacggatggtacctcggtgtcggtttacttgaaacaccctgatgccgacaagtatggaaggcgcgggggtgggaaaaagtcagcaaaaacgatggaggcggaggttaaagcggtatatgtggagaacaacttgcctgcttgtcgagcagcagagaacattgtcgttatcgacccaaacaagcgcgacattctctactgccaagacagcaatggtgcgacaatgtttcgctacaccgccaatcaacgctgcagggagactggcagccggcaatttgcaaagagacgagaagcaatgaagaaggaagcgggaattgacctcatagactcacgaataccatcccccaagacgatgaatctcatggacttcatgcgttaccttctcgttcgccgcgctgattgggatcgtcgcaaggagttctactcccatcctgcccacacgcggtggaagtggcactctttcatcaatcggcagcgaagtgaatcggacctcataagcaacatgcgcgacaagtttgggaacttcaccgttgtgatgggtgattggagcgatgccggccgaactgcaaaatttcagacctcatcaaagacaaaaggctggcgcattctgttcaggcgcaatcgcatcaactgcttcctgattgatgaacacaagacctcatctgtttgccctcgctgtttggcctcatacaacgacttccttgaaaaggacttcaaacaacgacctcattcaagaccttggcggcgacgagaaggcaaggttgaagatgtccatggcttgctgggttgtaccaaccctaactgtttgcagcaagactggacgacaatgcgctactggaatcgagatacgctggcaacgtgcaatatgctgacaatcgtgcaatcaatgttggatgggcacggtagaccagaaaggttcagcagaagcgttccagctatagcgtagcgtagattggttagattagcttatccgaaccggttgtcgccggttcattccctggtgcgggtgctagtgccaaagtccaccggctccgcactaagtaatagggggaggtgttctagtcagcaaccctttcaaaatcttcaagggagtactcctcagtgttcgtcatactaacccaacgggattcctccggtatatgaatcatcttcacaatatcatctgcaaacgtaacattaagttgacactttgcaaatctgttttttctcccggctacacgttggaagattctgtcaatgcgtcctatgtattgggtaggttggaagtagtccaaggtaacattctgagctatgcgttagcaactcagacagatgtacaagcccctttaaaactggaaaataccttgttagaggggtcttgaaaaccccttgccgagattttgaagagttctcccatgggttcgacgcaaaggccaatatagctcccctgatgctcgttttgctttggtttaaatagcagatacatggtcaacgttttgaaagtagctggctgagccattgtctcaggtgacggctgcagggcaccattttcatcaagagacatgccctgaaacgtagtagatagcgacattctgagttggttgaaccgagcggagttctcttagcgatctcacacgctgatgactgacggtgaccaagctgtataactgaacgctccgaacgacaatggacacaggctattgaaatatcgtccaagcaaactggaagcagtcaataaacaggcttccagccgatgttgtacctgacgctggcagactctcagtgttctggcagatcaacgtaaagacatttcgtccgtttctgaaagccccaatgttcctgtggctggcacttccatttaaccatttattccttttctcgttgccatgtcaacaatttgccaaacgctttgcaagcagttcattgagcaggattgttaactaccttttggacgaacaagtcatgattgccttcactataggcaaaacggccactaggtcaagttttcattttcccaagccgattggccactcgccaataacccggtcttttgccaggaagcctcgtcatgacaactccctttgtaagttccagaaaattgtagcggttgaaactttatgaaatatacatgtgagcttactcgttacagtgaacattgttggacgaagtggtgttgtcaaataccttggtgagtgagagctcgttaatgtgacattggcatcgtgcatttttgctaacgtggagacttaaagagtcacacagagaaagcgataagaagcaggacgtacagtacgttccccatccccaacgacggtttttgccaaatgaggtacgaaacgaatcttttggtctagtagactggtaagtgtggccaactgaactgaccttttatatcgcaacagacctatgtcccctccgacttgaacaatgaaaatattgaaaagtacatcaaagacaagcaaaagcaagcaccggaagacgtttgcgaaaagtatggaataaatcctttgaaggtgtatcgggtacgtaccgtgtagaatattttaccgtgtttgttggatcattcgtttgacttgggctgccgaataggatacgacgtttctatcgagatttttaacgcgaatggcatacatgaagc

SEQ ID NO: 699 - protein, 48 aa, Spizellomyces punctatus
  source 1..48: note = CDS = join(complement(84..210),complement(<1..19)), XP_016605977.1 - nuclear export factor GLE1 CDS
MFKTIATLLVLATAAVQSIHGHVTCVPPVGVPGKNVQTALRVPHGCNH

SEQ ID NO: 700 - protein, 632 aa, Spizellomyces punctatus
  source 1..632: note = CDS = 1488..3386, XP_016605978.1 - uncharacterized protein
MPPNKKQKLDNRPTCLHSCNKTSFAKAFLPNETYRQRLLDYIAIIHQLADHASHALKFYLLSAPTFPTVNEDTIEGILYLLNKGEAWHPRKEAKKAWRDSLLPYVQRYCQIVGFVHPNLRGEQQSINYLTASMMTNLKVNVQEHFMTMLLRYINLRLDVKGRKGQFPPKSEVRKAFFARLRYLKSIFLFDVVPESLDDLTAEESELLEEMWSLDLPFLPNNPLAYAIVADPMSFFPAYCKLSGLYERYGFRRFSAIPLRRSLIQSHVRIDTIILYQHILCITRPEAEAVEKDDLWLRVCNLCTKAFRSRRGMQFEGSITTDGTSVSVYLKHPDADKYGRRGGGKKSAKTMEAEVKAVYVENNLPACRAAENIVVIDPNKRDILYCQDSNGATMFRYTANQRCRETGSRQFAKRREAMKKEAGIDLIDSRIPSPKTMNLMDFMRYLLVRRADWDRRKEFYSHPAHTRWKWHSFINRQRSESDLISNMRDKFGNFTVVMGDWSDAGRTAKFQTSSKTKGWRILFRRNRINCFLIDEHKTSSVCPRCLASYNDFLEKDFKQRPHSRPWRRREGKVEDVHGLLGCTNPNCLQQDWTTMRYWNRDTLATCNMLTIVQSMLDGHGRPERFSRSVPAIA

SEQ ID NO: 701 - protein, 139 aa, Spizellomyces punctatus
  source 1..139: note = CDS = join(complement(3783..4010),complement(3559..3723), complement(3450..3476)), XP_016605979.1 - uncharacterized protein
MSLSTTFQGMSLDENGALQPSPETMAQPATFKTLTMYLLFKPKQNEHQGSYIGLCVEPMGELFKISARGFQDPSNKNVTLDYFQPTQYIGRIDRIFQRVAGRKNRFAKCQLNVTFADDIVKMIHIPEESRWCGAGGLWH

SEQ ID NO: 702 - protein, 135 aa, Spizellomyces punctatus
  source 1..135: note = CDS = join(4382..4502,4569..4607,4672..4748,4822..4941, 5009..>5057), XP_016605980.1 - ribosomal protein S18 CDS
MIAFTIGKTATRSSFHFPKPIGHSPITRSFARKPRHDNSLLNIVGRSGVVKYLESHRESDKKQDVQYVPHPQRRFLPNETYVPSDLNNENIEKYIKDKQKQAPEDVCEKYGINPLKVYRDTTFLSRFLTRMAYMK

SEQ ID NO: 703 - DNA, 4477 bp, Spizellomyces punctatus
  source 1..4477: mol_type = unassigned DNA; note = Fz = 1664..3481
ttcaattcccatacgtccgcacgatgtttgggtggggatgatgaggtattcataagaaaatcgagataattgatggcagaggaatccgttggccatggagatactgttgcatcagacagttaattgaattcactactggttaaacatgcgtgactattatcatactaacactttcgagactgcctcgatttgatcttgactgttgcgtccaggttttggctgctatcttcttggtccaatttgaaccgaacgtgtttctgcaggttctgaggccgtgagtgtgttccgggacgttgtaagatagacggtggggatgttgaattgggacacaacgatggaggcggtagggtcatcgctccaaatgtagggtttggagaacttgattctgtgacatcgctcacattactgctatcactgctactagattcagaatccaatagcctaaacttggcaggtcccactcgtgacaagacgacaacgttctctgatcgaacatgaataggcaggaattcgctctgatcctccagatccacatcatctgtgggcactttgattctttcccagctttcccatagcgaggtcgcagacccatgaggcggcaatggaggcagagctggcagagaaactcgagagtcctcctcttgttcattcgatgagagcataatttgttgcgaagactttggattattcgagccgacaaacgacgacccccaccaccagaaaccacctacacagtcggaaaacagcataatgaggtcaagaatttagaatgaaattggggggaagatgaggaaagacgacggcggaaatgccaaggtggaaggcggctaaattggagggaaggaaagcaacctgtcgaaaatccatgcagcgggctcttttaaggtgccctccacaagtctccgaatgcagtacacatgtgaaaattgcgatactagatattatttctttatcctcccctatctgatagatgtcctttggggggttattttccatcacaatcctttaaaccttgctctcgtgctctccacaaaactggctgcgcacgggcttttcccccctacccctctatggccgcgtgcaactaggcgtgtgcagggcgataactcattcacgtgactataagttgatgaacagctccccatgcacagactacagcattaaagtgctttcaactttataaaatgatgtgcaattccacgtgcgtaagatgggcatgcgataaactcaaaggctggaaggttctcccggcaagagctcgagcattcctccatgggtttgactcctacatatccttgcccgcgagcagcggtccacaagcatgtgccttggacaaatttaatttccatagtacggagccggtgggtattggcactagtacatagattccaatcaatttaatcataattttactcgatttagacttatggttcaatgcacaaaagatgcaccacccattgaaaaacgggtccaatatgtgcggcatctatgaggattgaggaattttcgcagttgcggcgagtgagttgccacatttctatataaacccctccactatcgttctctccctgcccattttcccaggctttcatcttttcccacagatatcatcatgccaccaaagaagcaaaggctcgaaaaactcgacaaacccaccttagtgaccttacacacctgcaacaagacgtcctttgcaaaagctttcctgccaaacgagatctaccaccaacggcttctagattacatcgccatcattcatgaacttgctgaccacgcttcccacgctctcaaattctacatcctatctgcaccatcctttcccatggtagatcaagatacaatcgaagcgattctctatcttctcaacaagggggaggcttggcatccaagaaaggaagcaaagaaggcatggcgggattgtttgctgccatatgttcaacggtactgccaaatcgtcggctttgttcaccccaatctacgaggcgagcagcaatcagtcaattacctgacagcgagtatgatgacgaacctgaaagtcaacattcaagaacatttcatgacgatgctgctccgctatatcaatctacggctcgacgtgaggggacggaaagggcctccaaagagtgaagcacggaaagctttctttgctcggctacgctacttgaagtcaattttccttttcgatatcgtgcccgaattgctggatgacttgactgctgaagagagtgaacttctagaagagatttggtcactcgatcggccttttcttgttgacaatccactcgcctacgcagttgtcgtcaatccaatgtcctttttccctgcgtactgtcggttgtcaagcctatatgaaaagcatggatttcgacagttcagcgcgatacctctgcgccgctctctcatccaaagccatgtgcggatcgacaccatcattctctaccagcatatcctttgcatcgcacgaagagaagcggaaactgttgaaaaggtcgatttatggttgcgcgtctgtaatctgcggaacaaggcttttagatctcgtcgtggaatgtgttttgaaggctcgatcacgacggacggtacctcggtgtcagtttacttgaaacatcctgaagccgacaagtatggaaagcgtggcggtgggaaaaagtcggcaaagaccttagaagctgaggtgaaggcagtatatgtggagaacaacttgcctgcttgtcgagcagcagagaactttgtcgttatcgacccaaacaagcgcgatcttctctactgccaagacaacaagggcaccatcttccgttacaccgccaatcaacgctgcaaggagactggaagccgtcgatttgcaaaagagcggcagcggatgaaagctggcggtattgacctcatagaatcacgtatcccaagccacaagacgatgaacctcatggactttactcgctaccttcttgttcgccgcgcagattcggatcgtcgcaaggaattctactcccaccctgcccacacgcgatggaaatggcacgcattcataaaccgtcagaagagcgaatcagacctcatatccaacatgcacaacaagtttgggaactttaccattgtgatgggagattggagcgatgccggtcgaactgcgagatttcagacctcatcaaagacgaaaggctggcgcaccctctttaagcgcaacaggatcaactgcttccttctcgacgagtacaagacctcatctgtttgcccttgctgttcctctgacgttgaaaaaggcttccaaacacgacctcattcaagaccttatcgacgacgagaaggcaagattgaaaaagtccacggattgctgggttgtaccaaccctaactgtttgcagcaagcctggacatcgggaatgcgctactggaatcgagatacgctgtcaacctgcaacatgctgatgatcgtgcaatcaatgttggatggacatggtagaccagaggtgttcagcaggagccgtagcgtagcgtagattggttagattaggttttccgaaccggttgtcgcgcggttcaatccctggtgcgggtgctagtgccaatacccaccggctccgcactatcaatataaaggtaattagaatttactatctacagaaatatctactttttttcatggtccccctcgaggatccggcgttttctacggggataccgatcaagtacggtaacgcccgctgtcttttttgggcgcctcggctgtggggcctcctcacgtttaccctctagcacaatattcgacttgttctctacagatgataccaatcgatgttcaaattggcgcaggtcggcggtaaatagcacctgcgtgcgctgatgagtacatgacagcaaaggttccattttcaaagtcacttactgaatgcgcccatccagcgtgtgtcccaaagatcgttcgaaagcgatccccgatcgctaagtagttcttttgcgtgagagtttttgaagcgaggccggacaacttgtagtctcttttcgcaatctagtgcgcaactgtaatgtttagcttctgtctcaaactaatatcgacccaagatcacattgcatacctgccatacatgcgtatcaacgggtatcgctcctggcttatccatgctatacgtatctatcaacaaatgcagactacgaaacaaatattcaaacctccgcatatacctcattaaacagacacagtctgcaacctttggtcccactaaataaaatttcaaattcaagaatagttattgtccatcatctacctgtaagctcgactcgactactgcttagcttaccaccagccagcttcaacaactcatccctgcattcttcatatggcaaatttctcaatcctcttaaccaggtttcgtcatggtgctccatgatgtacctcgccgtttgcgatatgtattttgcacggtagccgaaaccaagctgccgcaactcgttttccacattttcttgtgcaagacgcgcca

SEQ ID NO: 704 - protein, 227 aa, Spizellomyces punctatus
  source 1..227: note = CDS = join(complement(170..749),complement(<1..103)), XP_016612676.1 - uncharacterized protein
MLFSDCVGGFWWWGSSFVGSNNPKSSQQIMLSSNEQEEDSRVSLPALPPLPPHGSATSLWESWERIKVPTDDVDLEDQSEFLPIHVRSENVVVLSRVGPAKFRLLDSESSSSDSSNVSDVTESSSPNPTFGAMTLPPPSLCPNSTSPPSILQRPGTHSRPQNLQKHVRFKLDQEDSSQNLDATVKIKSRQSRKLSPWPTDSSAINYLDFLMNTSSSPPKHRADVWEL

SEQ ID NO: 705 - protein, 627 aa, Spizellomyces punctatus
  source 1..627: note = CDS = 1613..3496, XP_016612677.1 - uncharacterized protein
MPPKKQRLEKLDKPTLVTLHTCNKTSFAKAFLPNEIYHQRLLDYIAIIHELADHASHALKFYILSAPSFPMVDQDTIEAILYLLNKGEAWHPRKEAKKAWRDCLLPYVQRYCQIVGFVHPNLRGEQQSVNYLTASMMTNLKVNIQEHFMTMLLRYINLRLDVRGRKGPPKSEARKAFFARLRYLKSIFLFDIVPELLDDLTAEESELLEEIWSLDRPFLVDNPLAYAVVVNPMSFFPAYCRLSSLYEKHGFRQFSAIPLRRSLIQSHVRIDTIILYQHILCIARREAETVEKVDLWLRVCNLRNKAFRSRRGMCFEGSITTDGTSVSVYLKHPEADKYGKRGGGKKSAKTLEAEVKAVYVENNLPACRAAENFVVIDPNKRDLLYCQDNKGTIFRYTANQRCKETGSRRFAKERQRMKAGGIDLIESRIPSHKTMNLMDFTRYLLVRRADSDRRKEFYSHPAHTRWKWHAFINRQKSESDLISNMHNKFGNFTIVMGDWSDAGRTARFQTSSKTKGWRTLFKRNRINCFLLDEYKTSSVCPCCSSDVEKGFQTRPHSRPYRRREGKIEKVHGLLGCTNPNCLQQAWTSGMRYWNRDTLSTCNMLMIVQSMLDGHGRPEVFSRSRSVA

SEQ ID NO: 706 - protein, 195 aa, Spizellomyces punctatus
  source 1..195: note = CDS = join(complement(4295..>4477), complement(4179..4215), complement(4073..4118), complement(3883..4005), complement(3627..3827)), XP_016612679.1 - 8-oxoguanine DNA-glycosylase (ogg) CDS
ARLAQENVENELRQLGFGYRAKYISQTARYIMEHHDETWLRGLRNLPYEECRDELLKLAGVGPKVADCVCLMSMDKPGAIPVDTHVWQIAKRDYKLSGLASKTLTQKNYLAIGDRFRTIFGTHAGWAHSVLFTADLRQFEHRLVSSVENKSNIVLEGKREEAPQPRRPKKTAGVTVLDRYPRRKRRILEGDHEKK

SEQ ID NO: 707 - DNA, 7305 bp, Spizellomyces punctatus
  source 1..7305: mol_type = unassigned DNA; note = Fz = 3414..4805
ccgagcgggagttttctttggatgttgaggtggcagctagtggcttcacgaagaagcaacaagaagagcttgagaaggtgggtgtttgcgcaaaggttgggtgccatgaacaatagttgctcaaaacaaacctgtcaacattttcagctacaagaagaattgggggatcaatctgatgatagcgggtcggaagagacggatgacgaggaagcaagcactgacgaagatggagatgtggaaacggaaagggatgcggctactgtcgaggacgagctattgcaggaggttccctcaagcgacaaccttgatatatccgaagctgatagtcagcacttgatggagagcctgaacgagagggtgcatactttggcaattgatgattcgcagtcgcgtgttccatctatgttgcaggagcgggatcaactggaacaagcgccatcaggatccgaatcggaggaagaggaggaggtggacgaggacaggatattgaggaattgacatcgcgctcacgtccnnnnnnnnnnnnnnnnnnnnnnnnnnnnnnnnnnnnnnnnnnnnnnnnnnnnnnnnnnnnnnnnnnnnnnnnnnnnnnnnnnnnnnnnnnnnnnnnnnnnnnnnnnnnnnnnnnnnnnnnnnnnnnnnnnnnnnnnnnnnnnnnnnnnnnnnnnnnnnnnnnnnnnnnnnnnnnnnnnnnnnnnnnnnnnnnnnnnnnnnnnnnnnnnnnnnnnnnnnnnnnnnnnnnnnnnnnnnnnnnnnnnnnnnnnnnnnnnnnnnnnnnnnnnnnnnnnnnngtttctctgtaaatatccagatagcggatgttgttccgttcgtgcaatgtccacaccgttcatctctttatcatgtagcgctgatcgtcattgcaaatacaaggatcctttcatgagtatggctgggcttgacatcgcagctgaggtagttttgatctttataaagcgcatctgcacacaatttatagagtgattcttttcatatacacggaacaatccttcaaggtcaaagcagaaaatcggttctggatcaccatctggaaggtctgttggtcgtgtaggcatctttgacaacctttccagacataatcacagcatgactgaatagtcgtgtttacgggcatcttgaccatattccgaagtattgatgttgatgtaactttgagggagacaaacatgtagccaatcgtccacctaactctaacctaaacctaccctatgccgcccaagactttttcctctaccacctcccactccctgtcaggggaaagtcactacccgctcgtccatgaggtagaaaagatctttgactcgtacttttgacacgataccctgaatcagtccgtaaatcgacgcatctctagccattttcccaacaaaactgctgccaaaacagctaaaggtcttcctttcttgctggatgtctttatgtatggaggaatatctcttcacgagagcagttgttgattcgagtgacgtttcccgtttcaatgtactcggcatccaacctttttgaaatttttgccttttacctggtcgctttttgagatggatcttccaaggtatttcatcaggtatcccatgagatcatatgccactcctaccgggaatctatcgtcagatggaacacgttcaaaggtgaataggtagttgcagtggttgttgcgtaagatggaagaagcgagtgggtcaaagtaggaaagttgggggcacaaacttgagtagtcattcacttcccttttatcatccggagtaatttaaatgacatggattggggcttttggcaatcttacaatatatctatccgtgatgttgaggtcaccggcgtcggacttgcgatattcaattgccatattcgattgcgtcgacattttcatcgcgtctggacatgttcctcctctgttaacgcgattgggtttgttattggtatcactaatccgtacggaatatctttaacgatgtaaacaagtgcatatacgagtcctttgttaaacaagactcaaaggagtaagatggcactccatgtcgactcgtacaagcaaatgattcttgaagattgtggcaaggctcccaatggagctcgatgaaattgcaagtttaatgctcttcaagcaaaggatctccttgcaacatgaaggacacaggaactagaaatttgtggtgaaggagcagaataccattagattaaaattcggtgttgatggaggtttgatgcgtggacgatctttgaaagattcgctgtctgcaagagatagccacgggctggatcttaatcgttttaaatcatatcacattggtcgaaataccaattacaacactaaagccattacaagaatactacttgtactatattatctatcgaccatgtacatctcttatttagatcactctctaacttcccgaccgcattttgaacactgatgaccgtgggtggcgccccatacaagatcaataaaattgcagtgacggcatttgagataaaatgccccaggaatgttattctttgccgtttcacgcttgcacccgtcacacttgtggaaacgtgtgccgccatcgactttgtcgacgcgaccgcagtgagggcacacgacgcgatacgttcccaaaaggtgtcctgcaaccatttcgccgatgcgaaggacgccaggaatgatgacatctttaaaaccagcggcaaggagagccgcggcgatagcggattcaactgccattgttttgtcgagttgttgaagttgttgttgatgatgttgttgttgttgtgacgagctttgttaggtgcaaaatgggacgaggtgcatgttcgtgcctttatatacgaaatggggacaccacataaaaggccatgaaaacaatggaatcatagtgaagcatatgctcaccgtgaaatggaatattgccaactgtggctgctatattattttttggtggggaaggaaacaaacaacagcccataatggagcgggatagtctactgctacctcaaatgtcttgcatatcttgcaaatgcgtggctttaccgcctttgaatatcaaaatactcactgattgaaagctcgtactgcggccgaggtgcctatttcaatcctgttgacaagctgtgaatgatttcaagcattggaaatgacattataatgtacaaaagaagaagatcatattgtgacagatgtattcaaacagccaacccatttcccgcactcaccgtccgcaccctccgacacccatccgtccatccacgctttcatagtgcggagccgatgggtattggcactagtacaaagattccaaccaatttaatcataattttactcgatttagactcatgaactatggtttgattcaaaaaatcctatgtaagtcatcgtccattttcccaggctttcatctttttctacagatatcatcatgccaccaaagaagaagcaaaagctcgaaaggctcgaaaaacttgacaaacctacttgcttacatacctgcaacaagacgtccttcacaaaggctttcttgcctaatgagacctaccggcagcgtcttctagattacatcgccatcatccatcaactcgctgaccatgcttcccacgctctcaaattctacatcctatatgcaccaacctttcccacggtaaatgaagatacaatcgaagcgattctctatcttctcaacaagggggaggcttggcatccaagaaaggaagcaaagaaggcatggcgggattgtttgctgccatatgttcaacggtactgccaaatcatcggctttgttcacccaaatctacgaggcgagcagcaatcagtcaattatctgacagcgagtatgatgacaaatctgaaggtcaacgtccaggaacacttcatgacgatgctgctccggtacatcaatctgcggctcgatgtgaagggacagaagcagcgactgccactgaaaagcgatgcgcgaaacgctttctttgctcgtcttcgctacttgaagtcaattttcctttttgatatcgtgcccgagtcgcttgatgacttgactgctgaagagagtgaacttctagaagagatttggtcccttaacattcccctttctgacgaccagccactcgcatattcggttgctgtagaccctctcgccttctttcctgcatactgcaaactctctgggctgtatgaacgacatggcttccatcagttcagcgcgatacctctgcgtcgctcgctcatccaaagccatgtgcggatcgacaccatcatcctctactctcaccttctttgcatcacacgacgagaagcggaaactgtcgaaaaggtcgatttatggttgcgcgtgtgcaacctgcggaacaaggcttttcggtctcgccgcggtatgcagtttgaaggctcggtcacgacggatggaacctcggtgtctgtatacctaaagcacccagaagctgacaagtatggaaagcgcagcggagggaaaaagtcagcaaacacgacggaggcagaggttaaagcacaatatgtggagaaaaacttacctgcttgtcgagcagcagagaatgttgttgttatcgacccaaacaagcgcgacattctctactgccaagacagcaatggtacaatgttccgttacaccgccaaccagcgagccgtggagactggaagccgtcgatttgcaaaagaacggcagcagatgaagaaggaagcgggaatggacctcatagaatcacgtatccctagtcacaagacaatgaacctcatggacttcatgcgctatctccttgttcggcgcgctgattgggatcgtcgcaaggaattctactccaccctgcccacacgcgatggaaatggcactccttcatcaatcggcagcgaagcgaatcagacctcatatccaacatgcgcaacaagtttgggaactttaccgttgtgatgggtgattggagcgacgccggtcgaactgcgagatttcagacctcatcaaagacaaaaggctggcgcaccctctttaagcggaacaggatcaactgcttccttctcgacgagtacaagacctcatctgtctgccctcactgttcctctggcgttgaaaaaggcttcaaaacacgacctcattcaagaccttggcgccgtcgcgaaggcaagattgaaaaagtccacggattgctgggttgtaccaaccctaactgtttacagcaatcctggacgatgcgctactggaacagggacacgctgagcacctgcaacatgctgatgattgtgcaatcaatgttggatgggcactgtagaccagaagtgttcagcaggagtgttccagccgtagcttagattggttagattaggttttccgagccggttgtcgcgcggttcaatccctggtgcgggtgtccgcactatgaaatcctattgtgcagtcgtaatttcaatgatgatcgtgcatgtgtaagtactaagccgcaattgggttccgatcgacaccacccatcatcgctttccatctgtccgtccattcttcactcgcaccttgcgtcgaatagtgtcaacagtgcgaatcctttggcaactctttgatcaacttgctcttgatgcccgggaaactcacctgggctatcttgcatgaatttgatatacattgggtaaagatcaatgaggagaataaccattttctagagcccccaccatctttttcctcaataacctgccatacagtgttgctcttgtttttgtgtttctaaatcatcctgtccaccttcatgtctttcatgtctgtatttgcggtaaatactccattagatacagcatagacatgcttctacgtggtggtcaattaacgatctcgacgcgttttcttgacacgcccaaagtcgctgccccacacaagttgcaagtttctttttttttgcttcaaaacaaacggacggaatttgaaagcgccttacgagatattctaaagatattcttcatgaccgagttgagcaaggcagcattttcaagaatatgttttgctttgggtaatgcgatataatggatttatgctttcctgttcatacactaaacccataacatgcagggaaacccatcgccgtcctcccaaatccccaggcacgcattcctgcatatttacttcattatgaattctctctggcgctcctttctttgcattccaagcagcactatgtatcatccgctcaattgacgcaccaacatactgccgaggatttggcaacggcagaacatcttctctgtgtcataaattttccacgcaagcagataggaaagttcaagtcggattgcctcaccacaggcgtgcaagacgatcaggcaccagatcctgtaaagaagcgagaaacgaccgttgccgtgggtgtcctcaacatggctgagtcaggcaacaacaacatcttgcctggatctagagtgcacatagacggtcgtcatgaagtcgttgacacgaatgatagagatttatcttgggaagagttttgtcaatttgagattcgtgtcgggacggtcctatctggggacggaaatgtagattttggggaaaactggggtgttcgcagatgcaagtctgccattgaacttggaatttacacgggaaaacaagttttggccgtgctgaatgtagaggatgggccgtgggttttaagtgttggaaagactggattaataggaccgctaaaaaaggtctctaacgggatccgcttggcttgattttaaaaagtttcatccgagttttagtgtcctgtacatggtgagctattaatgaagaaagggcgctgcaatccttccatctccatgggacgatgcttcaatgacatggccgaaagcattgcccgacttttcatgtttgatgcgaggcgaaccgttgctaggcaacatttatgaacatcggaatttcggaatggcatctgattggctggccggcacgtgatgaatcaacgcggctataaaaggagcccaccgcgtcttcccacactctacttttccccatcagactcaaacaacgaccgtcgccgggacggactttttctctaggtgggtgggggacaaccatggttgctgaatcggcttgcaattccaaagtcctgctggggctgcaacacgccagtttatggctggccctgtcacagtatctatcgtgccttttggctgctggggctgtggtcggtccggagcacggctgccctgttgtggtatctatcggggatggagggttgtaagcagcctgctggggctgcaacacgccagtttatggctggccctgtcacagtatctatcgggccttttggctgctggggctgtggtcggtccagagcacggct

SEQ ID NO: 708 - protein, 141 aa, Spizellomyces punctatus
  source 1..141: note = CDS = join(<1..77,148..498), XP_016611303.1 - atypical/RIO/RIO2 protein kinase CDS
EREFSLDVEVAASGFTKKQQEELEKLQEELGDQSDDSGSEETDDEEASTDEDGDVETERDAATVEDELLQEVPSSDNLDISEADSQHLMESLNERVHTLAIDDSQSRVPSMLQERDQLEQAPSGSESEEEEEVDEDRILRN

SEQ ID NO: 709 - protein, 499 aa, Spizellomyces punctatus
  source 1..499: note = CDS = 3414..4913, XP_016611304.1 - uncharacterized protein
MPPKKKQKLERLEKLDKPTCLHTCNKTSFTKAFLPNETYRQRLLDYIAIIHQLADHASHALKFYILYAPTFPTVNEDTIEAILYLLNKGEAWHPRKEAKKAWRDCLLPYVQRYCQIIGFVHPNLRGEQQSVNYLTASMMTNLKVNVQEHFMTMLLRYINLRLDVKGQKQRLPLKSDARNAFFARLRYLKSIFLFDIVPESLDDLTAEESELLEEIWSLNIPLSDDQPLAYSVAVDPLAFFPAYCKLSGLYERHGFHQFSAIPLRRSLIQSHVRIDTIILYSHLLCITRREAETVEKVDLWLRVCNLRNKAFRSRRGMQFEGSVTTDGTSVSVYLKHPEADKYGKRSGGKKSANTTEAEVKAQYVEKNLPACRAAENVVVIDPNKRDILYCQDSNGTMFRYTANQRAVETGSRRFAKERQQMKKEAGMDLIESRIPSHKTMNLMDFMRYLLVRRADWDRRKEFYSTLPTRDGNGTPSSIGSEANQTSYPTCATSLGTLPL

SEQ ID NO: 710 - protein, 230 aa, Spizellomyces punctatus
  source 1..230: note = CDS = join(5943..5991,6051..6694), XP_016611305.1 - uncharacterized protein
MTELSKAAFSRICFALGKPIAVLPNPQARIPAYLLHYEFSLALLSLHSKQHYVSSAQLTHQHTAEDLATAEHLLCVINFPRKQIGKFKSDCLTTGVQDDQAPDPVKKRETTVAVGVLNMAESGNNNILPGSRVHIDGRHEVVDTNDRDLSWEEFCQFEIRVGTVLSGDGNVDFGENWGVRRCKSAIELGIYTGKQVLAVLNVEDGPWVLSVGKTGLIGPLKKVSNGIRLA

SEQ ID NO: 711 - DNA, 4684 bp, Spizellomyces punctatus
  source 1..4684: mol_type = unassigned DNA; note = Fz = 1141..2961
acaatgtttgcccgaacccgactagcagaggattgattgggccccagtactcttttggaagccaccgctcaagactttgtctggtggcttccgggttcttcgtccggacccaacctagacgattactgatgcggtgaacatgcgtgtcgacggcaattgcaacatctctgatcatagattgtcaaactaccgaagcaggtcgcgaaatcagttgtatgctggttactcacttgttccatgctatcgacatggtcaatgcggcctaaatagtgcggagaatatcagaattatgcacaactggaagcaatccactgtaagctcctactattttagggccaaccccaggaagggcgagtagctcttcccaggtaggagggatatcgccgtcatatcgctcgtgcaaaactctactcgttgccagcagagatctggatcataaaggtttcagccaaattgcacggccatacacgaaactacggcgacacaaaacttactttgttttctggttttgcattccgattgtcgccagacagcttttaatcagttcaggatccatcgctaatagggcattcggggtcatgccttcaggtgtgtgggattggagcagtctcatggtgggagccagtttcaagtcgggtgtttgagccgagagaataagcgatacaagtgtctcaaaacgatacacctgaatcaaatgcgttcagcaagcaaagcaactgtttggaaaggacgacagcgtatatgatttaccttgtcaccaaattcttttctgccgaggacggcacacccgcaggtatctacaggtgcctccacccgcttcctatacgcttcaatgctagtccacacatcttgccattcgcctttatcggaccttgacgcctcctctttgatttctgcctttaccgtttccagagcaatctcttggagatcgtagcgaatcggaacatgcttaaccgcgggtcgcttctttgtcgggcgcacctttgtttgctttccaaatacggtagcgatgggacaaactgtctccacgacaggagccgctgatcggggacggagtcccggtcgtggcatatgtggttttgaactgtgagatatgggttatcatctcctcccaacttggattttacatgtcgaggggcttagccgaacccatggggcgtagcaaattcatagtgcggagccgatgggaactggcactagtacatagattccaaccgatttaatcataattttactcgatttagactcatgaactatggtttgatccaaaaaatcctatataagttgtcgtgcccattttcccaggctttcatcttttcccacagatatcatcatgccgccaaaaaagaagcaaaaactcgaaaaactcgacaaacccaccttacatacctgcaacaagacttcctttgcaaaagccctgccaaacgagatctatcgccaacggcttctagattacatcgccatcatccatcaacttgccgaccatgcttcccacgcgctgaaattctatctcctttcatcatcagcgccagtttttcccacggtaaatgaagatacaatcgaagccatcctgtatcttctcaacaagggggaggcttggcatccaagaaaggaagcaaagaaggcatggcgggattgtttgctgccatatgttcaacggtactgccaaatcgtcggcttcattcacccaaatctacgaggcgagcagcagtcaatcaattacctgacagcgagtatgatgatgaacctgaaagtcaacgttcaagagcatttcatgacgatgctgctccgatatatcaatctgcagcttgacgtgaagggacagaagcagcaactgccaccgaaaagtgatgcgtggaaaagtgatgcgtggaaagctttctttgctcgtcttcgttacttgaagtcaattttcctttttgatgtggtgcccgagttgctggatctgagcaggacagaatccgatatcatggacgaaatttggtcgctcgatctgccttttcttgtcaacgatccactggcatatgctgttgccgttgacccgatgtcctttttccctgcatactgtcggttgtcaagcctatatgaaaagcatggatttcgacggttcagcgccatcccacttcgccactccctcatccaaacacatattcacatcgacacggtcattctgtaccagcatatcctttgcatcatgcgacgggaagcggaaactgttgaaaagttcgatttatggttgcgcgtgtgcaacctgcggagcaaggcttttcggtctcgccgcggtatgcagtttgaaggctcgatcagtacggatggaacctcggtgtcggtatacctaaagcacccagaagcagagtatggaaagcgcggagcgagaaagtcagcaaagagtttagaggatgaagttaaagcgcaatacatggagaaaaacttacctgcttgtcgagcagcagagaatgtcgttgttatcgacccaaacaagcgtgatctactctactgccaagacagcaatggtgcgacaatgtttcactacaccgccaaccagcaagccatggagactggaagccgtcgacagcaaagtgcaacggcagcagatgaagaaagaagctggagttgacctcatagaatcacgtatccctagccacaaaacaatgaacctcatggactttactcgctaccttcttgttcgccgtgctgattgggatcgtcacaaggagttctactcacatcctgcccacacgcggtggaagtggcatgcatttataaaccatcagaagagcgaatcagacctcataagcgccatgcacaacaaatacggtgaaaactttaccgttgtgatgggtgattggagcgatgccggtcgaactgcaagatttcagacctcatcaaagacgaaaggttggcgcaccctctttaagcacaacaggatcacctgcttccttctcgacgagtataaaacctcatctgtctgccctcactgttcctctggcgttgaaaaaggcttcaaaacacgacctcattcaagaccttggtgccgtcgcgaaggcaagattgaaaaagtccacggattgctgggttgtaccaaccctaactgtcagcaagcctggacgatgcgctactggaatcgagatacgctgagcacctgcaatatgctaatgattgtgagatcaatgttggatgggcactgtagaccagaggtgttcagcagaagcgttccagctatagcgtagcgtagattagttagttagcttttccgaaccggttgtcgccggttcaatccctggtgcgggtgctagtgccaatacccatcggctccgcactatgaatgtcgcaagcaaaacaaacccaatgcgcaacgattggtaagacgggtatttgccatctatgcccttgttcaccatttcttgcaaacgtacgctggtgcacagtttattatcatggagatcccggagtttgctgtccgaatgcaggaaatcagcaaactcttcgtggtgaaattctacgcaatggagtaacaaagtgccaagcgaaactgcaagcggctatcgccctcccacgcctttgtggttgattccaagcgttacgatcaaagaaagcacgcgatggaaagcaaagtaaaaaaatctatttgacaatttctggtcgcctaccttttagcacgttgaggcgttttaaagaaaaatgattttttactattggccccacgggtgaacgagcgatagacgagcaacagtccaattgctgaaaaacaagttgctgctcatgttcgctgcccactagagatctcatgccatgaatacgacgatacccccttccacatccgttgtgccagagcatcttcaatatacgttggaactggtctttggaggtctaggtaccgccattcagctcttcaactgtatatgggctgcatcggtactgttccgtcgtccgaatccctacaatgggactctggttatctgtggggtcttctacctgttggcccagggtattgtcgtgacgcagacaattatctccttctcggggggcaaaaaccatgagtacctcaccatgctggaagacttgggccaaggagaggaagtgaagcaacagtactcggactggaaattgggagtgatcatgccctggctgcagcgaacatacaatttcgtttatggcgtagccacacttgtttatgtgttgattgttcaaattcgatttcgtgtcgttcgacgaatcgtcccgtattggaagggttgggtacgttgtagatcgattcttctcagactgagcaactcgcatattgagactttgaacgaccttaggatcacatctttgttggctttaccgtcattctatgggctgctaccttcctcacttggaatgtcatacattattcgcgcgatggcctttcgagtgggatatcagcggccgtatggaatatttatgttttggtggttgatcaactcttgtgcgtcctgttccttatgcgtctgaagatgttccaaagaaagtttggccaatcaatccgacgccagacagccaggcgaacggtctttgtcgctctcatctgcctagcgataatgtcgtgggttgctttcggcgttttcatgtacagtaatatgggatatcggcacgacgaagggatgcgtaatgttttattcagagtagcaagtgccctgtctggctttatgatgtccgccgc

SEQ ID NO: 712 - protein, 271 aa, Spizellomyces punctatus
  source 1..271: note = CDS = join(complement(751..1071),complement(495..685), complement(326..428), complement(231..262), complement(<1..167)), XP_016610709.1 - uncharacterized protein
MPRPGLRPRSAAPVVETVCPIATVFGKQTKVRPTKKRPAVKHVPIRYDLQEIALETVKAEIKEEASRSDKGEWQDVWTSIEAYRKRVEAPVDTCGCAVLGRKEFGDKVYRFETLVSLILSAQTPDLKLAPTMRLLQSHTPEGMTPNALLAMDPELIKSCLATIGMQNQKTKSLLATSRVLHERYDGDIPPTWEELLALPGVGPKIAALTMSIAWNKDVAIAVDTHVHRISNRLGWVRTKNPEATRQSLERWLPKEYWGPINPLLVGFGQTL

SEQ ID NO: 713 - protein, 427 aa, Spizellomyces punctatus
  source 1..427: note = CDS = 1334..2617,  XP_016610710.1 - uncharacterized protein
MPPKKKQKLEKLDKPTLHTCNKTSFAKALPNEIYRQRLLDYIAIIHQLADHASHALKFYLLSSSAPVFPTVNEDTIEAILYLLNKGEAWHPRKEAKKAWRDCLLPYVQRYCQIVGFIHPNLRGEQQSINYLTASMMMNLKVNVQEHFMTMLLRYINLQLDVKGQKQQLPPKSDAWKSDAWKAFFARLRYLKSIFLFDVVPELLDLSRTESDIMDEIWSLDLPFLVNDPLAYAVAVDPMSFFPAYCRLSSLYEKHGFRRFSAIPLRHSLIQTHIHIDTVILYQHILCIMRREAETVEKFDLWLRVCNLRSKAFRSRRGMQFEGSISTDGTSVSVYLKHPEAEYGKRGARKSAKSLEDEVKAQYMEKNLPACRAAENVVVIDPNKRDLLYCQDSNGATMFHYTANQQAMETGSRRQQSATAADEERSWS

SEQ ID NO: 714 - protein, 275 aa, Spizellomyces punctatus
  source 1..275: note = CDS = join(3793..4239,4305..>4684), XP_016610711.1 - uncharacterized protein
MNTTIPPSTSVVPEHLQYTLELVFGGLGTAIQLFNCIWAASVLFRRPNPYNGTLVICGVFYLLAQGIVVTQTIISFSGGKNHEYLTMLEDLGQGEEVKQQYSDWKLGVIMPWLQRTYNFVYGVATLVYVLIVQIRFRVVRRIVPYWKGWDHIFVGFTVILWAATFLTWNVIHYSRDGLSSGISAAVWNIYVLVVDQLLCVLFLMRLKMFQRKFGQSIRRQTARRTVFVALICLAIMSWVAFGVFMYSNMGYRHDEGMRNVLFRVASALSGFMMSA

SEQ ID NO: 715 - DNA, 5555 bp, Spizellomyces punctatus
  source 1..5555: mol_type = unassigned DNA; note = Fz = 2042..2731, Fz = 2734..3897
gtgaagagcaatagcctgtattgggcacgtcagaatctgcaatgaaaggtgctccggtatggagtacagcgaacctatgatctcacctgcatatcgtcagcaatatgctttgcgcgatctgctgcactctgcgcaaccgccgcagccgaatccttgggaatgaccccaccggtaacagcagctgtccttgcctcaagttctttcgcatgtcgctgcatacattgagcggtcaattcggcctgagcagcgttggccatttgtttgtgttctggaagtttggcgattccttcagcaactgcttcgtccacgttggaaacttgggatttggaggtcgtctcgttttgttccttcgaacatgctagggtactcatccttcaaaactatgcgctatttgcgcaatactgcaggtgccctcaccttggcgtcctttttcaccttccatttcggattataaatgtgcaaatcttatttacagccttcacggcaagtttgacagttggtagggcagaaaagattcgctgcgagagagctcaactgttcttttaagttcgtattttgagcttatattactcaaggttggacacctttgtaggagcctttctccagcttccgtatttcagaaggcgaagttactgacggtcggctgcctttacactactgtaatactgacgccaattccaagtgaccaaggctcacagaaattaccatcacgtataagaatccactgaatagtccatgtctgccattacgtatcaaagatatcgtgactatttcccaaggacccttgggcttgtctgagtccttttgacgtgtagaagcaggaactcttacaaaaaaggacgtcgtgcatgagaaaggttccaatgcggtgcttcttgcaacgtcgttcaaagcagacgtccactttcaatgttatggagttgacattgatcagacatatttaggctactcacaacgcgatgacattatacactatccgtaccatatatacactttcaaaataatctttgtgttctgcctcattgtcaggtaacggtaagagaccgacacaacagtagcagtcttcaattacaaaagcaatgaaaaaaaagcacaagatgaggtggggaagcgacacgagcaggatttgaacctgcgcgggcagagcccaatagatttctagtctatcgccttaaccactcggccatcgtgtcaggtgaatgacagaacaggtatttgcaatatattccttgtgatattctatgctcatctgcttcccagaggctggctctaggtaaggctcgttgcaaggaaaattgtcgtggctgtaagttgacatgaaggagtatgaaatcgcactttcgggcgttgcagatacattgttgatattggcacttctcacatgtcgccattatcaactattatcatagatgtgaaagcaatgttcgcatagaaggaggacagtaaaagcaagaatgagccacctcggtgctagcagatctgcctctcgtttggagcacgatatatgctctatgaaattatggcttcatgtttttgagacgagccttagacgttgcgagaaagccatgctgaaagacagactccaatttagttgacacttgatcgaaagcataagacatggtagatttcattgatgattcggatgatttggagccaattatgttgaagttattaattggcattagctccgtccatccaggatacattgatgatgtccatgaactttggagaataggttcagcaccttttctgatggttttgtgttaaagaaagtacgcagttacttgccgatgcttcatgggaacaagatttggcccagttctcaacccttgtacatagtgcggagccgatgggtattggcactagtacaaagattccaaccaatttaatcataattttactcgatttagactcatgaactatggtttgatccaaaaagtcctatataagttgtcgggcccattttcccaggctttcgtctttttccacagatatcatcatgccaccaaagaaaaagcaaaaactcgaaaaactcgacaaacctacttgcttacatacctgcaacaagacttcctttgcaaaagctttcctgccaaacgagatctaccgccaacggcttctagattacattgccatgatccatcaacttgctgaccatgcttcccacactctcaaattctacatcctatctgcaccatccttcaccgtaaacgaggagaccatcgaagcaattctctatcttctcaacaaaggagaggcttggcaaccaaaaactgatgcgaaaagggcattgcgcgaatgcttgctgccctatgtccgacggtactgccacatcgtcggcttcgttcatccaaatctacaaaaagagcagcaatcagtcaattacctgacaatgagtatgatgacgaacctgaaagtcaacgtccaagagcatttcatgcagatgatccttcggtatatcaatctgcggcttgacgtgaagggacggaaagggcaatttcctccaaagagtgaagcgcgaaaagctttctttgctcggctacgctacttgaagtcagttttccttttcgaaacaatgccagaatcgctggatgacttgagcattcttgaaaacgagattttagaagagatctggacacttaacctgccatttcctgatcaagacaagccgcttgcctacctcattgccatcgacgcgatgtccttcttgcctgcatactgcaaactctcccgctctatgagcatcatggatttcgatggtttagcgccatacctcttcgccgctccctcatccaaagccatatacgcattgacaccgtcatcctctattctcatgttctttgcatcccccgcagacgcagagaggcagaagccatagagaaggatgatctgtggttgcgtgtctgtaatctacgtaccaaagcttttcagtctcgccgcagtatgcagtttgaaggctcgatcacgacggacggaacctcggtgtctgtatacctaaagcaccccgaagcagacaagtatggaaagcgcggagcgagaaagtcagcaaagactctagaagctgaggtgaaggcagtatatgtggagaacaacttgcctgcttgtcgagcagcagaaaatgtcgtcattattgacccaaacaagcgcgaccttctctactgccaagacagcaatggtgcgacgatgtttcactataccgccaatcaacgctgcaaggagactggtagccggcgatttgcaaaggaacggcagcagatgaagaaggaagcgggaatggaccttatagaatcgcgaataccatctcacaagacgatgaacctcatggatttcctccgctacctcctcgtccgttgtgtcgactggaaccgccgcaaggacttctattcgcatcctgctcatactcgatggaaatggcactccttcataaaccgtcagaagagcgaatcagacctcataagtaacatgcgcaacaagtacagtgaaaaccttactgttgtaatgggtgattggagcgatgccggtcgaactgcaagatttcagacctcatcaaagacaaaaggctggcgcaccctctttaagcgcaaccgcattgattgtttccttctcgacgagtacaagacctcatctgtttgccctcgctgttcctcatctgagtttgtggagaaaaaattcaaagaacgacctcattcaagaccttatcgacaacgagaaggcaagattgaaaaagtccacggattgctgggttgtaccaaccctaactgtttgcagcaagcctggacgatgcgctactggaatcgagatacgctgagcacctgcaatatgctaacgatcgtgcaatcaatgttggatggacacggtagaccagaagtgttcagcaggagtgttccagccgtagcttagattggttagattaggttttccgagccggttgtcgcgcggttcaatccctggtgcgggtgctagtgccaatacccaccggctccgcactatgttaccaagtctgtataacaagaagtcactggatgcaactttggggtcgactattgagccgtcaatttacgcggtgacatggtagaaaagcattgataacttaaactatcaccatgcaataagtcttgcgacaatggttaacctttaacacgctctatgtagaatatctattaaatgccagcaatctgcagcataggttggagaacttaatgataggaactttcaacgctcaaagtactatgattgacttccttccatcgcatcaccaccaaaaaacctctcccacacgcgtctcgcacccattcttgcccgatcaaacagagcagatgggctatccaaagcaggccttacatccacattgaaggcaggaacacccggcgcttcatcgggggcagagtagtagtcaatgacgtagcgcacttgctgtccgcagcgatcaaccgtccaatcgtggcgatcaaagggcttgtccactctggaagaaaacgctaattagggctacaaagacaccaacagcagatgacatgtacagataacatacccaaaccagctgtacatccttgccttaggtgtcaggtcctgcggtctaccctgaaactttgccaacttgacatccttgcagtcacagtgaaacattttttcccacttgaggacctccccccagcaagcctcgtttaaaaagttatgaatatcaaccatggtaggaatctcatgttccggggtttcccatccttttcgtttaagcgcgttgtaaaactgttgtggggaagggtagtcccatgtcttgtcttggacgtcttggcggggaatggaggaggatgtgcgttcggtggagaggttgaccgtttggccttgagaaggggtttgggggaggttgggcatcatattgagagggttgatgtgggaggaggtgtggtcgacagggcagccgcctcctgaggaagaggcggaggtcgacgaagagggtgctgatcgcttcccagcaatggacgcaaaagaagagtggtcaacgggacatgtacctcccgaagaggaggtttgagaatctggtgaaggcgtcatgacggagaacactagtcgcaaggtcacaacaaagtgcgaattgaagacgggaagaaaaacaaaagacacggcagcgttaagcgtgtgcgcaattgcagtcggagtatttttgggaggcacagccatctgaagtaatgtttgttgccatgacaccaaccaagtgcgattgccttgacggaatcactcacatatcagatgctgtttttgtgtttatcttcattctacagtcattgatttattcaattggctgcaatgttacaggtattgacatttggctttctttgccataccatcccagtcagatgcacggttagggtttgcagttatatcttagaaatgtggttggattaacaggttggagtgtctgggcagagagttaagatacccgggatatcttgcaagcgaatgagggtattctcctttggaagcaattaaaaggcaatctgatgtagggccaccaaatcgcaacagcttatgctacatattttattcgtttcgtatgc

SEQ ID NO: 716 - protein, 100 aa, Spizellomyces punctatus
  source 1..100: note = CDS = join(complement(87..371),complement(<1..15)), XP_016606174.1 - uncharacterized protein
MSTLACSKEQNETTSKSQVSNVDEAVAEGIAKLPEHKQMANAAQAELTAQCMQRHAKELEARTAAVTGGVIPKDSAAAVAQSAADRAKHIADDMQAIALH

SEQ ID NO: 717 - protein, 292 aa, Spizellomyces punctatus
  source 1..292: note = CDS = 2000..2878, XP_016606179.1 - uncharacterized protein
MPPKKKQKLEKLDKPTCLHTCNKTSFAKAFLPNEIYRQRLLDYIAMIHQLADHASHTLKFYILSAPSFTVNEETIEAILYLLNKGEAWQPKTDAKRALRECLLPYVRRYCHIVGFVHPNLQKEQQSVNYLTMSMMTNLKVNVQEHFMQMILRYINLRLDVKGRKGQFPPKSEARKAFFARLRYLKSVFLFETMPESLDDLSILENEILEEIWTLNLPFPDQDKPLAYLIAIDAMSFLPAYCKLSRSMSIMDFDGLAPYLFAAPSSKAIYALTPSSSILMFFASPADAERQKP

SEQ ID NO: 718 - protein, 114 aa, Spizellomyces punctatus
  source 1..114: note = CDS = complement(3055..3399), XP_016606178.1 - uncharacterized protein
MSRMRIEVLAAVPVDTTDEEVAEEIHEVHRLVRWYSRFYKVHSRFLLHLLPFLCKSPATSLLAALIGGIVKHRRTIAVLAVEKVALVWVNNDDIFCCSTSRQVVLHIYCLHLSF

SEQ ID NO: 719 - protein, 114 aa, Spizellomyces punctatus; identical to SEQ ID NO: 718
  source 1..114: note = CDS = complement(3055..3399), XP_016606177.1 - hypothetical protein, variant 1 CDS

SEQ ID NO: 720 - protein, 114 aa, Spizellomyces punctatus; identical to SEQ ID NO: 718
  source 1..114: note = CDS = complement(3055..3399), XP_016606175.1 - hypothetical protein, variant 3 CDS

SEQ ID NO: 721 - protein, 114 aa, Spizellomyces punctatus; identical to SEQ ID NO: 718
  source 1..114: note = CDS = complement(3055..3399), XP_016606176.1 - hypothetical protein, variant 2 CDS

SEQ ID NO: 722 - protein, 252 aa, Spizellomyces punctatus
  source 1..252: note = CDS = join(complement(4532..5052),complement(4228..4465)), XP_016606180.1 - uncharacterized protein
MTPSPDSQTSSSGGTCPVDHSSFASIAGKRSAPSSSTSASSSGGGCPVDHTSSHINPLNMMPNLPQTPSQGQTVNLSTERTSSSIPRQDVQDKTWDYPSPQQFYNALKRKGWETPEHEIPTMVDIHNFLNEACWGEVLKWEKMFHCDCKDVKLAKFQGRPQDLTPKARMYSWFGVDKPFDRHDWTVDRCGQQVRYVIDYYSAPDEAPGVPAFNVDVRPALDSPSALFDRARMGARRVWERFFGGDAMEGSQS

SEQ ID NO: 723 - DNA, 4145 bp, Spizellomyces punctatus
  source 1..4145: mol_type = unassigned DNA; note = Fz 1285..1851, Fz 1838..3106
tgatgctacaactcattttattgacgaattctcctgattaagtgttcatgggtatgggagagccactcgacaattataatgcagtcatggcagccgtccgagccatggttgatactggccggtttggccttgccccttcaaggatatctgtctcgaccgtaggagtcgtacctagaatccatagtctgatcaaggatgctcccaacataggcctggcgctttccttgcatgcaccaaaccagacccttcgccagcaaattgttcctaccgccaaagcttggcatgtggatagaatactttccgcttgtgacgcgttcatagatcaccagaacgggttgatcaaatctacgaatcggcgtcgccatattcttgttgaatatgtcttaatcagggacgtcaatgactcccaagaaaccgcccacgaattaggccaactgctgaaggggcgacatgttctcttgaacgtcattccatataatccaacatcagtaccgcatgattacaagactccgaatagagaagacagtcgtcgcttcgtggagacggtgcgggaatacggcgttcatactctcttgcgtcaaaccctaggagcagatgcagccagtgcttgcggtcagctagtcattgataatggcggacaaaagaccagcggacagtgtggggacgataagggcacaggaaatggagtcgccgatctggaagatttgctacagaatactggagctggtaaaaatggagtaaaagtatccatcaagtatcgcaagaaagccccgtcactcgccactcctactggtgtggaacgaaatcctctggacacactccaatctggcacggcagctcttaccaagagaaggtcacggctgaaggtggcaacattgtgtgctttatgtatattatttgctgtggtgctgggtagggtagtcctaagatctctgggtttggcaactgtatagcatagaagatatatttgcattatttcatttgtaacataggcgtggataatgaggggatgtcttctggaaaggagaatgggatttggaattacaggaagatttacatagtgcggagccgatgggtattggcactagtacatagattccaaccaatttaatcataattttactcgatttagactcatgaactgtggtttgatccaaaaaatcctatataagtcatcgtgcccattttcccaggctttcgtctttttcagatatcatcaatgccacagatacagatatcatcatgccgccaaagaaaaagcaaaaactcgaaaaactcgacaaacccaccttacatacctgcaacaaaacttcctttgcaaaagctttcctgccaaactaccaccaacggcttctagattacatcgccatcatccatcaacttgccgaccacgcttcccacgctctcaaattctacatcctatctgcaccatccttcaccgtgaacgaggagaccatcgaagcgattctctatcttctcaacaagggggaggcttggcatccaagaaaggaagcaaagaaggcatggcaggattgtttgctgccatatgttcaacagtactgccaaatcgtcggcttcgttcacccaaatctacgaggcgagcagcaatcagtcaattacctgacagcgagtatgatgatgaacctaaaagtcaacgttcaagagcatttcatgcagatgctccttcagtatatcaatctgcagctcgatgtgaagagacagaagcaactgccactgaaaagcgatgcacagaaagctttctttactcgactatgctatttgaagtcagttttccttttcgaaaccatgccagaatcgctggatgacttgagcattcttgaaaatgagatttttagaagagatctggacacttaacctgccatttcctgatcaagacaagccacttgcctacctcattgccattgacgcgatgtccttcttgcctgcttactgtcggttgtcaagcctatatgaaaagcatggatttcaacggttcagtgccatcccacttcgctgctccctcatccaaagccatattcgcatcgacacggtcattctctacgcccacatcctctgcatcacccgccaaggagcagaagctgtagagaaggtcgatttatggttgcgtgtctgtaatctgcggaacaaggcttttagatctcgccgcggtatgcagtttgaaggctcgatcacaacggatggaacctcagtgtctgtatacctaaagcacccagaagcagacaagtatggaaagcgcggagcgagaaagtcagcaaagagtttagaggacgaagttaaagtgcaatacatggagaaaaacttacctgcttgtcgagcagcagagaatgtcgttgttatcgacccaaacaagcgcaatattctctactgccaagacaacagtggtgtgacatttcgctacaccgccaaccagcgagccatggagactggaagccatcgatttgcaaaagaacggcagcagatgaagaaggaagcgggaattgacctcatagaatcatatatccctagtcacaagacaatgaacctcatggacttcatgcgctatctcctcgtttgccatcatgcagattcggattgtcgcaaggaattctactcccaccctgcccacacgcgatggaaatggcactccttcatcaatcagcagcaaagtgaatcaaacctcatatccaacttgtgcaacaaatacggtgaaaactttaccattgtgatgggtgattggagcgatgccggtcgaactgcaagatttcagacctcatcaaagacaaaaggttggcgcaccctctttaagcgcaacaggatcaactgcttccttcttgacgagtataaaacctcatctgtctgccctcactgttcctctggcattgaaaaaggcttcaaaacacgacctcattcaagaccttggcgccgtcgcgaaggcaagattgaaaaagtccatggattgctgggttgtaccaaccctaactgtcagcaagcctggacgatgcgctactggaatcgagatacactgagcacctgcaacatgctgatgatcgtgcaatcaatgttggatggacatggtagatcagaagtgttcagcctgttccagccgtagcgtagcgtagattagtttttccgaaccggttgtcgccggtttattccctggtgcgggtgctagtgccaatacccattggctccgcactattttgagttacccttttggattcaccgtacttcatatgctttggaggccaactttggtgtcacgtgaatatacaagctccgtatgttgtttgttgcgacaatttggtagattcataactcatcgttagatcgacaccaataatggaacctataaacagcgtggagtcagtagacgatccctacctgttataccccgaacttgccatcgccacacctccaacctcacgcattagacggcttgtcgcttacgactgggcaaacggctttgttagcccattcagagaaaccccaaccgacgtatgcacgtcattggcagaatacctccgccttcactctctagtttctgctagagatagcttgttggacttgggatgcgggaatggagctttgctttttggtgtggtgaaagctcttggccctgtggcgacctcttgttccctggtgggtctggatctcgacctaacgttggttgaggaagctgccaaaacagcgacaggggatgcgattatacgcaatcaacgagttcagttgtttgtgggagatattgtgagccgcaatcctgtttctcaggtgcatccacgtttgagatcaaacatcgatggcatctccatggtgtcgacaacaaccactgttgataccctcctagatgatgcttcagtaatactgctatatctattaccagaagcaataggaaagcttttgccgagtcttcgtcatcaaatccatcttggcaagttggttgtaagcattaaatggccattaacatctccggatttggatctctccgagttcctctgcacacatcaggatggatatctggtttacagacgtagcattaaggcttaagcatttacatcgcgtatgtacatcacaagcaatccaacacacgcattctccggggtctcaatgcagacggttctcgacattcaccccacactctgcatact

SEQ ID NO: 724 - protein, 494 aa, Spizellomyces punctatus
  source 1..494: note = CDS = 43..953, XP_016612555.1 - 23S rRNA methyltransferase CDS
MSRARPLNPKPIFDEELVLEAFRKNKIKESNAAKLWRYLIQQPEKTIDEIPDFPKAARKLIDDEFVITTSKVISRTDAKDGSTTKLLIELQDGQRVESVIMRYGEVELDCFPEEEERRKRRRREGNGEDGEEILEFRSNKRATLCVSSQVGCAMGCTFCATGTMGLLSNLAAGEIIEQLYHANKIEKIRNIVFMGMGEPLDNYNAVMAAVRAMVDTGRFGLAPSRISVSTVGVVPRIHSLIKDAPNIGLALSLHAPNQTLRQQIVPTAKAWHVDRILSACDAFIDHQNGLIKSTNRRRHILVEYVLIRDVNDSQETAHELGQLLKGRHVLLNVIPYNPTSVPHDYKTPNREDSRRFVETVREYGVHTLLRQTLGADAASACGQLVIDNGGQKTSGQCGDDKGTGNGVADLEDLLQNTGAGKNGVKVSIKYRKKAPSLATPTGVERNPLDTLQSGTAALTKRRSRLKVATLCALCILFAVVLGRVVLRSLGLATV

SEQ ID NO: 725 - protein, 392 aa, Spizellomyces punctatus
  source 1..392: note = CDS = 1931..3109, XP_016612556.1 - uncharacterized protein
MSFLPAYCRLSSLYEKHGFQRFSAIPLRCSLIQSHIRIDTVILYAHILCITRQGAEAVEKVDLWLRVCNLRNKAFRSRRGMQFEGSITTDGTSVSVYLKHPEADKYGKRGARKSAKSLEDEVKVQYMEKNLPACRAAENVVVIDPNKRNILYCQDNSGVTFRYTANQRAMETGSHRFAKERQQMKKEAGIDLIESYIPSHKTMNLMDFMRYLLVCHHADSDCRKEFYSHPAHTRWKWHSFINQQQSESNLISNLCNKYGENFTIVMGDWSDAGRTARFQTSSKTKGWRTLFKRNRINCFLLDEYKTSSVCPHCSSGIEKGFKTRPHSRPWRRREGKIEKVHGLLGCTNPNCQQAWTMRYWNRDTLSTCNMLMIVQSMLDGHGRSEVFSLFQP

SEQ ID NO: 726 - protein, 234 aa, Spizellomyces punctatus
  source 1..234: note = CDS = 3340..4044, XP_016612557.1 - uncharacterized protein
MEPINSVESVDDPYLLYPELAIATPPTSRIRRLVAYDWANGFVSPFRETPTDVCTSLAEYLRLHSLVSARDSLLDLGCGNGALLFGVVKALGPVATSCSLVGLDLDLTLVEEAAKTATGDAIIRNQRVQLFVGDIVSRNPVSQVHPRLRSNIDGISMVSTTTTVDTLLDDASVILLYLLPEAIGKLLPSLRHQIHLGKLVVSIKWPLTSPDLDLSEFLCTHQDGYLVYRRSIKA

SEQ ID NO: 727 - DNA, 5305 bp, Spizellomyces punctatus
  source 1..5305: mol_type = unassigned DNA; note = Fz = 1455..3305
gagtaaagatcctagagtaaacagttttgttattgcgtatagagcatatggcgggcatgtaagatctgtatgcttacccgtccataagcacgtccttgactatcaaactcgatgccacgcccgatacttgtgtcggatggtttacgcacgaaatagtcttgggtatcgggttgtgtcgcccacactgaatccactgctacatgctaaccaaaacaaccaaaaattattaaaccttgttctaaaaacaaatcagcaagttggatggaaacttacgttgggcacaaaatccaacatcaacttgatgccccgttgcttcaaccgcttcctaaactcctttagagcctcatcaccgcccaactctggattcaccgtatctaaccaccaaaagccaaaatcaataccccatcaccaacataacccaacaatgtaatcctcacattcaaaaacagcataaggcgacccaatcacatcctccatccgaaaatccaccaacgcctcccgataactcttgagtcgtcccgattcaactttatccacctgctcaagtccatatgtacccaatcgccaaacgccctgtaaccaaaccatatgtacaccacgggatgcgagtgtgtcgagcgcggtatcggggacagaggacaggggttgcggttgggaagataagctgtagaggtacggacgggcagggatttcatagatggtgaaccccgaaggaaaatctgaacttgaactggtggtcatggtggaatttaaaagtggcaggcccactatactgtggagaaagcatagaaagagtataaaggtaaacatggttgatgaggttcgtatctcaagtgaaccccgattacaaaagggattcgttatgatgggggagagcctacccagttctacctactttataaaaccaagttacttgcaacactgaaaaattacaaggtttttttctttgattttgtttgtttggcggttcacaaatgatctatagctcactaaaaactagcgtactataccctttacgcgtttcctccaattttgttcttcttctgctggattggtgctagaattcggcttttgcaaaaaagatgggggatttttgtatcatcaaagaatgccgtcgttgttcaacgaaaacgtgacaagcacactctggtgtgcagtccaccacgccaaagttatctgccaagatttctgcacacccaatactgcgcgtacaagggcggatctttgttggaacgtcaccgcgcgtgtgtgtatgcatagtgcggagccgatgggtattggcactagtacaaagattccaaccattttaatcataattttactcgatttagactcatgaactatggtttgatccaaaaaaatcctatataagttgtcgtgcccattttcccaggctttcatctttttccacagatatcatcatgccaccaaaaaagaagcaaaagcttgaaaaccctacttgcttacatacctgcaacaagacttcctttgcaaaagctttcctgccaaacgacatctaccgccaacggcttttagattacatcgccatcatccatcaacttgctgaccatgcttcccacgctctcaaattctacatcctatctgcaccatcctttcccacgttagatcaagatacaatcgaagcgattctctatcttctcaacaaaggagaggcttggcaaccaaaagctgatgcaaagaaggcgctacgtggatgcttggtgccatatattcgtcggtactgccacatcgtcagcttcgttcatccaaatctacaaaaagagcagcagtcaatcaattacctgacagcgagtatgatgacgaacctgaaagtcaacgttcaagagcatttcatgcagatgctccttcggtatatcaatctgcggctcgatgtgaagggacagaagcagcgactgccactgaaaagcgatgcacggaaagctttctttactcgactacgctacttaaagtcagtttttctttttgatatcgtgcccgagtcgctggatgacttgaccgctgaagagagtgagcttctagaagagatgtggtccttcattcccctttccgaccagccgctcgcatattcggttgctgttgaccctctcgctttctttcctgcttactgcaaactctctgtgctgtatgaacgacatggcttccgtcggttcagcgcaatacctcttcgtcggtctctgattcagtcccatattcgcatcgacacggtcatcctgtaccagcatatcctttgcatcacgcgacgggaagcggaaactgttgaaaaggtcgacttatggttgcgcatctgtaatctgcggaacaaggcttttagatctcgtcgtggaatgtgttttgaaggctcgatcacgacagacggtacctcggtgtcagtttacttgaaacatcctgaagctgacaagtatggaaagcgcagcggcggagggaaaaagtcagcaaacacaatggaggcagaggttaaagcgcaatatgtggagaaaaacttacctgcttgtcgagtagcagagaatgttgttgttatcgacccaaacaagcgcgacattctctactgccaagacagcattggtacaacatttcgctacaccgccaaccagcgagccatggagacaggtagccgtcgacagcaaaaggaacgacagcagatgaagaagggggaaattgacctcatagaatcacgtatccctagccacaaaacaatgaacctcatggattttactcgctaccttctcgttcgccgcgcggattcggatcgtcgcaaggaattctactcacatcctgcccacacgcggtggaagtggcactccttcatcaatcggcagcgaagcgaatcagacctcataagcgccatgcgcaacaaatacggtgaaaactttaccgttgtgatgggtgattggagcgacgccggtcgaactgccagatttcagacctcatcaaagacaaaaggttggcgcaccctctttaagcggaacaggatcaactgcttccttctcgacgagtacaagacctcatctgtctgccctcactgttcatccgatgacttccttgaaaaaggcttcaaaacacgacctcattcaagaccttggcgacgacgagaaggcaatgttgaaaaagtccatggattgctgggttgtaccaaccctaactgtttgcagcaagactggacatcgggaatgcgctactggaacagggacacactgagcacctgcaatatgctgatgatcgtgcaatcaattatggatggacacggtagaccagaggtgttcagcaggagtgttccagccgtagcgtagattggttagattagcttttccgaaccggttatcgccggttcaatccctggtgcgggtgctagtgcaatacccatccgcnnnnnnnnnnnnnnnnnnnnnnnnnnnnnnnnnnnnnnnnnnnnnnnnnnnnnnnnnnnnnnnnnnnnnnnnnnnnnnnnnnnnnnnnnnnnnnnnnnnncgtgctagccaaggtggcaccgacggttgtcctttatccaaaaagcatagagcccatcattttataaaattccaatacccaaccaaaacctcatgtaaaaaaattatcaaaatacaaaaaaataataaaccctccacaccacactcacaaaaaaagaaacacatgtagcacctcttatcctccacccctcctccgctcttgcaaacgtccattcatacccctggacactggcgcccaccgcggtgaaagctgcccagatcgattcgatccccggtacgcagtggactcattggaatatgtacttgtgctctccccataataccggcctgaactcgacacccgctgccggtcttcgtacgtatcccgttcggtgcgatcgtcttctcgtgtgtatgcgtcccgaagacttcgtcgttccctcaacatttccctcccagagtctctagcaggctctctggccacctcccacccccgctcctcctcaccctcccgcaccctcaaatgatgcaaagaagccaccgcttttgctaacctctcattctcattctccaaagccaatttcgcatctttaagccgtatcacctcctcctccaattccctcatacgtgggtcatcctgttcaaggtccaacaaattctcccagctgcctaccgcgctacgtgataaaatcggttccgtgtcaccacagagttctgcgaaaaaatgctgttggctttcggatagggcttgtttccagttacgtgctagtatcctatatcattcgatccagtcagtgatggtttggcacaaactcctttgtgtttatacacgtaccgcattcgaatgagactcctcacgacatccacacatctcttcaacttgataacaggtttgtcggacccgacgccagagggttcaagccccactcctgccaatgtcgctctgtgactttgtacagttaaagagagatacaatttctggtacttgaggtctgctcgccaggtcgacagcctgtcaaccagtgcgcggaggtagagaacctcggatatgagctgacggcactgttccttaatactacaaaaaaagcacccccacagattcggtgagtacgatataaacactcgtaacaaacacaatacaaaaaggggaagcttaccgagacatgtccaccttggccactttgtcatcattctccccgagaacagccatcacatcatgcccagacccagatacatccccaatggtgttcttcaacgtctctcgtaacacaaccatcatctcccgactactctgcctgatctttttcaattccttttgcaacaagcccacctcatctcgtaagccttcatctcccgcatcgcttggcgactgggttttcgcatcagaaggatgccgacggtcgactagacgccctcgctccttttcgagccgcaacacttgaatttcagcactacgccgtgcgtcttccaaatgctgaacacgtccatcaagccgtctgattcggtcatccttctcaagtgaaacctcttccaaatgtcgtatttgagtttcaccttgcaagattttttcttccagtcgttccttgacacgacggaaatcatccacaatgcgatctcgctctctttccaaagcgtccacaagtccttcaagtgccttgcgctcagcagtgtgcatctcttcttgtgcactagctgcctcttgatgctcgaaaaactgattgttcagcttatcttccagtagtttgacatcacttcgagccatttccgcatcctttgtagcggcatccaataaatccacaagctcatcaaattcttctcgcatacgagcctgagctgctcga

SEQ ID NO: 728 - protein, 180 aa, Spizellomyces punctatus
  source 1..180: note = CDS = join(complement(438..741), complement(274..374), complement(78..203), complement(<1..11)), XP_016605440.1 - amylase CDS
MTTSSSSDFPSGFTIYEIPARPYLYSLSSQPQPLSSVPDTALDTLASRGVHMVWLQGVWRLGTYGLEQVDKVESGRLKSYREALVDFRMEDVIGSPYAVFEYTVNPELGGDEALKEFRKRLKQRGIKLMLDFVPNHVAVDSVWATQPDTQDYFVRKPSDTSIGRGIEFDSQGRAYGRDLY

SEQ ID NO: 729 - protein, 628 aa, Spizellomyces punctatus
  source 1..628: note = CDS = 1422..3308, XP_016605441.1 - uncharacterized protein
MPPKKKQKLENPTCLHTCNKTSFAKAFLPNDIYRQRLLDYIAIIHQLADHASHALKFYILSAPSFPTLDQDTIEAILYLLNKGEAWQPKADAKKALRGCLVPYIRRYCHIVSFVHPNLQKEQQSINYLTASMMTNLKVNVQEHFMQMLLRYINLRLDVKGQKQRLPLKSDARKAFFTRLRYLKSVFLFDIVPESLDDLTAEESELLEEMWSFIPLSDQPLAYSVAVDPLAFFPAYCKLSVLYERHGFRRFSAIPLRRSLIQSHIRIDTVILYQHILCITRREAETVEKVDLWLRICNLRNKAFRSRRGMCFEGSITTDGTSVSVYLKHPEADKYGKRSGGGKKSANTMEAEVKAQYVEKNLPACRVAENVVVIDPNKRDILYCQDSIGTTFRYTANQRAMETGSRRQQKERQQMKKGEIDLIESRIPSHKTMNLMDFTRYLLVRRADSDRRKEFYSHPAHTRWKWHSFINRQRSESDLISAMRNKYGENFTVVMGDWSDAGRTARFQTSSKTKGWRTLFKRNRINCFLLDEYKTSSVCPHCSSDDFLEKGFKTRPHSRPWRRREGNVEKVHGLLGCTNPNCLQQDWTSGMRYWNRDTLSTCNMLMIVQSIMDGHGRPEVFSRSVPAVA

SEQ ID NO: 730 - DNA, 4975 bp, Spizellomyces punctatus
  source 1..4975: mol_type = unassigned DNA; note = Fz 1976..3643
tggcggaatctaggacgagcacgtaagatgttgttgaaagccctgaagccgttctgagaccacaattgctgacctcttgccgcccgcttgtgacccaatagccataatggcacagtcatacacattccgatgcctgtgccacggccatgatgactgcggcatgtaaacaaggcttcattcaacgggcgcttttgtcatgcaaaactgctcaaactgcaaatgttaagatatgggttggatactcatgtcaaaagactattggaaatttgcaagcgtgcattggtttgcatagatgtgaaatgattcatccgccgatgacagcaatgcactcaaatccatcatcatcacatcatctacctggagcatatctcttggtttaaaaaagatgttttggaaagagctgggcattatcgctgtgtggagtagatgcagtttgtagttctcgcttgcttgacacgtgagtaccaagcacaaggaacacgtcatggtggtggataacacagatccgcgacccgactccaagcctgggcaaagatagttcggcatgccatttcctatagaagagtggtactatgaagtaccggtcatcacacggacatatgttaccgctgtggtgttgaccacccttgcctgcgtaagttcagtatgtggggtttcccttggcacaatggaatcgatcaccgacggatctatcacaattgcattcatgtagcaactggatctcgtgtcgccctttcacctttacttcaactggacgctgatatggcgatccagacaagtaagtacatgaggctttgaggcagctttctgcgtccctgttggtccaccattaatgattgttggtgtgtgactgatttggttggtgcatcacagtggtggcgacttatcacaagcttcctgtactttggaaacttttcgctcgacttcctcttccacatgttcttcctgtacgtatggctagtgttagtctggtgaagcggacaagcaaatgctcaaatgttgtttttccagcgtccgatatagccgtatgttggaggaaggctctttccgtgggaggacggctgacttcctatggtttctattatttggaatgctggcaacaatcgtaagcttacgtcggaaaagtttgacgtgatatacgtcaaaaagtcatgtaatagtaaccaaccttttcttctcagggcatgtcgcctctactccctgctcgtacctccatcccgttcctctcttctcctctaactttcatgctcgtttacgtctggtcacgacgaaatgcattcattcgaatgaactttctggggatcttcacttttactgctccgtacctgccatgggtgctactcgggtttaccatcctcctgaacaaccaatggccggcaggcgacctcatggggctggctgtggggcatgtatactattttctcgatgatgtctatccgagaatggagatctctgaaggacgaaggcttctccgcgcccctgagtttttaaagagaatgattgagatataggactttatttcttgcagaccatgtgagtattctaccctctgcaagactagactttattgtccacaatttgtccatggtatgcagaaaatctttagctgccaagttatccggaccttatactgcacaccaattataacgaaaggacttgggagcaaattcaataaaaagataattctatagcagttgaaggtgacaagtatctgaggcgccgccgatatatatatgtctacgaggaaaaacagatatgccatccgtgtgaacggaatacatagtgcggagccgattggtattggtactagtacagagattccaaccaatttaatcataattttactcgatttagactcatgaattatggtttgatccaaaaaatcctatataagtcgtcgcccattttcccaggcttttctacagatatcatcatgccaccaaagaaaaagcaaaggctcgaaaaactcgacaaacctacttgcttacatacctgcaacaagacttcctttgcaaaagctttcctgccaaacgacatctactgccaacggcttttagattacatcgccatcatccatcaactcgccgaccacgcttcccacgctctcaaattctacatcctatctgcaccaacctttcccacggtaaatgaagatacaatcgaagcgattctctatcttctcaacaagggggaggcttggcatccaagaaaggaagcaaagaaggcatggcgggattgtttgctgccatatgttcaacggtactgccaaatcgtcggctttgttcacccaaatctacgaggcgagcagcaatcagtcaattacctgacagtgagtatgatgacgaacctgaaagtcaacgttcaagagcatttcatgcagatgctccttcggtatatcaatctgcggctcgacgtgaagggacggaaagggcctccaaagagtgaagcgcggaaagctttctttgctcggctacgctacttgaagtcaattttcctttttgatattgtgcccgagtcacttgatgacttgactgctaaagagagtgaacttctagaagagatgtggtccttcattcccctttctgaccagccgttcgcatattcggttgctgtagaccctctcgctttctttcctgcatactgcaaactctctgggctgtatgaacgacatggcttccgtcggttcagtgcaatccctcttcatcggtctctgattcagtcccatattcgcatcgacacgctcattctctacgcccacatcctctgcatcacgcgacgagaagcagaagccgtagagaaggtcgatttatggttgcgcatctgtaatctgcagaacaaggcttttagatctcgtcatggaatgtgttttgaaggctcgatcacgacggacggaacctcggtgtctgtatacctaaagcacccagaagcagacaagtgtggaaagcgcggagcgagaaagtcagcaaagagtttagaggacgacgttaaagcgcaatatgtggagaaaaacttgcctgcttgtcgagcagcagaaaatgtcatcgttatcgacccaaacaagcgcgatcttctctactgccaagacaacagtggtacgacatttcgctacaccgccaaccagcgagccgtggagacaggtagccggcgatttgcaaagagacgagaagcaatgaaggaagaagctggagttgatctcatagaatcacgaataccatcccacaaaacaatgaacctcatggacttcactcgctaccttctcgttcgccgcgctgattgggatcgtcgcaaggaattctactcccaccctgcccacatgcgatggaaatggcactccttcatcaatcggcagcgaagcgaatcgaacctcatatccaacttgcgcaacaagtttgggaactttaccattgtgatgggtgattggagcgacgctggtcgaactgcgagatttcagacctcatcaaagacgaaaggctggagcaccctctttaagcgcaaccgcattgattgtttccttctcgacgagtacaagacctcatctgtttgccctcgctgttcctcatctgagtttgtggagaaaaaattcaaagaacgacctcattcaagaccttatcgacgacgagaaggcaaggttgaaaaagtccacaaacggggcacactatatgaccacgtcactagcatctctgggtgtcctggcaacgcgcacagtgaacaagcaactagttcgcttgcaagttaacgctttggaaatcaccaaaatggctcatcctccgccccttccgacagcacctcaacagcctgctcacccttttgatttccataacgtgagttaatcgcatataccgcgcattgacacttgcaattaatgcaatcactaacatggttgagtatagatgccagttcaggaagcgtacagacatttgaacgcctaccaacgtagcatgacgcccgagcagctcatggccgccaaaatggagattatgcggccgtaccgtaagaggaatatgatagtgggaggaattcttttgggaggaacgctggctatatgtaagttggctgttgctcatgaccttggagtttatggttgggatgtcctggactcacactctggaacgctcaaatctagttggttattcaatgtacaagacgggccgtgacgattttgataacattccaatgcctccaccatcctctgccgacaagtccgcatgatgatggacgggcttcaattttccgttgtacattacattataatcatttcgccgtggaggccctcttgccaatatcctttgatttctggtgaggattttaccgagcgtgcctgtgcaaggctttgatcacatgaaaagtccacaccagtaaaaggatgcacactcaagaaatcaaagcaagtgtgatatatttccggaatattagtagtacatcaccgctaggacgacccagacactgaaagcttcttcaaatgctccataaacacttgaagactgacatcatctgttgcgatcgatgctccctgcgcctgttgattatagccgtagccacctgggctgacatgtgttgtcgatggatttactttggatttcaggaaacgctcttgtgatcctcctgcgtcacagtcaatgtatcgaggaatgggaaatctctccgcaaggagctcctgttaagaatagcaacatgaaggttaatatatgttgatccgcattttccacgcaggatacccacttgcgcatcctgcttgggcgcctccaagagaagtttaaagttttcgtaacttggctgctcgtggtatttggcttttcgccacgcggcgattgtttctccgtgccagatcagaatatggaaaaatgtgtccaatagaaggatatggtccggcttgatagacacggagtcaaggagtacaggctgaggtggtccgttgaaactgtagctcatgagggtgggctgaatcataataagggaattatttacgtcttcgcga

SEQ ID NO: 731 - protein, 217 aa, Spizellomyces punctatus
  source 1..217: note = CDS = join(545..634,713..778,874..947,1012..1105,1182..1511), XP_016611749.1, hypothetical protein, variant CDS
MPFPIEEWYYEVPVITRTYVTAVVLTTLACQLDLVSPFHLYFNWTLIWRSRQWWRLITSFLYFGNFSLDFLFHMFFLVRYSRMLEEGSFRGRTADFLWFLLFGMLATIGMSPLLPARTSIPFLSSPLTFMLVYVWSRRNAFIRMNFLGIFTFTAPYLPWVLLGFTILLNNQWPAGDLMGLAVGHVYYFLDDVYPRMEISEGRRLLRAPEFLKRMIEI

SEQ ID NO: 732 - protein, 217 aa, Spizellomyces punctatus; identical to SEQ ID NO: 731
  source 1..217: note = CDS = join(545..634,713..778,874..947,1012..1105,1182..1511), XP_016611750.1, uncharacterized protein

SEQ ID NO: 733 - protein, 600 aa, Spizellomyces punctatus
  source 1..600: note = CDS = 1934..3736, XP_016611748.1 - uncharacterized protein
MPPKKKQRLEKLDKPTCLHTCNKTSFAKAFLPNDIYCQRLLDYIAIIHQLADHASHALKFYILSAPTFPTVNEDTIEAILYLLNKGEAWHPRKEAKKAWRDCLLPYVQRYCQIVGFVHPNLRGEQQSVNYLTVSMMTNLKVNVQEHFMQMLLRYINLRLDVKGRKGPPKSEARKAFFARLRYLKSIFLFDIVPESLDDLTAKESELLEEMWSFIPLSDQPFAYSVAVDPLAFFPAYCKLSGLYERHGFRRFSAIPLHRSLIQSHIRIDTLILYAHILCITRREAEAVEKVDLWLRICNLQNKAFRSRHGMCFEGSITTDGTSVSVYLKHPEADKCGKRGARKSAKSLEDDVKAQYVEKNLPACRAAENVIVIDPNKRDLLYCQDNSGTTFRYTANQRAVETGSRRFAKRREAMKEEAGVDLIESRIPSHKTMNLMDFTRYLLVRRADWDRRKEFYSHPAHMRWKWHSFINRQRSESNLISNLRNKFGNFTIVMGDWSDAGRTARFQTSSKTKGWSTLFKRNRIDCFLLDEYKTSSVCPRCSSSEFVEKKFKERPHSRPYRRREGKVEKVHKRGTLYDHVTSISGCPGNAHSEQATSSLAS

SEQ ID NO: 734 - protein, 100 aa, Spizellomyces punctatus
  source 1..100: note = CDS = join(3756..3821,3891..4044,4124..4209), XP_016611747.1 - uncharacterized protiein
MAHPPPLPTAPQQPAHPFDFHNMPVQEAYRHLNAYQRSMTPEQLMAAKMEIMRPYRKRNMIVGGILLGGTLAIFGYSMYKTGRDDFDNIPMPPPSSADKS

SEQ ID NO: 735 - protein, 160 aa, Spizellomyces punctatus
  source 1..160: note = CDS = join(complement(4720..>4975),complement(4427..4654)), XP_016611746.1 - protein transporter SEC23 CDS
REDVNNSLIMIQPTLMSYSFNGPPQPVLLDSVSIKPDHILLLDTFFHILIWHGETIAAWRKAKYHEQPSYENFKLLLEAPKQDAQELLAERFPIPRYIDCDAGGSQERFLKSKVNPSTTHVSPGGYGYNQQAQGASIATDDVSLQVFMEHLKKLSVSGSS

SEQ ID NO: 736 - DNA, 11856 bp, Spizellomyces punctatus
  source 1..11856: mol_type = unassigned DNA; note = Fz = 1403..2932, Fz = 3484..3843, Fz = 10482..10841
tttctgctaatcttatccaatcttctatttacaccctgaattctatcggtttgctccatcacattcccttccgtccttgaaatgacatggctctgtcgctctatctcttgtcccatcgcctgcgcttggtacttgattcccttgacaatattactaatctgtcccatattctcctcaatcacttgttcatgcatctcagattttatcttgtcctcctcgtccgcccagtctcccagcattccgccaggcttgactgtgctcttgggttcggctccttttgcgatagcgccagggaattcctcaggtaaactgctaacacgtcgtccccacagaggtttgccgtccggtccctgcggtgctttccactcaaatggttgggaatctttttgtttaacttgcttttcaccgccaaatattggccggaggaaggaatcagagagtttgtcgaggtacgaggttttcgcttcggcaattttgattttgtgtccagtctcttcggttttttcatgtattgagtcaagttgttctaacaaagcgaatggacttttagtcatgttcgtcaaagctacatggactaatgcaaaccacatagatcatctctacttaccaccctgtgcattgagcttcaccaagttctccattcccagctgttccgtttgcttggcggttgccaatgccctagcagtagcattcgcagactcctcctgtacttctagtgttcttttagagagggccacgagctgagcaacctcgtcgccaacactttggtcgtcatctgggcttggtggtgcccatgagcgtctgactccggcaccaaatggattgcctgtcttggtgggtcttggtatcgcttccattattgtcttgtctcaaaatgtcgctatggagaattatctggagctccagttgggtatattatgtgaacattgaaaagggcttggctatctcctgcgtggctaagcatttggctctgcacagccatcaccgctcgtggccgcgcgccccatttacggtcaacagagccagttccgagaagctatgtgccagcctattctttcatccatccgcactgggtcgtaagataagaaaacagagcttacgaaaaagacgatgaaagaagcacaacacattgtcggtcaatcgaacgaaatcaaaacatcaatagtctagcatgaaggcatatgctgtagaaactagcacattcatagtgtggagccggtggactttggcactagtacatagattccaaccaatttaatcataattttactcgatttagactcatgaactatggtttgattcaaaaaatcctatataagtcgtcgcccattttcccaggctttcatctttttccacagatatcatcatgccaccaaagaaaaagcaaaagcttgaaaagctacctacctgcttacatacttgcaacaagacttcctttgcaaaagctttcctgcctaatgagacctaccgacagcgtcttcttgattacattgccattatccatcaacttgctgaccatgcttcccatgctctcaaattctacatcctctctgcgccatccgttcccatggtagatcaagatacaatcgaagcaattctctatcttctcaacaagggggaggcttggcaaccaagaacagatgcaaagaaggtgctatgcggatgcttgttgccatacatttgtcagtactgctgcattgtcagctttgttcatccaaatctatgaggtgagcagcagtcaattaattacctgacagcaagtatgatgatgaacctgaaagtcaatgttcaagagcattttatgcagatgctcctttgatatatcaatctgcggctcgatgtgaagggacagaagcagcaactgccacctaaaagtgatgtgcaaaaggctttctttgctcatcttcactacttgaagtcaattttcctttttgatactgtgcccgagtcactcgatgacttgactgctgaagagagtgagcttctagaagagatgtggtccttcattcccctttccgaccagccgctcacatattcagttgctgtagaccctctcgccttcttccctgcctactgttggttgtcaagcctatatgaaaagcatggatttcgacggttcagtgcaatcccacttcgccactccctcatccaaagccatgtgcggatcgacaccatcattctctactctcatattctttgcatcatgcagcgagaagcagaagcattagagaaggatgatctgtggatgcgcgtctgcaatctacataccaaggcttttcggtctcgctgccatatgcagtttgaaggctcgatcacaatggacagtacctcggtttctgtgtatttgaaacaccccaatgctgacaagtacagaaagcatggagcgagaaagtcagcaaagaccctagaagctgaggtgaaggcagtatatgtggagaacaacttacctgcttgttgagcagagaatgttgttgctatcgacccaaacaagcgtgacattctctactgccaagacagcattggtacaacatttcattacactgcaaaccagtgagccatggagacaggtagccattgacagcaaaggcaaaggcagcagatgaagaagggggatattgacctcatagaatcatgaattcctagccacaaaacaatgaacctcatggattttactcgctaccttcttgttcgccatgctgattgggattgtcgcaaggagttctactcacatcctgcccacacgtggtggaaatggcacacattcataaaccatcagaagagtgaatcagacctcatatccaacatgtgcaacaagtatggtgaaaactttactgtcatgatgggtgattggagcgatgccagtcgaactgcaagatttcagacctcatcaaagacaaaaggttggcgcaccctctttaagcggagcaggatcggtacgaccgaataaggttttcagctgaatttgagaggggaaggcggttcgtcgcgcttctccaccatgtaacggattttttgttggtagactacagtaaagacaacttgggtctcctagcaggttgtgtgggtgtccgtactaggaatcgtagtctccaaatcctttctttgggcgtcggtagcgacttgggggcgagaggcaaggagagtcggttagttgtgaaccgagcaggatttagaggcttcggtacgggtgatcaggccgttgaagcgctctgttaggttcctgttaacctaagattggagttgagaagcgagttatggggattttgtgtcgctacggcttctgcccccgacttattttattgaatacatcctttttatacaagattcttggataaactgttaaactaaactaaactaatgggtgtcgctgcaccgcaactgatttattggtggcggtaccgatctcttccttttccgcactggctcgggcctccacaggttgtacgaggcacgctgaaatctaatgcgccaattgccattctccgaaccggttttttcggtcgcggtaacccaatcggtggagttggtcacgcgattcgtgcttcccgcgtccgatttgggcttactcgcgatctctcgaagacgtcctcgtcgttacacttccttgaaaaggacttcaaaacatgacctcattcaagaccttggtgatgacaagaaggcaaggttgaaaaagtccatggattgctgggttgtaccaaccctaactgtttgcagcaagcctggacaatgcgctactggaatcgagatacactgtcaacctgcaacatgctggcaatcatgcaatcaatgttggatggacacggtagaccagaggtgttcaggaggggtgttccagtggtagcgtagcgtagactagttagattaaggtttccgaaccggttgtcgcgcggttcaatccctggtgcgggtgctagtgccaatacccaccggctccgcactactaaccccaattgtagagccagtnnnnnnnnnnnnnnnnnnnnnnnnnnnnnnnnnnnnnnnnnnnnnnnnnnnnnnnnnnnnnnnnnnnnnnnnnnnnnnnnnnnnnnnnnnnnnnnnnnnnnnnnnnnnnnnnnnnnnnnnnnnnnnnnnnnnnnnnnnnnnnnnnnnnnnnnnnnnnnnnnnnnnnnnnnnnnnnnnnnnnnnnnnnnnnnnnnnnnnnnnnnnnnnnnnnnnnnnnnnnnnnnnnnnnnnnnnnnnnnnnnnnnnnnnnnnnnnnnnnnnnnnnnnnnnnnnnnnnnnnnnnnnnnnnnnnnnnnnnnnnnnnnnnnnnnnnnnnnnnnnnnnnnnnnnnnnnnnnnnnnnnnnnnnnnnnnnnnnnnnnnnnnnnnnnnnnnnnnnnnnnnnnnnnnnnnnnnnnnnnnnnnnnnnnnnnnnnnnnnnnnnnnnnnnnnnnnnnnnnnnnnnnnnnnnnnnnnnnnnnnnnnnnnnnnnnnnnnnnnnnnnnnnnnnnnnnnnnnnnnnnnnnnnnnnnnnnnnnnnnnnnnnnnnnnnnnnnnnnnnnnnnnnnnnnnnnnnnnnnnnnnnnnnnnnnnnnnnnnnnnnnnnnnnnnnnnnnnnnnnnnnnnnnnnnnnnnnnnnnnnnnnnnnnnnnnnnnnnnnnnnnnnnnnnnnnnnnnnnnnnnnnnnnnnnnnnnnnnnnnnnnnnnnnnnnnnnnnnnnnnnnnnnnnnnnnnnnnnnnnnnnnnnnnnnnnnnnnnnnnnnnnnnnnnnnnnnnnnnnnnnnnnnnnnnnnnnnnnnnnnnnnnnnnnnnnnnnnnnnnnnnnnnnnnnnnnnnnnnnnnnnnnnnnnnnnnnnnnnnnnnnnnnnnnnnnnnnnnnnnnnnnnnnnnnnnnnnnnnnnnnnnnnnnnnnnnnnnnnnnnnnnnnnnnnnnnnnnnnnnnnnnnnnnnnnnnnnnnnnnnnnnnnnnnnnnnnnnnnnnnnnnnnnnnnnnnnnnnnnnnnnnnnnnnnnnnnnnnnnnnnnnnnnnnnnnnnnnnnnnnnnnnnnnnnnnnnnnnnnnnnnnnnnnnnnnnnnnnnnnnnnnnnnnnnnnnnnnnnnnnnnnnnnnnnnnnnnnnnnnnnnnnnnnnnnnnnnnnnnnnnnnnnnnnnnnnnnnnnnnnnnnnnnnnnnnnnnnnnnnnnnnnnnnnnnnnnnnnnnnnnnnnnnnnnnnnnnnnnnnnnnnnnnnnnnnnnnnnnnnnnnnnnnnnnnnnnnnnnnnnnnnnnnnnnnnnnnnnnnnnnnnnnnnnnnnnnnnnnnnnnnnnnnnnnnnnnnnnnnnnnnnnnnnnnnnnnnnnnnnnnnnnnnnnnnnnnnnnnnnnnnnnnnnnnnnnnnnnnnnnnnnnnnnnnnnnnnnnnnnnnnnnnnnnnnnnnnnnnnnnnnnnnnnnnnnnnnnnnnnnnnnnnnnnnnnnnnnnnnnnnnnnnnnnnnnnnnnnnnnnnnnnnnnnnnnnnnnnnnnnnnnnnnnnnnnnnnnnnnnnnnnnnnnnnnnnnnnnnnnnnnnnnnnnnnnnnnnnnnnnnnnnnnnnnnnnnnnnnnnnnnnnnnnnnnnnnnnnnnnnnnnnnnnnnnnnnnnnnnnnnnnnnnnnnnnnnnnnnnnnnnnnnnnnnnnnnnnnnnnnnnnnnnnnnnnnnnnnnnnnnnnnnnnnnnnnnnnnnnnnnnnnnnnnnnnnnnnnnnnnnnnnnnnnnnnnnnnnnnnnnnnnnnnnnnnnnnnnnnnnnnnnnnnnnnnnnnnnnnnnnnnnnnnnnnnnnnnnnnnnnnnnnnnnnnnnnnnnnnnnnnnnnnnnnnnnnnnnnnnnnnnnnnnnnnnnnnnnnnnnnnnnnnnnnnnnnnnnnnnnnnnnnnnnnnnnnnnnnnnnnnnnnnnnnnnnnnnnnnnnnnnnnnnnnnnnnnnnnnnnnnnnnnnnnnnnnnnnnnnnnnnnnnnnnnnnnnnnnnnnnnnnnnnnnnnnnnnnnnnnnnnnnnnnnnnnnnnnnnnnnnnnnnnnnnnnnnnnnnnnnnnnnnnnnnnnnnnnnnnnnnnnnnnnnnnnnnnnnnnnnnnnnnnnnnnnnnnnnnnnnnnnnnnnnnnnnnnnnnnnnnnnnnnnnnnnnnnnnnnnnnnnnnnnnnnnnnnnnnnnnnnnnnnnnnnnnnnnnnnnnnnnnnnnnnnnnnnnnnnnnnnnnnnnnnnnnnnnnnnnnnnnnnnnnnnnnnnnnnnnnnnnnnnnnnnnnnnnnnnnnnnnnnnnnnnnnnnnnnnnnnnnnnnnnnnnnnnnnnnnnnnnnnnnnnnnnnnnnnnnnnnnnnnnnnnnnnnnnnnnnnnnnnnnnnnnnnnnnnnnnnnnnnnnnnnnnnnnnnnnnnnnnnnnnnnnnnnnnnnnnnnnnnnnnnnnnnnnnnnnnnnnnnnnnnnnnnnnnnnnnnnnnnnnnnnnnnnnnnnnnnnnnnnnnnnnnnnnnnnnnnnnnnnnnnnnnnnnnnnnnnnnnnnnnnnnnnnnnnnnnnnnnnnnnnnnnnnnnnnnnnnnnnnnnnnnnnnnnnnnnnnnnnnnnnnnnnnnnnnnnnnnnnnnnnnnnnnnnnnnnnnnnnnnnnnnnnnnnnnnnnnnnnnnnnnnnnnnnnnnnnnnnnnnnnnnnnnnnnnnnnnnnnnnnnnnnnnnnnnnnnnnnnnnnnnnnnnnnnnnnnnnnnnnnnnnnnnnnnnnnnnnnnnnnnnnnnnnnnnnnnnnnnnnnnnnnnnnnnnnnnnnnnnnnnnnnnnnnnnnnnnnnnnnnnnnnnnnnnnnnnnnnnnnnnnnnnnnnnnnnnnnnnnnnnnnnnnnnnnnnnnnnnnnnnnnnnnnnnnnnnnnnnnnnnnnnnnnnnnnnnnnnnnnnnnnnnnnnnnnnnnnnnnnnnnnnnnnnnnnnnnnnnnnnnnnnnnnnnnnnnnnnnnnnnnnnnnnnnnnnnnnnnnnnnnnnnnnnnnnnnnnnnnnnnnnnnnnnnnnnnnnnnnnnnnnnnnnnnnnnnnnnnnnnnnnnnnnnnnnnnnnnnnnnnnnnnnnnnnnnnnnnnnnnnnnnnnnnnnnnnnnnnnnnnnnnnnnnnnnnnnnnnnnnnnnnnnnnnnnnnnnnnnnnnnnnnnnnnnnnnnnnnnnnnnnnnnnnnnnnnnnnnnnnnnnnnnnnnnnnnnnnnnnnnnnnnnnnnnnnnnnnnnnnnnnnnnnnnnnnnnnnnnnnnnnnnnnnnnnnnnnnnnnnnnnnnnnnnnnnnnnnnnnnnnnnnnnnnnnnnnnnnnnnnnnnnnnnnnnnnnnnnnnnnnnnnnnnnnnnnnnnnnnnnnnnnnnnnnnnnnnnnnnnnnnnnnnnnnnnnnnnnnnnnnnnnnnnnnnnnnnnnnnnnnnnnnnnnnnnnnnnnnnnnnnnnnnnnnnnnnnnnnnnnnnnnnnnnnnnnnnnnnnnnnnnnnnnnnnnnnnnnnnnnnnnnnnnnnnnnnnnnnnnnnnnnnnnnnnnnnnnnnnnnnnnnnnnnnnnnnnnnnnnnnnnnnnnnnnnnnnnnnnnnnnnnnnnnnnnnnnnnnnnnnnnnnnnnnnnnnnnnnnnnnnnnnnnnnnnnnnnnnnnnnnnnnnnnnnnnnnnnnnnnnnnnnnnnnnnnnnnnnnnnnnnnnnnnnnnnnnnnnnnnnnnnnnnnnnnnnnnnnnnnnnnnnnnnnnnnnnnnnnnnnnnnnnnnnnnnnnnnnnnnnnnnnnnnnnnnnnnnnnnnnnnnnnnnnnnnnnnnnnnnnnnnnnnnnnnnnnnnnnnnnnnnnnnnnnnnnnnnnnnnnnnnnnnnnnnnnnnnnnnnnnnnnnnnnnnnnnnnnnnnnnnnnnnnnnnnnnnnnnnnnnnnnnnnnnnnnnnnnnnnnnnnnnnnnnnnnnnnnnnnnnnnnnnnnnnnnnnnnnnnnnnnnnnnnnnnnnnnnnnnnnnnnnnnnnnnnnnnnnnnnnnnnnnnnnnnnnnnnnnnnnnnnnnnnnnnnnnnnnnnnnnnnnnnnnnnnnnnnnnnnnnnnnnnnnnnnnnnnnnnnnnnnnnnnnnnnnnnnnnnnnnnnnnnnnnnnnnnnnnnnnnnnnnnnnnnnnnnnnnnnnnnnnnnnnnnnnnnnnnnnnnnnnnnnnnnnnnnnnnnnnnnnnnnnnnnnnnnnnnnnnnnnnnnnnnnnnnnnnnnnnnnnnnnnnnnnnnnnnnnnnnnnnnnnnnnnnnnnnnnnnnnnnnnnnnnnnnnnnnnnnnnnnnnnnnnnnnnnnnnnnnnnnnnnnnnnnnnnnnnnnnnnnnnnnnnnnnnnnnnnnnnnnnnnnnnnnnnnnnnnnnnnnnnnnnnnnnnnnnnnnnnnnnnnnnnnnnnnnnnnnnnnnnnnnnnnnnnnnnnnnnnnnnnnnnnnnnnnnnnnnnnnnnnnnnnnnnnnnnnnnnnnnnnnnnnnnnnnnnnnnnnnnnnnnnnnnnnnnnnnnnnnnnnnnnnnnnnnnnnnnnnnnnnnnnnnnnnnnnnnnnnnnnnnnnnnnnnnnnnnnnnnnnnnnnnnnnnnnnnnnnnnnnnnnnnnnnnnnnnnnnnnnnnnnnnnnnnnnnnnnnnnnnnnnnnnnnnnnnnnnnnnnnnnnnnnnnnnnnnnnnnnnnnnnnnnnnnnnnnnnnnnnnnnnnnnnnnnnnnnnnnnnnnnnnnnnnnnnnnnnnnnnnnnnnnnnnnnnnnnnnnnnnnnnnnnnnnnnnnnnnnnnnnnnnnnnnnnnnnnnnnnnnnnnnnnnnnnnnnnnnnnnnnnnnnnnnnnnnnnnnnnnnnnnnnnnnnnnnnnnnnnnnnnnnnnnnnnnnnnnnnnnnnnnnnnnnnnnnnnnnnnnnnnnnnnnnnnnnnnnnnnnnnnnnnnnnnnnnnnnnnnnnnnnnnnnnnnnnnnnnnnnnnnnnnnnnnnnnnnnnnnnnnnnnnnnnnnnnnnnnnnnnnnnnnnnnnnnnnnnnnnnnnnnnnnnnnnnnnnnnnnnnnnnnnnnnnnnnnnnnnnnnnnnnnnnnnnnnnnnnnnnnnnnnnnnnnnnnnnnnnnnnnnnnnnnnnnnnnnnnnnnnnnnnnnnnnnnnnnnnnnnnnnnnnnnnnnnnnnnnnnnnnnnnnnnnnnnnnnnnnnnnnnnnnnnnnnnnnnnnnnnnnnnnnnnnnnnnnnnnnnnnnnnnnnnnnnnnnnnnnnnnnnnnnnnnnnnnnnnnnnnnnnnnnnnnnnnnnnnnnnnnnnnnnnnnnnnnnnnnnnnnnnnnnnnnnnnnnnnnnnnnnnnnnnnnnnnnnnnnnnnnnnnnnnnnnnnnnnnnnnnnnnnnnnnnnnnnnnnnnnnnnnnnnnnnnnnnnnnnnnnnnnnnnnnnnnnnnnnnnnnnnnnnnnnnnnnnnnnnnnnnnnnnnnnnnnnnnnnnnnnnnnnnnnnnnnnnnnnnnnnnnnnnnnnnnnnnnnnnnnnnnnnnnnnnnnnnnnnnnnnnnnnnnnnnnnnnnnnnnnnnnnnnnnnnnnnnnnnnnnnnnnnnnnnnnnnnnnnnnnnnnnnnnnnnnnnnnnnnnnnnnnnnnnnnnnnnnnnnnnnnnnnnnnnnnnnnnnnnnnnnnnnnnnnnnnnnnnnnnnnnnnnnnnnnnnnnnnnnnnnnnnnnnnnnnnnnnnnnnnnnnnnnnnnnnnnnnnnnnnnnnnnnnnnnnnnnnnnnnnnnnnnnnnnnnnnnnnnnnnnnnnnnnnnnnnnnnnnnnnnnnnnnnnnnnnnnnnnnnnnnnnnnnnnnnnnnnnnnnnnnnnnnnnnnnnnnnnnnnnnnnnnnnnnnnnnnnnnnnnnnnnnnnnnnnnnnnnnnnnnnnnnnnnnnnnnnnnnnnnnnnnnnnnnnnnnnnnnnnnnnnnnnnnnnnnnnnnnnnnnnnnnnnnnnnnnnnnnnnnnnnnnnnnnnnnnnnnnnnnnnnnnnnnnnnnnnnnnnnnnnnnnnnnnnnnnnnnnnnnnnnnnnnnnnnnnnnnnnnnnnnnnnnnnnnnnnnnnnnnnnnnnnnnnnnnnnnnnnnnnnnnnnnnnnnnnnnnnnnnnnnnnnnnnnnnnnnnnnnnnnnnnnnnnnnnnnnnnnnnnnnnnnnnnnnnnnnnnnnnnnnnnnnnnnnnnnnnnnnnnnnnnnnnnnnnnnnnnnnnnnnnnnnnnnnnnnnnnnnnnnnnnnnnnnnnnnnnnnnnnnnnnnnnnnnnnnnnnnnnnnnnnnnnnnnnnnnnnnnnnnnnnnnnnnnnnnnnnnnnnnnnnnnnnnnnnnnnnnnnnnnnnnnnnnnnnnnnnnnnnnnnnnnnnnnnnnnnnnnnnnnnnnnnnnnnnnnnncttctgccccgacttattttattgaatacatcctttttatacaagattcttggataaactgttaaactaaactaaactaatgggtgtcgctgcaccgcaactgatttattggtggcggtaccgatctcttccttttccgcactggctcgggcctccacaggttgtacgaggcacgctgaaatctaatgcgccaattgccattctccgaaccggttttttcggtcgcggtaacccaatcggtggagttggtcacgcgattcgtgcttcccgcgtccgatttgggcttactcgcgatctctcgaagacgtcctcgtcgttacacttccttgaaaaggacttcaaaacatgacctcattcaagaccttggtgatgacaagaaggcaaggttgaaaaagtccatggattgctgggttgtaccaaccctaactgtttgcagcaagcctggacaatgcgctactggaatcgagatacactgtcaacctgcaacatgctggcaatcatgcaatcaatgttggatggacacggtagaccagaggtgttcaggaggggtgttccagtggtagcgtagcgtagactagttagattaaggtttccgaaccggttgtcgcgcggttcaatccctggtgcgggtgctagtgccaatacccaccggctccgcactactaaccccaattgtagagccagttcccaaaagaaacatgaaaatgtattaagacacagaaaatgataggaaccgaaacaaatcatacaaatagtaattttgaatgccaccgcccttgctccccaaaaatatgccaaattggcttccatcctgtctttacaacgctactactacaactcctataacgacactattccaatactacccattacctacgacttaacacaactgtcaataaatcatgtagaattgctgagctcacgctttcgcctcttctttgacaaacaatccatcagcaacaccctgcttcgctgcctcagcagcggcacgttcctgctcaatggccgccttggtaacatagttggtgtttggtttgatcaccccgcgttcattgaggtagtacgtgtacaggaaggaataagcatcgaggtttcgtgcccattcgttgaatttcatggactcaagttcggctcggtacacagggtcgtgaattgaatgatgacggaactccgttaccgcgggctgttgaaacaaaaaaaattagctttcagatggtagtaaatagtgattctgagcagttggacattaccaggtgtttggcaaagtggatgccatttggatcagatctcctctcgcaatcagagttgaaagtgtcgtagtgcggctcatccaaaatcaatcccatcgcaggagcctccggtatctcaatcttggcatatccaaatgagttggcaacaatgcttcgtggcgtgttggttctaatgaccatgatagccattgccatcatcttgcggacctggtaccgcgcaaaagccttggcttggaccttaattcgaagccattccatgccaaagtgcacctctggggcgctgcattcaatgttgatgatgcgcatgtagcaccgtgaatcttcatactt

SEQ ID NO: 737 - protein, 258 aa, Spizellomyces punctatus
  source 1..258: note = CDS = join(complement(608..857),complement(<1..526)), XP_016608127.1 - uncharacterized protein
MEAIPRPTKTGNPFGAGVRRSWAPPSPDDDQSVGDEVAQLVALSKRTLEVQEESANATARALATAKQTEQLGMENLVKLNAQGEQLDSIHEKTEETGHKIKIAEAKTSYLDKLSDSFLRPIFGGEKQVKQKDSQPFEWKAPQGPDGKPLWGRRVSSLPEEFPGAIAKGAEPKSTVKPGGMLGDWADEEDKIKSEMHEQVIEENMGQISNIVKGIKYQAQAMGQEIERQSHVISRTEGNVMEQTDRIQGVNRRLDKISR

SEQ ID NO: 738 - protein, 298 aa, Spizellomyces punctatus
  source 1..298: note = CDS = join(1367..1651,1847..2458), XP_016608126.1 - uncharacterized protein
MPPKKKQKLEKLPTCLHTCNKTSFAKAFLPNETYRQRLLDYIAIIHQLADHASHALKFYILSAPSVPMVDQDTIEAILYLLNKGEAWQPRTDAKKGQKQQLPPKSDVQKAFFAHLHYLKSIFLFDTVPESLDDLTAEESELLEEMWSFIPLSDQPLTYSVAVDPLAFFPAYCWLSSLYEKHGFRRFSAIPLRHSLIQSHVRIDTIILYSHILCIMQREAEALEKDDLWMRVCNLHTKAFRSRCHMQFEGSITMDSTSVSVYLKHPNADKYRKHGARKSAKTLEAEVKAVYVENNLPAC

SEQ ID NO: 739 - protein, 197 aa, Spizellomyces punctatus
  source 1..197: note = CDS = join(complement(11527..>11856),complement(11196..11459)), XP_016608125.1 - tRNA pseudouridine synthase A CDS
KYEDSRCYMRIINIECSAPEVHFGMEWLRIKVQAKAFARYQVRKMMAMAIMVIRTNTPRSIVANSFGYAKIEIPEAPAMGLILDEPHYDTFNSDCERRSDPNGIHFAKHLPAVTEFRHHSIHDPVYRAELESMKFNEWARNLDAYSFLYTYYLNERGVIKPNTNYVTKAAIEQERAAAEAAKQGVADGLFVKEEAKA

SEQ ID NO: 740 - DNA, 24789 bp, Spizellomyces punctatus
  source 1..24789: mol_type = unassigned DNA; note = Fz 21153..23000
gtgttcgggagctgcggagatacgtccatattcatgttaaggtggtgagacagacccggcggatgaagtgcctgtggtgcgtgagttggtgacgttcgattgtgctgagctggtgcaagctgctgtgataaggcggacgtgacttgctgtgatggcgttgtgaaggaggttgctggcacgatgatgggtgtagaagtagggtgcagattttggttctgctgctgcgaatggcgctgctcaacctgttgctcgttgtccagctgcatatcctcggctgcttgtggtacagccgggagcatggatggcagcatatcatctgctccatgcgatgggagatcattgatcgcaggctgatccaagatatccgagaagtccactccactccatcgaaacccttctcgaaatcttttcaattccaccgcagcatatgagcccatagaaaaggctgccgcagacaaatttcgtttcgccagtatttggctgcctgcattgtcctcgcttggttgagctgccaacaacgcactcagatctgcatcgacgtttccggtacccgcggggaacaagccacccgcaccgccgccgctattgatttttcccaatatgtccataggctttgtagtagaaactcctgtatgtagatcaccagtgggttgctgctgatcccacatgtcgtcctcctgatatgcgggagagaaaatcggcaagggacgagcctgtggtctttttccttcaactgttctttcctccgcatgcacttgctcgtaatgccgaagcaggtcctcatatgttgcatggatttgaccacaacaaggaatatctttttccgcgccgcctcgctcaggaacggtcaaaggtgagtttgagcatttgcggtccaaagattctactcttcgaggtgaaatgggagaagctgagagcggaaaacggggagacgaggaatacaatggtgacgttccatatgaaggcggaaaagagttggtttgaggtgttccaggagtgggaaaagcggagttgggtgtaaggtgaaagtcgaatacgtcaaggtacgatccgttgcgcattgcgtcctttttgatatacaggtgggttcctgtcgtagatgtcgatggaggcttaatggccaacggattggatgtggtagggacaacgcttagaccaccagcatcggaagaaattacggccgaccttgacgaagacccttcattgctcgcatccctattttgcgccgacatggccatcaggctagcggacactacacagccgtgaaagtttccggtcctcgggttctgtgcgtgcagcaattcccttcgggtagggatgtattgccttgaaaaaaaagcactaaaaaagaagtgagactttacaccagcaaagcaaggagccccttagcaacatcagaagctgtgccacaatatcttctgcacgttgctatggcgtgagtggtcatcagatttggataggagaggtcatgacccatcctgaacgaagaaattaaccaacaagattggcaccccctcgccgcacagcaaattggtgatacttgggaggcatttaaaatacgcaggataagcgattgtctatggccttggacatcttgcccgtgaaccagctgtggctcgactagtcacatagtgtggaggtgatggaaaatggcactaagactcattattatccggataatccggttaatcatatcgcataatcagaacccccatctatcgctcaaagcggtgtggcatgcatgtaatgtttttttttttaaaactgtggtgaggcgcaagccaaaggtctataaaacgctgctactactatgctgcaacgatcgcaggtatgcattatctttgtattttcccacgcgtattcccagtctacttctgatctaccttagtatctgaacatcctccgactaaagaatttcggaaagtaggatttctctcgtgtggtgggcttagttacccggttagaacaaccgtaatgtattgcatgtgtaattgggcctagtcgtagttggttggttgtaaggaaggaattacttggcttttccgaaccagttatcgctggtttattccctggtgtagtagctagtgccatcacctcgacactatctgatgagcagacaatggcttgatatctcgaattggcgggctaataatgttgaccagccctggaataaatctctttccatctccatcggccatgccagcgcgaaaacatagcaattgataaagatcattcaacgttaattacatactattgtataatgataaaatatcagtagtgacatctaactagtgtatatatctctatgaagtctacgattctactgttcaactcaagcactagcacctccggtgataatgctaatcagcgctgcaactggagcaacaatgatagcaacagggaaaaacagagcatacagtgctagcatggttgccacattcaaaacatcgagaatttgatcctggggtgatcgggcggaatcagcacgaaggcggagggggcgagtgacctggcgcttaagcttggcttgcgatacaatgcttttggttacgtcgtcatagatagccagcacggttgcattgtaccaggttgccacagctgactggacctgtcaaagcgaatatggcctgtaagactcatggtcgcaactgggatggcaaaaatacatgcaaacttacagaattgctgatagagtccgtagtttgcttcttcaaaccttcagaccatgtcttgattgacattgcctcggttacggttgtcaatgtcttcacaatcccggcgttcttgattcccaatacgaaagcgtcctcgatggtgcccttcaaggcttcggttcgtttcgtcaactctcccgtctgagcatccacaagagacttgacattgacttttcccgaaacatcgaccccggtgtgtgatttgaggtcgacgatagcagcatcgacgatcttgggtagcgtctcagctttcatgtgcgcggttagtttggtggacatggtgttgaggttggggcgaagagtcatttgtgcaactttctcgaaagcaagttcgactagggaggatgctacggtgctaacaactccggcttgcacaggagtaggagccgtgatggtcatcccaactgcgaaagcgctcacaatgatacgacgtaggtggaccatgatgtagggtatttggtatatgatgaggttggtggatgtttgacttgatgaatgtacaaagggaactggggcaggttggttacttttataaccttttgtgaaggcaaggacgaggtcgggattcttcttttttgtttgagtcatgattgcgatttttttcagtcctccttctttttcctcttcccctgggcggcagtttgctgctgccaagcatctccttccctttccctttcagaagagcgtaaagccgaagcttcccgatatgatacaagcttgaaagtactaggaatagaccgtggtgaagaaaaatggcttataaaaacttgataaaatttcgagttttttttttatattttttgtcgaccatccaaaggaagtttgctgcctgcgcttacgcttgcattttgacgtttttcacactttctttttggctgcgtttaaacgagcgttaaaagccccatgaataatcacgtcgcccacctaagcacatgccgtttatttttgcaacccacgcgcgactaagtatgtccggggacggcggacgtacgacattatgatgcacagcatttcaaaggactcgctgccacacaaaatgagcattgaaagtcatgggaataaggatgaattgcggagcgcaatcgccacttctcgggatctcaagcaaatcttcatgacgtgcattcttgcaaatcagcaaaccttccattaccgtgaacagaaaagtaaggtgtacgccctttgaaggatttccaacaacaacatcatcgccaatccattacaggctgagatctattatgcacagattggagctagtcaaggagaagaaggtgacaaaacgaagcggtattgaaacagggagcacttgttccataagaacaatcaattcctctagcttgcaacagcagcagatctctggccaggtcgtctgaatcaaagagaaggtggacggccacattaacgccggctattatgggtacaaaaactagccatcagtagtaggactgcaaagtgaatttccatttattcgcttaccgttcagttcgctcatggctcctctctcgctcacggcgtgggcttctgcttctgcgtcgttctttatcacggtcagatcgcgacccgcgacggtcatcgtaatcaccgcgagatgaccgacgttcgccgtcacgatcgcctcctcgagagccgcgatagtctccatgatcccgttcacgatcgtaccgcctgaaaagtgaatgtaataggtcaaacctcgagaatgtgcttgtcccacagaaaaacatacccgcgatcacgatcccctcggtcaggtcggtctccataaccgccaccccctccacccggtcctggtcctccaggtccgccaaaccgcctcctgtccattccaccaccgccgtaaccaaagccgcctcgtcgatcaccgtaacctcctccgcccctggatccacggaaaccaccatgtccgccatagtctccgccatatacaccctggtatcctccagatgcatacgatcctccctcacgaccactatggcgctgattaacgtcgggtccaccgatacgggttccacccaatccaccaccaagacggcgtggccgccatcccttgacagtccgcccacgttccacatccaccagaacccgcctgtcatcaatcttcattccatctccttccttgtaggctgctttcatgtccttttcgcgttcgtattcgatgaaggcgtatccgcgtgattttcctgtttcatcttgtacaatccgtaactgtcatagcggttccgtagaagatccgaaagtgccatgcgcgatcgtgtccgaacgttcgtccgaagaatataggggaaagggggagggaaaccaatacgtacccgaaaaaggtggaaccaatattggcgtaaagagtaggggtggttgcattcaatttccataggtttgggataatcgctccgcggacttacccgccaaaacgacaaaacacaaaaacacccacaagtctcacaggccaaacctgttaccaatatcttaccgttttaatgggtccaaatacttcaaactctcgcttcaattccttttctgtcgtttcatatgactacagtagttatgttagaggtgctgtatgaccaattgcaaattgcaatgccaaagcttttcaacctaccaaacgcgcaacgaagagggtcttgtacggatcgctcacgatatggtcatccttacttggatcccatacctcaagtcctttctggatagcctctttcgccttttgctccctctcttgttgctaaaagaataatgaatatattagctcccaagcacgatcaaaacgatccaagtcgccctagtatcataaccagcacacaccagcctcttcttaatctctgctcgagtctccgttggcacataatccgcatcgtatcccttacatctttcgagaaaagcagcaacaccgctgatgaccggtccccgccgttgagcaggagaacgatcaaggggttccagatgcgggagaggaggccgcggcgcaaagagttttaggagattcggcggaagttgtgatgtcattggaacgattccgccttggccaagactgtggctctgagaagaaacgatggccttttcgctagtggagcttggtgtttgattgcgcgcagcctgggtggttgggttgacatagcaacgccttggctactgtaatgcattcgagcctcacacagatctgaagcgttgcaagttcctatccacagtaccccacattgcacaatatggaggaacgagtacggcaatatcacgttgaagcgacatcttttgtctcagcagcagtactacccccaaaagctttgaaggctatgaatggactacgtaaattcatccataaaaaccaagactatcgtttctcggacaaggaaaaggcaaaactctttggtgcagtggaagcatactttacgatattcgatagaaactcagataggtaccacaacatcatccttgattttagtctctcagttgataccttctcaaccccgatataaaacctcagaacgaacacaaacgaaagcgacgccaacaaacctacctccctccctcttatcgaagacgccctcaaagtccccctattcaccaccaaacaaaagtcaactatgctgaaatggtatgacgaactccataaagaagagggtggccataacacacagagccgtgaaactgacggaaccgcccgacatccttggagcgaagaagatgattggggcaaccccgatgagtggggaacagaggagcagagtgatggggacggaattgagaagaaggacacagaaaaggagataccgcaggtccaacaagattcgaataccaagatgaaactaaaaaataagaagagatgacactgtactgcctttctctttatccctggattggtcgttgtgaatacagcattatcagtgcaaacctagattccacaacgcagagggataatgtaaaacaaaatccggacagttgctattgggttagcagccacgacaaggcatatgactaaccacttgcagtatatttccttgactgtcagcgtacctttaccatgactaaggaaccatcgcaaatcttcgatgaatctcatcaagcatgtgctacaaggtttgttttgttcttcctgtgcatcaaaagctggtataccatatcaaccatgcaaaaaagcaaccaagcatgacagcaacttccgcatcggggaatcgaaccccggccgccgcggtgagagcgcggaatcctaaccactggaccaatgcggatgaccaaatattgctctaatatttcttgaatcccgtaaattttggctatgcaccagattttactagtgtcgatgtattcaccaaaatagtggttagaatttacccaagtgggtggcatataaagtataagccaaatatgtataattcacgactgtgcttgtccgtgaatgcaacgataccaattgtaggagcagtatcctttcgtattgaacattcattcaattttgagccattcaaagtacacagcgaagtctactttacagtcagctagatacgctccgatccccttgctatgtatggacagcttaaagcatcttctggataagagcgttgatcttgtcctcacggtttccggactcaccaccctcaatgaagtgggtggccttctttcccttgtagccaccagtggggttggagaggtggaaaggccacaagaaggcgttggcctgcttgaagttgggtccaacggtaacaatttcgtggatcaagtcctcaacgcaaatgatgccaaactggccaagagccttctcaatgacggcgttgtcggtgataggcaatcgctgtttgtcaaccttggcgaaaccgcgcttgtagacgagctcacggacggatttgaggttggggtaaccccatgcaacgtagggaccaacccactggagcatctgaagggtggccttggtgagacgcacgaaggtaccagagttgatgctggtgagacggaggagctgaaggatcttccggggcttgggggggatcttcatgatactaaatgggagtatgagcaggctggctagcacccaccgctacgtacacgaaaacataccccttaatacggatcacgaaggcaaggggagcctcagcggggacgtagaagttaccgtgagccttagcctgacgcttaaggcggacttcatcgcgctccttggcacggtactccttgacgtactgctcagcgcgcttgaaaatgaccttgcgcttggcggcagcagcctattaatcacaaaataagatttagatgaaattcatctgatccacggaatttcaaacagatatgcagaatgtcagtcccgaaagatggtatttatgacaactacatctccctttgggattcgttggtcagggattttttgtcatcacccattctgcacatcagtcttcaccacatctctgtacataccttacggcgttcagcctcagcaaccgcacgctcggcggcgaccttctcagtggtcttgcgcttcttgagcacagactcgggcacgtattgcttggcgctgcagagagcatacgtaaagaaaagacggaatgtcaatgaccgaacatgccactgattgatgtgttgacttttgtcccatccatgagggggagcaaaaggtttgcaccggggaaccgagcccagcgaccagttccaacgattattttaactggagtggtggaccacgcccgactaaaatcggacgttgcccaatcgatcacaaccagcaattccccaagcgatagctagcgaagctccgcgaaggacgaaatagacgagaaacccgttaaaatgggctagctacgagacgcaagcgtcgacagctctcgtctatcacacaatgcatttaaggagaaagagtaatgaagactcttaactcccaaatcctcgcccaactgtcttcgaatgtaagagaacagtcagtgcgagacaatatggcatgtggtccgacctgcggctaaaagagaaggaagaaaacaggtgtagtggacaacgccttccttcaggcctcccttcttgcagtctacttgctcccttccccacttttccaccaaaaacaatacacagatacgtacgcgtcagacattctggctggacagatggaccaaaacgacggaggggatcgttcaaatggccgtgtgagttgaaagggaagagaaagcaagactggagcgtggtttgtcttttgttagtcgaccgtggcttggctaataatttttcttctcactgatttgattggtcgatcgtaaaaccaagtataaccacattgcatcctaattatcttacgtaaaaatctcaaaggcgagtaaccttctccatgccctaatgtcttgcactaaaatatgggtgataaggaatgtcactcgtcaattaataacatgagatatagctgactgatccaaagcaacatatgtcagggtgagatacagacgtggccaagtgtgagcgagggtaaaaggtgctccctgtattctgtatttgctgggcagcattctattaaattaatgctctcaaacctgttttgcatcaaaaggtgcggctaaattcagtcactgacgaagcatgatctttaaacgctgctattccaaccggatacttgctgcatcagctgggtaaagaaggatggcattcaaggttgcgtataatctactgcgttcagccccgaggcctcgtaggctattcagttcactattactatcatcgctactgtacaaagggaggtgcgacaatcgccaccctaactaaaagtataaaaaagaagaaccaattacataagtacaaatctttcacaactcccaactattcacagctcctcctccagattctcataacaccccttggtaatccacccaaatgcaaaagacaaccaagagacacttgttgattgcacgggttgcaaaggctggacctttggttgcgggagtggtggtagggcctgtgtgaggagatagtagaaatctagaggggcgtcggggggtgactgcttggacagttgttgagaaaggagaaaggggcattcattgtcttgtagtgctcttgattctacagacatcctatcagtgagaggcgtcgcacgcaaggggaaactaagattgtgcgcaacgtaccataataaaggtcgtctttgagagatgcctcaatgggtccctcatgtcgtaccattgggatgcctcccaagacttgcatccgagatttcgccacatcgctggaaataatccgatactcatgtaagagatacgatccattctcaatcttgaatcgcgttctaagcaagtgtttaacttggacggttgacaagaagggtgcgccgtagatctcgaacaccggtcgtccatttgctgcgcgatggagacacgatggtggaggatcgtcgtcagagtcaaagaggctagcaagctgtgttaatatattatcggggatcccgggggtatgtcgaaacgagcaacggagagtccacgctggatggaatacgcggagctgaacagcgtgaggtgaaacggatgactgtgagggagtttgggcggatttaggcgatgacggtggcggtgggggtggacgtagaaatcgagcgattcgtgcgtgtgggggtattataacctcagcttgcgagagaacccgcaagtcttccatagttctaatttctgtacaaacatgaacattgatgggttagcctttgtaggaaaactcaacaactcaacattgaccacactaacctccattcccaaccgatttgaccacggccaatctcaaatcttcatcgaatcttgtctttctccgctcctgcatctcctccgcgacaaagaacgcctccacgtctttccatacgatgccgagcaaatcgcgcgcggttgtagatgaggggcgatatggatactgacggatgcacccgtctggaaggaggagggttacgaacgaatcgggtgtggttcttgccgggttgaaaccgagcatctggggggccactggttgtgaaggatgagcaagtggaaggagctgtcaggagttgcttgggctgagggggacatttaaattcagcgcccaacgcgcccgactaaaccacagcgcgcaccagtggagtctttgctgtataaataacacaacaatctgataagatgatggacggcatttagcgatgctttgttgatgcatcgtagagatctcaatgaaatagtaatgtcgcaaccaatgtcgccattgggtttcgatgatccattacgtccgaaaggcaacggttacggggaagctcatcgcatataaaaatagtctattctttagatgtcaagaagctttggcaaagccttaatttacaaatagcttccgtgttccatacttcatttgcctgcaaacttccccacaacccatcaaactcacattcaacactagctttgtgaaaacctgagcacacagattctcttctcatatactcatcctttgagcagcctcgccgaataagaaggaccatcttgtcaacagagtaaaacctccatctttgcacattcctcttccccagatctcaccgaagccatctgttcataccgagtgtctaaccactgcctgaccttcgatccaaaaatgaccgtcgctcaagccgaattcgaagcgtcggaacagcttgtgcagagcacaggcgagaacgacactgaactcaaccccatcgaaagcgagactgaagcgaacaatccacctaacggcacaaagaccaaaaagcgcgctaagcaatcgagaaagaaacaggagaatggggacggtgatgtcgaggtcaaggaaaaaaagactaaaaagcgtgcaacgggtaccaaacggcagaacagcagagtcaaatcaagggcggaacccaacgatgaagatgcggataatggcgaaggcaaccccgatgcagagaaggccaaagtgggaaataaagtcagagccaaggtaggtaggaaacaccatatcattaagaaccctcctcagatctaaataaatcactccctaaagccattgtcccaagaagaacgcgatatcctcgaggacatcatggaatctttgaaaggtccagttcactgggagaccatcgccagaaaattcaatagccactttggacgtacgcccgcccagttgggccagttctggcgaagccagacgtttaaaaagagacatgaagacagagaacaacaagaagaaagccctgaggacagttcgatgtaaccagcacatgcgagcaaatcgtggacaatgattcagagatttgggccatcgaatcataagacggggccggtggactttggcactagtacatagattccaaccaatttaatcataattttactcaatttaggcacatgaatcaaaatgtgaacgttaagatactttatataataatgacactttacatcattgttctcgaaacactttgaaacactttgaaacactttgaaacactccaatgcattgggcaaacacttcaatagcagagcttctgcattcaaacacaacctaaacatgtctttctgtaacgacgaggacgtcttcgagagatcgcgagtaagcccaaatcggacgcgggaagcacgaatcgcgtgaccaactccaccgattgggttaccgcgaccgaaaaaaccggttcggagaatggcaattggcgcattagatttcagcgtgcctcgtacaacctgtggaggcccgagccagtgcggaaaaggaagagatcggtaccgccaccaataaatcagttgcggtgcagcgacacccattagtttagtttagtttaacagtttatccaagaatcttgtataaaaaggatgtattcaataaaataagtcgggggcagaagccgtagcgacacaaaatccccataactcgcttctcaactccaatcttaggttaacaggaacctaacagagcgcttcaacggcctgatcacccgtaccgaagcctctaaatcctgctcggttcacaactaaccgactctccttgcctctcgccctcaagtcgctaccgacgcccaaagaaaggatttggagactacgattcctagtacggacacccacacaacctgctaggagacccaagttgtctttactgtagtctaccaacaaaaaatccgttacatggtggagaagcgcgacgaaccgccttcccctctcaaattcagctgaaaaccttattcggtcgtaccgaaactcttgcgcaaaccgagatccgctcaggtagctactcggaaaccttttctctcgtttcggagacagaacttcacgaaaccgagaatgatgccggtcgaacgctcaccaacgcgaggccgctcacctgtgatccagactcgtagtcagggtcctgcggaggacgtcgaagtccctcccgcaacacgcccaaggcgttcagggaccacttccgtcgaaccggaagcccctaacttggccacgatggcctctgaagtggcagcgttaaaagaagacattgcccgctcgactgctgcaacgcagttggcaactcaaaaccttacggaacagcttcataggctttccgaacgtcagacagcggcggatgagcgcctcgcacgagccttagaagccctagcgcatcgcccgctgcctgaacaacctcccatagcacgagctacaagagaacggtccgcaaccccgtgggaaacggcggacacaccaagggagcgtaccgaaccaagtttttcaggtgcggtgcctccaatccaagtgccagcggccccgtgggccagcgacaccaaggtcgattccttgaaagcaaaggacgtacccgagtttacgggcagaagaaaccaagacgttgaagaatggcttaacaaagtccaacttcttcaaaacgttagcgcaacgtcggatgccaggatggtacagctcctaccagccatgatagccgagaaaacccctgctgacgcttggttttacactctggaagcccaggaaactcgctcatggacctggaaaaggtggaaagaggaactgcttcgagagttccgagatcccctaaccgagtccaagcgcaaaaccgaatatgtgcgctgccatgcgaaccccaaagaatttcgcagctttctcgcgttcatcgaccacaaaactcatctccggcgcctcgcttatggcgaccgggcaaacatagaatgtcccgctgaccagcatttcgacctaatagtcgaacaattgcccagcgacatccaaatcatggtcaaatcctgtaacgtcacgaacctgaccaaattaaaagacttcctgcgcctttatttcggctctgatgacaccagaaaacgagacccttgctacagcggtgctgcagaagctcagaagaagtcacaaaagaccggaaccgacaaaggccctaagcagacggctccgcataaaaccggaaaccccgaaaagggtcgcgatggtcctcagaagatggttccggaccccaacaaggaaccaccggcaccctgcaaattctgtcagaaaaagcattggaatgttttctgctggcagaacccgaaccgaaaagatcctgaagatggaaagaaaggaccatatggagcacccatgccctcaggttggaaacccaaacaggaatcgaagaaggcgtacatagtggagctggactcgacgtccgctaccaccgagactcttttttcggcttcggaactggaaagaacggaagccgctaatcaaggattccacaccatcgggttctttcattcacccaagcactcggaatcaacaattttgatgaccgcacctctttccaaggtcacggtgaccaaggaagaggacccccgcacgcccacgcagggctgggaccgagtctgggacaacatagccatcatctggggcaccccgcaagtggctctgatgatgggcaacaacccccgcgcgctcagcttcttcgccaaagaaccgaagcgaggcgccgggcacctcgggaacgacccctacgcagtcgcgtggagttcccaccacctctacatcgctgccgcagccgaagctgacaaggatcgaatcctgcgaaaggtccgagaagacggtacccctcgtttgattctccttgcctggataaagctcgacgagcgcgagaaattcttgatgtggagctctgaagatcctgttatctttgatgcgtacgccaacctgcaactggtggcatttctcctgacaggcaatatcgttcgctcagactattattatcgtcgcggaaaccccaaatttcggcacgttaaagaccatccacgtctccaaagacacgaagagagcgaacggacgcgtatagtcatgctggctatcgaacaagttgctcgccagaataaaacaacaaaaccacaaaacgacaaaactagagaacactttgagagtgtgatcaaggctacggaagcaacaattaacgacatcgcgccccatttcgagatcgcggtgccttctatcaacgccttctactcagtagatttaggcgatgtactcaaaagccagactaagacccaaacgcagccttgctggacgctagccgtcatcgcgcagctctgggcacctgtggtactagacacaggggcctgcgagtctctgatttccgacacgtaccaaggccttctgttctccgaaaccgatttgcaggatgcggaaacgatggctttcaacggcattggtggacgtatctcatctaccaagacagtatgcctcgaaacttccctcagaggccgcggcggagaatacctgactttccgcgcctactttcgggtcatcgcgtacgggaaacctctcatcatcctagccaacgacgttttgggacatttgaaactccaaaccttggttcaggaacccccgttacccagtttcgcggtgacgctcaagaatccagacatccttatcccctgctccataacggatgagctggacaccgatcacatgcgcggcacgccatacaagaccaagcagggtgaattcatgaaggatgtgtcaatgccacggctgaccaaagccaaagctcagaagtctagattaaccatgttaatcacgggacagacgcgcgtggcagcccaaacttttctcatcgaaaaccctcttgaggccaccgctgctagctcaacggtcccgttaggcctcaaactgtccaccgcgacccataattcggttgcggaccccgaagagaacatttccaaagaagaatggcagacacttcggaacaaatggaacctcgactctacggagagggctccaggggccttcgaagcccaattaaaagacgcggaacgtttccacgtcgatctcaagcgacccaaacccgtggtctgggccctaatcaacattctacgacacttccatcaagccttcagctatgagggtcatctcatagggaactacaccaagattccttatgcgcctcgatttatctcggctccgccacccctttcgaggccacggtcgtactctccgttggagcggacagccctcgagacggagcgagacaccatgatggggcttcagaggtggaaacgaaccaccgaagtaaccttcgccagcgatcctgttatcattcgctatgcagacaaacccccgcgcgtagccttcgactatcgccgagccaacgactgcatggcctgggatccatatccctttcccatcatgctcgacatcctgaactggatcgtcgcagtcccattccgatacatatcgggaggtgacgcaaacaaaggattctaccaaatcgccatcaccgatgcgtcggtacgcaaatggctcgcgctcagactccatgacggcatctacgaaccactctttatgcccttcggacccaagactgccccctcgcacttctgtcgggtgatggacgacaccttgggtccctccaaatggcgaaatatcaacaacttcgtcgacgatatccacacacgagtggagacagccgcggaagccctagacgccatcgcggactggctcgaccgcttttccagagccaaactcaccctaagactcgacaagtgtcaatggctctttcaccagctcacggccctcggtttcgttgcctcctctcagggtctcgctaccgatccagacaaggtcgcaaccatagtcgattggccacaacccaaattcataggtgacctatggtcattcgtgggtctcctagggttctacgcccaattcatttctcgctacgcggaactcgtccgacccctgcaagacgctatccaagagggcgttcgcgaataccgagaccttaaaaagggtcgcgctgacccgaagaaaggcgctgaaaagctcaattcaccatccatgctcgacacggcggtggcccctacaatcacagccaccggagcccgatttgaggtttcgcaacatccgaaatctagctcctcagacctaccggcggtcaatctacgccaatcatcgctggcggacttacccattgaccccttttgtgtcggacgccttgctcgcaagcgccccgaccaaggtctgcgcagatttatcgcgaagcgtgaagtttcatggaccgattcccgaaactctgccttcgcagccgccaagcaggctctgacaacagctccagtgctcgcggcacccagaaaagggttcccctacacccttcacagtgacgcttcctacacagcgtttaatgtcacgctcgaacagttacagccggatgcttctaaacgcccgctgtgctaccattcccgaggcaccaccacctcggaaaagaaggccccccccgtcgaactcgaggccggatgcctcatttggggcctcggaaaactccgcccatacctcgaaggcctgcctttcacggtcattaccgatcaccgagctcttttgtggctcgccaaatacaaaggcgagaaccgaaagctcctccgctgggccctcgatcttagttactggtccgaatggatgacaatcgtacacaaaccaggacgcttccacatagtcgctgatacactttcgcggctacttggcgcggaaactcttctttgctctaccgcgaccgaaatatgggtgtcggaacgcaaaggacgacggccgcgcaccccgccagccggtcccgcaccctcctcaacactggcagatgccatctttcgtttggcgttacagcccgcactcatcaccgccatccgcgctggcctcaccggcccgctccaccccatcgcccaacaggcccgcacccttctatgggagaccagccccgacacgtacactaccgccgacacgcgctttcttcaggactggcaacgtgcagataacctgctgtggcaccgtttttcagtctccgaagacctttggcgcctttacgtgccccctgcttgcacccctgaggtgcgcaagctttttcacgaggggggaggacacttcggattcgaaagaacctacgctagagctgcagcgcaagtctggtggccgaaaatggcacaagatttcagaaaacactgcgcaggatgtgaaacctgtcaacgctcaaaaagggtaccgcaactgattccggggttgctgaaacccataccaccagctccgggacgctggacagtcatcacgactgacttcgtaaccaagctcccacttacttccagagggtacgacgccttttggttaatagcatgtaaatgctcaaagaggatccacgtatggcccctcaagagcactgcgacagctattcaggtcgcggaactctttatagagcgctacgtcccattgcacggcatcccggagaccattatctcggaccgcgactccaaatttacgagtcgattttggcaggaggtctgcaaaaacctaaagattaatcaagagctcaccacagcctaccaccctcaaggtgatggacaatcagaaagagacaacgcaacggtcttgcaggtccttaccacaatggtcaacacccgattagatgactgggacacctttcttccggttgcggaattcattatcaacgatacggtacacgaggcgacaaaaatgacgcgattcagaatggacctaggctatgagccccacaatccactggcggacatcgtcgaaaggccgtcagaaaccagaaatgcagatgcggaggagctctgtaaacacctcggcgacctaaacatccttatccgagatctgatgatcgaagcccaggattcgcagaaaagatattacgatttatcgcgacgacatttggagttccggagaggagataaggtgcttctgagcacgaaaaacctagcagggtatgagtccaagatcgctccgaaatggctgggaccagtcacggtgaccgactgtaaccctctccgcgacaactacgagttaaaactgccagacaagatgagacgacttcatccatggtttcacatatcgaaattacgtccgtaccagaagcctgtcgacgccgaaactgaggaaaaggtcgcggaagcacaagcggaggattccgacgcttcagatggcgagtttgaagtggaagcgatagtagaccatcgaaccaggcgcggaaaacgtcaatttcgaatacgttggtccggatacccaccccatgaggatacctgggaaccagaggaagccctaacagaggcttccgaagccttagaagagtactggagatccagagctcccactagcgcgctagtagaggactctttggtagtcagccttgcaggcgacgccccggaagatacggcttatgcttccgaccaccaatgcttcgcggtttatccggacgatagctcacgtgataatcacgccctctcaccagaaagaaaaccagtttcgcgtggcttacctcaccagtcgagaacgccacaccaagcctcccgatcacgcttacgcgcgtccgagctgtcaaaatcagccggcgacgaccttaaaaggacgcccctgcacgctccccctcttttttcttcttcaaccgcccacgacctacttcccttacacactcactctgcttcgcaaaccccttctatcgacaccgaaactaaaacttccatttctaacacaatgaacaccgatctcagaggacaagcaggagtgagcgtaccctccacgtacatgtccggctacccttgggaggaagactcgggcgacttcgaggccgagggcgtgctggatcgccttggggttgcgatcgctacctgggttcactcctgggttcatcagcttcggaccaaccccaacgcgccgctgcagactccagggcatgagttttggctgggagtcgacgctccgaaaccttacgcggtgggccagcccctcacaaaccacatcgcggacccctacagcaaggccaccgatggtggtgaagcagcggtcggaatagttgctgacgcgaaaaaacccggaaaaagagggcgcccagctccgtgcgccgcttggctcgaccgcggggttccccaacacgaggcgggaagccgaaaaacggctccgttcaccgattggccgaacgacgacgcccacgagtttgcgtccgccgtcattgaagcagctaggacggtgctcctaaggacggcgaacgcagcggaagcctctgcaaggctcaccagaccccgacatcacgagcacgcggagtaccatttccgcgcgacaaacctgaaaagggccgcggagacctttacggccctctacgtaaccagaactggccccgacgtgaccccgggtaccatcgttcgtaccgcaacagatcaaatctggttttgttgcaacgtcggtggccgtgccagtatcatctgggtcgtgaaccaagatgcagatgaagcggaccccacagatccggtaccgacctggtaattgacgtcccaacacccccgctcggagcgccggtgcgttggctcttcaaaggggggatgtaacgacgaggacgtcttcgagagatcgcgagtaagcccaaatcggacgcgggaagcacgaatcgcgtgaccaactccaccgattgggttaccgcgaccgaaaaaaccggttcggagaatggcaattggcgcattagatttcagcgtgcctcgtacaacctgtggaggcccgagccagtgcggaaaaggaagagatcggtaccgccaccaataaatcagttgcggtgcagcgacacccattagtttagtttagtttaacagtttatccaagaatcttgtataaaaaggatgtattcaataaaataagtcgggggcagaagccgtagcgacacaaaatccccataactcgcttctcaactccaatcttaggttaacaggaacctaacagagcgcttcaacggcctgatcacccgtaccgaagcctctaaatcctgctcggttcacaactaaccgactctccttgcctctcgcccccaagtcgctaccgacgcccaaagaaaggattcggagactatgattcctagtacggccacccacataacctgctaggagacccaagtcgtctttaccgtagtctaccaacaaaaaatccgttacatctgcccatttcccaggctttcatccatttttctattccaatcatcatgccaccaaagaagaagcaaaaattcgacaatcgacctacctgtctgcattcatgcaacaagacttcctttgcaaaggctttcttacctaatgggacctaccggcagcgtcttctagattacatcgccatcatccatcaactcgccgaccatgcttcccacgcgctgaaattctatctcctttcagcaccaacctttcccacggtaaatgaagatacaatcgaagcgattctctatcttctcaacaagggggaggcttggcatccaagaaaggaagcaaagaaggcatggcgggattgtttgctgccatatgttcaacggtactgccaaatcatcggctttgttcacccaaatctacgaggcgagcagcaatcagtcaattacctgacagcgagtatgatgacgaacctgaaagtcaacgttcaagagcatttcatgcagatgctccttcggtatatcaatctgcggcttgacatgaagggacagaagcagcaactgccacctaaaagcaatgtgcgaaaggatttctttgctcgtcttcgctacttgaagtcaattttcctttttgatattgtgcccgagtcactcgatgacttgaccgctgaagagagtgagcttctagaagagatgtggtccttcattcccctttctgacaaccagccgctcgcatattcggttgctgtagaccctcttgccttctttcctgcatactgcaaactctctgggctgtatgaacgacatggatttcgacagttcagtgcaatccctcttcatcggtctctcatccaaagccatgtgcaaatcgacaccatcgttctctaccagcatatcctttgcatcacacgaagagaagcggaaactgtcgaaaaggtcaatttatggttgcgcgtctgtaatctacgtaccaaagcttttcggtctcgccgcggtatgcagtttgaaggcttgatcatgacggatgggacctcggtgtctgtatacctaaagcacccaggagcagacaagtatggaaagcgtggagcgagaaagtcagcaaagagtttagaggacgaagttaaagcgcaatacatggagaaaaacttacctgcttgtcgagcagcagagaatgtcatcgttatcgacccaaacaagcacgatattctctactgccaagacaacagtggtatgacatttcgctacaccaccaaccagcgagccgtggagactggaagccgtcgacagcaaaggcaatggcagcagatgaagaaagaagctggagttgacctcatagaatcacgaataccaagccagaagatgatgaatctcatagacttcatgcgttaccttcttgttcgccgcgctgattgggatcgtcgaaaggagttctactcccaccctgctcatactagatggaaatggcacgcattcataaaccgtcagaagagcgaatcagacctcatatccaacatgcgcaacaagtacggcgaaaacttcaccattgtgatgggtgattggagcgacgccagtcgaactgcgagatttcagacctcatcaaagacgaaaggttggcgcaccctctttaagcggaacaggatcaactgcttccttctcgatgagtacaagacctaatctgtctgccctcgctgtttggcctcatctgatgacttccttgaaaaggacttcaaaacacgacctcattcaagaccttggcgccgtcgcgaaggcaagattgaaaaagtccacggattgctgggttgtaccaaccctaactgtcagcaagcctggacgatgcgctactggaacagggacacgctgagcacctgcaacatgctgatgatcgtgcaatcaatgttagatggacacggtagaccagaggtgttcaacaggagtgttccaggtgtagtgtagattggttagattaggttttccgagccggttgtcgcgcggttcaatccctggtgcgggtgctagtgccaatacccatcggctccgcactaagacgggttggcggagagagctgaaccatctattttgtgtattgattgtgtatagcatagctagttttctgccttttctctcataataacatgagatgtttttttgcatgatcaaaccaaaagtagtagctgtgagcttctccctctgttctttgcacacgctggaaatgctgccaatgctgtcgtctcctttccatcacgccgacatgcggtgcataacgtctcgaatttggcatgacgcaggtctaaccccccagcaatgaacaaaatcctccagaatttggaatgacgcaggtccaacccctcagcaatgaacaaaatcctccaatacaaagaaacaattaccatttgccattggagtcaacgcgggagcgggtccacagcacacacattaataattacgttcgtcgtaagatcggaaccttcgaatctgaaacgaacaagacgataaacagcttgtcataacttgccgtcctaccggcaaccggtaaacgcttctaggccagttgcaacttgccacgttcaaacgcttttcaatttggtaaattgtttgaagacccaaatatactcaagttattccgcatccgcctgttgcaatggatttgctaagccctccgacaattggagggggaagatcgctggacatttcatgcgcctttttatttttatttccgggcttccgaaggtttgttcaagacaaaacacatactttgacaaatagatttgcaacaagaatacaagagttctagcggcggaaaaactatcgttctcgtttttgttccatgcaaaggttcttgtattggttataaaagcaaaggattgaagtgctcccccctagtatgataaaaccatcaaaacaatacattgcattcaaacaaataaaatacgggatacttgacgaagatcacataaaccataaagtatgccgccaaattccaaaatctctgatgagcacctctccatcaatgtcaccgacacggacatccctacaccaaaccggggcggctccctatcctggaataatgtcacttactcgattgatctgaagacaaaggacgataacggtaaaccaaaatcgcggacgctgctgtctgatgtgtcgggtgaggccaagagaggggagttggttgcgatcatgggaagtagtggagctggcaaaacgacgcttttaaactggtaagtgatgacttttttttttctgaccgatggatttttttgaactgacattgttggtcctacagcctctctggtcgcttgggtacaggtcacctaagtggaagcgtcacgctcgatgggcgtccacggaaccggaaaacctggaaaaaactcgtagcctttgttgaacaagacgaccaaatgtatagcaacatcaccgtccgcgaaaccatcaattacgctgcccgcctccgtctgtcatcctcccgatacgctaaagctgaaaaagcttctctcacagacgatgttatcaaatcccttcgcttatccaaagccaaggacacctatattggtgatggattgacacgtggtgtgagtggaggtgaacggaagcgaacagccattgcccaagagttggtgggaaaccccgagattctgttcctggatgagccgacgagtggactagattccaattcggcgtacgccgtccttgaaaatgtcaaagccgaagcgatccgaactggacgtatcgtcatcttgac

SEQ ID NO: 741 - protein, 412 aa, Spizellomyces punctatus
  source 1..412: note = CDS = complement(<1..1238), XP_016606728.1 - uncharacterized protein
MAMSAQNRDASNEGSSSRSAVISSDAGGLSVVPTTSNPLAIKPPSTSTTGTHLYIKKDAMRNGSYLDVFDFHLTPNSAFPTPGTPQTNSFPPSYGTSPLYSSSPRFPLSASPISPRRVESLDRKCSNSPLTVPERGGAEKDIPCCGQIHATYEDLLRHYEQVHAEERTVEGKRPQARPLPIFSPAYQEDDMWDQQQPTGDLHTGVSTTKPMDILGKINSGGGAGGLFPAGTGNVDADLSALLAAQPSEDNAGSQILAKRNLSAAAFSMGSYAAVELKRFREGFRWSGVDFSDILDQPAINDLPSHGADDMLPSMLPAVPQAAEDMQLDNEQQVEQRHSQQQNQNLHPTSTPIIVPATSFTTPSQQVTSALSQQLAPAQHNRTSPTHAPQALHPPGLSHHLNMNMDVSPQLPN

SEQ ID NO: 742 - protein, 299 aa, Spizellomyces punctatus
  source 1..299: note = CDS = join(complement(2679..3302),complement(2333..2608)), XP_016606729.1 - uncharacterized protein
MTQTKKKNPDLVLAFTKGYKSNQPAPVPFVHSSSQTSTNLIIYQIPYIMVHLRRIIVSAFAVGMTITAPTPVQAGVVSTVASSLVELAFEKVAQMTLRPNLNTMSTKLTAHMKAETLPKIVDAAIVDLKSHTGVDVSGKVNVKSLVDAQTGELTKRTEALKGTIEDAFVLGIKNAGIVKTLTTVTEAMSIKTWSEGLKKQTTDSISNSVQSAVATWYNATVLAIYDDVTKSIVSQAKLKRQVTRPLRLRADSARSPQDQILDVLNVATMLALYALFFPVAIIVAPVAALISIITGGASA

SEQ ID NO: 743 - protein, 353 aa, Spizellomyces punctatus
  source 1..353: note = "CDS = join(complement(5514..5714), complement(5314..5433), complement(5182..5244), complement(4441..4919), complement(4191..4379), complement(4113..4122)), XP_016606730.1 - uncharacterized protein"
MTSQLPPNLLKLFAPRPPLPHLEPLDRSPAQRRGPVISGVAAFLERCKGYDADYVPTETRAEIKKRLQQEREQKAKEAIQKGLEVWDPSKDDHIVSDPYKTLFVARLSYETTEKELKREFEVFGPIKTLRIVQDETGKSRGYAFIEYEREKDMKAAYKEGDGMKIDDRRVLVDVERGRTVKGWRPRRLGGGLGGTRIGGPDVNQRHSGREGGSYASGGYQGVYGGDYGGHGGFRGSRGGGGYGDRRGGFGYGGGGMDRRRFGGPGGPGPGGGGGGYGDRPDRGDRDRGRYDRERDHGDYRGSRGGDRDGERRSSRGDYDDRRGSRSDRDKERRRSRSPRRERERSHERTERRR

SEQ ID NO: 744 - protein, 182 aa, Spizellomyces punctatus
  source 1..182: note = CDS = join(5915..6120,6190..6532), XP_016606731.1 - uncharacterized protein
MEERVRQYHVEATSFVSAAVLPPKALKAMNGLRKFIHKNQDYRFSDKEKAKLFGAVEAYFTIFDRNSDRTNTNESDANKPTSLPLIEDALKVPLFTTKQKSTMLKWYDELHKEEGGHNTQSRETDGTARHPWSEEDDWGNPDEWGTEEQSDGDGIEKKDTEKEIPQVQQDSNTKMKLKNKKR

SEQ ID NO: 745 - protein, 244 aa, Spizellomyces punctatus
  source 1..244: note = "CDS = join(complement(8765..8775), complement(8112..8208),  complement(7758..7924), complement(7240..7699)), XP_016606732.1 - 60S ribosomal protein L7 CDS"
MSDAAKQYVPESVLKKRKTTEKVAAERAVAEAERRKAAAAKRKVIFKRAEQYVKEYRAKERDEVRLKRQAKAHGNFYVPAEAPLAFVIRIKGIMKIPPKPRKILQLLRLTSINSGTFVRLTKATLQMLQWVGPYVAWGYPNLKSVRELVYKRGFAKVDKQRLPITDNAVIEKALGQFGIICVEDLIHEIVTVGPNFKQANAFLWPFHLSNPTGGYKGKKATHFIEGGESGNREDKINALIQKML

SEQ ID NO: 746 - protein, 336 aa, Spizellomyces punctatus
  source 1..336: note = "CDS = join(complement(10403..10640), complement(9797..10330),  complement(9493..9731)), XP_016606733.1 - uncharacterized protein"
MLGFNPARTTPDSFVTLLLPDGCIRQYPYRPSSTTARDLLGIVWKDVEAFFVAEEMQERRKTRFDEDLRLAVVKSVGNGEIRTMEDLRVLSQAEVIIPPHARIARFLRPPPPPPSSPKSAQTPSQSSVSPHAVQLRVFHPAWTLRCSFRHTPGIPDNILTQLASLFDSDDDPPPSCLHRAANGRPVFEIYGAPFLSTVQVKHLLRTRFKIENGSYLLHEYRIISSDVAKSRMQVLGGIPMVRHEGPIEASLKDDLYYESRALQDNECPFLLSQQLSKQSPPDAPLDFYYLLTQALPPLPQPKVQPLQPVQSTSVSWLSFAFGWITKGCYENLEEEL

SEQ ID NO: 747 - protein, 117 aa, Spizellomyces punctatus
  source 1..117: note = CDS = complement(11273..11626), XP_016606734.1 - uncharacterized protein
MIWCFLPTLALTLFPTLAFSASGLPSPLSASSSLGSALDLTLLFCRLVPVARFLVFFSLTSTSPSPFSCFFLDCLARFLVFVPLGGLFASVSLSMGLSSVSFSPVLCTSCSDASNSA

SEQ ID NO: 748 - protein, 535 aa, Spizellomyces punctatus
  source 1..535: note = CDS = 21117..22724, XP_016606735.1 - uncharacterized protein
MPPKKKQKFDNRPTCLHSCNKTSFAKAFLPNGTYRQRLLDYIAIIHQLADHASHALKFYLLSAPTFPTVNEDTIEAILYLLNKGEAWHPRKEAKKAWRDCLLPYVQRYCQIIGFVHPNLRGEQQSVNYLTASMMTNLKVNVQEHFMQMLLRYINLRLDMKGQKQQLPPKSNVRKDFFARLRYLKSIFLFDIVPESLDDLTAEESELLEEMWSFIPLSDNQPLAYSVAVDPLAFFPAYCKLSGLYERHGFRQFSAIPLHRSLIQSHVQIDTIVLYQHILCITRREAETVEKVNLWLRVCNLRTKAFRSRRGMQFEGLIMTDGTSVSVYLKHPGADKYGKRGARKSAKSLEDEVKAQYMEKNLPACRAAENVIVIDPNKHDILYCQDNSGMTFRYTTNQRAVETGSRRQQRQWQQMKKEAGVDLIESRIPSQKMMNLIDFMRYLLVRRADWDRRKEFYSHPAHTRWKWHAFINRQKSESDLISNMRNKYGENFTIVMGDWSDASRTARFQTSSKTKGWRTLFKRNRINCFLLDEYKT

SEQ ID NO: 749 - DNA, 21349 bp, Spizellomyces punctatus
  source 1..21349: mol_type = unassigned DNA; note = Fz = 1556..1618, Fz = 18457..20241
gtccaggcatgtctacgttctgttttctgtcagtcttgtctgtaaagcgtttctcttgttcgttgtcgtaattgccctcggtaattgtcgtccgtaagtaccgtaactgtaaattgcaagtaagtctagaagaagaaggagaaaggggaaaagacttgaagcatcgttcaagaagaagaagaaaaaaaaggtcacaagtctaaaatacgagagcgagagataaacacaccatgtgatgtgtttaagtgtgtgtgtgtgtggagtgaagagatataaaaagtaaacgcgcgcctgatttgaagcgcgtgggaaaaataaaagaattatagatttccttttatggaaataatgcggaatgagacgggagaatgaatgacacggttccctccgattattcactctttctcacacacaagggagacacgagagagatcggcaggcgggaaataacgcgttctataaaaggcaattattcacatgcctttatcacatgcgcacacacacagtcacgttatatgttatttatttgctgttgatcgatggatagaatttagagagtggctgtgtgattcatttagatagtttcatttatcgatatctcatgactagcgggatgacccgaatcatgcaagacattgtcatgtgatgactaggctattggttcagtcaatgactctgggtactaataacaaaaagggaactgaaaatttactactaaaagtatgatagatattttattacatgtttgaatggctatatgcaactggctggctggctagagagataggccatgacatgcatagcattggacggaaagaaggaggctatgacacatgcatagcattgatggcaatgtcgttgtggcaagagagagcgtttgcatagcacgaatgggtcatgccgtgtggccgtgatatggatagcactggtcatgccgcgggctgtgcatcgtggggcaggtgagccgctcatctgtcaggtgagcaataggtggcatccctcttgtggggttgcacagctcattataaacaagcgcacatgtactgctgaattggttccatggtgtagcggttagcactcaggactctgaatcctgcgacccgagttcgattctcggtgggaccttcgggggtcattccagtggacattttttggtggctttttctcgaacatagtgcggagccggtgggtattggcactagtacagtgattccaaccaattgaatcataattttactcgatttagactcatgaactatgatttgataatggttcgatgcccaaacgatgctccaccattgaaaaacaggtccaatatgtgcggcaatgaacggattgaatattctgcagttgctccaccattgaaaaatgggtccaatgcgcagttgtcatatctctatataaacccgccttctctgcccatttcccaggttttcatcattctctgccaataggctttcatcattctctgcccattttccaggctttcatccatttttctattccaatcatcatgccgccaaagaaaaagcaaaagcttgaaaagcttgacaaacccaccttacatacatgcaacaaaacttcctttgcaaaagctttcctgcctaatgagacctatctggtagtgcatcacccatggtatataccatgggtgatgcactaccagagggcccatagttcgttcaactctaccaggacccatagtacccagaaatgccagaaaacccatagttcgttcaactctaccaggacccatagtacccgtaggagccatatttaaacgccctgtcaacaactattgctgaaacgcccactccatatttaaacaccctgtcaacaactattgctgaaatgcccactccatatttaaatgccctgtcaacaactgtagctgaaatgcccactccatatttaaatgccctgtcaactacactcgtataagctcgacctgctttcataatgcttacgtaatcaataacatccatcatgtcacgtggcattcactccatcgctgcctcccacattcatttaaaaaagcatgactccccgggattggccatgccccatttcctataaggaaacagttgtattttgaggtattgagttcgaacacctcatggccaattgtttgggcacatttcgaatgttgtatatggaatcgtttacagaggagctggttggattgggggggaaggatgcaagaagctagccgcctttaagcaaaaacttggacttgctattgatagtcgcttttcccactttacatcagcagattactatgcatacaacatcaaagctatgcatacaactcacgtgacacatcttcaccattttggatcaaaaggtacattcacttcactcatttccttcacaatcgttgaaccaaatagtgttaatggaagtcacgtgatttgacatgtctcagacatgtttgctcatcatggttctttaaatacagctttggtttctgaggtcgcctatggcgaaagtaaaggaacattcaatcacttcactgcgtgtcctcgcttccttcataatcatggaatcatatggtgtaaatggaagtgaatggtgactcgattccacatatacttacacaaaaaacccagacccaaacatgtgtacatacttccactatatgagaaaataatttttttttttgaagaagctttattctttttttttttttaaaatctgtctcttaactgaagcaaactacacttttgggtctgggttttttgggtttctctccattcattgaaacaaacttttactaaatcatctcgggtttgagccattttatcgagtcagcttctcacactacccgttttacccatctctcacttgtttctattctgccattactgattcaatggaaacatgtacatccctccatacattctcactctttattcgccctttcaatctccttccgttgccataacacctcaaaaaatgcaatatctctcctttgccataacacctgatgacggtaatcctctcgataaaatgcatatgaataatcctcatcatggaagtctttgagtagaacaaagtaaaactcgtcattgtcttcctgatgcatctctatgcattcatatttccccaaaaatgttacggtgcggcattttatatggtcacatacaaatttaggcaattgattgattctcatcatcttataaaactgatcgattctcttcatcttatgaagaaactgtggctcattcggtattttgaccctctcccatccgagactaactgccttgcatagtttaatcttagtgtcgatgtcacaatactcgtcgatgaaggttactatttctgggggaaagagggaagccattttggattttagctatagcatggtatgcattcaatttataagaattagtaaacatcaactactacatcatggttatgtagaacaacgacgtatctgcctctcgtgtatgccccccacgccctaaaaaacatccatcgccctgccccacaattgtctcattaccagcctgtccctgccacgatgtgctataaaatctgatcgcttatccctaccatcatactctctgaaaatacagccttcctcatgaccataatggtaatactcttgatacattgcatacgaatagttttcgttctcaaaatctttgagtagaacaaagtaaaactcgttgttgccttcttgatgcatctctatgcgtagtaacttgtcgttgcattcatatttccaaaaaaggggtggcattctgtctcatggtcgcatacatattcatcatagaaaggcaactgattgattctcttcatcttatgaagaaactgtggctcatttggtattttgaccctctcccatccgagaccggttgccttgcatagtttaatcttagtgtcaatgtcacaatactcgtcgatgaaggttactatttctgggggaaagagggaagccattttggatttagctatagcatggtatgcattcaatttataagaattagtaaacatcaactactacatcatggttatgtagaacaatgacgtgtctgcttctcatgcatccccgcattctagctggtcccaaaattttaccattcaaaaggtcgccccccacatgccccccacgcccccgctcacattcacttcttactcattgaatttagttgctgtatcccagcaggcatcactacaaacaccggagagagccatctccttttctgttgccgttttgactttatcaggaatatcatagttgcgcgaacaaacagggcaaatccgattcttttcccccacgctccttttggttttgttatgaacaaagatgcgaaacaaatcttcatcattcataatacggcgaacttcaggaaagttggaagtgttgatatggatgcaccttcctcgcttatccattgccatcaacatgtccgtcttgaagagcatgatgcaattagcaaagtgttcatgctttggagtaacagggaaatgtaacggattttttgttggtagactacagtaaagacaacttgggtctcctagcaggttgtgtgggtgtccgtactaggaatcgtagtctccaaatcctttctttgggcgtcggtagcgacttgagggcgagaggcaaggagagtcggttagttgtgaaccgagcaggatttagaggcttcggtacgggtgatcaggccgttgaagcgctctgttaggttcctgttaacctaagattggagttgagaagcgagttatggggattttttgtcgctacggcttctgcccccgacttattttattgaatacatcctttttatacaagattcttggataaactgttaaactaaactaaactaatgggtgtcgctgcaccgcaactgatttattggtggcggtaccgatctcttccttttccgcactggctcgggcctccacaggttgtacgaggcacgctgaaatctaatgcgccaattgccattctccgaaccggttttttcggtcgcggtaacccaatcggtggagttggtcacgcgattcgtgcttcccgcgtccgatttgggcttactcgcgatctctcgaagacgtcctcgtcgttacagaaagacatgtttaggttgtgtttgaatgcagaagctctgctattgcatactagctttttataagagttggtacacatcaactactacatcaaattagctacatgatgtagaacaatgatgtaaagtgtcattattatataaagtatcttaacgttcacattttgatggcattgtataatgtcgtctgaccaagaacctgaaaatgcaaagcagttccgatgtgttttttattcccaggttattcaccgagcgatagatggaatactcacgggcgctggggatggtagagaagaacgtcttgtggctgcacttgagccagtttcatgggcagctcaatatgttttcgaatatcctacacattttgaaactagttggcctggtatgattctcttactatctactaccactataggaacatattgtcaaatgcagcataagagtgaaaaggaatcatttgcagttgaacaattagacttaatccttgaatgtactaagagtctatctagttctatggatattgaggttgttgtgtgttgaatagaactgtggctcatggtatcctactgaacctcctccatccgcatctctaaaatgaacagtttttcattatgttcatgccctagcaatatacaatcattcaaaattgcgagataactggtacagttgaagcataaatgatccaatttgctcaggtggacaattgacatgattttatcaaaaatcggttggttctcttgattttttttaagatacagtatgatttttgccttgtcactaccggtcaacatgctcttgcaatatctccaaaacttatccatgtcacctttgatggcatccctgatattgaataccaaatgataatctatatcaacacgttgcattgtaagtttacatagctttgttttttaatcatagcgtagtgcactaagtttctaagggccgagttccgtgattttgatgagggtaacatctgtggtattatcaggagcagcctgactgatactaaaatttgtgaagtaagccacgttatcggccatccctgtaagaatgaatgtggctgtcagcgtagtgttaattccactgttgaaattgaagtctgaagcatatacgagaggcattgagccggcactttgtccaaggaagatggaaagtgtaccatttgagtttgcattgccatgcaagcgtattgtccactccataagtaccttgcctggtgttgaaacatagaaaactttcgaggcattgttggattgccatacatctttagtcaacagtttgaaaacttgaacatttcttaggaatgtctgaccggtcacccatgactgagttgcgcacacctgaccattcgagtaaactgggccattgctataaagattccctccagccactacatgggctccaacagcgacacctccattcaccaccaatgcacctgttgtactcgataaagccggagtggtgctttcaactatgacatttcctgtcgatgatgcaatagtaatacccttcgctccctgcgcttgcaatcgcactccccctgcatcgttccttattgtaaatgtatttactcccccatccacactcctattgtttccgttcaaaaacataacagcactccctgcggcattctggaagtattggatggcacaagcattggttcctgggtcgagatttttcaaaataatagcccgtagcccattaagtggcaaaccaatagttagattaccggacaagatgaggtctccggtgtaggtgttaacagagaatcagctattccatgttccaaaggtatcactggaataatgaccgaattcataacgatgttggtctatgctatcagacgagccggcgaggtggacgtgaagggcgtctccggagttgttgtaggagatagtgtagtcacctttcatagagggagtgtcgcttctcaacttgaaatatccacctgtagaggctgctataagaacttttcctgtaatgtttccacctgagaagatgcttttagaaacccctatacctcctttaacctgtagagccccacttgatacggtttgtgcatcggatgtatcattagcaagaattgtatttaccaacagattgctggaagacattataacatcttgtttcgatgtttgcagtgctgatatgctgggggcatagttgacaatgtttaaaatacttcgcacagtgacatcatttgcgagagtgaatccttggacatcatctcccatgagaaacatattgctcattggtgacatcgaggcaatggaatcgagtaaaggacttgcattttgcttccctgagaggtcgacattcgtaacacctagaattgacttcacctcttcaacagttttcgtggagaatgatgtagcagaacttccaacaatgaatgaatttgcagatagtgcaagaccgcttatggatgataatagtggactcgatgcctgtttattagcaatggccatccctacataactctcggttgcaagtttgagattattggagaaaatgtcaccaccgacgtacagtgatttagcaattcctgcacctcctgatacctgcaatgcgcccgttatagttgacgatgagtctgtagtggaagtgattgcaatggttccattggctttgaggatgaattgatgggcgctagttccatagttataaaacccgaggctcccattggtaagtatacctgttccattagttgcagcatggtatataccccatgaattactcgaagcagcattgttactaatcagaacggccatagatgcagtagcacttgaaggcgcattgatgactatggccgcaggctgcaatcctcctccacctgctcctagggttagagtttttcctatgccaactccacctgatacctggaaagcacctgttgtcacactagatgaatcagttgtgtttggtatctgcattacgcctgtattggaaactctcagaacgaagcctgtattgttataagaactatttagaccgaatccgcctgctgataatgttccgtctcctgtgcttccggcaactctcatgccccatgtaatgttactcccagtgttcactaaggacattgttgtagatgctgcgccattttgaatggttatacccctgccaacagtagcgctgttaaatgatagcgcagtcgatgaggtaataagaggttgatatgaggaaagtatattcgatgtaggaacaactgagaaccctgtgggtgttcccatgatgaatgtgttagccgccggtattaaaccactgatggaattgagtaatggagaagcactttgtttagtagcaagcgccatatctgcggcggtcttgttattctgaacaagtgtttgaagcaatgtcaaggattgactgagaggagttgtcatgctagtcatcatagcaacagcccattgttgcattgccaccttgacaccattttgaatgatcagtccttcaacatttagatccttttccacaagtaagccacctgtcaagagtccattgcctacattatcaacacggaacaccatatccatagccccttgtacaaatatcccaccactggtcatcagagaattcacattcaatgaggatgatgtagtaagaagaggttggtatccaccaagaatagtggaaacaggtgtcgctgtaaaaccgttcgatgcccccatgatgaatgtattaggtgtcgttgttaaaccacttattgcatcgagtaaaggacttgcattttgcttcgtagcaacggatgctgttagagaactttcagtagccaatttcacaccatttgtgtatacatcccctccaatgtacagtgatttagcgatgccaactccacctttgacttgaaaggagccagttgttgtggaagtacaatctgtcgtcatattgataataacattcctggatgagagaatatccagattagaagccgtcgctccgtttgtaccaatatgcaaattactggtgcttgttcgcaagacgtaatcattcgctaatgtgtttgtgaaccattgtccagctgagtcagcgaagccgaatgccccattatttatctggaaggctgctgcggtgggacttgatataatagcatacttacccatgtaaaccgttccttttatgccaactcctcctgccacctgtagagcgccagtgactgttgaagatgaatcagttgttgcatccagtgtaacgattccagtgttcgcgagtattgtcagtcctttttgtaacggattttttgttggtagactacggtaaagacgacttgggtctcctagcaggttatgtgggtgtctgtactaggaatcgtagtctccaaatcctttctttgggcgtcggtagcgacttgagggcgagaggcaaggagagtcggttagttgtgaaccgagcaggatttagaggcttcagtgtgggtgatcaggccgttgaagcgctctgttaggttcctgttaacctaagattggagttgagaagctagttgtggggatttagtgtcgctacggcttctggccgccgacttattttattgaattcctctttttatacaagaatatgctacggtaacgtctacactagtttccgtagccttcattagggtggcggcatccgatcttcccatctcggaccattgccatgatcgatcatggctgcgtaacatatccttcacgctgcgctggtgtagcccagaaccgagcttgatcttaggggtttcgaagcttaggttacaattgcggaaacctcaatcatggtcacctgatgcctttgagcgaaccggtttatcagagtcatttgctacatccccccttcgaaaaagaaggttcggcgactcgtctgtgagtgcccgaacctcgcttctaccatgacgcaactggatagtcgtcgtcagcttcaaggctgtcttcgttgatcgtccagattatggtagcgcgccccatgacgttcgcgcagaaccaaatttggtcagtggcttccggagccggggttccaggtgtcctggaaccgttggctcgggttacgtagagggctgtgaacgtctctgcggcccttttcaagttaaccgctcgaaagtggtaataggcgtgctcccgatgtttgggacggagctgctcttctgtggtttcagctgcgttggctagctttaacaacactgctctcgcggcttcgatggctatgtccgcgaaatcgtgggcctcgcgatcgggccagagggtgaagcgggccgttttggggtttccggccgcatgttgagggaccccagcgtcaagccaggcggtgcagggtacgtcccgtaatctcttcccaatcttttttgtgtcggcgatgataccgacagctgcttgactgccgtcggaagccctactgtagggctccgcaatatgcatcgtgaggggctggctcgtggcgtacggcttcgaagccccgtcaaccacccaatcttcaccacgatagtgttcgaggggtttgtttgggtcttcgaacagctcacgaatccaaacttcgacccaggtggccatagctgctccgagccgctcgatagagttctcggcagcgaaggcgtcgcttacttctgaccagggatagccttcctcaagggtagagaggatgctgactccttgttgtcctcggatatcggtggtcatggtgttggaaacgaaagcttttgtctcggtgtccatagacaaggtttgcaaagcagagtaggtctgtaagggagataggtcataggtagttgaagaagaaaaaagagggggagtgtgcaggggcgtccttttaaggtcatcgccggctgattttgacagctcagatgcacataagcatgatcgggaggcttggtgtggtgttctcgactggtgaggtaagccgcgcaaaactggttttctttctggtgagagggtgtgattatcacgtgagctattgtccggataaatcgtgaagcattggtggtcagaagcgtaagccagggtgtcgcctgcaaagctgactaccaaggagtcctctactagtgcgctagtgggagctctggatctccagtactcttctaaggcttcggaagcctctgttagggcttcctctggttcccaggtatcctcatggggtgggtatccggcccaacgtattcgaaattgatgctttccgcgcctggttcgatggtctactatcgcttccacttcgaactcgccttttgaagcgtcggaatcctccatttgtgcttccacgatcctttcctcagtttcggcgtcgacaggcttctggtacggacgtaattttgatatgtgaaaccatgggtgaagtcgtctcatcttgtctggcagttttagctcatagttgtcgtggagagggttgcagtcggtcaccgtgactggtcccagccatttcggagcgatcttggactcataccctgctaggttttttgtgctcagaagcaccttatctcctctccggaactccagatgtcgtcgcgataaatcgtaatatcttttctgcgagtcctgggcctcgatcatcagatcccggataaggatgtttaggtctctgagatgtttacagagctcttccacatctgcatttctggtttctgacagcctttcaacgatgtccgccagtggattgtggggctcatagcctaggtccatcttgaaccgcatcatttttgtcgcctcgtgtaccgtatcattgataatgaattctgcaaccagaagaaaggtgtcccagtcgtctaatcgggtgttgaccattgtggtaaggacctgcaagaccgttgcgttgtctctctctgattgtccatcaccttgagggtggtaggctgtggtgagctcttgattaatctttaggtttttgcagacctcctgccaaaatcgactcgtaaatttggggtcgcggtctgagatgatagtttccgggatgccgtgcaatgggacgtagcgttctataaatagttccacgacctgagtagctgtcgcagtgctcttgaggggccatacgtggatcctctttgagcatttacaagctattagccaaaaggcatcgtaccctctggaagtaagtgggagcttggttacgaagtcagtcgtgatgactgtccagcgtcctggagctggtggtatgggtttcaacaaccccggaatcagttgcggtaccctttttgagcgttggcaggtttcacatcctgcgcaatgttttctgaaatcttgtgccattttcggccaccagacttgtgctgcagctctagcataggttctttcgaatccaaagtgtcctcccccctcgtgaaaaagcttgcgcaccttgggggtgcaagcagggggcacgtagaggtgccaaaggtctttggagactgaaaaacggtgccacagcaggttatctgcacgttgccagtcctgaagaaagcgcgcgtcggctgtagtgtaggtgtcggggctggtctcccataggagcatgcaggcctgttgggctatggggtggagctggccggtgaggccagcgcggatggcggcaatgagtgcaggctgtaaggccagacgaaagacggcatctgccagtgtcgaggaaggtgcgagagcagctggtgtggtgcgcagccgtcgtcttccgcatttcgacacccatatttgggtcgcggtggagcagagtagggtttccgctcctagtagccgtgaaagtgtatcagcgacaatgtgaaaacgtcctggtttgtgaacgattgtcatccattcggaccagtaactaagatcgagggcccagcggagaagcttacggttctcgcctttgtatttagcgagccacaaaagagctcggtgatcagtaatgaccgtgaaaggcaggccttcgaggtatgggcggagttttccgaggccccaaatgaggcatccggcctcgagttcgacggggggggccttcttttctgaggtggtggtgcctcgggaatggtagcacagcgggcatttagaagcatccggctgtaactgttcaagcgtgacattaaacgctgtgtaggaagcatcactgtgaagggtgtaggggaacccttttctgggtgccgcgagcactggagctgttgtcagagcctgcttggcggctgcaaaggcagagtttcgggaatcggtccatgaaacttcacgcttcgcgataaatctgcgcagaccttggtcggggcgcttgcgagcaaggcgtccgacacaaaaggggtcaatgggtaagtccgccagcgatgattggcgtagattgaccgccggtaggtctgaggagctagatttcggatgttgcgaaacctcaaatcgggctccggtggctgttattgtaggggccaccgccatgtcaagcatggatggtgaattgagcttttcagcgcctttcttcgggtcagcgcgaccctttttaaggtcttggtattcgcgaacgccctcttggatagcatcttgcaggggtcggacgagttccgcgtagcgagaaatgaattgggcgtagaacccttttcggttcgggttctgccagcagaaaacattccaatgctttttctgacagaatttgcagggtgccggtggttccgtgttggggtccggaaccatcttctgagggccgtcgcgactctttttggggtttccggttttatgttgagccatctgcttagggcctttgtcggttccggtcttttgtgacttcttctgagcttcagcagcaccgctgtagcaagggtctcgttttctggtgtcatcagagccgaaataaaggcgcaggaagtcttttaatttggtcaggttcgtgatgttacaggatttgaccatgatttggatgtcgctgggcaattgttcgactattaggtcgaaatgctggtcagtgggacattctatgtttgcccggtcgccgtatgcgaggcgccggagatgagttttgtggtcaatgaatgcgaggaagctgcgaaattctttggggttcgcgtggcagtgcacatattcggttttgcacttggactcggttaggggacctcggaactctcgaagcagttcttctttccaccttttccaggtccacgagcaagtttcctgggcttccagagtgtaaaaccaagcgtcggcaggggttttctcggctatcatggctggtaggagctgtaccatcctggcatccgatgttgcgctaatgttttgaagaagttggactttgttgagccattcttcaatgtcttggtttcttttgcccgtaaacttgggtacgtcctttgctttcaaggaatcgaccttggtgttgctggcccacggggccgctggcacttggattggaggcaccggacctgaaaaacttggttcggtacgctcccttggtgtgtccgacgtttcccacggggttgcggaccgttctcttgtagctcgtgctatgagaggttgttcaggcagtgggcgatgtgctagggcttctaaggctcgtgcgaggcgctcatccgccgctgtctgacattcggaaagcctatgaagctgttccgtaagattttgagttgccaactgcattgcagcagtcgagcgggcaatgtcttcttttaacgctgccacttcagaggccatcgtggccaagttaggggcttccggttcgacggaagtggtccctgaacgccttgggcgtgttgcgggagggacttcgacgtcctccgcaggaccctgactacgagtctggatcacaggtgagtggcctcgcgttggagagcgtttgaccggcatcattctcggtttcatgaagtctgtttccgaaacaagagaaaaggtttccgagtagctacctgagcagatctcagtttgcgcaagagtttcggtatgaccgaataaggttttcagctgaatttgagaggggaaggcagtttgtcgcgcttctccaccatgtaacagattttttgttggtagactatggtaaagacaacttgggtctcctagcaggttgtgtgggtgtccgtactaggaatcgtagtctccaaatcctttctttgggcatcggtagcgacttgagggcgagaggcaaggagagtcagttagttgtgaaccgagcaggatttagaggcttcagtgtgggtgatcaggccattgaagcgctctgttaggttcctgttaacctaagattggagttgagaagctagttgtggggatttagtgtcgctacggcttctggccaccgacttattttattgaattcctctttttatacaagaatatgctacggtaatgtctacactagtttccgtagccttcattagggtggcggcgtccgatcttcccatctcggaccatcgccatgatcgatcatggctgcgtaacgtatccttcatgctgcgctggtgtagcccagaaccgagcttgatcttaggggtttcgaagcttaggttacaattgcggaaacctcaatcgtggtcacctgatgcctttgagcgaaccggtttatcagagtcgttcgctacagtagccacggaacttttagaagaatgtcaggcatatgttacagaggatactaattttgacgttccattagtcatcaaacccatgcttgtttcaatggaatttaacgaaaaatatcacatcaaaaatgctgtggaagttgaagaagatgcttccgatgatgccgacatggacctgatgggcgaacacctcgacggcgaactacaagaagcagtcaaatcccctagccatctctctatggcacaacttctacgcaaactgagtgatgggatgtttgtgtatgacggaacgacggtttggatgtttagggatgggtggcaacctatatcggaacactgcgagattgtccgacaatttatggtcaagcacatgaaccccatctgggacgaacgcatcagaattttcttagatttgctctccaaagtggaccccgattccaaaaaggcctataagtacaaacgctgcttggaaacagagaacttcgcaaaatcactgctgactaccaactctcacatcacatccatcatttcctgtttcaagtgtgaagtatacaatgctacttttctgcaaagatgtgataaggaccctttgaagattggatgcaataatggctatgtggaccttgtggatgggaagttgaaaccatatagcaaggatgtgcttataacaaagacagtaggctacgattatttttctaccgaaaacgatgtttctgccaaattgcgcaacgattggcttgaatttgttactcgtctcttccctgtggaggaggagcgcaatattgcccacatatacgctggatattgcctccgtggtgaccatccggagaaaattttccgcgtcctgaaggacaaaatcgatggtaacaatggcaagacaaagtttgcgcaggctttggaaatagcctttggcgggtatgcaaagcagggaaatgccgaacatatatatcgttccaccaggcattccaatcagaatggtcataatgctgcaatatttgcatatgctggatacttgctcgcaatcttcgaagagatggacgagcacaagacacttgataccaaaagagccaaaaagaaccatggggggaatgcaagcgaaactggctgaagaccacatagcaaaaaggatgaaattgtggcacttaccaccaaatggattatgatattcaacgaccgctgccagcccaaatatgatacctccgacacagcatttgtagagcgcatgctagtgttaccctttcgctccaagtttttgaagaccgaacaagaggtgaaggacagcaaattggaatacaagtacctagccgacccattcatttcagataagtttcatgtgtggcaaccatatattttggaatggttactggaagggcatatgaagtatttacaaaaccggtttcagaacattccagactcatgcaaagattggagagaagaggtatctgcagtggtagataacttggaggaatggttggaggataatgtggaggaagcagaagatgcggttttggagttgaaggacatcaaagcatggatgccccaatccatgaagttgagattcaaagataagaagcaccttgtagatgtgcttcgtaaaactctcaaaaattatgtttctgacacaggaaaggggaaggataggatgatggatgtatttaggggctaccaattgaaactgcaatcatgtttccgttgaatcagtaatggcagaatagaaacaagtgagagatgggtaaaacgggtagtgtgagaagctgactcgataaaatggctcaaacccgagatgatttagtaaaagtttgtttcgatgaatggagagaaacccaaaaaacccagacccaaaagtgtagtttgcttcagttaagagacagattttaaaaaaaaaaaaagaataaagcttcttcaaaaaaaaaaattattttctcatatagtggaagtatgtacacacgtttgggtctgggttttttgtgtaagtatatgtggaatcaagtcaccattcacttccatttacaccatatgattccatgattatgaaggaagcgaggatgcgcagtgaagcgattgaatgttcctttacttttgccataggcaacctcggaaaccaaagctgtatttgaagaaccatgatgagcaaacatgtctgagacatgtcaaatcacgtgacttccattaacactatttggttcaacgattgtgaaggaaatgagtgaagtgaatgtaccttttgatccaaaatggtgaagatgtgtcacgtgagttgtatgcgtagctttgatgttgtatgcatagtaatctgctgacgtaaagtgggaaaagcgactatcaatagcaagtccaagtttttgcttaaaggcggctagcttcttgcatcctcccccccccaatccaaccagctcctctgtaaacgattccatatacaacattcgaaatgtgcccaaacaattggccatgaggtgttcgaactcaatacctcaaaatacaactgtttccttataggaaatggggcatagccaatcccggggagtcatgcttttttaaatgaatgtgggaggcagcgatggagtgaatgccacgtgacatgatggatgttattgattacgtaagcattacgaaagcaggtcgagcttatatgagtgtagttgacagggcgtttaaatatggagtgggcatttcagctacagttgttgacagggcatttaaatatggagtgggcgtttcagcaatagttgttgacagggcgtttaaatatggagtgggtgtttcagcaatagttgttgacagggtgtttaaatatggctcctacgggtactatgggtcctggtagagttgaacgaactatgggttttctggcatttctgggtactatgggtcctggtagagttgaatgaactatgggccctctggtagtgcatcacccatggtatataccatgggtgatgcactaccagaacctaccaccaacggcttctagattacatcaccatcatccatcaactcaccaaccacgcttcccacactctcaaattctacatcctatctgcaccaacctttcccatggtaaatgaagatacaattgaagcaattctctatcttctcaacaagggggaggcttggcatccaagaaaggaagcaaagaaggcacagcgggattgtttgctgccatatgttcaacagtactgccgcatcgttgattttcctcatccaaacctacacggcaagcagcagtcaatcaattacctgacagcgagtatgatgacaaacctgaaagtcaacattcaagaacatttcatgcagatgctcctttggtacattaatctgtggctcgacgtgaagggacacaagcagcaactgcccccaaaaagtgatgcatgaaaagctttctttactcggctatgctacttaaagtcagtttttctttttgatatcatgcccgagtcactggatgacttgactgctgaagagagtgagcttctagaagagatgtggacacttaacctgccatttcctgatcaagacaagccgctcgcatattcagttactatagaccctcttgccttcttccctgcctactgtcggttgtcaagcctatatgaaaagcatggatttcgacggttcagtgcaatcccacttcaccgctccctcatccaaagccatgtgcagatcgacaccgtcatcctctactctcatatcctttgcatcacgtggcgagatgcagaagccgtcgagaaggtcaatttatggatgcgcatctgtaatctacataccaaagcttttcggtctcgccacggtatgcagtttgaaggctcgatcaccacagatggaacctcagtgtctgtatacctaaagcacccagaagcagacaagtatgggaagtgcagcagtgggaaaaagtcagcaacaactcttacagctgaggtgacggtgctttatgtggagaaaaacttacctgcttgtcgagcagcagagaatgtcattgttatcgacccaaacaagcatgacattctctactgccaagacggcaatggtacatttcgctacactgccaaccagcaagctgtggagactggaagccgtcgatttgcaaaagaatggcagcagatgaaagccggcagtattgacctcatagaatcatgactaccatctcacaagatgatgaacctcatggactttactcgctatctcctcgttcaccgtgccgactggaactgccacaaggacttctattcgcatcctgcccacatgcagtggaagtggcatgcatttataaaccgtcagaagagtgaattgaacctcatatccaacttatgcaacaagtacagtgaaaactttaccattgtgatgggagattggagtgatgccggtcgaactgcaagatttcagacctcatcaaagatgaaaggttggcgcaccctctttaagcacaacaggattaactgcttccttctcgacgagtataaaacctcatctgtctgccctcactgttcatctgatgacttccttgaaaaaggcttcaaaacatgacctcattcaagaccttggtgatgatgagaaggcaagattgaaaaagtccatggattgctgggttgtaccaaccctaactgtcagcaagcctggatgatgcgctactggaatcgagatacgctgagcacctgcaatatgctgataatcgtgcaatcaatgttggatggacacagtagaccagaagtgttcagcaggagtgttccagccgtagcttagattggttagattaggttttccgagccggttgtcgccggttcaatccctggtgcgggtgctagtgccaatacccaccggctccgcactatttatttatcagtctcttgaaaaaaaggcaaacgacaaactagttttgtaattctacaatcgggtctccttctctttctatatatatatatagtataggggtaatggtagggactagtggaactacctctcaacccccacctcccgcaacaccttgaccaacttgctcatataattctccgcaaatgaactcatccaatactcatgcatcgcatcatgctcactcacaaaattatgtccaagctcatgacaccacgtcaagaaccagtaataaaacgtatcaggatcctccgtctccactcccctcggtgctgaaaacccaccaggaagcgtcacaccctgatgtcgttgtttataatgcaaaccaaggtaaaaccgtgcattaaaaaacagggttcggttccgattaaacgcgatcgtgctcccagttgcatcaaagtagacgtgaatggctttcttgtctgttccaaagacgttggctagtaagctgaggaccatgacaaattgatggatgcctgtcatgttgaggtcggcaataacagaaggtgaggctgctcggtcaatataaaacggtactccgtcaatgagatcacgtagtactaggtcattgtcggaaataatcgaacagtgtgcagcgacttgacgggagagcatgctgggtgtcgggggtggattcagaggaatttcggctcggaaattgggttcctgtgttccgcggagagatgcgatcgagttggagaggtgggatttgaggttcacggtgctgttgggtgtgatttcttcggcgggcatggtggttcctcctccaccgggaggaataggttggtaccctccgtgctgattcgtggatacgggagggagcaaagactcgccagcgagctccaccagccccgtgagacccttgtttttgatcttgtcccttgccttgctcaagaaccccccgaaaagcccgtcaactgccggcgccgatgacgacggttgcgacgactgcgacgatccagccggtggtacaccattc

SEQ ID NO: 750 - protein, 961 aa, Spizellomyces punctatus
  source 1..961: note = CDS = join(complement(6883..8959),complement(6008..6816)), XP_016610099.1, uncharacterized protein
MTTDCTSTTTGSFQVKGGVGIAKSLYIGGDVYTNGVKLATESSLTASVATKQNASPLLDAISGLTTTPNTFIMGASNGFTATPVSTILGGYQPLLTTSSSLNVNSLMTSGGIFVQGAMDMVFRVDNVGNGLLTGGLLVEKDLNVEGLIIQNGVKVAMQQWAVAMMTSMTTPLSQSLTLLQTLVQNNKTAADMALATKQSASPLLNSISGLIPAANTFIMGTPTGFSVVPTSNILSSYQPLITSSTALSFNSATVGRGITIQNGAASTTMSLVNTGSNITWGMRVAGSTGDGTLSAGGFGLNSSYNNTGFVLRVSNTGVMQIPNTTDSSSVTTGAFQVSGGVGIGKTLTLGAGGGGLQPAAIVINAPSSATASMAVLISNNAASSNSWGIYHAATNGTGILTNGSLGFYNYGTSAHQFILKANGTIAITSTTDSSSTITGALQVSGGAGIAKSLYVGGDIFSNNLKLATESYVGMAIANKQASSPLLSSISGLALSANSFIVGSSATSFSTKTVEEVKSILGVTNVDLSGKQNASPLLDSIASMSPMSNMFLMGDDVQGFTLANDVTVRSILNIVNYAPSISALQTSKQDVIMSSSNLLVNTILANDTSDAQTVSSGALQVKGGIGVSKSIFSGGNITGKVLIAASTGGYFKLRSDTPSMKGDYTISYNNSGDALHVHLAGSSDSIDQHRYEFDLILSGNLTIGLPLNGLRAIILKNLDPGTNACAIQYFQNAAGSAVMFLNGNNRSVDGGVNTFTIRNDAGGVRLQAQGAKGITIASSTGNVIVESTTPALSSTTGALVVNGGVAVGAHVVAGGNLYSNGPVYSNGQVCATQSWVTGQTFLRNVQVFKLLTKDVWQSNNASKVFYVSTPGKVLMEWTIRLHGNANSNGTLSIFLGQSAGSMPLVYASDFNFNSGINTTLTATFILTGMADNVAYFTNFSISQAAPDNTTDVTLIKITELGP

SEQ ID NO: 751 - protein, 445 aa, Spizellomyces punctatus
  source 1..445: note = CDS = 15278..16615, XP_016610098.1 - uncharacterized protein
MSTLVSVAFIRVAASDLPISDHRHDRSWLRNVSFMLRWCSPEPSLILGVSKLRLQLRKPQSWSPDAFERTGLSESFATVATELLEECQAYVTEDTNFDVPLVIKPMLVSMEFNEKYHIKNAVEVEEDASDDADMDLMGEHLDGELQEAVKSPSHLSMAQLLRKLSDGMFVYDGTTVWMFRDGWQPISEHCEIVRQFMVKHMNPIWDERIRIFLDLLSKVDPDSKKAYKYKRCLETENFAKSLLTTNSHITSIISCFKCEVYNATFLQRCDKDPLKIGCNNGYVDLVDGKLKPYSKDVLITKTVGYDYFSTENDVSAKLRNDWLEFVTRLFPVEEERNIAHIYAGYCLRGDHPEKIFRVLKDKIDGNNGKTKFAQALEIAFGGYAKQGNAEHIYRSTRHSNQNGHNAAIFAYAGYLLAIFEEMDEHKTLDTKRAKKNHGGNASETG

SEQ ID NO: 752 - protein, 178 aa, Spizellomyces punctatus
  source 1..178: note = CDS = 16667..17203, XP_016610097.1 - uncharacterized protein
MIFNDRCQPKYDTSDTAFVERMLVLPFRSKFLKTEQEVKDSKLEYKYLADPFISDKFHVWQPYILEWLLEGHMKYLQNRFQNIPDSCKDWREEVSAVVDNLEEWLEDNVEEAEDAVLELKDIKAWMPQSMKLRFKDKKHLVDVLRKTLKNYVSDTGKGKDRMMDVFRGYQLKLQSCFR

SEQ ID NO: 753 - protein, 235 aa, Spizellomyces punctatus
  source 1..235: note = CDS = 18934..19641, XP_016610096.1 - uncharacterized protein
MPESLDDLTAEESELLEEMWTLNLPFPDQDKPLAYSVTIDPLAFFPAYCRLSSLYEKHGFRRFSAIPLHRSLIQSHVQIDTVILYSHILCITWRDAEAVEKVNLWMRICNLHTKAFRSRHGMQFEGSITTDGTSVSVYLKHPEADKYGKCSSGKKSATTLTAEVTVLYVEKNLPACRAAENVIVIDPNKHDILYCQDGNGTFRYTANQQAVETGSRRFAKEWQQMKAGSIDLIES

SEQ ID NO: 754 - DNA, 13984 bp, Spizellomyces punctatus
  source 1..13984: mol_type = unassigned DNA; note = Origin - Fz = 2179..3963, Fz = 11221..12918
cgcagcagagtgagcagcctggacactgcgaaaagaaacaaatgcattggcgtttggcttgaagtgatgatcgcctttcgagcgcagttcgtagatttcgcgctccagcgcatgtagtctcccgctacagtattcaatactgtcaaccttctgtcctccaaatatcagcaatttcttgttgattttatgggtaggacgcttggtcggaactcggtacgggtctttcaagtctgaaccatgaaatttatcagtatctagacaagacattaaatcgtcatccaagaacttacagattgccaatacatcctccaattttgcagtgactttttggtgctcttcaatgagctttggtaaatctccaacttcccgtccgattacggcctggcgaatcgagtccttcaagttcaatgatgtcatgaactcggttacgtcttgaggtgagcgcatcgagtccgggaggtttgtcagaattagcgtgcgattatgaaatgcactttgaaattctgagctgaaaaagaactctctacgaaatcgtatccaatccatccagagtctgtacattagatctgcaatatggtaaacggctgagtcgcagcactcgtaatattgcagattatcaccataatcggaaacttacagtatgcatacatgctaaacacccagaccaatacagcatgcatccaaaaccacgaagactcatgatatacattgttgatagttaacgcggccagttggggcgacttttgatcggtttgtttatcaggactgtttacgctgtcgcggttcgatcctccggtgaatctcggcgcataaaagtggaagatacaaagtgggattccaatgcatgtgagacctaggaagaattgaaagcaaagacgaatgaagcggaggaacatgacggcatctaggccgatcttgtcgacaagttggttttcattggtaaagagcgtcgggcgcagccatgctgtcggaataccgctgagcggctgtggtcgtttcctgttggtcaataaggcagttaagatcacttttatactaagatcctttgcgacaatcacatactgctccggagcaaactttgatcgaggttcgtatacaattttatttcgcggccgtaataaagaaaagccgataaaaagcccttgaacataaacaaagaagctataagcattaccgggcgacggagcctcaaatgtaccgtcctgttcctaccgattgagatcgccgtctgcaaaccggcagcagttacgactcctgcaagatctgtcggactattgtctgacgacatgtcgctccaacgagtccagctaactcaacaatggaaactagacgagctcacaatgtctacttctcgccgaggcaaaatactaccctctggcttgaaatgcactgcttcctcacacggtgacagcaggaaaaacgaccgttaacggtgatgttgaacaatggtccttgtaaagcgagagtgtccaccagaaatggccgctcccagccgcgatgctatggacacaactcacaagatgaaacattgcaaaagccccctccgcgcgatcgtctgtgcagagtttcaagggctgcgcaaacgaagacttggcgagggacagcgttttcttttgatgaactgctggcctaaacaaatgatggtcagaatttattcagtatcaggattcacatatactgtcacggacagtaccaatgtgctgcatgcaagatattcagtttgtttactgtccagccagctcgaatataagccatgcatcctgttctttcaccatcccgttgggttgagtaaaagcctaaggagaattgcttgtcctttgttatcagcgttccatgtttaatctgtaccaaaagtatggattgcttttgggtcctctgaacccttccgccatgtgttgttgtcttttaccactacagttgaatatcaagagatggttgcaaattttgtttagaatgttgaaagcaattacatagtgcggagccgattggtattggcactagtacatagattccaaccaatttaatcataattttactcgatttagactcatgaactatggtttgatccaaaaaatcctatataagttgtcgtcgcccattttcccaggctttcatcttttcccacagatatcatcaatgccaccaaaaaagaagcaaaagcttgaaaaactcgacaaacccaccttacatacctgcaacaagacttcctttgcaaaagctttcctgccaaactatcgccaacggcttctagattacatcgccatcatccatcaactcgccgaccacgcttcccacgcgctgaaattctatctcctttcatcatcagtgccagtttttcccacagtaaatcaagagacaattgaagccatcctctatcttctcaacaaaggtgaattgtagcgaacgactctgataaaccggttcgctcaaaggcatcaggtgaccacgattgaggtttccacaattgtaacctaagcttcgaaacccctaagatcaagctcggttctgggctacaccagcgcagcatgaaggatacgttacgcagccatgatcgatcatggcgatggtccgagatgggaagatcagacgccgccaccctaatgaaggctacggaaactagtgtagacgttaccgtagcatattcttgtataaaaagaggaattcaataaaataagtcagcggccagaagccgtagcgacaaaaaatccccacaactagcttctcaaccccaatcctaggttaacaggaacctaacagagcacttcaatggcctgatcacccgcactgaagcctctaaatcctgctcggttcacaactaaccgactctccttgcctctcgccctcaagtcgctaccgacgcccaaagaaaggatttggagactacgattcctagtacggacacccacacaacctgctaggagacccaagttgtctttaccgtagtctaccaacaaaaaatccgttacatggtggagaagcgcgacgaactgccttcccctctcaaattcagctgaaaaccttattcagttgtaccgaaactcttgtgcaaaccgagatccgctcaggtagctactcggaaaccttttctctcgtttcggaaacagacttcacgaaaccgagaatgatgccggtcgaacgctctccaacgcgaggccgctcacctgtgatccagactcgtagtcagggtcctgcggaggacgtcgaagtccctcccgcaacacgcccaaggcgttcagggaccacttccgtcgaaccggaagcccctaacttggccacgatggcctctgaagtggcagcgttaaaagaagacattgcccgctcgactgctgcaacgcagttggcaactcaaaaccttacggaacagcttcataggctttccgaacgtcagacagcggtggatgagcgcctcgcacgagccttagaagccctagtgcatcgcccgctgcctgaacaacctctcatagcacgagctacaagagaacggtccgcaaccccgtgggaaacgtcggacacaccaagggagcgtaccgaaccaagtttttcaggtccggtgcctccaatccaagtgccagcagccccgtgggccagcgacaccaaggtcgattccttgaaagcaaaggacgtacccgagtttacgggcaaaagaaaccaagacgttgaagaatggctcaacaaagtccaacttcttcaaaacgttagcgcaacattggatgccaggatggtacagctcctaccagccatgatagccgagaaaacccctgccgacgcttggttttacactctggaagcccaggaaactcgctcgtggacctggaaaaggtggaaagaagaactgcttcgagagttccgagatcccctaaccgagtccaagcgcaaaaccgaatatgtgcgctgccacgcgaaccccaaagaatttcgcagctttctcgcattcattgaccacaaaactcatctccggcgcctcgcatacggcgaccgggcaaacatagaatgtcccgctgaccagcatttcgacctaatagtcgaacaattgcccagcgacatccaaatcatggtcaaatcctgtaacgtcatgaacctgaccaaattaaaagacttcctgcgcctttatttcggctctgatgacaccagaaaacgagacccttgctacagcggtgctgctgaagctcagaagaagtcacaaaagaccggaatcgacaaaggccctaagcagacggctcaacataaaaccggaaaccccgaaaagggtcacgacggccctcagaagatggttccggaccccaacacggaaccaccggcaccctgcaaattctgtcagaaaaagcattggaatgttttctgctggcagaacctgaaccgaaaagatcctgaagatggaaagaagggaccatacggagcacccatgcccgcaggttggaaacccaaacaggagtccaagaagtcgtacatagtggagctggactcgacgtccgctaccaccgagactcttttttcggcttcggaactggaaaggacagccaccgctaatcaaggattccacaccatcggattctttcattcacccgagcactcggaatcaacaattttgatgaccgcacctctttccaaggtcacggtgaccaaggaagaggacccccgcacgcccacgcagggctgggaccaagtctgggacaacatagccatcatctggggcaccccgcaagtggctctgatgatgggcaacaacccccgcgcgctcagcttcttcgccaaagaaccgaagcgaggcgccgggcacctcgggaacgacccctacgcagttgcgtggagttcccaccacctctacatcgctgccgcagccaaagctgacaaggatcgaatcctgcgaaaagtccgagaagatggtacccctcgtttgatcctccttgcctggataaggctcgacgagcgtgagaaattcttgatgtggagctccgaagatcctgttatctttgattcttacgccaacctgcaactggtggcatttctcctgacaggcaatatcgttcgctcagactattattatcgtcgcggaaaccccaaatttctgcacgttaaagaccatccacatctccaaagacacgaagagagcgaacggacgcatatagtcatgctggctatcgaacaagttgctcgccagaataaaacaacaaaaccacaaaacgacaaatctagagagcactttgagagtgcgatcaaggctacggaagcaacaattaatgacatcgtgccccatttcgaggtcgtggtgccttccatcaacgccttctactcggtagatttaggcgatgtactcaaaagccagaccaagacccaaacgcagccttgctggacgctagccgtcatcgctcagctctgggcacctgtggtactagacacaggagcctgcgagtctctggtttccgacacgtaccagggccttctgttctccgaaaccgatttgcaggatgcggaaacgatggctttcaaaggcattggtggacgtatctcatctaccaagacagtatgcctcgaaacttccctcagaggccgcggaggagaatacctgactttccgcgcctatttccgagtcattgcatatgggaaacctctcatcatcctagccaacgatgttctgggacatttgaaactccaaaccttggttcaggaacccccgttacccagtttcgcggtgacgctcaagaatccggacatccttatcccttgctccataacggatgagctggacaccgatcacatgcgcggcacgccatacaaaaccaagcagggtgaattcatgaaggatgtgtcaatgccacggctgaccaaagccaaagctcagaagtctagattaaccatgttaatcacgggacagacgtgcgtggcagcccaaacttttctcatcgaaaaccctcttgaggccaccgctgctagctcaacagtcccgttaggcctcaaactgtccaccgcgacccataattcggttgcggaccccgaagagaacatttccaaagaagaatggcagacactttggaacaaatggaacctcgactctacggagagggctccaggggccttcgaagcccaattaaaagacgcggaacatttccacgtcgatctcaagcgacccaaacctgtggtctgggccctaatcaacattctacgacacttccatcaagccttcagctatgagggtcatctcatagggaactacaccaagattccttatgcgcctcgatttatctcggctccgccacccctttcgaggccacggtcgtactctccgttggagcgcacagccctcgagacggagcgagacaccatgatggggcttcagaggtggaaacgaaccaccgaagtaaccttcgccagcgatcctgttatcattcgctatgcagacaaacccccgcgcgtagccttcgactatcgccgagccaacgactgcatggcctgggatccatatccctttcccatcatgctcgacatcctgaactggatcatcgcagtcccattccgatacatatcgggaggtgacgcaaacaaaggattctaccaaatcgccatcaccgatgcgtcggtacgcaaatggctcgcgctcagactccatgacggcatctatgaaccactctttatgcccttcggacccaagactgccccctcgcacttctgtcgggtgatggacgacaccttgggtccctccaaatggcgaaatatcaacaacttcgtcgacgatatccacacacgagcggagacagccgcggaagccctagacgccatcgcggactggctcgactgcttttccagagccaaactcaccctaagacttgacaagtgtcaatggctctttcaccagctcacggccctcggtttcgttgcctcctctcagggtctcgctaccgatccagacaaggtcgcaaccatagtcgattggccacaacccaaattcataggtgacctatggtcatttgtgggtctcctagggttctacgcccaattcatttctcgctacgcggaactcgtccgacccctgcaagacgctatccaagagggcgttcgcaaataccgagaccttaaaaagggtcgcgctgacccgaagaaaggcgctgaaaagctcaattcaccatccatgctcgacacggcggtggcccctacaatcacagccaccggagcccgatttgaggtttcgcaacatccgaaatctagctcctcagacctaccggtggtcaatctacgccaatcatcgctggcggacttacccattgaccccttttgtgtcggacgccttgctcgcaagcgccccgaccaaggtctgcgcagatttattgcgaagcgtgaagtttcatggaccgattcccgaaactctgccttcgcagccgccaagcaggctctgacaacagctccagtgctcgcggcacccagaaaagggttcccctacacccttcacagtgacgcttcctacacagcatttaatgtcacgctcgaacagttacagccggatgcttctaaacacccgctgtgctaccattcccgaggcaccaccacctcggaaaagaaggccccccccgtcgaactcgaggccggatgcctcatttggggcctcggaaaactccgcccatacctcgaaggcctgcctttcacggtcattactgatcaccgagctcttttgtggctcgctaaatacaaaggcgagaaccgtaagcttctccgctgggccctcgatcttagttactggtccgaatggatgacaatcgttcacaaaccaggacgttttcacattgtcgctgatacactttcacggctactaggagcggaaaccctactctgctccaccgcgacccaaatatgggtgtcgaaacgcggaagacgacggctgcgcaccacaccagctgctctcgcaccttcctcaacactggcagatgccgtctttcgtctggccttacagcctgcactcattgccgccatccgcgctggcctcaccagccagctccaccccatagcccaacaggcccgcacgctcctatgggagaccagccccgacacctacactacagccgacgcgcgctttcttcaggactggcaacgtgcagataacctgctgtggcaccgtttttcagtctccgaagacctttggcgcctctacgtgccccctgcttgcacccccgaggtgcgcaagctttttcacgaggggggaggacacttcggattcgaaagaacctacgctagagctgcagcacaagtctggtggccgaaaatggcacaagatttcagaaaacattgcgcaggatgtgaaacctgccaacgctcaaaaagggtactgcaactgattccggggttgttgaaacccataccaccagctccgggacgctggacagtcatcacaactgacttcgtaaccaagctcccacttacttccagagggtacgatgccttttggctaatagcttgtaaatgctcaaagaggatccacgtatggcccttcaagagcactgcgacagctactcaggtcgcggaactatttatagaacactacgtcccattgcacggcatcccggaaactatcatctcagaccgcgaccccaaatttacaagtcgattttggcaggaggtctgcaaaaacctaaagattaatcaagagctcaccacagcctaccaccctcaaggtgatggacaatcagagagagacaacgcaacggtcttgcaggtccttaccacaatggtcaacacccgattagacgactgggacacctttcttccggttgcagaattcattatcaacgatacggtacacgaggcgacaaaaatgacgtggttcaagatggacctaggctatgagccccacaatccactggcggacatcgttgaaaggccgtcagaaaccagaaatgcagacgcggaagagctctgtaaacatcttggagacctaaacatccttatccaggatctgatgatcgaggcccaggactcgcagaaaagatattacgatttattgcgacgacatctggagttccggagaggagataaggtgcttctgagcacaaaaaacctagcagggtatgagtccaagatcgctccgaaatggctgggaccagtcacggtgaccgactgcaaccctctccgcgacaactatgagctaaaactgccagacaagatgagacgacttcacccatggtttcacatatcgaaattacgtccgtaccagaagcctgtcgacgccaaaactgaggaaaggatcgcggaagcacaaatggaggattccgacgcttcaaaaggcgagttcgaagtggaagcaatagtagaccatcaaaccaggcgcggaaagcgtcaatttcgaatacgttgggctggatacccaccccatgaggatacctgggaaccagaggaagccctaacagaggcttccgaagccttagaagagtactggagatccagagctcccactagcgcactagtagaggactccttggtagtcagctttgcaggtgacgccctggcttatgcttccgaccaccaatgcttcacgatttatccggacaatagctcacgtgataatcacgccctctcaccagaaagaaaaccagtttcgcgcggcttacctcaccagtcaagaacgccacaccaagcctcccgatcacgcttacgcgcgtccgagctgtcaaaatcagccggcaacgaccttaaaaggacgcccctgcacgctccccctcttttttcttcttcaactacctacgacctatctcccttacagacctactctgcttcgcaaaccttgtctatcaacaccgagacaaaagctttcgtttccaacaccatgaccaccgatatccgaggacaacaaggagtcagcatcctctctacccttgaggaaggctatccctggtcagaagtaagcgacgccttcgctgccgagaactctatcgagcagctcggagcagctatggccacctgggttgaagtttggattcgtgagctgttcgaagacccaaacaaacccctcgaacactatcgtggtgaagattgggtggttgacggggcttcaaagccgtacgccacgagccagcccctcacgatgcatatcgcggagccctacagtagggcttccgacggtggtcaagcagctgtcggtatcgtcgctgacgcaaaaaagatcgggaagagattacgggacgtaccctgcgccgcctggcttgacgctggggtccctcaacatgcggccggaaaccccaaaacggcccacttcaccctctggcccgatcgcgaggcccacgatttcgcggacatagccatcgaagccgcgagagcagtgttgttaaagctagccaacgcagctgaaaccacagaagagcagctccgtcccaaacatcgggagcacgcctattaccactttcgagcggttaacttgaaaagggccgcagagacgttcacagccctctacgtaacccgagccaacggttccaggacacctggaaccccggctccggaagccactgaccaaatttggttctgcacgaacgtcatggggcgcgctaccataatctggatgatcaatgaagacagccttgaagctgacgacgactatccagttgcgtcatggtagaagcgaggttcgggcactcacagatgagtcgccgaaccttctttttcgaaggggggatgtagcgaacgactctgataaaccggttcactcaaaggcatcaggtgaccatgattgaggtttccacaattgtaacctaagcttcgaaacccctaagatcaagctcggttctgggctacaccagcgcagcatgaaggatacattacgcagccatgatcgatcatggcgatggtccgagatgggaagatcggacgccgccaccctaatgaaggctacggaaactagtgtagacgttaccgtagcatattcttgtataaaaagaggaattcaataaaataagtcggcggccagaagccgtagcgacaaaaaatccccacaactagcttctcaaccccaatcctaggttaacaggaacctaacagagcgcttcaacggcctgatcacctgcactgaagcctctaaatcctgctcggttcacaactaaccgactctccttgcctctcgccctcaagtcgctaccgacgcccaaagaaaggatttggagactacgattcctagtacggacacccacacaacctgctaggagacccaagttgtctttaccatagtctaccaacaaaaaatccgttacagaatcatggcaaccaaaaactggtgcaaagaaggcgttatgcgaatccttgttgccatacatccaatggtactgcaacatcgtcggcttcgttcatccaaatgtacaaaaagagcagcaatcagtcaattatctgacagcgagtatgatgacgaatctgaaggtcaatgtccaggaacacttcatgatgatgctgctccggtacattaatctgtggcttgatgtgaagagacagaagcagcgactgccactgaaaagcgatgcgcaaaacgctttctttgctcgtcttcactacttgaagtcaattttcctttttgatattgtgcctgagtcgcttgatgacttgactgctgaagagagtgaacttctagaagagatttggtcccttagcattcccctttctgacgaccagccactcacatattcggttgctgtagaccctctcgccttctttcctgcatactgcaaactctcctgactctatgagcatcacggatttcgacggtttagcaccatacctcttcatcgctcgctcattcaaagtcacgtgcaaatcgacaccatcatcctctactctcaccttctttgcatcacgcgacgagaagcggaaactgtcgaaaaggtcgatttatggttgcgcatctgtaatctatgtaccaaagcttttcagtctcgctgtggtatgcagtttgaaggctcaatcatgacagacagtacctcggtgtcagtttacttgaaacatcctgaagctgacaagtatggaaagcacagcggcagagggaaaaagtcagcaaacaagatggaggcagaggttaaagcgctttatgtggaaaacaacttgcctgcttgtcaagcagcagagaacattgtcattatcgacccaaacaagcacgaccttctctactgccaagacagcaatggtgcaacaatgtttcgctataccgccaatcaatgctgcaaggagactggtagccggcgattgtgacagtgcatatttttatgattgcaatcataaaaatatgcactgtcacagcgatttgcaaaggaacggcagcagatgaagaaggaagcgggaatggacctcatagaatcacatatcccaagccacaagacgatgaacctcatggacttcacttgctaccttcttgtttgccgcacagattcagatcatcgaaaggaattctactcccaccctgcccacacgcagtggaagtggcatgcatttataaaccgtcagaagagtgaatcaaacctcatatccaacatgcgcaacaagtttgggaacttcaccattgtgatgggtgattggagtgatgccggtcgaactgcaagatttcagacctcatcaaagacgaaaggttggcgcaccctctttaagcgcaacaggatcaactgcttccttctcgacgagtacaagacctcatctgtctgccctcactgtttggcctcatctgctgacttccttgaaaaaggcttcaaaacacgacctcattcaagaccttggcgccgtcgcgaaggcaagattgaaaaagtccatggattgctgggttgtaccaaccctaactgtcagcaagcctggacgatgcgctactggaacagggacacgctgagcacctgcaacatgctgatgatcgtgcaatcaatgttagatggacacggtagaccaaaagtgttcagcaggggtgttccagccgtagcgtagattagttagattaccttttccgaactggttgtcgccggttcaatccctggtgcgggtgctagtgccaatacccatcggctccgcactattgaaacagcatagatgatgatcgtaagattggatgaaatcaattatagagaactccatgtttgaatataggtgattagcggttgaagctttcaaatgaaatgtgtgatattacccgcccttgcaagtgatatgaactcgaaaagtgttggatttcctattttagctgccaagtccttgatatattgataaagtgaatacttgtacagaaatgatgacaacaaaggtcattgcccaatcctccagacataaacgccatgcaaccatgtaccactcctacactaactgcatggttgcaagttagtgttgcagtgtgccataaaaggtgcccggcgataaacagtgtaggatttagctgcctttgcaatagcactcattgatggttggagtgtacatgcattagaaaaacgagtgagcacaattgatatttcaatgctgggacctctctttctgcagaaaccaagttccaacagtgcttcaaaatgggaaacgagcgttttatatgcgagtcccagcaccatcgcaacttaacggtggaacacaaatgtccagtaaatgttgaaactttttaatagatctatcgtttccttgtccacataggtagtggagttttcaataggaagcaccaacatggctgggtctcgccaacatacgtcaacattcagagcagggcgaaaagtccaaaacaacgtaaaagaccagagttattcagtcagaatcccccagtcaggacaaaaagtgctgcgcagatgatagtgatgtaaatggattttgggggaggggaaggaattttgcttcagggctcccctgttgatgggtctagatgccctatcgtcaaagaattggacaaacagtaccgtctttttgtgttcaaccctcgccccaaaagacttgcatgtgtgtgtgcgtgtgctgcaaaggctaggaaatcatctcttccttgcaggccttcaagctttaaagtccaagaagaagg

SEQ ID NO: 755 - protein, 268 aa, Spizellomyces punctatus
  source 1..268: note = CDS = join(11923..12187,12380..12921), XP_016607809.1 - uncharacterized protein
MTDSTSVSVYLKHPEADKYGKHSGRGKKSANKMEAEVKALYVENNLPACQAAENIVIIDPNKHDLLYCQDSNGATMFRYTANQCCKETDSDHRKEFYSHPAHTQWKWHAFINRQKSESNLISNMRNKFGNFTIVMGDWSDAGRTARFQTSSKTKGWRTLFKRNRINCFLLDEYKTSSVCPHCLASSADFLEKGFKTRPHSRPWRRREGKIEKVHGLLGCTNPNCQQAWTMRYWNRDTLSTCNMLMIVQSMLDGHGRPKVFSRGVPAVA

SEQ ID NO: 756 - DNA, 30889 bp, Spizellomyces punctatus
  source 1..30889: mol_type = unassigned DNA; note = Origin - Fz = 2179..3963, 29761..29823
aacgaattgttggccatggaggagcgacaggtgatacggtcttacaagtttggggttgcatatgtagggcctggccagtgctctgaggaggaaatgttttcgaaccgcgcgggtgagtttcttgattaccatgagtgaaatttattttctgttgggaaatgttgacatctttgtggactagaaaatgcttcacccaagtttaaggaatttttaaactttcttggcgagacaatagaactccgaggttggaaagggtatcgtgcgggtctcgacgtgagcggaagtatgtatacattcgcatttacatcccaatgtctatacactcacttataatacgcgctttcttacccaactccttaggcaacatgacaggaacgcactccatctacacaaaatggcaaggctatgaaatcatgttccacgtctccaccctcctcccctacatccccggtgaccgccagcaactcgaacgcaaacgccacattggcaacgacattgtcatcatcatcttttctgaatccgactcccccttccaattgtcttctatcacgtcccatcagaatcatgttgtggctgtcgtgagtccagtggagggcgaccggtatcggttgacggttgcgccaaagagcggggtacctgggtttacgccggatttaccagagccctgtgtgtttggacgggatgctgtcagtagggatttctttttacacaagtgtgagtatatttgatttggttttgtttcgactgccttttgtatggttgttctaacccgtacgttgctttagtggtaaatggcgaaagagcctcttacaaagcccccagctttgcccctaaaatctcacgaacacgctctgttctcctctacgaagtcgcttccaagtttctaaaatgaaagaaaacactcaaaccccccttttgcccactataatggacggcctgtaggagagttctattgttttgttcttgtgtgtgtgtttttgttttttttgttgtggatggtggtggttagagcatgggaaacgtaatttataatgtctgggtactgtgctctttctgtttgtcattgctgcgtttcttgttttttttttcttgtaaacccatcgtgtgtcaacaaatgacgatgaccaacagcgcgtgtggatcatcaactataaccttattcgacgttcaccaactattcgccagagatcatgcaggacaccatattccgtcctccgtatcaagattcctgcatagtacacgtttcttggcacatatacctgcaaaacctcgagcataacgttcttatgatcactcctgagttgttttggttggtacgaagcctacactttgttaccaaactcttagatgactacaaactggtagttccccattctgtattataattctcagcactggaatttccatggtaacatacctgcatgttttttagaaagttctttgggccctgcatgcagaaagggtacatctccaaagataatgcacgttatggacagggttatggatgagctgagtgggttagacgtagatgataaggtcggcacattgttttgaatattgctatcatgcatgtggtcaaaaccttggggaccatggtaagaaggatcgtttgcctctcaaattgtggcgcaaggaggttttcatctgccagacagttgatattccttggctcctgttctagtgccataatagccaatgtgaccgatatcctatcgccacatttaacatggtttgccagagaatacattacatggaataggtgtgagattttcaccatacggggagacctatctccctgcgagcatcccttacaaggaaacccttgtccccaattggctccagtcttgcaaattgttcgaaatactcttgaaaaatacccaaaactaggagcgctgctggtccatgcacaagtgcagtcgctgctttcaccttcttctttccatccacaatagcataagtgatacaatttcatagtgcggagccgattggtattggcactagtacatagattccaaccaatttaatcataattttactcgatttagactcatgaactatggtttgatccaaaaaatcctatataagttgtcgttgcccattttcccaggctttcatcttttcccacagatatcatcaatgccaccaaaaaagaagcaaaagcttgaaaaactcgacaaacccaccttacatacctgcaacaagacttcctttgcaaaagctttcctgccaaactatcaccaacggcttctagattacatcaccatcatccatcaactcaccaaccatgcttcccatgctctcaaattctacatcctatctgcaccaaccttcactgtgaatgaggagaccatcgaagcgattctctatcttctcaacaagggggaggcttggcatccaagaaaggaagcaaagaaggcatggcgggattgtttgctgccatatgttcaatggtactgccaaatcattggctttgctcacccaaatctacaaggtgagcagcaatcagtcaattacctgacagcaagtatgatgatgaacctgaaagtcaatgttcaagagcatttcatgcagatgctccttcagtacattaatctgtggcttgatgtgaagggacagaagcagtgactgaaaagtgatgcgtgaaacactttctttgctcgtctttgctacttgaagtcaattttcctttttgatattgtgcccaagtcactcaatgacttaactgctgaagagagtgaacttctagaagagatttggtcacttgatctgccttttcttgttgaccatccactcacctatgcagttgtcatggatccaatgtcctttatccctgcctactgtcagttgtcaagcctatatgaaaagcatggatttcgatggttcagtgcaatccctcttcatcagtcactgattcagtcccatatttgcatcaacatggtcattctctatgcccacatcctctgcatcacccgccaagaagcacaagccatagagaaggtcgatttatggatgcgcatctgcaatctatgtaccaaggcttttcggtcttgctgtgatatgcagtttgaaggctcgatcacgatggatggcacctcagtgtcagtttacttgaaacatcctgaagctgacaagtatggaaagcacagcagtggagggaagaagtcagcaaagaccctagaagctgaggtgaaggcagtatatgtggagaacaacttgcctgcttgttgagcagcagagaatgtcatcattatcgacccaaacaagcatgacattctctactgccaagacagtaatggcacgacatttcactacactgccaaccagtgagccgtggagactggaagctgtcgatttgcaaaagaatggcagcagatgaaagccggcggtattgacctcatagaatcatgaataccatctcacaagacaatgaacctcatggactttactcactaccttctcatttgccgtgcagattcagattgttgaaaggagttctactcacatcctgcccacacacagtggaagtggcatgcatttataaactgtcagaagagtgaatcaaacctcatatccaacatgcgcaacaagtttgggaacttcaccattgtgatgggtgattggagtgatgctggttgaactgcaagatttcagacctcatcaaagatgaaaggttggtgcaccctctttaagcgcaacaggatcaactgcttccttcttgacaagtacaagacctcatctgcctgccctcactgtttggcctcatctgctgacttccttgaaaaaggcttcaaaacatgacctcattcaagaccttggtgccattgcaaaggcaagattgaaaaagtccatggattgctgggttgtaccaaccctaactgtcagcaagcctggacgatgtgctactggaacagggacatgctgagcacctgcaacatgctgatgatcatgaaatctgtagcggattttttgttggtagactatggtaaagccaacttgggtctcctagcaggttatgtgggtgtccgtactaggaatcatagtctccgaatcctttctttgggcatcggtagcgaattgggggcgagaggcaaggagaatcagttagttgtgaaccgagcaggatttagaggcttcagtgtgggtgatcaggccgttgaagcactctgttaggttcctgttaacctaagattggagttgagaagctagtttcttggggatttagtgtcactatggcttctgcccatgacttattttattgaatttgttgttttatacaagaatatgctatggtaacatctacactagtctctgtaaccttcattagggtggcggcatccaatattcccatttctgatcattgccatgatcaattatgactgcgtaacatatcctttgtgctgcactggtgtagcccagaaccaaacttgatctcaggggtttcgaagctcaggttacaattgcggaaacctcaatcatggtcacctgatgcctttgagcgaaccggtttatcagagtcattcgctacattcccccttcgaaaaagaaggttcagcaacttgcatgcaagtgtttgagaccttgtctctaccatgacacaactggatagttgtcatcagcttcaaagctgtcttcgttgattgtccagattatggtagtgcgccccatgatgtttgcgcagaaccaaatttggtcagtggcttccggagctggggttccaggggtcttggaaccattggcttgggttacataaagggctgtgaacatctctgcggcccttttcaagttaaccgcttgaaagtggtaataggagtgctcccgatgtttgggatggagctgctcttctgtggtttcagctgcattggctagctttaacaacactgctctcgtggcttcgatggctatctctgcaaaatcatgggcttcgcaatcgggccagagggtgaagcgggccattttggggtttccagccacatgttgagggaccccagcatcaagccaggcagcgcagggtacatcccgtaatctcttccctattgtttttgcattggcaatgataccgacagctgcttgaccaccatcggaagccctactgtagggctctgcaatatgcatcatgaggggctggcttgtggcgtatggcttcgaagccccgtcaaccacccaatcttcaccacgatagtgttcaagaggtttgtttgggtcttcgtacaactcatgaatccaaactttgacccaggtggccatagctgctccgagccgctcaatagagttctcggcagcaaaggcatcgcttacttctgaccagggatagccttcctcaagggtagagaggatgctgactccttgttgtcatcggatattggtggtcatggtgttggaaatgaaagcttttgttttggtgtcaatagaaaaggtttgcgaggcagagtaggtctgtaagggaagtaggttgtcagtagttgaagaagaaaaaagagggggggcaagcaggggcatccttttaaggtcatcaccagctgattttgacagctcggacacacataagcatgatcgggaggcttggtgtggcattctcgactggtgaggtaagccacatgaagctggttttcattctggtgagagggcatgattatcatgtgagctattgtctggataaaccacgaagcattggtggtcagaagcataagctggggcatcgcctgcaaagctgactaccaaggagtcctctactagtgcactagtgggagctctggatctccagtactcttctaaggctttggaagcctctgttagggcttcctctggttcccaggtatcctcatggggtgggtatccagcccaatgtattcgaaattgatgctttccacacctggttcgatggtctactattgcttccactttgaactcaccttctggagtgtcggaattctccatttgtgcttccgtgactttttcctcagtttcgccattgacaggcttctggtatggacataatttcaatatgtgaaaccatggatgaagtcatctcatcttatctggcagttttaactcatagttgtcacagagaaggttacagtcagtcactgtgactggtcccagccattttggagtgatcttggactcataccctgctaggtttttcatgctcagaagcaccttatctcctctctggaactccaaatgttgttgtgataaatcatagtatcttgtaacaggctagcagggacaagaagacaacagaaaactagggaagacttggttactacttgttattttcctttgaggggcctcagagaggtcctctttttatagacaaaggggctgacaaatgctatatcctaactacccaatcagatctcacccacatcatcctaaactatttgtcagcctattgcaccatttgcaaccaatcagaactcatacatgtcatcctaaactatttgtcagcctattgcaccatttgcaaccaatcagatcttgtacatgtcatcctaaactatttgtcagcctattgcaccatttgcaaccaatcagatcttgtacatgtcatcctaaactatttgtcagcctattgcaccatttatagccaatcacaagtgagacaagtcatcctaaatacactgtgccacttgattgaaaggggcagatgctagtgtgtcaggatactcatctaatttagccagaaatggctaaatctgcttatttatctaattctggtcaaatgaatgttgacaccatcagcaaagtcatgtgaccactagtttggaaccacatctaaccagtataaccatagcactgacagaagaattctgtcacatatcttttctgtgaatcctgggcctcaatcatcagatctcggataaggatgtttaggtctccgagatgtttacagagctcttccacatctgcatttctggtttctgacggcctttcaatgatggagtcatggtctgagataatagtctccggaatgctgtgcaatgggatgtagcattctataaatagttctgcgacctgagtagctgtcgcggtgctcttgaggggccatacgtggatcctctttgagcatttacaagctattagccaaaaggcatcataccctctggaagtaagtgggagcttggttacaaagtcagtcatgatgactgtccagcatcccagagctggtggtatgggtttcagcaaccccagaatcagttgcggtaccctttttgagcattggcaggtttcatatcctgtgcaatgttttctgaaatcttgtgccatctttggccaccagacttgtgctgtggctctggcgtaggttctttcgaatccgaagtgtcctcccccctcgtgaaaaagcttgcgcaccttgggggtgcaagcagggggcacgtagaggcaccaaaggtcttcggagactgaaaaacggtgccacagcaggttatctgcacattgccactcctgaagaaagcgcgcgttggctgtagtgtaggtgtcagggctggtctcccataggagcatgcgggcctgttgggctatggggtagagctggccagtgaggccagcgcagatggcggcaatgagtgcaggctgtaaggccagacaaaagacggcatctgccagtgtcaaggaaggtgcgagagccgctggtgtggtgcgcagccatcgtcttccgcgttccgccacccatatttgggttgcggtggagcagagtagggtttctgctcctagtagccatgaaagtgtatcagcgacaatgtgaaaacatcctggtttgtgaatgattgtcatccattcagaccagtaactaagatcgagggcccagcagagaagcttatggttctcgcctttgtatttagtgagccacaaaagagcttggtgatcagtaatgactgtgaaaggcaggccttcgaggtatgggcagagttttccaaggccccaaatgaggcatccggcctcgagtttgacggggggggcctttttttctgaggtggtggtgcctcgagaatggtagcacagcgggcggttagaagcatctggctgtaactgttcgagcatgacattaaatgctgtgtaggaagcgtcactgtgaagggtgtaggggaacccttttctgggtgccacaagcactggagctgttgtcagagcctgcttggcggctgcgaaggcagagtttcgggaatcagtccatgaaacttcacgcttcacaataaatctgcacagaccttggtccgggcgcttgcaagcaaggcatccgacacaaaaggggtcaatgggtaagtaaggcttgaggagtctcacatggaacactggatgaatcttcatggtgctggggagctccagggtgtaattctgaaattcatccttggccttgattctgtaaggtccaagccaggggtgaagaagtttctgggctggcctctgggcttcttcttctggggtgataccttctctagatagccaaactttggagcctaaggggtagcttggggccttgctgagagacttgttggcttgctgaacttgtctttcttgggccagtatcatgttatccttggctacttgaagcagttgctgaatatactggtggaagtctgttgcttcaggatcattgctttctcctggtggtgttgctggggtcctgggatgctggccattctctaagtagaatggggtaaagcctgtggtttctgagatactgttgttgtaggcaaactcagcaaagggtacaagatcttcccaattcttcatgttgtactgcaggaaagctctcaggtagatcttcaaagtcttgatggttctctctgcctgtccattggtctgctggtgccttgcagtggctaggagggtgttgcagcctaagagttgcatcaagttggaccagaatgaactggtgaacttggtgtctctatcagatacaatcacttctgggaggccatggtgcttgaagatgtgcttcaagaagagcagggccaggtccttggctgaggctctggtggtggtagggatgaagtggcctctctttgacaatctgtcaacaatgacaaagatggcattgtgatcagaggaagtcacaggtaggtcagggatcaggtcaatggaaatctggctccatctggtcttaggtactgggaggggctgcagcaagcctgctggtggttgctgactaggtttgcttctctggcaggaatcacaagacttgacatacttcgtaatgtccttgtacatccttggccagtagtaatgccttgctagggcatcatgggtcttggtgatgccaaagtgtccagcatactgagtgtcatgggtttcttggagtaggctcaaccttaggtctgggtcactaggaacaaaaatcctgtcctggaaatagagtaacccatcttgatggctgaggtatttgagcctttgttgctggtcttctggtctcctggggtcatccaaagcttggatgagctcttgaagttctgggtcttctgtggtactggtcttcaatctctcttgaagggtgctggtggtgtgggtcacagcattcaactctgctgtcaccaaggccttgcacttgatgcatcttggggccaggtctggtcttctagacaggatgtctgccactgtgtggagtcttcctgggccatagccaatctcaaagtcaaaagattggaaattcatgacccatctggcttgtcttctggtcaagaagggctggttctgtagccacttgagggactggtggtctgagataactttgaagggggttccttccaggtagggcctccaaactctgagggcatcatggatggctaacagctcttgttgtctggtgtcatatctggtctctgctggagccatcttcctggagtggtaggcaactggtctcatgcctttcccatcatcctgtccaagccatgctccaactgcatagcctgaggcatcagggaagacagtggtaggcaaggctgggtcaaagggtctgagtacaggggctttggtgaccatatccttcagctgctgaaaagctttctcctgaggttcagaccaggtccagggcttgtcatttctcaacaggtctgtcaatggtgcagcttgctctgccaggtccttcagaaagctatggaagtagttcaccaggcccatgaactgtctgacttcagtgacgctctgaggggtgggccattcttgaacagtctgcactttcttggggtcaagcctgactccttcatgtgagactacatggccaagaaactctacttcttgcttgaagaactggcacttgctggggttggcatacagcttgttctgcctgagggcttgcagaacctgcttgaggtggtccaggtgatcttctggggtcttggagtagatgaggatgtcatctaggtagacaataacaaagatgtccaagaagggtcttagaacatcattcatcaaagtcatgaaagtggctggggcattggtcattccaaaggacatgaccaggaactcaaagtgaccatatctggttctgaaagctgtcttggggatgtcttctgggtggatcctgatctggtagtagcctgacttgagatccagcttggtaaagacctgggctccattcagtctgtccatcagctcatcaatcctagggaggggatatctgctcttgatggtgattttattcagagccctgtagtccacacacatcctcaaagacccttctttcttcttgacaaagaggatgggtgctccaaaggggctcttggatggtctgatgtggcctgcctccagaagttcagacagctgcttcctcagttcttctaactccaaagaagagaggtggtaggttggtctccagggggtctggttgggggcactgagttcaattctgtgatccactgttctctcagggggaagtcctgggggaagctcttccacaaagacatcttgatagttttcaagaagcttggtgactttggaatccatggtgtctggaggggtgctggtatcttgagggttcttgagatacacagcaaaagctgttgctgtcctcttcttcagtgttctgaccaacatctttgctgataccatggtgataagattggacttctgggatttgttggaagagctggcctgcttaacaaaccatctgactctggggtgctgggaggtggtgaaggtcacagtgttcttgttgtggttgatactgggattcctccaggcaaaccaaggtatacccaggatcaagtcaaacttgattggggctactataaagtctgactgttctgtgtaggttcctactgagtactgaagacctttgacaaagcctatttcttggtgctttctgtcatcagccatagagatttctgctccagggagagaatgagtcaccagttgtgccttcttgacaaaggactgtgacacatagagttggtttgccccattatccaggagaatggttactgggattccttggattctaccttgcacagtcagcaagtgactccggggaatccttggccctttgggggtacttaaagagtatggagccacctctactacatggatcttgctttcttggtaggtggcctgggtggtctggggttctggggttctctggggttcctgggttttctggggttctagggttctctggggttctggggttctctggggttcttgggttctctggggttctggggttctctggggttcttgggttctctggagttcttgggttctctggggttcttgggttctctggagttcttgggttctctggagttctggggttctctgggattctggggttctctggggttctggggttctctggggttctgggattctctgggtttctggggttctctgggattctggggttctcaggggtcctgcgattttctgggtttctggggttctctgggattctggtgtagcgaatgactctgataaaccggttcgcttaaaggcatcaggtgaccatgattgaggtttccgcaattgcaacctaagcttcgaaacccctgagatcaagctcggttctgggctacaccagcgcagcgcaaaggatatggtacgcagtcataattgatcatggcaatgatcggaaacgggaatatcggacaccgccaccctaatggaggttacggaaactagtgtagatgttactgtagcatattcctgtataaaaagatgaattcaataaaataagttgtgggcagaagccatagtgacactaaatccccacaactagcttctcaactccaatcttaggttaacaggaacctaacagagtgcttcaacagcctgatcacctgcactgaagcctctaaatcctgctcagttcacaactaaccgactctccttgcctctcaccctcaagttgctactgacgcccaaagaaaggattttggagactatgattcctagtacagacacccacataacctgctaggagacccaagttgtctttaccatagtctaccaacaaaaaatccattacatggtggagaagtgcgacgaactgccttcccctctcaaattcagctgaaaaccttattcggtcgtaccgaaactcttgcacaaaccgagatctgctcaggtagctactcggaaaccttttctctcgtttcggaaacagacttcatgaaactgagaatgatgctggtcgaacgctctccaatgtgaggccactcacctgtgatccagacttgtagtcagggtccagcggaggacgtcgaagtccctcccgcaacatgcccgagacattcagggaccacttccgtcgaaccggaagcccctaacttggccatgatggcctctgaagtggcagcgttaaaagaagacattgcccactcgactgctgcaatgcagttggcaactcaaaatcttacggaacagcttcataggctttccgaacatcagacagtggcagatgagtgcctcgcacgagccttagaagccctagtgccactgcctgaacaacctctcatagcacgagctacaagagaacagtctgcaaccccatgggaaacattggacacaccaagggagcatatggaaccaagtttttcaggtctggtgcctccaatccaagtgccagcagccccatgggccagcgacactaaggtcgattccttgaaagcaaaggacatacctgagtttatgggcaaaagaaaccaagatgttgaagaatggctcaacaaagtccaacttcttcaaaatgttagcgcaatgtcagatgccaggatggtacagctcctaccagccatgatagccaagaaaacccctgccaatgcttggttttacactctggaagcccaggaaacttgcttgtggacctggaaaaggtggaaagaagaactgcttcaagagttctgagatcccctaaccaagtccaagcgcaaaaccaaatatgtgcactgccatgtgaaccccaaagaatttcgcagctttctcacattcatcgaccacaaaactcatctccggtgcctcacatatggcgaccgggcaaacataatatatcccactgaccagcattttgacctaatagttgaacaattgcccagcgacatccaaatcatggtcaaatcctgtaatgtcatgaacctgaccaaattaaaagacttcctgcgcctttatttcagctctgatgacaccagaaaatgagacccttgctacagcggtgctgcagaagctcagaagaagtcacaaaagaccggaactgacaaaggccctaagcagacggctcaacataaaactggaaaccccgaaaagggtcacaatggtcctcagaggatggttccggaccccaacaaggaaccaccagcaccctgcaaattctgtcagaaaaagcattggaatgttttctgctggcagaacccgaaccgaaaagatcctgaagatggaaagaagggaccatacggagcacccatgcccgcaggttggaaacccaaacaggagtccaagaagtcgtacatagtggagctggactcgacgtccgctaccaccgagactcttttttcggcttcggaactggaaaggacagccgccgctaatcaaggattccacaccattggattctttcattcacccgagcactcggaatcaacaattttgatgaccgcacctctttccgaggtcacggtgaccaaggaagaggacccccgcatgcccacgcagggctgggaccaagtctgggataacatagccatcatccggggcaccccgcaagtggctctgatgatgggcgacaacccccgcatgctcagcttctttgccaaagaaccaaagcgaggtgctgggcacctcaggaatgacccctatgcagttgcgtggagttcccaccacctctacatcactgctgcagccaaagctgacaaggatcgaatcctgcaaaaagtccgagaggatggtaccccttgtttgatcctccttgcctggataaggctcgacaagcatgagaaattcttgatgtggagctctgaagaccctgttatctttgattcttacgccaacctgcaactggtggcatttctcctgacaggcaatattgttcactcagactattattatcatcacggaaaccccaaatttctgcacgttaaagaccatccacatctccaaagacatgaagagagtgaacggatgtatatagtcatgctggctatcaaacaagttgctcgccagaataaaacaacaaaaccacaaaacaacaaatctagggagcactttgagagtgtgatcaaggccatggaagcaacaattaatgacatcatgccccatttcgaggttgtggtgccttccatcaatgccttctacttggtagatttaggcgatgtactcaaaagccagaccaagacccaaatgcagccttgctggatgctagctgtcattgctcagctctgggcacctgtggtactagacacaggagcctgcgagtctctggtttctgacacatacctgggccttctgttctccgaaactgatttacaggatgtggaaatgatggctttcaacagcattggtggacgtatctcatctaccaagacagtgtgcctcgaaacttccctcagaggccatggaggagaatacctgactttctgcacctactttcgggtcattgcatatgggaaacctctcatcatcctagccaacgacattctgggacatctgaaactccaaaccttggttcaggaacccccattacccagtttcgtggtgatgctcaagaatccggacatccttatcccttgctccataacagatgagctggacaccgatcacatgcatggcacgccatacaagaccaagcagggtgaattcatgaaggatgtgtcaatgccacagctgaccaaagccaaagctcagaagtctagattaaccatgttaatcacaggacagatgcgcgtggcagcccaaacttttctcatcgaaaaccctcttgaggccaccgctgctagctcaacggccccattaggcctcaaactgtccaccacaacccataatttggttgcagaccctgaagagaacatttccaaagaagaatggcagacacttcggaacaaatggaacctcgactctatggagaaggctccaggggccttcgaagcccaattaaaagatgcagaacgtttccacatcgatctcaagtgacccaaacccgtggtctgggccctaatcaacattctatgacacttccatcaagccttcagctatgagggtcatctcatagggaactacactaagattccctatgcaccttgatttatctcggctccaccaccccttttgaggccatggtcatactctccgttggagcggacagcccttgagctggaacgagacaccatgatggggcttcagaggtggaaatgaaccaccgaagtaaccttcaccagcaatcctgttatcattcgctatgcagacaaacccccgtgggtagcctttgactatcgccgagccaatgactgcatggcctgggatccatatccctttcccatcatgctcaacatcctgaactggatcgttgcagtcccattccgatacatatcgggaggtgatgcaaacaaaggattctaccaaattgccatcaccaatgtgttggtacacaaatggcttgtgatcagactccatgacagcatctatgaaccactctttatgcccttcggacccaagactgccccttcacacttctgtcgggtgatggatgacaccttgggtccctccaaatggcgaaatatcaacaacttcatcgacaatatccatacacaagcagagacagctgcggaagccctagatgccattgcagactggctcgactgcttttccagagccaaactcaccctaagactcaacaagtgtcaatggctctttcaccagctcacggctctcagttttgttgcctcctctcagggtcttgctaccgatccagacaaggttgcaaccatagtcgattggccacaacccaaattcataggtgacctatggtcatttgtgggtctcctagggttctatgcccaattcatctctcgctacgtggaactcatctggcccctgcaagatgctatccaagagggcgttcgcatataccgagaccttaaaaagggtcgcgctgacccaaagaaaggtgctgaaaagctcaattcaccatccatgcttgacatggcggtggcccctacaatcacagccaccagagcctgatttgaggtttcgcaacatccgaaatctagctcctcagacctaccggcggtcaatctatgccaatcatcgctggcggacttacccattgaccccttttgtgtcggatgccttgcttgcaagcgcccggaccaaggtctgtgcagatttattgtgaagcgtgaagtttcatggactgattcccgaaactctgccttcgcagccgccaagcaggctctgacaacagctccagtgcttgtggcacccagaaaagggttcccctacacccttcacagtgacgcttcctacacagcatttaatgtcatgctcgaacagttacagccagatgcttctaaccgcccgctgtgctaccattctcgaggcaccaccacctcagaaaaaaaggccccccccgtcaaactcgaggccggatgcctcatttggggccttggaaaactctgcccatacctcgaaggcctgcctttcacagtcattactgatcaccaagctcttttgtggctcactaaatacaaaggcgagaaccataagcttctctgctgggccctcgatcttagttactggtctgaatggatgacaatcattcacaaaccaggatgttttcacattgtcactgatacactttcatggctactaggagcagaaaccctactctgctccaccgcaacccaaatatgggtggcggaacacggaagacgatggctgcgcaccacaccagcggctctcgcaccttccttgacactggcagatgccgtcttttgtctggccttacagcctgcactcattgccgccatctgcgctggcctcaccggccagctctaccccatagcccaacaggcccgcatgctcctatgggagaccagccctgacacctacactacagccaacgcgcgctttcttcaggagtggcaatgtgcagataacctgctgtggcaccgtttttcagtctccgaagacctttggtgcctctacgtgccccctgcttgcacccccaaggtgcgcaagctttttcacgaggggggaggacacttcggattcgaaagaacctacgccagagccacagcacaagtctggtggccaaagatggcacaagatttcagaaaacattgcacaggatatgaaacctgccaatgctcaaaaagggtaccgcaactgattctggggttgctgaaacccataccaccagctctgggatgctggacagtcatcatgactgactttgtaaccaagctcccacttacttccagagggtatgatgccttttggctaatagcttgtaaatgctcaaagaggatccacgtatggcccctcaagagcaccgcgacagctactcaggtcgcagaactatttatagaatgctacatcccattgcacagcattccggagactattatctcagaccatgactccatcattgaaaggccgtcagaaaccagaaatgcagatgtggaagagctctgtaaacatctcggagacctaaacatccttatccgagatctgatgattgaggcccaggattcacagaaaagatatgtgacagaattcttctgtcagtgctatggttatactggttagatgtggttccaaactagtggtcacatgactttgctgatggtgtcaacattcatttgaccagaattagataaataagcagatttagccatttctggctaaattagatgagtatcctgacacactagcatctgcccctttcaatcaagtggcacagtgtatttaggatgacttgtctcacttgtgattggctataaatggtgcaataggctgacaaatagtttaggatgacatgtacaagatctgattggttgcaaatggtgcaataggctgacaaatagtttaggatgacatgtacaagatctgattggttgcaaatggtgcaataggctgacaaatagtttaggatgacatgtatgagttctgattggttgcaaatggtgcaataggctgacaaatagtttaggatgatgtgggtgagatctgattgggtagttaggatatagcatttgtcagcccctttgtctataaaaagaggacctctctgaggcccctcaaaggaaaataacaagtagtaaccaagtcttccctagttttctgttgtcttcttgtccctgctagcctgttacatggtagcaccaccttagacaacaaccccagactcttagaccttctgtgagagatcagaagctaagatccccagacccccagaccctgccctagaccttctgagtaatatcagaagaccaacagaccccagaccccagaccctgccctagtccttctgagtaatatcagaagacccctgcctcttatcccaggcccaacttatgcccagaaccccccctcaaggactcctacagaccagcccacaccaccccataccacaaacctacccccagcacaacctccagaactaccaccagacacaccacttggttagcatcagaagctctgagaaaacagatagagtttttctattgtgggattgtgaagaagctgtagagtccccctgtatcctccccaccagttgtacttgcaagtaatattgcatattttgggcctgtgacccaccctattttgactgcaagtaacattgcatctcttgggcctgtgacccaccctattgttgttgttacaagtaatattgtaactacccaagactccaccccattaccaccatgaccagccaggaagagattctcttcaacaccattgctgagcttgacatagaccaggtcaggcaggagctttatcaagcaaagctccagcagctgaactccaccacaccagccactgctcagtaccaacccagagtagataaatccctggtaaaagtcctccaaagcaagttgaagccctacaaaggcaacaggaatgtccaagagattaggacatacctcctcagacttgaagagtacttccaggcagctgcagatctatcaccagaaggccaactgttagtagccaccacctatgtcgaagagattaggannnnnnnnnnnnnnnnnnnnnnnnnnnnnnnnnnnnnnnnnnnnnnnnnnnnnnnnnnnnnnnnnnnnnnnnnnnnnnnnnnnnnnnnnnnnnnnnnnnnnnnnnnnnnnnnnnnnnnnnnnnnnnnnnnnnnnnnnnnnnnnnnnnnnnnnnnnnnnnnnnnnnnnnnnnnnnnnnnnnnnnnnnnnnnnnnnnnnnnnnnnnnnnnnnnnnnnnnnnnnnnnnnnnnnnnnnnnnnnnnnnnnnnnnnnnnnnnnnnnnnnnnnnnnnnnnnnnnnnnnnnnnnnnnnnnnnnnnnnnnnnnnnnnnnnnnnnnnnnnnnnnnnnnnnnnnnnnnnnnnnnnnnnnnnnnnnnnnnnnnnnnnnnnnnnnnnnnnnnnnnnnnnnnnnncccacccatcaacttagccacagctgcagcaacagctgataggattgaccagatccagttcagctaccagagaagaagccaggccaccagctactactcccctaagactgagaactctggagtagtccctatggagatagatagtatatccaccaactctgggaagcctctctccaaactcactgaggctgagaagactgagctcagaaagaagggagcctgtttcaggtgcagaaaaccaggccatattgcccccctatgccccttgaagaccaagcagcagggaaatggcaagcagactcagtagaagatagaggttctgcctctactggggaagatatcaagaaccaccaccctgacacccaccacctggtacactctcctgttattcaacccttggacctattggacccacctgaaaccacccctgagactttaactatccatggactttacctggaaccccagagaaccccagcatcccagagaaccccagaaacccagagaatcccagtgtaacagattttttgttggtagactacggtaaagacaacttgggtctcctagcaggttgtgtgggtgtccgtactaggaatcatagtctccaaatcctttctttgggcgtcggtagcgacttgagggtgagaggcaaggagagtcggttagtcatgaaccgagcaggatttagaggcttcagtgcgggtgatcaggccattgaagcgctctgttaggttcctgttaacctaagattggagttgagaagctagttgtggggatttaatgtcgctacggcttctggccgccgacttattttattgaattcctctttttatacaagaatatgctacggtaacgtctacactagtttccgtagccttcattagggtggcggcatccgatcttcccatctcggaccatcgccatgattgatcatggctgcgtaacgtatccttcatgctgcgctggtgtagcccagaaccgagcttgatcttaggggtttcgaagcttaggttacaattgcggaaacctcaatcgtggtcacctgatgcctttgagcgaaccggtttatcagagtcgttcactacatccccccttcgaaaaagaaggttcggcgactcatctgtgagtgcccgaacctcgcttctaccatgacgcaactggatagtcatcgtcagcttcaaggctgtcttcgttgatcatccagattatggtagtgcgccccatgatgtttgcgcagaaccaaatttggtcagtggcttccggagccagggttccaggtgtcctggaaccgttggctcgggttacgtagagggctgtgaacgtctctgcggcccttttcaagttaaccgctcgaaagtggtaataggcgtgctcccgatgtttgggacggagctgctcttctgtggtttcagctgcgttggctagctttaacaacactgctctcgcggcttcgatggctatgtccgcaaaatcgtgggcctcgcgatcaggccagagggtgaagcgggccgttttggggtttccggccgcatgttgagggaccccagcatcaagccaggcggcgcagggtacgtcccgtaatctcttcccgatcttttttgcatcagcgacgataccgacagctgcttgaccgccgtcggaagccctactgtagggctccgcaatatgcatcgtgaggggctggctcgtggcgtacagcttcgaagccccgtcaaccacccaatcttcaccatgatagtgttcgaggggtttgtttgggtcttcgaacagctcacgaatccaaacttcgacccaggtggccatagctgctccgagccgctcgatagagtctcggcagcgaagcgtcgcttacttctgaccagggatagccttcctcaagggtannnnnnnnnnnnnnnnnnnnnnnnnnnnnnnnnnnnnnnnnnnnnnnnnnnnnnnnnnnnnnnnnnnnnnnnnnnnnnnnnnnnnnnnnnnnnnnnnnnnnnnnnnnnnnnnnnnnnnnnnnnnnnnnnnnnnnnnnnnnnnnnnnnnnnnnnnnnnnnnnnnnnnnnnnnnnnnnnnnnnnnnnnnnnnnnnnnnnnnnnnnnnnnnnnnnnnnnnnnnnnnnnnnnnnnnnnnnnnnnnnnnnnnnnnnnnnnnnnnnnnnnnnnnnnnnnnnnnnnnnnnnttctggtgagagggcgtgattatcacgtgagctattgtccggataaattgtgaagcattggtggtcggaagtgtaagccagggcatcgcctgcaaagctgactaccaaggagtcctctactagtgcgctagtgggagctctggatctccagtactcttctaaggcttcggaagcctctgttagggcttcctctggttcccaggtatcctcatggggtgggtatccggcccaacgtattcgaaattgacgctttctgcgcctggttcgatggtctactatcgcttccacttcgaactcgccttttgaagtgtcggaatcctccatttgtgcttccgcgatcctttcctcagtttcggcatcgacaggcttctggtatggacataatttcaatatgtgaaaccatggatgaagtcatctcatcttatctggcagttttcactcgtagttgtcacagagaaggttacagtcagtcactgtgactggtcccagccattttggagtgatcttggactcataccctgctgggtttttcatgctcagaagcaccttatctcctctccggaactccaaatgttgttgtgataaatcatagtatcttgtaacaggctagcagggacaagaagacaacagaaaactagggaagacttggttactacttgttattttcctttgaggggcctcagagaggtcctctttttatagacaaaggggctgacaaatgctatatcctaactacccaatcagatctcacccacatcatcctaaactatttgtcagcctattgcaccatttgcaaccaatcagaactcatacatgtcatcctaaactatttgtcagcctattgcaccatttgcaaccaatcagatcttgtacatgtcatcctaaactatttgtcagcctattgcaccatttgcaaccaatcagatcttgtacatgtcatcctaaactatttgtcagcctattgcaccatttatagccaatcacaagtgagacaagtcatcctaaatacactgtgccacttgattgaaaggggcagatgctagtgtgtcaggatactcatctaatttagccagaaatggctaaatctgcttatttatctaattctggtcaaatgaatgttgacaccatcagcaaagtcatgtgaccactagtttggaaccacatctaaccagtataaccatagcactgacagaagaattctgtcacatatcttttctgtgaatcctgggcctcaatcatcagatctcggataaggatgtttaggtctccgagatgtttacagagctcttccacatctgcatttctggtttctgacagcctttcaatgatggagtcatggtctgagataatagtctccagaatgccgtgcaatgggatgtagcattctataaatagttctgcgacctgagtagctgtcgcggtgctcttgaggggccatatgtggatcctctttgagcatttacaagctattagccaaaaggcatcgtaccctctggaagtaagtgggagcttggttacgaagtcagtcgtgatgactgtccagcgtcccggagctggtggtatgggtttcaacaaccccggaatcagttgcggtaccctttttgagcgttggcaggtttcacatcctgcgcaatgttttctgaaatcttgtgccatctttggccaccagacttgtgctgtggctctggcgtaggttctttcgaatccgaagtgtcctcccccctcgtgaaaaagcttgcgcaccttgggggtgcaagcagggggcacgtagaggcaccaaaggtcttcggagactgaaaaacggtgccacagcaggttatctgcacattgccagtcctgaagaaagtgcgcatcggctgtagtgtaggtgttggggctggtctcccataggagcgtgcgggcctgttgggctatggggtggagctggccggtgaggccagcgcggatggcggcaatgagtgcaggctgtaaggccagacgaaagacggcatctgccagtgtcgaggaaggtgcgagagcagctggtgtggtgcgcagccatcgtcttccgcgtttcgacacccatatttgggtcgcggtggagcagagtagggtttccgctcctagtagccatgaaagtgtatcagcaacaatgtgaaaacgtcctggtttgtgaatgattgtcatccattcagaccagtaactaagatcgagggcccagcggagaagcttacggttctcgcctttgtatttagcgagccacaaaagagctcggtgatcagtaatgaccgtgaaaggcaggccttcaaggtatgggcggagttttccgaggccccaaatgaggcatccggccttgagtttgacagggggggccttcttttccgaggtggtggtgcctcaggaatggtagcacagcgggcgtttagaagcatctggctgtaactgttcgagcgtgacattaaacgctgtgtaggaagcgtcactgtgaagggtgtaggggaacccttttctgggtgccgcgagcactggagctgttgtcagagcctgcttggcggctgcgaaggcagagttttgggaatcggtccatgaaacttcacgcttcgcgataaatctgtgcagaccttggtcggggcgcttgcaagcaaggcgtccgacacaaaaggggtcaatgggtaagtccgccagcgatgattggcgtagattgaccaccggtaggtctgaggagctagatttcggatgttgcgaaacctcaaatcaggctccggtggctgtgattgtaggggccaccgccgtgtcgagcatggatggtgaattgagcttttcagtgcctttcttcgggtcagtgcgaccctttttaaggtctcggtattcgcgaacgccctcttggatagcgtcttgcaggggtcggacgagttccgcgtagcgagaaatgaattgggcatagaaccctaggagacccacgaatgaccataggtcacctatgaatttgggtcgtggccaatcgactatggttgcgaccttgtctggatcagtagcgagaccctgagaggaggcaacgaaaccgagggccgtgagctggtgaaagagccattgacacttgtcgagtcttagggtgagtttggctctggaaaagcggtcgagccagtctgcaatggcgtctagggcttccgcggctgtctccgctcgtgtgtggatatcgtcgacgaagttgttgatattttgccatttggagggacccaaggtgtcgtccatcacctgacagaagtgcgagggggcagtcttgggtccgaagggcataaagagtggttcgtagatgccgtcatggagtctgagcgcgagccatttgcataccgacgcattggtgatggcaatttggtagaatcctttgtttgcgtcacctcccgatatgtatcgcaatgggactgcgacgatccagttcaggatgtcgagcatgatgggaaagggatatggatcccaggccatgcagtcgttggctcggcgatagtcgaaggctatgcgcgggggtttgtctgcatagcgaatgataacaggatcgctggcgaaggttacttcggtggttcgttccacctctgaagccccatcatggtgtctcgctccgtctcgagggctgtccgctccaacggagagtatgaccgtggcctcgaaaggggtggcagagccgagataaatcgaggcgcataaggaatcttggtgtagttccctatgagatgaccctcatagctgaaggcttgatggaagtgtcgtagaatgttgattagggcccagaccatgggtttgggtcgcttgagatcgacgtggaaacgttccgcgtcttttaattgggcttcgaaggcccctggagccctctccgtagagtcgaggttccatttgttccgaagtgtctgccattcttctttggaaatgttctcttcggggtccgcaaccgaattatgggtcgcggtggacagtttgaggcctaacaggaccgttgagctagcagcggtggcgtcaagagggtttttgatgagaaaagtttgggctgccacgcgcgtctgtcccatgattaacatggttaatctagacttctgagctttggctttggtcagccgtggcattgatgcatccttcatgaattcaccctgcttggtcttgtatggcatgctgcgcatgtgatcggtgtccagctcatctgttatggagcaagggataaggatgtccggattcttgagcatcaccacgaaactgggtaatgggggttcctgaaccaaggtttggagtttcagatgtcccagaacgtcattggctaggatgatgagaggtttcccgtatgcaatgactcggaaataggcgcggaaagtcaggtattctcctccgcggcctctgagggaagttttgaggcatactgtcttggtagatgagatacgtccaccaatgcctttgaaagccatcgtttccgcatcctgcaaatcagtttcggagaacagaaggccctggtacgtgtcggaaaccagagactcgcaggctcctgtgtctagtaccacaggtgcccagagctgagcgatgacggctagcgtccagcaaggctgcgtttgggtcttggtctggcttttgagtacatcgcctaaatctaccgagtagaaggcattgatggaaggcaccatgacctcgaaatggggcgcgatgtcgttacttgttgcttccgtagccttgatcgcactctcaaagtgctctctagatttgtcattttgtggttttgttgttttattctggcgagcaacttgttcgatagccagcatgactatacacgtccgttcgctctcttcatgtctttggagacgtggatggtctttaacgtgcagaaatttggggtttctgtgatgataataatagtctgagcgaatgatattgcctgtcaggagaaatgccaccagttgcaggttggcgtaagaatcaaagataacaggatcttcggagctccacatcaagaatttctcatgctcgtcgagccttatccaggcaaggaggatcaaacaaggggtactgtcttctcggacttttcgcaggattcgatccttgtcagctttggctgcggcagcgatgtagaggtggtgggaactccacacaactgcgtaggggttgttcccgaggtgcccggcgcctcgcttcggttctttggcgaagaagctgagcgcgcgggggttgttgcccatcatcagagccacttgcggggtgccccagatgatggctatgttgtcccagacttggtcccagccctgcgtgggcatgtgggggtcctcttccttggtcaccgtgacctcggaaagaggtgcggtcatcaaaattgttgattccgagtgctcgggtgaatgaaagaatccgatggtgtggaatccttgattagcggcggctgtcctttccagttccgaagccgaaaaaagagtctcggtggtagcggacgtcgagtccagctccactatgtacgacttcttggactcctgtttgggtttccaacctgcgggcatgggtgctccgtatggtcccttctttccatcttcaggatcttttcggttcgggttctgccagcagaaaacattccaatgctttttctgacagaatttgcagggtgccggtggttctgtgttggggtccagaaccatcttctgagggccgtcgcaacccttttcggggtttccagttttatgttgagccgtctgcttagggcctttgtcagttccggtcttttgtgacttcttctgagcttctgcagcaccgctgtagcaagggtctcattttctggtgtcatcagagctgaaataaaggcgcaggaagtcttttaatttggtcaggttcatgacattacaggatttgaccatgatttggatgtcgctgggcaattgttcaactattaggtcaaaatgctggtcagcaggacattctatgtttgcccggtcgccgtatgcgaggcgccggagatgagttttgtggtcaatgaacgcgagaaagctgcgaaattctttggggtttgcatggcagcacacatattcggttttgcgcttggactcggttaggggatctcggaactctcgaagcagttcttctttccaccttttccaggtccacgagcgagtttcctgggcttccagagtgtaaaaccaagcgtcggcaggggttttctcggctatcatggctggtaggagctgtaccatcctggcatccgacattgcgctaacattttgaagaagttggactttgttgagccattcttcaatgtcttggtttcttttgcccgtaaactcgggtacgtcctttgctttcaaggaatcgaccttggtgtcgctggcccacggggccgctggcacttggattggaggcaccggacctgaaaaacttggttcggtatgctcccttggtgtgtccgacgtttcccacggggttgcggaccgttctcttgtagctcgtgctatgagaggttgttcaggcagcgggcgatgcactagggcttctaaggctcgtgcgaggcgctcatccgccgctgtctgacgttcggaaagcctatgaagctgttccgtaagattttgagttgccaactgcattgcagcagtcgagcgggcaatgtcttcttttaatgctgccacttcagaggccatcgtggccaagttaggggcttccggttcgacggaagtggtccctgaacgccttgggcatgttgcgggagggacttcaacgtcctccgcaggaccctgactacgagtctggatcacaggtgagcagcctcgcgttggagagcgttcgaccggcatcattctcggtttcgtgaagtctgtttccgaaacgagagaaaaggtttccgagtagctacctgagcggatctcggtttgtgcaagagtttcggtacgaccgaataaggttttcagctgaatttgagaggggaaggcagttcgtcgcacttctccaccatgtaatggattttttgttggtagactacggtaaagacaacttgggtctcctagcaggttgtatgggtgtccgtactaggaatcgtagtctccaaatcctttctttgggcgtcggtagcgacttgagggtgagaggcaaggagagtcggttagtcgtgaaccgagcaggatttagaggcttcggtatgggtgatcaggccattgaagcgctctgttaggttcctgttaacctaagattggagttgagaagtgagttatggggattttgtgtcgctacggcttctgcccgctgacttattttattgaattcctctttttatacaagaatatgctatggtaacatctacactagtttccatagccttcattagggtggcagcgtccgatcttcccatctcggaccatcgccatgatcaatcatggctgtgtaacgtatcctttgcgctgcgctggtgtagcccagaaccgagcttgatctcaggggtttcgaagcttaggttgcaattgcggaaacctcaatcatggtcacctgatgcctttaagcgaaccggtttatcagagtcgttcgctacagagcgaaccggtttatcagagtcgttcgctacaaatcaatgttagatggacacggtagaccaaaagtgttcagcaggggtgttccagccgtagcgtagattagttagattaccttttccgaactggttgtcgccggttcaatccctggtgcgggtgctagtgccaatacccatcggctccgcactatcgaatatgtgatcggatgagcatagaagcgggtttcaaccggcccattgtggttgcaattattcaacaattcctaggccataccatcaaacctggttggacgcacgcactgcaatgttgctgatatcaaatattcgatacgaattggatgcttagtaagccacagtggctcgcgggtggctgccatgtggcaaagcacgaccgggggcttttggggagccgagcgtaagtgtgaagttttcggcctgttgcgtttgcgttttggcgcgtgcccttgacaaaagccatccccaactcctctccgatctgggcttttgaacaggttccccgccccagattttctcttgttctgtttcttgtcttgagccgatttcgtgttaattttaggaaagcatggattgtggacaaagacgacgcgagtggggaactcgtaggacagagcctacttacctagcactatcattacacatctcgctgcccaggatgggtaatgatgctcatggcccatgaggccatgcgtttccgtctactatcgttaggcctcgaagcagtcaaacgccactaaaaagtgggatccccaatccttatagctactctttgacgacaagcacggcgtcagcattttttgacccgagaaaagcaactcgggttccccatttaccattgggtgccgaatctgtgcattatcgtagtagtagacggttaaaaaggaaaggcgaacgtgcctgatgccccgcctgccccctcaattcaaaacgtagaaatcagcgcctaatttgcaagttcggctggtctcgcgtattttatcttgccttgaagcctgttgtccatgtgagttaagaactgtcttaaaaaaactgtagagttggcgtgtttcaaacgcgttgtgggtggaccaagttttaccgtttgacttttatttgtttatatatcttgagatgtcacgacacggacatactattacatatatatact

SEQ ID NO: 757 - protein, 162 aa, Spizellomyces punctatus
  source 1..162: note = 2137..2625, XP_016606083.1, uncharacterized protein CDS
MPPKKKQKLEKLDKPTLHTCNKTSFAKAFLPNYHQRLLDYITIIHQLTNHASHALKFYILSAPTFTVNEETIEAILYLLNKGEAWHPRKEAKKAWRDCLLPYVQWYCQIIGFAHPNLQGEQQSVNYLTASMMMNLKVNVQEHFMQMLLQYINLWLDVKGQKQ

SEQ ID NO: 758 - protein, 97 aa, Spizellomyces punctatus
  source 1..97: note = 2935..3228, XP_016606082.1, uncharacterized protein CDS
MVILYAHILCITRQEAQAIEKVDLWMRICNLCTKAFRSCCDMQFEGSITMDGTSVSVYLKHPEADKYGKHSSGGKKSAKTLEAEVKAVYVENNLPAC

SEQ ID NO: 759 - protein, 219 aa, Spizellomyces punctatus
  source 1..219: note = complement(4585..5244), XP_016606081.1, uncharacterized protein CDS
MATWVKVWIHELYEDPNKPLEHYRGEDWVVDGASKPYATSQPLMMHIAEPYSRASDGGQAAVGIIANAKTIGKRLRDVPCAAWLDAGVPQHVAGNPKMARFTLWPDCEAHDFAEIAIEATRAVLLKLANAAETTEEQLHPKHREHSYYHFQAVNLKRAAEMFTALYVTQANGSKTPGTPAPEATDQIWFCANIMGRTTIIWTINEDSFEADDNYPVVSW

SEQ ID NO: 760 - protein, 143 aa, Spizellomyces punctatus
  source 1..143: note = join(complement(6085..6144),complement(5608..5979)), XP_016606080.1, uncharacterized protein CDS
MKNLAGYESKITPKWLGPVTKPVNGETEEKVTEAQMENSDTPEGEFKVEAIVDHRTRCGKHQFRIHWAGYPPHEDTWEPEEALTEASKALEEYWRSRAPTSALVEDSLVVSFAGDAPAYASDHQCFVVYPDNSSHDNHALSPE

SEQ ID NO: 761 - protein, 188 aa, Spizellomyces punctatus
  source 1..188: note = 12775..13341, XP_016606079.1, uncharacterized protein CDS
MASEVAALKEDIAHSTAAMQLATQNLTEQLHRLSEHQTVADECLARALEALVPLPEQPLIARATREQSATPWETLDTPREHMEPSFSGLVPPIQVPAAPWASDTKVDSLKAKDIPEFMGKRNQDVEEWLNKVQLLQNVSAMSDARMVQLLPAMIAKKTPANAWFYTLEAQETCLWTWKRWKEELLQEF

SEQ ID NO: 762 - protein, 618 aa, Spizellomyces punctatus
  source 1..618: note = 13759..15615, XP_016606078.1, uncharacterized protein CDS
MVPDPNKEPPAPCKFCQKKHWNVFCWQNPNRKDPEDGKKGPYGAPMPAGWKPKQESKKSYIVELDSTSATTETLFSASELERTAAANQGFHTIGFFHSPEHSESTILMTAPLSEVTVTKEEDPRMPTQGWDQVWDNIAIIRGTPQVALMMGDNPRMLSFFAKEPKRGAGHLRNDPYAVAWSSHHLYITAAAKADKDRILQKVREDGTPCLILLAWIRLDKHEKFLMWSSEDPVIFDSYANLQLVAFLLTGNIVHSDYYYHHGNPKFLHVKDHPHLQRHEESERMYIVMLAIKQVARQNKTTKPQNNKSREHFESVIKAMEATINDIMPHFEVVVPSINAFYLVDLGDVLKSQTKTQMQPCWMLAVIAQLWAPVVLDTGACESLVSDTYLGLLFSETDLQDVEMMAFNSIGGRISSTKTVCLETSLRGHGGEYLTFCTYFRVIAYGKPLIILANDILGHLKLQTLVQEPPLPSFVVMLKNPDILIPCSITDELDTDHMHGTPYKTKQGEFMKDVSMPQLTKAKAQKSRLTMLITGQMRVAAQTFLIENPLEATAASSTAPLGLKLSTTTHNLVADPEENISKEEWQTLRNKWNLDSMEKAPGAFEAQLKDAERFHIDLK

SEQ ID NO: 763 - protein, 219 aa, Spizellomyces punctatus
  source 1..219: note = complement(21197..21856), XP_016606077.1, uncharacterized protein CDS
MATWVEVWIRELFEDPNKPLEHYHGEDWVVDGASKLYATSQPLTMHIAEPYSRASDGGQAAVGIVADAKKIGKRLRDVPCAAWLDAGVPQHAAGNPKTARFTLWPDREAHDFADIAIEAARAVLLKLANAAETTEEQLRPKHREHAYYHFRAVNLKRAAETFTALYVTRANGSRTPGTLAPEATDQIWFCANIMGRTTIIWMINEDSLEADDDYPVASW

SEQ ID NO: 764 - protein, 337 aa, Spizellomyces punctatus
  source 1..337: note = complement(27986..28999, XP_016606076.1, uncharacterized protein CDS
MPVERSPTRGCSPVIQTRSQGPAEDVEVPPATCPRRSGTTSVEPEAPNLATMASEVAALKEDIARSTAAMQLATQNLTEQLHRLSERQTAADERLARALEALVHRPLPEQPLIARATRERSATPWETSDTPREHTEPSFSGPVPPIQVPAAPWASDTKVDSLKAKDVPEFTGKRNQDIEEWLNKVQLLQNVSAMSDARMVQLLPAMIAEKTPADAWFYTLEAQETRSWTWKRWKEELLREFRDPLTESKRKTEYVCCHANPKEFRSFLAFIDHKTHLRRLAYGDRANIECPADQHFDLIVEQLPSDIQIMVKSCNVMNLTKLKDFLRLYFSSDDTRK

SEQ ID NO: 765 - DNA, 11855 bp, Spizellomyces punctatus
  source 1..11855: mol_type = unassigned DNA; note = Origin - Fz = 1722..1823, Fz = 8361..8735, Fz = 9316..10710
ctactcggacgtcaagattgccattattggcggatcggggctttatcacttggacaatttgaaggttctcggcgagattaacccggagactccttggggacatccgagcgacaaaatcattatttccgagacgcccgacggccacaagattgcctttctcgcccgacacggtcgtgggcactttttgaatccgagcgaagtgcctgcgcgagcaaacattgccgccctcaagcacattggcgtagaggttatcctcgcattctccgctgtcggctccctccgcgaagagatcaagcccagggactttgttctgccatctcaaattgtggataggacaaagggcattcgaccctcaacttatttcgagaatggtgtaacagcccatgttggatttgctgatccttttgataaagaattgtcggacattatcttcgcccagggtaacgtttgcgaaggggtgacattccacacgaataaaacccttgtctgcatggaaggaccagccttttccactcgcgcagagtcacatatgtaccggtcgtggggatgcgatattattaacatgtctgtactccctgaagcaaagctggctagagaggctgaaattggataccaaatggtctgtatgtcaaccgactacgattgttggaaggaaacggaggaagccgtctccgtggaggccgtcattgcgaacttgggtgcaaactcggataacgcaaagaagctactcttggcagtcatcccagctgtgaccaaggctttggacgcaggagagctcaaaagtgtggcggcgttgcaaggtgcgaacaagtacgctgtcattacctctaaagaaaagcgcaacgcggagcaactgaagaaattggagtatcttctccctggctattttatttgattgtctagtgtagagtgattatgtagattcgatagaggcagctacccttcgatcgaagctagatgacttttactttcatcgtcataagaatcattgtaatattaacttttaccgtttggattgcctcaacataaaggccaaagagaatcttgactggaaagactttgtgcctcccatgggacttgacaataatgccacccgcacaaacaacatctgtaaattacaaaccttttgatcgaatgaccatataataaagaatccgatatttcgttcattactggctggttgagttgaccactatgaaagaagaaccagggttcttcctatgcggattgtctgttggtgttcgaaaacctaactggagagctgccatgaaagcagaaaaggagccacgccagggcgatcaaagtctggcgggcatagtctaagaacgcgtcgcaacatagtgcggagccggtgggtattggcactagtacagtgattccaaccaattgaatcataattttactcgatttagactcatgaactatgatttgataatggttcgatgcacaaacgatgctccaccattgaaaaacgggtccaatatgtgcggcaatgaacggattgaatattctgcagttgctccaccattgaaaaacgggtccaatgcgcagttgtcatatctctatataaacccgccttctctgcccatttcccaggttttcatcattctctgccgataggctttcatcattctctgcccattttccaggctttcatccatttttctattccaatcatcatgccgccaaagaaaaagcaaaagcttgaaaaacttgacaaacccaccttacatacctgcaacaaaacttcctttgcaaaagctttcctgcctaatgagacctaccaccaacggcttctagattacatcaccatcatccatcaatgtaacaggctagcagggacaagaagacaacagaaaactagggaagacttggttactcttgttattctcctttgaggggcctcagagaggtcctctttttatagacaaaggggctgacaaatgctatatcctaactacccaatcagatctcacccacatcatcctaaactatttgtcagcctattgcaccatttgcaaccaatcagaactcatacatgtcatcctaaactatttgtcagcctattgcaccatttatagccaatcagaagtgagacaagtcatcctaaatacactgtgccacttgattgaaaggggcagatgccagtgtgtcagaatactcatctaatttagccagaaatggctaaatctgcttatttatctaattctggtcaaatgaatgctgacaccatcagcaaagtcatgtgcccactagtttggaaccacatctaaccagtataaccatagcactgacagaagaattctgtcacactcccccactttaagattaagctcccttctgggctaggaactccttcaagatttctctgccatggggtaggaggttttcttctggttcccaggtgttctgagaggagggatagcctttccacttgatgaggtagagattcttcttccttctggtcttgtggtcaagaatcttctcaacttcccaaaactcttctccttgctggataattggctcaggctcagggggtactggtctggtagggaagtcctctgtggggtccaagtaaggcttgaggagtctcacatggaacactggatgaatcttcatggtgctggggagctccagggtgtaattctgaaattcatccttggccttgattctgtaaggtccaagccaggggtgaagaagtttctgggctggcctctgggcttcttcttctggggtgataccttctctagacagccaaactttggagcctagggggtagcttggggccttgctgagagacttgttggcttgctgaacttgtctttcttgggccagtatcatgttatccttggctacttgaagcagttgctgaatatactggtggaagtctgttgcttcaagatcattgctttctcctggtggtgttgctggggtcctgggatgccggccattctccaagtagaatggggtagagcctgtggtttctgagatactgttgttgtaggtgaactcagcaaaggggagaagatcttcccaattcttcatgttgtactgcaggaaagctctgaggtaaatcttcaaagtcttgatggttctctctgcctgtccattggtctgctggtgccttgcagtggctaggagggtgttgcagcctaagagttgcatcaagttggaccagaatgaactggtgaacttggtgtctctgtctgatacaatcacttctgggaggccatggtgcttgaagatgtgcttcaagaagagcagggccaggtccttggctgaggctctggtggtggtagggatgaagtggcctctctttgacaatctgtcaacaatgacaaagatggcattgtgatcagaggaagtcataggtaggtcagggatcaggtcaatggagatctggctccatctggtcttaggtactgggaggggctgcagcaagcctgctggtggttgctgactaggtttgcttctctggcaggaatcacaagacttgacatacttcttaatgtccttgtacatccttggccagtagtaatgccttgctagggcatcatgggtcttggtgatgccaaagtgtccagcatattgagtgtcatgggtttcttggagtaggctcaaccttaggtctgggtcactaggaacaaagatcctgtcctggaaatagagtaacccatcctgatggctgaggtacttgagcctttgttgctggtcttctggtctcctggggtcatccaaagcttggatgagctcttgaagttctgggtcttctgtggtactggtcttcaatctctcttgaagggtgctggtggtgtgggtcacagcattcaactctgctgtcaccaaggccttgcacttgatgcatcttggggccaggtctggtcttctagacaggatgtctgccactgtgtggagtcttcctgggccatagccaatctcaaagtcaaaagattggaaattcatgacccatctggcttgtcttctggtcaagaagggctggttctgtagccacttgagggactggtggtctgagataactttgaagggggttccttccaggtagggcctccaaactctgagggcatcatggatggctaacagctcttgttctctggtgtcatatctggtctctgctggagccatcttcctggagtggtaggcaactggtctcatgcctttcccatcatcctgtccaagccatgctccaactgcatagcctgaggcatcagggaagacagtggtaggcaaggctgggtcaaagggtctgagtacaggggctttggtgaccatatccttcagctgctgaaaagctttctcctgaggttcagaccaggtccagggcttgtcatttctcaacaggtctgtcaatggtgcagcttgctctgccaggtcctccagaaagctatggaagtagttcaccaggcccatgaactgtctgacttcagtgacactctgaggggtgggccattcttgaacagtctgcactttcttgggatcaagcttgactccttcatgtgagactacatggccaagaaactctacttcttgcttgaggaactggcacttgctggggttggcatacagcttgttctgcctgagggcttgcagaacctgcttgaggtggtccaggtgatcttctggggtcttggagtagatgaggatgtcatctaggtagacaataacaaagatgtccaagaagggtctaaggacatcattcatcaaagtcatgaaagtggctggggcattggtcattccaaaggacatgaccaggaactcaaagtgaccatatctggttctgaaggctgtcttggggatgtcttctgggtggactctgatctggtaatagcctgacttcagatctagcttggtaaacacctgggctccattcagcctatccatcagctcatcaatcctagggaggggatatctgttcttgatggtgattttattcagagccctgtagtccacacacatcctcaaagacccttctttcttcttaacaaagaggataggtgctccaaatgggctcttggatggtctgatgtggcctgcctccagaagttctgaaagctgcttcctcagttcttctaactnnnnnnnnnnnnnnnnnnnnnnnnnnnnnnnnnnnnnnnnnnnnnnnnnnnnnnnnnnnnnnnnnnnnnnnnnnnnnnnnnnnnnnnnnnnnnnnnnnnnnnnnnnnnnnnnnnnnnnnnnnnnnnnnnnnnnnnnnnnnnnnnnnnnnnnnnnnnnnnnnnnnnnnnnnnnnnnnnnnnnnnnnnnnnnnnnnnnnnnnnnnnnnnnnnnnnnnnnnnnnnnnnnnnnnnnnnnnnnnnnnnnnnnnnnnnnnnnnnnnnnnnnnnnnnnnnnnnnnnnnnnnnnnnnnnnnnnnnnnnnnnnnnnnnnnnnnnnnnnnnnnnnnnnnnnnnnnnnnnnnnnnnnnnnnnnnnnnnnnnnnnnnnnnnnnnnnnnnnnnnnnnnnnnnnnnnnnnnnnnnnnnnnnnnnnnnnnnnnnnnnnnnnnnnnnnnnnnnnnnnnnnnnnnnnnnnnnnnnnnnnnnnnnnnnnnnnnnnnnnnnnnnnnnnnnnnnnnnnnnnnnnnnnnnnnnnnnnnnnnnnnnnnnnnnnnnnnnnnnnnnnnnnnnnnnnnnnnnnnnnnnnnnnnnnnnnnnnnnnnnnnnnnnnnnnnnnnnnnnnnnnnnnnnnnnnnnnnnnnnnnnnnnnnnnnnnnnnnnnnnnnnnnnnnnnnnnnnnnnnnnnnnnnnnnnnnnnnnnnnnnnnnnnnnnnnnnnnnnnnnnnnnnnnnnnnnnnnnnnnnnnnnnnnnnnnnnnnnnnnnnnnnnnnnnnnnnnnnnnnnnnnnnnnnnnnnnnnnnnnnnnnnnnnnnnnnnnnnnnnnnnnnnnnnnnnnnnnnnnnnnnnnnnnnnnnnnnnnnnnnnnnnnnnnnnnnnnnnnnnnnnnnnnnnnnnnnnnnnnnnnnnnnnnnnnnnnggttctctggagttctggggttctcaggggtcctgggattttctgggtttctggggttctctgggattctgggattctctgggtttctggggttctctgggatgctggggttctctggggttccaggtaaagtccatggatagttaaagtctcaggggtggtttcaggtgggtccaataggtccaagggttgaataaaggagagtgtaccaggtggtgggtgtcagggtggtggttcttatatcttccccagtagaggcagaacctctatcttctactgagtctgcttgccatttccctgctgcttggtcttcaaggggcagaggggggcaatatggcctggttttctgcacctgaaacaggctcccttctttctgagctcagtcttctcagcctcagtgagtttggagagaggcttcccagagttggtggatatactatctatctccatagggactactccagagttctcagtcttgggggagtagtagctggtggcctggcttcttctctggtagctgaactggatctggtcaatcctatcagctgctgctgcagctgtggctaagttgatggtactggtggggttgagctccagttgttcctgaaccctgggtttaagccctctgataaacttgtctaacttttcagcttctgacaagtcatccacctgaaggcataaagtattgaactggtttaggtactcctttactgagccttgttgtttgagcctggccaactggtctcttgctgctctggtggcatttgctgggaggaagttctcttgaagggctctcttgaactggtcccaagactggattctgagaggggatcctactgggtggttcttgacatggctttgccaccagacttcagcatggagttccaagtaggtggtggctactaacagttggccttctggtgatagatctgcagctgcctggaagtactcttcaagtctgaggnnnnnnnnnnnnnnnnnnnnnnnnnnnnnnnnnnnnnnnnnnnnnnnnnnnnnnnnnnnnnnnnnnnnnnnnnnnnnnnnnnnnnnnnnnnnnnnnnnnnnnnnnnnnnnnnnnnnnnnnnnnnnnnnnnnnnnnnnnnnnnnnnnnnnnnnnnnnnnnnnnnnnnnnnnnnnnnnnnnnnnnnnnnnnnnnnnnnnnnnnnnnnnnnnnnnnnnnnnnnnnnnnnnnnnnnnnnnnnnnnnnnnnnnnnnnnnnnnnnnnnnnnnnnnnnnnnnnnnnnnnnnnnnnnnnnnnnnnnnnnnnnnatgttgcagtcaagatagggtgggtcacaggcccaagagtatgcaatgttacttgcagtcaagatagggtgggtcacaggcccaagagatgcaatgttacttgcagtcaaaatagggtgggtcacaggcccaaaatatgcaatactacttgcaagtacaactggtggggaggatacagggggactctacagcttcttcacaatcccacaatagaaaagctctatctgttttatcagagcttctgatgctaaccaagtggtgtgtctggtggtagttctggaggttgtgctgggggtaggtttgtggtatgggatggtgtgggctggtctgtaggagtccttgaggggggttctgggcataagttgggtctgggataagaggcaggggtcttctgatattactcagaaggactaaggctgggtctggggtctggggtctgttggtcttctgatattactcagaaggtctagggcaggttctgggggtctggggatcttagcttctgatctctcacagaaggtctaagagtctggggttgttgtctaaggtggtgctaccatgtaacaggctagcagggacaagaagacaacagaaaactagggaagacttggttactacttgttctccctttgagcggcctcagagaggtcctctttttatagacaaaggggctgacaaatgctatatcctaaggggcctcagagaggtcctctttttatagacaaaggggctgacaaatgctatatcctaactacccaatcagatcacatgtcatcctaaactatttgtcagcctattgcaccatttgcaaccaatcagatcttgtacatgtcatcctaaactatttgtcagcctattgcaccatttatagccaatcagaagtgagagaagtcatcctaaatacactgtgccacttgattgaaaggggcagatgccagtgtgtcagaatactcatctaatttagccagaaatggctaaatctgcttatttatctaattctggtcaaatgaatgctgacaccatcagcaaagtcatgtgcccactagtttggaaccacatctaaccagtataaccatagcactgacagaagaattctgtcacaatcaacttgccgaccatgcttcccacgcgctgaaattctatctcctttcatcagcgccagtttttcccacagtaaatcaagagacgattgaagccatcctctatcttctcaacaaaggtgaatcatggcaaccaaaaaccggtgcgaagaaggcattacgcgaatccttgttgccatacattcgttggtactgccacatcgttggcttcgttcatccaaatctacaaaaagagcagcaatcagtcaattacctgacagcaagtatgatggcgaatctgaaggtcaacatccaggaacacttcatgatgatgctgctccggtacattaatctgcggctcgacgtgaagggacagaagcagcgactgccactgaaaagtgtaacaacgaggacgtcttcgagagatcgcgagtaagcccaaatcggacgcaggaagcatgaatcgcgtgaccaactccaccgattgggttaccgtgaccgaaaaaaccagttcagagaatggcaattggcgcattagatttcagcgtgccttgtacaacctgtggaggcccgagccagtgtggaaaaggaagagattggtaccgccaccaataaatcagttgcggtgcagtgacacccattagtttagtttagtttaacagtttatccaagaatcttgtataaaaaggatgtattcaataaaataagtcaggggcagaagccgtagtgacactaaatccccataactcgcttctcaactccaatcttaggttaacaggaacctaacagagtgcttcaacggcctgatcacctgtactgaagcctctaaatcctgctcggttcacaactaaccgactctccttgcctcttgcccccaagtcgctaccgacgcccaaagaaaggattcggagactatgattcctagtacggccacccacataacctgctaggagacccaagtcgtctttaccgtagtctaccaacaaaaaatccgctacaaaagcgatgcgcggaaagctttctttgctcgtcttcactacttgaagtcggttttccttttcaaaaccatgccagaatcgctggatgacttgactgctgaagagagtgaacttctagaagagatttggtcccttaacattcccctttctgacgaccagccactcgcatattccgttgctgtagaccctctcgtgttctttcctgcatactgtcggttgtcaagcctatatgaaaagcatggatttcgacagttcagtgcgatacctctgtgccgctcgctcattcaaagtcacgtgcgaatggacaccatcatcctgtaccagcatatcctttgcatcacgcagtgagacacagaaactgtcgaaaaggatgatctgtggttgcgcgtctgtaatctgtggaacaaggcttttagatctcgccacggtatgcagtttgaaggctcgatcacgacggatggaacctcagtgtctgtatacctaaagcacccagaagcagacaagtatggaaagcgcagagcgagaaagtcagcaaacatggtggcagcggaggttaaagtgcaatacatggagaaaaacttacctgcttgtcgagcagcagagaatgtcgtcgttatcgacccaaacaagcacgatattctctactgccaagacaacagtggtatgacatttcgctacaccgccaaccagcgagctgtggagactggaagccgtcgatttgcaacagaacggcagcagatgaagaaggaagcgggaatggacctcatagaatcacgtatccctagtcacaagacaatgaacctcatggacttcatgcgctatctccttgttcggcgcgctgattgggatcgtcaaaaggacttctattcgcatcctgcccacacgtggtggaagtggcatgcatttataaaccgtcagaagagtgaatcgaacctcatatccaacttacgcaacaagtacggtgaaaactttaccattgtgatgggagattggagcgatgccggttgaactgcaagatttcagacctcatcaaagacgaaaggttggcgcaccctctttaagcgcaacaggatcaactgcttccttctcgacgagtataaaacctcatctgtctgccctcactgttcatccgatgacttccttgaaaaaggtttcaaaacacgacctcattcaagaccttggcgacgacgagaaggcaagattgaaaaagtccatggattgctgggttgtaccaaccctaactgtcagcaagcctggacgatgcgctactggaatcgagatacgctgagcacctgcaatatgctgataatcgtgcaatcaatgttggatggacacagtagaccagaagtgttcagcaggagtgttccagccgtagcttagattggttagattaggttttccgagccggttgtcgccggttcaatccctggtgcgggtgctagtgccaatacccaccggctccgcactagcttgtccttgcaacttaagtcatccgccacttttcaacaaacgatggcttccgaaacgattcccgcccgcttcggccatatccggcgttactttgcgctcttcctcctccttactgtgattattggtgtgagcgcatacgaggacactgttccgttgattctatggagtggcaaaaagtagccgtcatggtgctccctgtccgttgaacctgcaccttacttgagtcgtctatttcttttccagattttcagttccaagtacctcctccatactccggagatcagacttgtcgccagtgtttggaaacgtcggttgtcggaaactgaatgtggtctttgaacagaaagatgtgcgcatgtcgtgtatctgtcgctactcccctgctacatcatttaacacaaacatttatatagcttcacgccttggatcttcctcatttgtctcccgcaaccaaaaagttgaaacgatcagtagactctgctccttcgagcctcaaaatatcatttgttgcggccgcaaatgatgtgaaagatgtcgtggaacatatccaggatgcatgccagaaagctgggcaggaggctgtcgttctgaaaattggagaaggtatgatcgaccacggagggagaaataaaactatcaagataataacgcatgtttggtccctaatacagatgggtcggtacctgatctcagtgatggaaaaagttacatcctggtcgctagtttgaagcctcttcgcgccgcttcagcagcagaacacgtcgagacaatgaccgaaaatgacaacgttatcgacaaggtgctgaccgacatcaccaagctggaacaagacgattggacagctgtgtttaccggtgtatccaacccttcggtgcgtccacgctgtttggttgatgtattgttacctgtagactcaccagtgcatacgcaattacagacgctgcgaaagcgagctactcaagccacccccttgccatggagcaagcgccccatcttccagaaatacgtgtttttcaatcaaggtctcttcatgtgcattttcgcgatggtgc

SEQ ID NO: 766 - protein, 297 aa, Spizellomyces punctatus
  source 1..297: note = <1..895, XP_016605023.1, methylthioadenosine phosphorylase CDS
YSDVKIAIIGGSGLYHLDNLKVLGEINPETPWGHPSDKIIISETPDGHKIAFLARHGRGHFLNPSEVPARANIAALKHIGVEVILAFSAVGSLREEIKPRDFVLPSQIVDRTKGIRPSTYFENGVTAHVGFADPFDKELSDIIFAQGNVCEGVTFHTNKTLVCMEGPAFSTRAESHMYRSWGCDIINMSVLPEAKLAREAEIGYQMVCMSTDYDCWKETEEAVSVEAVIANLGANSDNAKKLLLAVIPAVTKALDAGELKSVAALQGANKYAVITSKEKRNAEQLKKLEYLLPGYFI

SEQ ID NO: 767 - protein, 192 aa, Spizellomyces punctatus
  source 1..192: note = 9763..10341, XP_016605024.1, uncharacterized protein CDS
MQFEGSITTDGTSVSVYLKHPEADKYGKRRARKSANMVAAEVKVQYMEKNLPACRAAENVVVIDPNKHDILYCQDNSGMTFRYTANQRAVETGSRRFATERQQMKKEAGMDLIESRIPSHKTMNLMDFMRYLLVRRADWDRQKDFYSHPAHTWWKWHAFINRQKSESNLISNLRNKYGENFTIVMGDWSDAG

SEQ ID NO: 768 - protein, 248 aa, Spizellomyces punctatus
  source 1..248: note join(10846..10979,11047..11152,11217..11406,11475..11674, 11741..>11855), XP_016605025.1, uncharacterized protein CDS
MASETIPARFGHIRRYFALFLLLTVIIGVSAYEDTVPLILWSGKKFSVPSTSSILRRSDLSPVFGNVGCRKLNVVFEQKDLHALDLPHLSPATKKLKRSVDSAPSSLKISFVAAANDVKDVVEHIQDACQKAGQEAVVLKIGEDGSVPDLSDGKSYILVASLKPLRAASAAEHVETMTENDNVIDKVLTDITKLEQDDWTAVFTGVSNPSTLRKRATQATPLPWSKRPIFQKYVFFNQGLFMCIFAMV

SEQ ID NO: 769 - DNA, 21390 bp, Spizellomyces punctatus
  source 1..21390: mol_type = unassigned DNA; note = Origin - Fz = 2204..3538, Fz = 18980..19504
aacggggtgcaaccaccgtcacgaccgatctctcgtattccctcccgtgcgtcctctcgcgcatccattacatcggatgctccctccgaagcctccaatacatcccgaagaagtgttattggacggcacacatctccgcgagcttcgcagtctcttcgatcatctagtggtagagttactccaaccagagtgtcgacgaccaatctgaatggtagggcagtcaagtacgcagtgtttcaacagtgccatttctgatcccatatcttgttgtgtaccgcagcaacaataacgttaccaactgttgctgcacagcagcatttgactaccagccccattccaagggcacccattacaggagcgggaaggattcgtgctccagcccgaccggggtctgcaagtagcgttgcctcatctagacgctccagtgcaaactctacggcagaaagatagataatggctaattgcgtggtgtataaattggtattgtgcgtcttcaaagtatgctgtaaaaattgtaaaatgaaagactcggacagtggttacacttcaccgtccaacttgaattgaagattaagaaagatatcactatatcatgaaccacctgttgtagccagcattcagcgagcttgttttaaacccgtgctcgtaacctgaagatcttcagcgaggactctgatgattactttcactttaaaaggacacagcaacagcactttagctgactgcgaaactgaatactacggtgcacagacggtaaaacagtgcaccactatcggccagcggaattatggatttggaaaggcaaaaccaccaaagaaaatctctagagtgtgatcggaatcgggccatgaagaagatgcgtcagcaggcatactggaaaacaatgagttcggcggccagttttcacagaggaagcccatcagagaagaatggaacagccatcaaaggagacgagctcaacacggcctaaagattatggagaacgtaaaagccgacgatggaaggtcgatatctggttgcagatggccagagattattacctgttctgcaggttctgcaagcgtccgacccctgccaatcacacagtttgcaccaacgagtatttctgaaaagcgggagttcgatgtctgcgaactatggcactataggcaaacactggctctgtccgtcgtgtcagcaaattctcacttaaataaggtgagattggatatcgtctgaagtacactatctcatatgagcttgtgtgggcactcaatttgacgaataattatacagaatatgtgaatgtgaatattgaaaattgccattcaaggttgttactttttgtgcgatatgtcaagctaacgagactgtcgttctacagtggcatttttcggacaaatatttgcgacaacgttctgagtttccgctcttgtacagatggatgaatatatcgagcttgagcttcgaaagcgatacgaaacttaagaaagtataagtggctggagcgtctggcagcctaaccacctcgggccatgctatgcacccgtctgatcaaggcacgattgcacccgacactaaaatgcatcatggtgaccccttctattgaacacttaaaagtttccgggaaggaaaacgccaggtgaaaatgcttgtacaaaatactcaacagctttccataaactgggaaaattacagaaaatggtctgagaacatccgttatataattcagagatataaccaaaaagactgtcgatatactcgctaacattgcttgcaggtttaggaccaatccgcgtagctaagcacttgtttgggagacagcacgcaaaaaggcctataactcctacatagtgcggagccggtgggtattggcactagtacagtgattccaaccaattgaatcataattttactcgatttagactcatgaactatgatttgataatggttcgatgcacaaacgatgctccaccattaaaaatgggtccaatatgtgcggcaatgaacggattgaatattctgcagttgctccaccattgaaaaacgggtccaatgtgcagttgtcatatctctatataaacccgccttctctgcccatttcccaggttttcatcattctctgccgataggctttcatcattctctgcccattttccaggctttcatccatttttctattccaatcatcatgctgccaaagaaaaagcaaaagcttgaaaaacctacttgcttacatacctgtaacaagacttcctttgcaaaagctttcttgccaaacgagatctatcgccaatggcttctagattacatcgccatcatccatcaactcgccgaccatgcttcccacgctctcaaattctacatcctatctgcaccaaccttcaccatgaacgaggagaccatcgaagcaattctctatcttctcaacaagggggaggcttggcatccaagaaaggaagcaaagaaggcatggcgggattgtttgctgccatatgttcaacggtactgccaaatcatcagcttcgttcacccaaatctatgaggtgagcagcaatcagtcaattacctgacagcgagtatgatggcgaacctgaaagtcaacgttcaagagcatttcatgcagatgctccttcagtatatcaatctgcggctcgatgtgaagggacagaagcagcgactgccaccgaaaagcgatgcacgaaaggctttctttgcttggctacgctacatgaagtcaattttcctttttgatatcatgcccgagtcgcttgatgacttgactgctgaagagaatgaacttctagaagagatttggtcccttaacattcccctttctgatgaccagccactcgcatattccgttgctgtagaccctctcgcattctttcctgcatactgcaaactctctgggctgtatgaacgacatggcttccgtcggttcagtgccattccactacgtcaatccctcatccaaagccatgtgcggatcgacaccatcatcctctactctcaccttctttgcatcacgcgacgagaagcggaaactgttgaaaaggtcgatttatggttgcgcgtctgtaatctgcggaacaaggcttttagatctcgtcgtggaatgtgttttgaaggctcgatcaccacggatggaacctcggtgtctgtatacctaaagcacccagaagcagcagacaagtatggaaagcgcggagtgagaaagtcagcaaagagtttagaggacgaagttaaagcgcaatacatggagaaaaacttacctgcttgtcgagcagcagagaatgttgtcgttatcgacccaaacaagcgcgatcttctctactgccaagacagccttggtactacattccgttacaccgcaaaccagcgagccatggagacaggtagccgccgaattgcaagggagtgggaagcaatgaaagccggcggtattgacctcatagaatcacgaataccatctcacaagacgatgaacctcatggactttactcgctaccttcttgtttgccgcgctgattgggatcatcgcaaggagttctactcctgtagcgaacgactctgataaaccggttcgctcaaaggcatcaggtgaccacgattgaggtttccgcaattgtaacctaagcttcgaaacccctaagatcaaactcggttctgggctacaccagcgcagcatgaaggatacattatgcagccatgatcgatcatggcgatggtccgagatgggaagattggacgccgccaccctaatgaaggctatggaaactagtgtagatgttaccgtagcatattcttgtataaaaagaggaattcaataaaataagtcagtggccagaagccgtagcgacaaaaaatccccacaactagcttctcaaccccaatcctaggttaacaggaacctaacagagcgcttcaatggcctgatcacctgcactgaagcctctaaatcctgctcggttcacaactaaccgactctccttgcctctcgccctcaagttgctactgacgcccaaagaaaggatttggagactacgattcctagtacggacacccacacaacctgctaggagacccaagttgtctttaccgtagtctaccaacaaaaaatccattacatggtggagaagcgcgatgaactgccttcccctctcaaattcagctgaaaaccttattcggtcataccgaaactcttgcgcaaaccgagatccgctcaggtagctactcggaaaccttttctctcgtttcagaaacagacttcacgaaaccgagaatgatgctggtcgaacgctctccaacgcgaggccgctcacctgtgatccagactcgtagtcagggtcctgcggaggacatcgaagtccctcctgcaacacgcccaaggcattcagggaccacttctgtcgaaccggaagcccctaacttggccacgatggcctctgaagtggcagcgttaaaagaagacattgccagctcgactgctgcaatgcagttggcaactcaaaatcttacggaacagcttcataggctttccgaacatcagacagtggtggatgagcacctcgcacgagccttagaagccctagcgcatcgcccgctgcctgaacaacctctcatagcacgagctacaagagaatggtccgcaaccccgtgggaaacgtcgcacacaccaagggagtgtaccgaaccaagtttttcaggtccagtgcctccaatccaagtgccagcggccccgtgggccagcgacaccaaggtcgattccttgaaagcaaaggacgtacccaagtttacaggcaaaagaaaccaagacattgaagaatggctcaacaaagtccaacttcttcaaaacgttagcgcaacgtcagatgccaggatggtacagctcctaccagccatgatagccgagaaaacccctgccgatgcttggttttacactctggaagcccaggaaacttgctcgtggacctggaaaaggtggaaagaagaactgcttcgagagttccgagatcccctaaccgagtccaagtgcaaaaccgaatatgtgcactgccacgtgaaccccaaagaattttgcagctttctcgcattcattgaccacaaaactcatctccagcgcctcgcatacggcgaccgggcaaacatagaatgtcccgctgaccagcattttgacctaatagttgaacaattgcccagcgacatccaaatcatggtcaaatcctgtaacgtcacgaacctgaccaaattaaaagacttcctgcgcctttattttggctctgatgacaccagaaaatgagacccttgctacagcggtgctgctgaagctcagaagaagtcacaaaagaccggaactgacaaaggccctaagcagatggctcaacataaaaccggaaaccccgaaaagggttgcgacggtcctcagaagatggttccggaccccaacaaggaaccaccaacaccctgcaaattctgtcagaaaaagcattggaatgttttctgctggcagaacccgaaccgaaaagatcctgaagatggaaagaaaggaccatacagagcacccacgcccgcaggttggaaacccaaacaggagtccaagaagtcttacatagtggagctggactcgatgtccgctaccaccgagactctttttttggcttcggaactggaaaggacagctgccgctaatcaaggattccacaccattggattctttcattcacccaagcacttggaatcaacaattttgatgaccgcacctctttccgaggtcatggagactaaggaagaggacccccgcatgcccatgcagggctgggaccaagtctggaacaacatagccatcatctggggcaccctgcaagtggctctgatgatgggcaacaacccccgcgcgctcagcttctttgccaaagaactgaagcaaggcgccgggcacctcgggaacgacccctacgcagtcgcgtggagttcccaccacctctacattgctgccgcagccgaagctgacaaggatcgaatcctgcgaaaagtccgagaagatggtacccctcatttgatcctccttgcctggataaggctcgatgagcatgagaaattcttgatgtggagctccgaagatcctgttatctttgattcttacaccaacctgcaactggtggcatttctcctgacaggcaatatcattcgctcagactattattatcatcgcagaaaccccaaatttctgcacattaaagaccatccacgtctccaaagacacgaagagagtgaatggacgcgtatagtcatgctggctatcgaacaagttgctcgccagaataaaacaacaaaaccacaaaacaacaaatctagagagcactttgagagtgcgatcaaggctatggaagcaacaattaacgacattgcgccccatttcgaggtcgcggtgccttccatcaacgccttctacttggtagatttaggcaatgtactcaaaagccagaccaagacccaaacgcagccttgctggatgctagccatcatcgctcagctctgggcacctgtggtactagacacaggagcctgcgagtctctggtttctgacacataccagggccttctgttctccgaaaccaatttgcaggatgcagaaacgatggctttcaaaggcattggtggatgtatctcatctaccaagacagtatgcctcgaaacttccctcagaggccgcggaggagaatacctgactttccgcgcctatttccgagtcattgcatatgggaaacctctcatcatcctagccaacaatgttctgggacatttgaaactccaaaccttggttcaggaacccccgttacccagtttcatggtgatgctcaagaatccggacatccttatcccttgctccataacagatgagctggacactgatcacatgcgcggcacgccatacaagaccaagcagggtgaattcatgaaggatgtgtcaatgccacagctgaccaaagccaaagctcagaagtctagattaaccatgttaatcacgggacagacgcgtgtggcagcccaaacttttctcatcgaaaaccctcttgaggccaccgctgctagctcaacggccctgttaggcctcaaactgtccaccgcgacccataattcggttgcggaccccgaagagaacatttccaaagaagaatggcagacacttcggaacaaatggaaccttgactctacggagagggctccaggggccttcaaagcccaattaaaagacacggaacatttccacgtcaatctcaagcaacccaaacccgtggtctgggccctaatcaacattctacgacacttccatcaagccttcagctatgagggtcatctcatagggaactacaccaagattccttatgcacctcgatttatctcggctccgccacccctttcgaggccacggtcgtactctccgttggagcggacagcccttgagacggagcgagacaccatgatggggcttcagaggtggaaacgaaccaccaaagtaaccttcgccagcgatcctgttatcattcgctatgcagacaaacccccgcgggtagccttcgactatcgccgagccaatgactgcatggcctgggacccatatccctttcccatcatgctcgacatcctgaactggatcgttgcagtcccattccgatacatatcgggaggtgacgcaaacaaaggattttaccaaatcgccatcaccgatgcatcggtacgcaaatggctcgtgatcagactccatgacggcatctacgaaccactctttatgcccttcggacccaagactgccccttcgcacttctgtcaggtgatggacgacaccttgggtccctccaaatggtgaaatatcaacaactttgtcgatgatatccacacacgagcggagacagccgcggaagccctagatgccatcgcggactggctcaactgcttttccagagccaaactcaccctaagactcgacaagtgtcaatggctctttcaccagctcacggctctcggtttcgttgcctcctctcagggtctcgctaccgatccagacaaggtcgcaaccatagtcgattggccacgacccaaattcataggtgacctatggtcctttgtgggtctcctagggttctacgcccaattcatcccccgctacgcggaactcgtccgacccctgcaagacactatccaagagggcgttcgcgaatactgagaccttaaaaagggtcgcgctgacccaaagaaaggtgctgaaaagctcaattcaccatccatgctcgacacggcggtggcccctacaatcacagccactggagcccgatttgaggtttcgcaacatccgaaatctagctcctcagacctaccggcagtcaatctatgccaatcatcgttggcggacttgcccattgaccccttttgtgtcagatgccttgctcgcaagcgccccgaccaaggtctgcgcagatttatcgcgaagcgtgaagtttcatggaccgattcccgaaactctgcctttgcagctgccaagcaggctctgacaacagctccagtgcttgtggcacccagaaaagggttcccctacacccttcacagtgacgcttcctacacagcatttaatgtcacgctcaaacagttacagccagatgcttctaaacgcccactgtgctaccattcccgaggcaccaccacctcggaaaagaaggcccccccccgtcaaactcaaggccggatgcctcatttggggcctcggaaaactccgcccatacctcgaaggcctgcctttcacggtcattaccgatcaccgagctcttttgtggctcgctaaatacaaaggcgagaaccgtaagcttctccgctgggccctcgatcttagttactggtccgaatggatgacaatcattcacaaaccaggacgttttcacattgtcgctgatacactttcacggctactaggagcggaaaccctcctctgctccaccgcgacccaaatatgggtggcggaacacggaagacgacggctgcgcaccacaccagcggctctcgcaccttcctcaacactggcagatgccgccttccgtctggcattacagcctgcactcattgccgccatccgtgctggcctcaccggccagctccaccccatagcccaacaggcctgcacgctcctatgggagaccagccccaacacctacactacagccgacgcgcgctttcttcaggactggcaacgtgcagataacctgctgtggcaccatttttcagtctccgaagacctttggcgcctctacgtgccccctgcttgcacccccaaggtgcgcaagctttttcacgaggggggaggacacttcagattcgaaagaacctatgccagagccgcagcgcaagtctggtggccaaagatggcacaagatttcagaaaacactgcgcaggatgtgaaatctgtcaacactcaaaaagggtaccgcaactgattccggggttgctgaaacccataccaccagctccgggacactggacagtcatcacgactgactttgtaaccaagctcccacttacttccagagggtacgacgccttttggctaatagcatgtaaatgctcaaagaggatccatgtatggcccctcaagagcaccgcgacagctattcaggtcgcggaactctttatagaatgctatgtcccattgcacggcattccagagactattatctcggaccgcgaccccaagtttacgagtcaattttggcaggaggtctgcaaaaacctaaagattaatcaagagctcaccacagcctaccaccctcaaggtgatggacaatcagagagagacaacgcaacggtcttgcaggtccttaccacagtggtcaacacccaattagacgactgggacacctttcttccggttgcggaattcattatcaacgatacggtacacgaggcgacaaaaatgacgcgattcagaatggacctaggctatgagccccacaatccactggcggatattgtcaaaaggccatcagaaaccagaaatgcagatgcggaagagctctgtaaacacctcggtgacctaaacatccttatccaagatctgatgatcgaagcccaggattcgcagaaaagatattatgatttatcgcgacgacatttggagttccggagaggagataaggtgcttctgagcacaaaaaacctagcagggtatgagtccaagatcgctccgaaatggctgggaccagtcacagtgactgactgtaaccctctccgtgacaactacaagttaaaactgccagacaagatgagacgacttcatccatggtttcacatattgaaattacatccgtaccagaagcctgtcgacgccaaaactgaggaaaaggtcgcggaagcacaagcggaggattccgatgcttcagagggcgagtttgaagtggaagtgatagtagaccatcgaaccaggtgcggaaaatgtcaatttcgaatacatttgtgacagaattcttctgtcagtgctatggttatactggttagatgtggttccaaactagtggtcacatgactttgctgatggtgtcagcattcatttgaccagaattagataaataagcagatttagccatttctggctaaattagatgagtatcctgacacactagcatctgccccttttaatcaagtggcacagtgtatttaggatgacttctctcacttgtgattggccataaatggtgcaataggctgacaaatagtttaggatgacatgtacaagatctgattggttgcaaatggtgcaataggctgacaaatagtttaggatgacatgtatgagttctgattggttgcaaatggtgcaataggctgacaaatagtttaggatgacatgtatgagttctgattgggtagttaggatatagcatttgtcagccccttttgtctataaaaagaggacctctctgaggcccctcaaaggaaaaaaataacaagtagtaaccaagtcttccctagttttctgttgtcttcttgtccctgctagcctgttacatggtagcaccaccttagacaacaaccccagactcttagaccttctgtgagagatcagaagctaagatccccagacccccagaccctgccctagaccttctgagtaatatcagaagaccaacagaccccagaccccagaccctgccctagtccttctgagtaatatcagaagacccctgcctcttatcccaggcccaacttatgcccagaaccccccctcaaggactcctacagaccagcccacaccaccccataccacaaacctacccccagcacaacctccagaactaccaccagacacaccacttggttagcatcagaagctctgataaaacagatagagcttttctattgtgggattgtgaagaagctgtagtgtccccctgtatcctccccaccagttgtacttgcaagtaacattgcatagtttgggcctgtgacccaccctgtcttgactgcaagtaacattgcatctcttgggcctgtgacccaccctatcttgactgcaagtaacattgcatctcttgggcctgtgacccaccctatcttgactgcaagtaacattgcatctcttgggcctgtgacccaccctattgttattgttacaagttatattgtaactacccaagactccatcccattaccaccatggccagccaggaagagattctcttcaacaccattgctgagcttgacatagaccaggtcaggcaggagctttatcaagcaaagctccagcagctgaactccaccacaccagcccctgctcagtaccaacccagagtagataaatccctggtaaaagtcctccaaagcaagttgaagccctacaaaggcaacaggaatgtcgaagagattaggacatacctcctcagacttgaagagtacttccaggcagctgcagatctatcaccagaaggccaactgttagtagccaccacctacttggaactccatgctgaagtctggtggcaaagccatgtcaagaaccacccagtaggatcccctctcagaatccagtcttgggaccagttcaagagagcccttcaagagaacttcctcccagcaaatgccaccagagcagcaagagaccagttggccaggctcaaacaacaaggctcagtaaaagagtacctaaaccagttcaatactttatgccttcaggtggatgacttgtcagaagctgaaaagttagacaagtttatcagagggcttaaacccagggttcaggaacaactggagctcaaccccaccagtaccatcaacttagccacagctgcagcaacagctgataggattgaccagatccagttcagctaccagagaagaagccaggccaccagctactactcccccaagactgagaactctggagtagtccctatggagatagatagtatatccaccaactctgggaagcctctctccaaactcactgaggctgagaagactgagctcagaaagaagggagcctgtttcaggtgcagaaaaccaggccatattgcccccctatgccccttgaagaccaagcagcagggaaatggcaagcagactcagtagaagatagaggttctgcctctactggggaagatatcaagaaccaccaccctgacacccaccacctggtacactctcctgttattcaacccttggacctattggacccacctgaaaccacccctgagactttaactatccatggactttacctggaaccccagagaaccccagcatcccagagaaccccagaaacccagagaatcccagaatcccagagaaccccagaaacccagaaaatcccaggacccctgagaaccccagaatcccagagaaccccagaaacccagagaaccccagaaccccagagaaccccagaaacccagagaaccccagaaccccagagaaccctagaaccccagaaaacccaggaaccccagagaaccccagaaccccagaccacccaggccacctaccaagaaagcaagatccatgtagtagaggtggctccatactctttaagtacccccaaagggccaaggattccccagagtcacttgctgactgtgcaaggtagaatccaaggaatcccagtaaccattctcctggataatggggcaaaccaactctatgtgtcacagtcctttgtcaagaaggcacaactggtgactcattctctccctggagcagaaatctctatggctgatgacagaaagcaccaagaaataggctttgtcaaaggtcttcagtactcagtaggaacctacacagaacagtcagactttatagtagccccaatcaagtttgacttgatcttgggtataccttggtttgcctggaggaatcccagtatcaactacaacaagaacactgtgaccttcaccacttcccagtaccccagagtcagatggtttgttaagcaggccagctcttccaacaaatcccagaagtccaatcttatcaccatggtatcagcaaagatgttggccagaacactgaagaagaggacagcaacagcttttgctgtgtatctcaagaaccctcaagataccagcacccctccagacaccatggattccaaagtcaccaagcttcttgaaaactatcaagatgtctttgctgaagagcttcccccaggacttccccctgagagatcagtagatcacagaattgaactcagtgaccccaaccagaccccctggagaccaacctaccacctctcttctttggagttggaagaactgaggaagcagctttcagagcttctggaggcaggccacatcagaccatcgaagagcccatttggagcacctatcctctttgttaagaagaaagaaggttctttgaggatgtgtgtggactacagggctctgaataaaatcaccatcaagaacagatatcccctccctaggattgatgagctgatggataggctgaatggagcccaggtgtttaccaagctagatctgaagtcaggctattaccagatcagagtccacccagaagacatccccaagacagccttcagaaccagatatggtcactttgagttcctggtcatgtcctttggaatgaccaatgccccagccactttcatgactttgatgaatgatgtccttagacccttcttggacatctttgttattgtctacctagatgacatcctcatctactccaagaccccagaagatcacctggaccacctcaagcaggttctgcaagccctcaggcagaacaagctgtatgccaaccccagcaagtgccagttcttcaagcaagaagtagagtttcttggctatgtagtctcacatgaaggagtcaagcttgatcccaagaaagtgcagactgttcaagaatggcccacccctcagagtgtcactgaagtcagacagttcatgggcctggtgaactacttccatagctttctgaaggacctggcagagcaagctgcaccattgacagacctgttgagaaatgacaagccttggacctggtctgaacctcaggagaaagcttttcagcagctgaaggatatggtcaccaaagcccctgtactcagaccctttgacccagccttgcctaccactgtcttccctgatgcctcaggctatgcagttggtgcatggcttggacaggatgatgggaaaggcatgagaccagttgcctaccactccaggaagatggccccagcagagaccagatatgacaccagagaacaagagctgttagccatccatgatgccctcagagtttggaggccctacctgcaaggaacccccttcaaagttatctcagaccaccagtccctcaagtggctacagaaccagcccttcttgaccagaagacaagccagatgggtcatgaatttccaatcttttgactttgagattggctatggcccaggaagactccacacagtggcagacatcctgtctagaagaccagacctggccccaagatgcatcaagtgcaaggccttggtgacagcagagttgaatgctgtgacccacaccaccagcacccttcaagagagattgaagaccagtaccacagaagacccagaacttcaagagctcatccaagctttggatgaccccaggagaccagaagaccagcaacaaaggctcaagtacctcagccatcaagatgggttactctatttccaggacaggatctttgttcctagtgacccagacctaaggttgagcctactccaagaaacccatgacactcagtatgctggacactttggcatcaccaagacccatgatgccctagcaaggcattactactggccaaggatgtacaaggacattaagaagtatgtcaagtcttgtgattcctgccagagaagcaaacctagtcagcaaccaccagcaggcttgctgcagcccctcccagtacccaagaccagatggagccagatctccattgacctgatccctgacctacccatgacttcctctggtcacaatgccatctttgtcattgttgacagattgtcaaagagaggccacttcatccctaccaccaccaaagcctcagccaaggacctggccctgctcttcttgaagcacatcttcaagcaccatggcctcccagaagtgattgtatcagacagagacaccaagttcaccagttcattctggtccaacttgatgcaactcttaggctgcaacaccctcctagccactgcaagacaccagcagaccaatggacaggcagagagaaccatcaagactttgaagatctacctgagagctttcctggagtacaacatgaagaattgggaagatcttctcccctttgctgagtttgcctacaacaacagcatctcagaaaccacaggcttcaccccattctacttggagaatggccagcatcccaggaccccagcaacaccaccaggagaaagcaatgatcctgaagcaacagacttccaccagtatattcagcaactgcttcaagtagccaaggataacatgatactggcccaagaaagacaagttcagcaagccaacaagtctctcagcaaggccccaagctaccccctaggctccaaagtttggctgtctagagaaggtatcaccccagaagaagaagcccagaggccagcccagaaacttcttcacccctggcttggaccttacagaatcaaggccaaggatgaatttcagaattacaccctggagctccccagcaccatgaagattcatccagtgttccatgtgagactcctcaagccttacctggaccccacagaggacttccctaccagaccagtaccccctgagcctgagccaattatccagcaaggagaagagttttgggaagttgagaagattctggaccacaagatcagaaggaagaagaatctctacctcatcaagtggaaaggatatccctcctctcagaacacctgggaaccagaagaaaacctcctaccccatggcagagaaatcttgaaggagttcctagcccagaagggagcttaatcttaaagtgggggagtgtgacagaattcttctgtcagtgctatggttatactggttagatgtggttccaaactagtggtcacatgactttgctgatggtgtcagcattcatttgaccagaattagataaataagcagatttagccatttctggctaaattagatgagtatcctgacacactagcatctgccccttttaatcaagtggcacagtgtatttaggatgacttctctcacttgtgattggccataaatggtgcaataggctgacaaatagtttaggatgacatgtacaagatctgattggttgcaaatggtgcaataggctgacaaatagtttaggatgacatgtatgagttctgattggttgcaaatggtgcaataggctgacaaatagtttaggatgacatgtatgagttctgattgggtagttaggatatagcatttgtcagccccttttgtctataaaaagaggacctctctgaggcccctcaaaggaaaaaaataacaagtagtaaccaagtcttccctagttttctgttgtcttcttgtccctgctagcctgttacaacattggtcaggatacccaccccatgaggatacctgggaaccagaggaagccctaacagaggcttccgaagccttagaagagtactggagatccagagcccccactagcgcactagtagaggactctttggtagtcagccttgcaggcaacgccccggaagatacggcttacgcttccgaccaccaatgcttcgcggtttatccggatgatagctcacgtgataatcacgccctctctccagaaagaaaaccagtttcgcgtggcttacctcaccagtcgagaacgccacaccaagcctcccgatcatgcttacgcgcgtccgagctgtcaaaatcagccggcgacgaccttaaaagggcgcccctgctcgccccccctcttttttcttcttcaactaccaacgaactacttcccttacacactcactctgcttcgcaaaccctttctatcgacaccgaaacaaaagctttcatttccaacaccatgaccaccgatatccgaggacaacaaggagtcagcatcctctctacccttgaggaaggctatccctggtcagaagtaagcgacgccttcactgccgagaactctatcaagcggctcggagcagccatggccacctgggtcgaagtttggattcgtgagttgtacgaagacccaaacaaaacccttgaacactatcgtggtgaagattgggtggttgacagggcttcaaagccttacgccacgagccagcccctcatgatgcatatcgcggagccctacagtagggcttccgacagcggtcaagctgctgtcggtatcgtcgccaatgcaaaaaagataggcaagagattacgggacgtaccctgcgctgcctggcttgatgctggggtccctcaacatgcggccggaaaccccaaaacggcctgcttcaccctctggcccgatcacgaggcccacgatttcgcggacatagccatcgaagccgcgagagcagtgttgttaaagctagccaatgcagctgaaaccacagaagagcagctccgtcccaaacatcgggagcacgcctattaccactttcgagtggttaacttgaaaagggccgcagagacgttcacagccctctacgtaacccgagccaacggttccaggacacctggaaccccggctccggaagccactgaccaaatttggttctgcgcgaacgtcatggggcgcgctaccataatctggacgatcaacgaagacagccttgaagctgacgacgactatccagttgcgtcatggtagaagcgaggttcaggcactcacagacgagtcgccgaaccttctttttcgaaggggggatgtagcgaatgactctgataaaccggttcgctcaaaggcatcaggtgaccacgattgaggtttctgcaattgtaacctaagcttcgaaacccctaagatcaaactcggttctgggctacaccagcgcagcgtgaaggatacgttacgcagccatgatcgatcatggcgatggtccgagatgggaagatcagacgccgccaccctaatgaaggctacggaaactagtgtagacgttaccatagcatattcttgtataaaaagaggaattcaataaaataagttggcagccagaagccgtagtgacaaaaaatccccacaactagcttctcaaccccaatcctaggttaacaggaacctaacagagcgcttcaacggcctgatcacccgcactgaagcctctaaatcctgctcggttcacaactaactgactctccttgcctcttgccctcaagtcactaccgatgcccaaagaaaggatttggagactacgattcctagtacggacacccacacaacctgctaggagacccaagttgtctttaccatagtctaccaacaaaaaatccgttacactcccatcctgctcatactcgatggaaatggcactctttcatcaatcggcagcaaagcgaatcagacctcataagtaacatgcacaacaagtatggtgaaaactttactgttgtgatgggtgattggagtgacgctggtcgaactgcgagatttcagacctcatcaaagacaataggctggtgcactgtcttcaagcagaacaggatcaactgcttccttctcgacgagtacaagacctcatctgtctgccctcactgttcatccgatgacttccttgaaaaaagcttcaaaacacgacctcattcaagaccttggcgacgacgagaaggcaagattgaaaaagtccatggattgctgggttgtaccaaccctaactgtcagcaagcctggacgatgcgctactggaatcgagatacgctgagcacctgcaatatgctgataatcgtgcaatcaatgttggatggacacagtagaccagaagtgttcagcaggagtgttccagccgtagcttagattggttagattaggttttccgagccggttgtcgccggttcaatccctggtgcgggtgctagtgccaatacccaccggctccgcactacctttcctggacttgaatataagatggggtcgctctgaatcctattcgcatatctatctagcttcaacacacgctagtggtagtggtctattctcctcgtcttgcatctgaagaacatcatgagcgacggaatttcggttagctttgaaatcctacattactttactaaacctgtatgaactccatgacgacaggtttctactcctattttggctattgttaacgataatatcgaacagtttccttacagaaatttttattaatggagagtttgttccattgttgtctggcaagacatttccaaccatcgatccgacgtgagtccttgccaacggccgccagctttgtatgcccagtcatatgtgagcagctacacaagactggagcctttgtgagttgttggacagatgtacgctgggattatccgccatcattctgctatcttactttccataccaggtcgtcccatggaacttccctttgatgatgctgagatggaagttgggccctgcattggcacaggcaatacaattgttttaaaggcatatatgttacagataattacatatcccaaaattccttcggaagaaactggcagacatcaaaaaaaaatcctctctttccgcgctcaaagtcggccaattgactgctgaagcagaattcccaccaggcgttattaatgtactctctggtttcgggtccacggctgggtatgccattactcaacatcctggtatcagcaaagctcctttcactggctccacagctccaccagcggctggttgaaaggtgctgatggtagccgccgcgatcaactcaagaagataggcttgaagctcggggacagatgccccaatattgtttttcgacgatgcaacttggaagaaccgtgcatgctgtctctaccgctgactttcaaatcatggacaggtgtgctattcgggcactcgcttgtacatccagaatggacatctatgaaagatttgtcgagcaattcaaataaaagatagcattatagcagatcatatgagtcaagagttttgtagtctcaacttcgactcatatcagatggaaataataaacctgggaaattgtttccacccagaaaacgaaccgtggatccgtggtagacgctctctagtataatcgtgtgcatcgatttgggaaaagaagtcgccaagtgtgggtatggagggcatactgttggcaaacaaggctacttcatcatctcatattatcacaggcgttaaatatcatatgattgtcgccagaaaggagggttttggccctatcgtcgctgccattcgcttcagaccgaggaagaggtcatgcatgaagcaaatgaaacgaattacaggttggcagctgcagtccattcccgagatttggtagggtattcgggtgatggaaattgtgaaagaaggaatagtgtggggttaattgtataggaagtatgcagatgctcgacgtacccaatgtttccagttacgtagaggtaagtcttacctgggttttcttcgcatagtttttctatcccagctactattggcaaattacaaaaactcggatgtcggacgcaaactggatgaacaggttcttcgcgagtacagcttgaatgtactcctacggattcacaccactgttggcatgtctaggtgtaataagtctgtccttttgctgaccgaggtgaaatcggtcgtcataaaagtgaacactttggacctggcaacaaccatgctagcattgacagaaaatgcggcacttcactcccctgtcgttgtcacttcttggcaga

SEQ ID NO: 770 - protein, 983 aa, Spizellomyces punctatus
  source 1..983: note = join(1..211,281..450), XP_016607855.1, uncharacterized protein CDS
MLSVEDNQHAHSLPPFANAQNKALSNDIRNLESRLSSLLASLDDNVSRTDTMSAHMKNVQQELAHTQALADAKSRQIDTEDHFKQLAEREAGRLAIEIRQLDKEIAQITDYLNGIQNNIYRGNERIESIRSELKLEKDELDEWLRVQAEKEEDNIALLKYTKEDDMKVKELSLGIEKMMHEVNKKKAILSAEVTETQVAQIELDKTTEAFKKLHQERQELIQQWESAIENMHKRDQDIINAQNDYQALKDEIRNKQKIIDEKQAFLDQQHQNNAETEKRIGLTERQVSKSRLEQHQAKASLVQFQDEVDVLRNTLNKTATDLVNRRGEIVNLKGDLQERRAKLENEKQNREDMKAKLVMVTDKTMSLEAKAQELQEILKQEELRSKELDRELKMLRESQFKRNQEVFRLKQEEKNLSAEIAGGEAALRNLKSKIHSLDQEALKQQALLYAQEFQIQQLERKLRRAQGERTDEEKEVLMKRIDDLNQQLGAATLKWNLLNAQLKKSQDDVRASQRNLETLEKEKMNVKENIDELNLYNESASKQLAGKIREKEDLMVEENILRLELRKLRGFLNARADQVFTLGTRQVHLQLALEERTKEISIHKDMLKLALKNAEEERHSAAAELRDRVSKVEKLKRRYEIVMTHFGSSEDGDGEEEHSQAYYVIKAAQHREELQREGDELDARIRKAEKEIKALENTLKMMNDRNEEYRMNLYKAEQNSKDIQHREMLEQQYRHTMERYKEKRDEIQSLQTALLNSEKTLSTLTNAESSRLQTISLLEQKFNALQKDVAEQQAKRERAVKTVQRSAKEVGTKADEVELDFKVRELKELGNLAIEAIGKVVERRPEIGERVNQLLAENGVQPPSRPISRIPSRASSRASITSDAPSEASNTSRRSVIGRHTSPRASQSLRSSSGRVTPTRVSTTNLNATITLPTVAAQQHLTTSPIPRAPITGAGRIRAPARPGSASSVASSRRSSANSTAER

SEQ ID NO: 771 - protein, 330 aa, Spizellomyces punctatus
  source 1..330: note = 2564..3556, XP_016607856.1, uncharacterized protein CDS
MANLKVNVQEHFMQMLLQYINLRLDVKGQKQRLPPKSDARKAFFAWLRYMKSIFLFDIMPESLDDLTAEENELLEEIWSLNIPLSDDQPLAYSVAVDPLAFFPAYCKLSGLYERHGFRRFSAIPLRQSLIQSHVRIDTIILYSHLLCITRREAETVEKVDLWLRVCNLRNKAFRSRRGMCFEGSITTDGTSVSVYLKHPEAADKYGKRGVRKSAKSLEDEVKAQYMEKNLPACRAAENVVVIDPNKRDLLYCQDSLGTTFRYTANQRAMETGSRRIAREWEAMKAGGIDLIESRIPSHKTMNLMDFTRYLLVCRADWDHRKEFYSCSERL

SEQ ID NO: 772 - protein, 337 aa, Spizellomyces punctatus
  source 1..337: note = 4268..5281, XP_016607857.1, uncharacterized protein CDS
MLVERSPTRGRSPVIQTRSQGPAEDIEVPPATRPRHSGTTSVEPEAPNLATMASEVAALKEDIASSTAAMQLATQNLTEQLHRLSEHQTVVDEHLARALEALAHRPLPEQPLIARATREWSATPWETSHTPRECTEPSFSGPVPPIQVPAAPWASDTKVDSLKAKDVPKFTGKRNQDIEEWLNKVQLLQNVSATSDARMVQLLPAMIAEKTPADAWFYTLEAQETCSWTWKRWKEELLREFRDPLTESKCKTEYVHCHVNPKEFCSFLAFIDHKTHLQRLAYGDRANIECPADQHFDLIVEQLPSDIQIMVKSCNVTNLTKLKDFLRLYFGSDDTRK

SEQ ID NO: 773 - protein, 261 aa, Spizellomyces punctatus
  source 1..261: note = 17579..18364, XP_016607858.1, uncharacterized protein CDS
MTTDIRGQQGVSILSTLEEGYPWSEVSDAFTAENSIKRLGAAMATWVEVWIRELYEDPNKTLEHYRGEDWVVDRASKPYATSQPLMMHIAEPYSRASDSGQAAVGIVANAKKIGKRLRDVPCAAWLDAGVPQHAAGNPKTACFTLWPDHEAHDFADIAIEAARAVLLKLANAAETTEEQLRPKHREHAYYHFRVVNLKRAAETFTALYVTRANGSRTPGTPAPEATDQIWFCANVMGRATIIWTINEDSLEADDDYPVASW

SEQ ID NO: 774 - DNA, 17813 bp, Spizellomyces punctatus
  source 1..17813: mol_type = unassigned DNA; note = Origin - Fz = complement(929..1078), Fz = complement(16332..16598)
tgacatcgactacatgtcccgaaccgtattgtatataaatggacgacgggggtttcccacggtttagctaaagattgattaccaagatgaagaacaatgccttgcgagaaactgggccattttttttttacggacactggccaacaaacgttggatagttttctgaattggtacaaatgaaaatgggtaggaactatatgcgactgttcgtttttttttatcctgctaacgagtagcgtggcactacaatcaccgcaagttgcccagatgacagcacgttttagcattctgccaaaaattatttttgactaggacgcaaatactatttgggtgtcggctggtagcaaaaaccgtcaatgacgtaaaacccaaaaacgaggagaagcaaaccatcttgactcgacctatttttgttcagctcacgaatacactcaacgtttgtcaaaccagtgtcgaacttgtaatgggttggtataatgaaatcaaacatggcagctgagcgaaacgcaagaccaagtagtttcttgactcggatgagacagtgctatttgccccgaaacctacgcggttgggcttcccttagtaaactacagaaatcggctcttacatcatgattgctctggatgcaggtcatcagcattaaccagccctaattacatttggatcgactatcacgaaaaatcgtaaaaattaggaaactacacatataatgaaaaataacaaaggattattattcttcaaattagtttgattgcattttgttgccggtaaattaaaactgcgtagtacattatataatttgaattgtaaagtttatcctttaccaaaagcgcatggtagtgcggagccgatgggtattggcactagcacccgcaccaggaattgaaccggcgacaaccagttcggataagctaatctaaccaatctacgctacggctggaacacccctgctgaacacctctggtctaccgtgcccatccaacattgattgcacgattgtcagcatattacaggttgccagcatatctcggttccagtagcgcatcgtccaggcttgctgcaaacagttagggttggtgtaacggattttttgttggtagactacggtaaagacaacttgggtctcctagcaggttgtgtgggtgtccgtactaggaatcgtagtctccaaatcctttctttgggcgtcggtagcgacttgagggcgagaggcaaggagagtcggttagttgtgaaccgagcaggatttagaggcttcagtgtgggtgatcaggccgttgaagcactctgttaggttcctgttaacctaggattggggttgagaagctagttgtggggattctttgtcactacggcttctggccgccgacttattttattgaattcctctttttatacaagaatatgctatggtaacatctacactagtttccgtagccttcattagggtggcggcgtccgatcttcccatctcagaccatcgccatgatcgatcatggctgcgtaacgtatccttcacactgcgctggtgtagcccagaaccgagcttgatcttaggggttttgaagcttaggttacaattgcggaaacctcaatcgtggtcacctgatgcctttgagcgaaccggtttatcagagtcgttcactacatccccccttcgaaaaagaaggttcggcgactcgtctgtgagtgcccgaacctcgcttctaccatgacgcaactggatagtcgtcgtcagcttcaaggctgtcttcgttgatcgtccagattatggtagtgcaccccatgacgttcgcgcagaaccaaatttggtcagtggcttctggagccggggctccaggtgtcctggaaccgttggctcgggttacgtagagggctgtgaacgtctctgtggcccttttcaagttaaccgctcgaaagtggtaataggcatgctcccaatgtttgggatggagctgctcttctgtggtttcagctgcattggctagctttaacaacactgctctcgtggcttcgatggctatgtccacaaaatcgtgggcctcgcaatcgggccagagggtgaagcgggccattttggggtttccggccgcatgttgagggaccccagcgtcaagccaggcagcgcagggtacgtcctgtaatctcttgcctatcttttttgcatcagtgatgataccgacagcagcttgaccgccgtcggaagccctactgtagggctccgcgatatgcatcgtgaggggctggctcatggcgtaaggtttcgaagccccgtcaaccacccaatcttcaccacgatagtgttcaagggttttgtttgggtctttgtacaactcatgaatccaaactttgacccaggtggccatggctgctccgagccgctcgatagagttcttggcagcgaaggcatcgcttacttctgaccagggatagccttcctcaagggtagagaggatgctgactccttgttgtcctcggatattggtggtcatggtgttggaaacgaaagcttttgtttcggtgtcgatagaaagggtttgcgaagcagagtgagtgtgtaagggaagtagtttgttggtagttgaagaagaaaaaagagggggggcgagcaggggcgcccttttaaggttgtcgccggctgattttgacagctcggatgtgcgtaagcgtgatcgggaggcttggtgtggcgttcttgactggtgaggtaagccacgcgaaactggttttctttctggtgagagggcgtgattatcacgtgagctatcatccggataaaccgcgaagcattggtggtcggaagtgtaagccgtatcttccggggcgtcgcctgcaaggctgactaccaaagagtcctctactagcgcgctagtgggggctctggatctccagtactcttctaaggcttcggaagcctctgttagggcttcctctggttcccaggtatcctcatggggtgggtatccagaccaacgtattcgaaattgacgttttccgcgcctgtgtaacgatgaggacgtcttcgagagatcgcgagtaagcccaaatcggacgcgggaagcacgaatcgcgtgaccaactccaccgattgggttaccgcgaccgaaagaaccggttcggagaatggcaattggcgcattagatttcagcgtgcctcgtacaacctgtggaggcccgagccagtgcggaaaaggaagagatcggtaccgccaccaataaatcagttgcggtgcagcgacacccattagtttagtttagtttaacagtttatccaagaatcttgtataaaaaggatgtattcaataaaataagtcgggggcagaagccgtagcgacaaaaaatccccacaactagcttctcaaccccaatcctaggttaacaggaacctaacagagcgcttcaatggcctgatcacccgcactgaagcctctaaatcctgctcggttcacaactaactgactctccttgcctctcgccctcaagtcgctaccgatgcccaaagaaaggatttggagactacgattcctagtacggacacccacacaacctgctaggagacccaagttgtctttaccgtagtctaccaacaaaaaatccgctacatggtggagaagcgcgacgaactgccttcccctctcaaattcagctgaaaaccttatttggtcgtaccgaaactcttgcgcaaaccgagatctgctcaggtagctactcggaaaccttttctctcgtttcggaaacagacttcatgaaaccgagaatgatgccggttgaacgctctccaacgcgaggccgctcacatgtgatccagactcgtagtcagggtcctgcggaggacgtcaaagtccctcccgcaacacgcccaaggcgttcagggaccacttccgttgaaccggaagcccctaacttggccacgatggcctctgaagtggcagcgttaaaagaagacattgcccactcgactgctgcaatgcagttggcaactcaaaatcttacggaacagcttcataggctttccgaacgtcagacagcggcggatgagcgcctcgcacgagccttagaagccctagcgcatcacccgctgcctgaacaacctctcatagcatgagctacaagagaacggtccgcaaccccgtgggaaacgtcggacacaccaagggagcataccgaaccaagtttttcaggtccggtgcctccaatccaagtgccagcggccccgtgggccagcgacaccaaggtcgattccttgaaagcaaaggacgtacccgagtttacgggcaaaagaaaccaagacgttgaagaatggctcaacaaagtccaacttcttcaaaacgttagcgcaacgtcggatgccaggatggtacagctcctaccagccatgatagccgagaaaacccctgccaacgcttggttttacactctggaagcccaggaaacttgctcgtggacctggaaaaggtggaaagaagaactgcttcgagagttccgagatcccctaaccaagtccaagcgcaaaaccgaatatgtgcgctgccacgcgaaccccaaagaatttcgcagctttctcgtgttcattgaccacaaaactcatctctggcgcctcgcatacggcgaccgggcaaacatagaatgtcccgctgaccagcatttcgacctaatagtcgaacaattgcccagcgacatccaaatcatggtcaaatcctgtaacgtcatgaacctgaccaaattaaaagacttcctgcgcctttattttggctctgatgacaccagaaaacgagacccttgctacagcggtgctgctgaagctcagaagaagtcacaaaagaccggaatcgacaaaggccctaagcagacggctcaacataaaaccagaaaccccgaaaagggtcgcgacggccctcagaagatggttccggaccccaacacggaaccaccggcaccctgcaaattctgtcagaaaaagcattggaatgttttctgctggcagaacccgaaccgaaaagatcctgaagatggaaagaagggaccatacggagcacccatgcccgcaggttggaaacccaaacaggagtccaagaagtcgtacatagtggagctggactcgatgtccgctaccaccgagactcttttttcggcttcggaactggaaagaacggaagccgctaatcaaggattccacaccatcggattctttcattcacccgagcactcggaatcaacaattttgatgaccgcacctctttccgaggtcacggtgaccaaggaagaggacccccgcacgcccacgcagggctgggaccaagtctgggacaacatagccatcatctggggcaccccgcaagtggctctgatgatgggcaacaacccccgcgcgctcagcttcttcgccaaagaaccgaagcgaggcgccgggcacctcgggaacgacccctacgcagtcgcgtggagttcccaccacctctacatcgctgccgcagccgaagctgacaaggatcgaatcctgcgaaaagtctgagaagacggtacccctcgtttgatcctccttgcctggataaggctcgacgagcgtgagaaattcttgatgtggagctccgaagatcctgttatctttgattcttacgccaacctgcaactggtggcatttctcctgacaggcaatatcgttcgctcagactattattatcgtcgcggaaaccccaaatttctgcacgttaaagaccatccacgtctccaaagacacgaagagagcgaatggacgtgtatagtcatgctggctatcgaacaagttgctcgccagaataaaacaacaaaaccacaaaacgacaaatctagagagcactttgagagtgcaatcaaggctacggaagcaacaattaatgacatcgcgccccatttcgaggtcgcggtgccttccatcaacgccttctactcggtagatttaggcgatgtactcaaaagccagaccaagacccaaacgcagccttgctggacgctagccgtcatcgctcagctctgggcacctgtggtgctagacacaggagcctgcaagtctctggtttccgacacgtaccagggccttctgttctccgaaaccgatttgcaggatgcggaaacgatggctttcaaaggcattggtggacgtatctcatctaccaagacagtatgcctcgaaacttccctcagaggccgcggaggagaatacctgactttccgcgcctatttccgagtcattgcatacgggaaacctctcatcatcctagccaacgacattctgggacatttgaaactccaaaccttggttcaggaacccccgttacccagtttcgcggtgacgctcaagaatccggacatccttatcccttgctccataacggatgagctggacaccgatcacatgcgcggcacgccatacaagaccaagcagggtgaattcatgaaggatgtgtcaatgccacggctgaccaaagccaaagctcagaagtctagattaaccatgttaatcacgggacagacgcgcgtggcagcccaaacttttctcatcgaaaaccctcttgaggccaccgcttgctgcaagtggtcacagaacggcgcagaacggaagctcttgctacatgttctccctacatagcatttttatgagaaaaagggggggacacaaaatacactccatgatttttgggaaaaaagctgtataaatttggttcaattgatgaaaaagatagaactaaatagaaatatcgacatgcctgagccggcattggcactccgtgccggcatgtttaaatggcctcgttggtttcctgctgaaaaactggttgcatatttcatgtaggcaactcaggcgtcagaactcatcccatctcaacattaccttcgaggcataccagccgggattggccgctccgcgcccggcatcttccgccgcgggatttctatgtgcgaaaatgtacccttcggacgaacttttaactttttctgctgcgcacgagtacgagcgggctggattcggacaggtatcaagtcttcaagttctcttgctgcctgcttttgcaaacgatcccttttttgtaatgcggccgcaactttgattgtaactggttcctcggttttgatgagttcattatagttgaaaattcgatcgggaatcccctctaccacatatctatatgaccgcagtttgtcgaatggtttaatgactttcccaatccgataaacattgctagagaaattttctcgatgtgcctttttgaacacattgccttcatgtttgacacgaacatgatcaccgatggagaatatttcaggttctttctgatgcatcttctcccagtatctttccaagtttatcaatgccttatacggtttctcgattgcttcatggggagacatcccaataccgcgatgttctcgcctgttaatcattgatnnnnnnnnnnnnnnnnnnnnnnnnnnnnnnnnnnnnnnnnnnnnnnnnnnnnnnnnnnnnnnnnnnnnnnnnnnnnnnnnnnnnnnnnnnnnnnnnnnnnnnnnnnnnnnnnnnnnnnnnnnnnnnnnnnnnnnnnnnnnnnnnnnnnnnnnnaatccccctgacatgtatgctccaccagcgtcagtaacgattttgttgggtctcattttataagtctttagcgaacgatcgagaatatatcgcattgcggaacatacggaagtctcgtccaatttcttcaatggttgtgtaaataccatctttgaaaacttgtccacgcataccaaaatatgagaacatcctttattctgacgaggataagcgtccgatcctaaagcgagacaatcgctttcccaaacatcaaatggtgcatatgtacgctgaacgttcaggttcagcctcttcttttttcgatgtatttgatgagtacgttctttctccagaaatgactttatgtctttcaaggacaagtctgtcccttgtctcttcagcatattcttcaagccggatgctcctaccggagctccaggcgtgtaatacaacttccggagttcctccatatttgtatgtaacgcttaatttatttcatatagaattgttttacagcatcgttcgttcttttttgttttcgtctattctctgaaatgtctaatggtgcaagattttcatagtgatttgatccgccttgggattcaggcattatgtgatcgatttcaaagttccatcggtagtcattccatgacatgcccttaagatctttcgactttttgagcagttcttggatgtatgacaagaattcttcaaaagtgcaaccttcaacccatgagagagaggtcctcagttgcgccatccaagcgggatcctccatctggtttctaagtgaaatagaggagaatgatataaatttgctgtgctttgcccgagacactgctgtatataacattctcttcgacatcttctctacctcgtggatggtgaacggtctgttaaatgtttgcccttgtgccttgtgtactgtggtacaataaccagaaagaaaaaacttttgaaatttgttcctgggtacagtgcatttcattataccatcggataaatcctctttttcacaaatgacctttgtgtcattccaactggaaatacgccatcgggttcccttgatcactccttgattgcgcattggctttctagaaaccacaggggatcccttgatgaaaatacaatcttgcgtttttgaatctttggggattcttgggcactttaggatccttgctttgttcctctccaattgttcatctcgtttcatgttaagatcattccgagcaggatttagaggcttcagtgcgggtgatcaggccgttgaagcgctctgttaggttcctgttaacctaggattggggttgagaagctagttgtggggattctttgtcgctacggcttctggccgccgacttattttattgaattcctctttttatacaagaatatgctacggtaacgtctacactagtttccgtagccttcattagggtggcggcgtccgatcttcccatctcggaccatcgccatgatcgatcatggctgcgtaacatatccttcacgctgcgctggtgtagcccagaaccgagcttgatcttaggggtttcgaagcttaggttacaattgcggaaacctcaatcgtggtcacctgatgcctttgagcgaaccggtttatcagagtcgttcgctacaacaggaacctaacagagtgcttcaacggcctgatcacctgcactgaagcctctaaatcctgctcggttcacaactaaccgactctccttgcctctcgccctcaagtcgctaccgacgcccaaagaaaggatttggagactacgattcctagtacggacacccacacaacctgctaggagacccaagttgtctttaccgtagtctaccaacaaaaaatccgttacacctggttcgatggtctactatcgcttccacttcaaactcgccctctgaagcgtcagaatcctccgcttgtgcttccgcgaccttttcctcagttttggcgtcgacaggcttctggtacggacgtaatttcgatatgtgaaaccatggatgaagtcgtctcatcttgtctggcagttttaactcatagttgtcgtggagagggttacagttggtcaccgtgactggtcccagccatttcggagcaatcttggactcataccctgctaggttttttgtgctcagaagcaccttatctcctctccggaactccagatgtcgtcgtgataaatcgtaatatcttttctgcgagtcctgggcctcgatcatcagatcccggataaggatgtttaggtctccgagatgtttacagagctcttccgcgtctgcatttctggtttctgacggcctttcaacgatgtccgccagtggattgtggggctcatagcctaggtccatcttgaaccgcgtcatttttgtcgcctcgtgtaccgtatcgttgataatgaattccacaaccggaagaaaggtgtcccagtcgtctaatcgggtgttgaccattgtggtaaggacctgcaagaccgttgcgttgtctctctctgattgtccatcaccttgagggtnnnnnnnnnnnnnnnnnnnnnnnnnnnnnnnnnnnnnnnnnnnnnnnnnnnnnnnnnnnnnnnnnnnnnnnnnnnnnnnnnnnnnnnnnnnnnnnnnnnnnnnnnnnnnnnnnnnnnnnnnnnnnnnnnnnnnnnnnnnnnnnnnnnnnnnnnnnnnnnnnnnnnnnnnnnnnnnnnnnnnnnnnnnnnnnnnnnnnnnnnnnnnnnnnnnnnnnnnnnnnnnnnnnnnnnnnnnnnnnnnnnnnnnnnnnnnnnnnnnnnnnnnnnnnnnnnnnnnnnnnnnnnnnnnnnnnnnnnnnggtggtatgggtttcaacaaccccggaatcagttgcggtaccctttttgagcgttggcaggtttcacatcctgcgcaatgttttctgaaatcttgtgccatctttggccaccagacttgtgctgtggctctggcgtaggttctttcgaatccgaagtgtcctcccccctcgtgaaaaagcttgcgcaccttgggggtgcaagcagggggcacgtagaggcaccaaaggtcttcggagactgaaaaacggtgccacagcaggttatctgcacattgccagtcctgaagaaagtgcgcatcggctgtagtgtaggtgttggggctggtctcccataggagcgtgcggggcctgttgggctatggggtggagctggccggtgaggccagcgcggatggcggcaatgagtgcaggctgtaaggccagacgaaagacggcatctgccagtgtcgaggaaggtgcgagagcagctggtgtggtgcgcagccgtcgtcttccgcgtttcgacacccatatttgggtcgcggtggagcagagtagggtttccgctcctagtagccgtgaaagtgtatcagcgacaatgtgaaaacgtcctggtttgtgaacgattgtcatccattcggaccagtaactaagatcgagggcccagcggagaagcttacggttctcgcctttgtatttagcgagccacaaaagagctcggtgatcagtaatgaccgtgaaaggcaggccttcgaggtatgggtggagttttccgaggccccaaatgaggcatccggcctcgagttcgacagggggggccttcttttccgaggtggtggtgcctcgggaatggtagcacagcgggcatttagaagcatccggctgtaactgttcgagcgtgacattaaacgctgtgtaggaagcgtcactgtgaagggtgtaggggaacccttttctgggtgccgcaagcactggagctgttgtcagagcctgcttggcagctgcgaaggcagagtttcaggaatcggtccatgaaacttcacgcttcgcgataaatctgcgcagaccttggtcggggcacttgcgagcaaggcgtccgacacaaaaggggtcaatgggcaagtccaccaatgatgattggcgtagattgactgccggtaggtctgaggagctagattttggatgttgtgaaacctcaaatcgggctccagtggctgtgattgtaggggccaccgccatgtcgagcatggatggtgaattgagcttttcagcgcctttctttaggtcagcgcgaccctttttaaggtcttggtattcacgaacaccctcttggatagcgtcttgcaggggtcggatgagttccacgtagcgggggatgaattgggcgtagaaccctaggagacccatgaaggaccataggtcacctatgaatttgggtcatggccaatcgactatggttgcgaccttgtctggatcggtagcgagaccctgagaggaggcaacgaaaccgagagccgtgagctggtgaaagagccattgacacttgtcgagtcttagggtgagtttggctctggaaaagcagtcgagccagtccgcgatggcatctagggcttccgcggctgtctccgctcgtgtgtggatatcgtcgacaaagttgttgatatttcgccatttggagggacccaaggtgtcgtccatcacctgacagaagtgcgaaggggcagtcttgggtccgaagggcataaagagtggttcatagatgccgtcatggagtctgatcgcgagccatttgtgtaccgacgcatcggtgatggcaatttggtaaaatcctttgtttgcatcacctcccaatatgtatcggaatgggactgtgacgatccagttcaggatgtcgagcatgatgggaaagggatatgggtcccaggccatgcagttgttggctcggcgatagtcgaaggctacccgcaggggtttgtctgcatagcgaatgataacaggatcgctggcgaaggttactttggtggttcatttccacctctgaagccccatcatggtgtctcgctccatctcgagggctgtccgctccaacggagagtacgaccgtggcctcgaaaggggtggcggagccgagataaatcgaggcgcataaggaatcttggtgtagttccctatgagatgaccctcatagctgaaggcttgatggaagtgttgtagaatgttgattagggcccagaccacgggtttgggtcacttgagatcaacgtggaaacgttccgcatcttttaattgggcttcgaaggcccctggagccctctccgtagagtcgaggttccatttgttctgaagtgtctgccattcttctttggaaatgttctcttcggggtccacaaccgaattatgggtcgcggtggacagtttgaggcctaacggggctgttgagctagcagcggtggcctcaagagggttttcgatgagaaaagtttgggctgccacgcgcatctgtcccatgattaacatggttaatctagacttctgagctttggctttggtcagccgtggcattgacacatccttcatgaattcaccctgcttggtcttgtatggcatgccgcgcatgtgatcggtgtccagctcatccgttatggagcaagggataaggatgtccggattcttgagtgtcaccgcgaaactgggtaacgggggttcctgaaccaaggtttggagtttcaaatgtcccagaacgtcgttggctaggatgatgagaggtttcccatatgcaatgactcggaaataggcgcggaaagtcaggtattctcctccgcggcctctgagggaagtttcgaggcatactgtcttggtagatgagatacgtccaccaatgcctttgaaagccattgtttccgcatcctgcaaattggttttggagaacagaaggccctggtacatgtcggaaaccagagacttgcaggctcctgtgtctagtaccacaggtgcccagagctgagcaatgacagctagcatccagcaaggctgcgtttgggtcttggtctggcttttgagtacatcacctaaatctaccgagtagaaggcgttgatggaaggcaccgcaacctcgaaatggggcgcgatgtcgttaattgttgcttccgtagccttgatcgcactctcaaagtgctctctagatttgtcgttttgtggttttgttgttttattctggcgagcaacttgttcgatagccagcatgactatacacgtccgttcgctctcttcgtgtctttggagatgtggatggtctttaacgtgcagaaatttggggtttccgcaacgataataatagtctgagcgaacgatattgcctgtcaggagaaatgccaccagttgcaggttggcgtaagaatcaaagataacaggatcttcggagctccacatcaagaatttctcacgctcatcgagccttatccaggcaaggaggatcaaacgaggggtaccgtcttctcggacttttcgcaggattcgatccttgtcagcttcggctgtggcagcgatgtagaggtggtgggaactccacgcgactgcgtaggggtcattcccgaggtgcccggtgcctcgcttcggttctttggcgaagaagctgagcgcgcgggggttgttgcccatcatcagagccacttgcggggtgccccagatgatggctatgttgtcccagacttggtcccagccctgcgtgggcgtgcgggggtcctcttccttagtctccgtgacctcggaaagaggtgcggtcatcaaaattgttgattccgagtgcttgggtgaatgaaagaatccgatggtgtggaatccttgattagcagcggctgtcctttccagttccgaagccgaaaaaagagtctcggtggtagcagacgtcgagtccagctccactatgtacgacttcttggactcctgtttgggtttccaacctgcgggcatgggtgctccatatggtcccttctttccatcttcaggatcttttcggttcgggttctgccagcagaaaacattccaatgctttttctgacagaatttgcagggtgccggtggttccgtgttggggtccggaaccatcttctgagggccgtcgcgacccttttcggggtttccggttttatgttgagccgtctgcttagggcctttgtcgattccggtcttttgtgacttcttctgagcttcagcagcaccgctgtagcaagggtctcgttttctggtgtcatcagagccgaaataaaggcgcaggaagtcttttaatttggtcaggttcgtgacgttacaggatttgaccatgatttggatgtcgctgggcaattgttcgactattaggtcgaaatgctggtcagcgggacattctatgtttgcctggtcaccatatgcgaggcgccggagatgagttttgtggtcaatgaacgcgagaaagctgcgaaattctttggggttcgcgtggcagtgcacatattcagttttgcacttggactcggttaggggatctcggaactctcgaagcagttcttctttccaccttttccaggtccacgagtgagtttcctgggcttccagagtgtaaaaccaagcatcggcaggggttttctcggctatcatggctggtaggagctgtaccatcctggcatccgacgttgcgctaatgttttgaagaagttggactttgttgagccattcttcaacatcttggtttcttttgcccgtaaactcgggtacgtcctttgctttcaaggaatcgaccttggtgtcgctggcccacggggctgctggcacttggattggaggcaccagacctgaaaaacttggttcggtatgctcccttggtgtgtccgacgtttcccatggggttgcggaccgttctcttgtagctcgtgctatgagaggttgttcaggcagcgggcgatgtgctagggcttctaaggctcgtgcgaggcgctcatccgccgctgtctgacgttcggaaagcctatgaagctgttccgtaagattttgagttgccaactgcattgcagcagtcgagcgggcaatgtcttcttttaatgctgccacttcagaggccatcgtggccaagttaggggcttccggttcgacggaagtggtccctgaacgccttgggcgtgttgcgggagggacttcgacgtcctccgcaggaccctgactacgagtctggatcacaggtgagcggcctcgcgttggagagcgttcgaccggcatcattctcggtttcgtgaagtctgtttctgaaacaagagaaaaggtttccgagtagctacctgagcggatcttggtttgcgcaagagttttggtatgaccgaataaggttttcagctgaatttgagaggggaaggcagttcgtcgcgcttctccaccatgtaacggattttttgttggtagactatggtaaagacaacttgggtctcctagcaggttgtgtgggtgtccgtactaggaatcatagtctccaaatcctttctttgggcgtcggtagcgacttgagggcgagaggcaaggagagtcggttagttgtgaaccgagcaggatttagaggcttcagtgtgggtgatcaggccgttgaagcactctgttaggttcctgttaacctaggattggggttgagaagctagttgtggggattctttgtcgctacggcttctggccgccgacttattttattgaattcctctttttatacaagaatatgctacggtaacatctacactagtttccgtagccttcattagggtggcggcgtccgatcttcccatctcggaccatcgccatgatcgatcatggctgcataacgtatccttcacgctgcgctggtgtagcccagaaccgagcttgatcttaggggtttcgaagcttaggttacaattgcggaaacctcaattgtggtcacctgatgcctttgagcgaaccggtttatcagagtcgttcgctacactcccccttgttgagaagatagagaattgcttcgattgtatcttcatttaccgtgggaaaggttggtgcatataggatgtagaatttgagagcgtgggaagcatggtcagcaagttgatggatgatggtgatgtaatctagaagacgctgccagtaggtctcatcaggcaagaaagcctttgtgaaggacgtcttgttgcaggtatgtaaggtgggtttgtcaagtttttcgagcctttcgagcttttgctttttctttggtggcatgatgatatctgtagaaaaagatgaaagcctgggaaaatggacgatgacttatataggattttgtggatcaaaccatagttcatgagtctaaatcgagtaaaattatgattaaattggttggaatctttgtactagtgccaatacccatcggctccgcactatgtaaatggatgactggggtttcccacggtttgctaaagctttcatttcagaagtttaaagtaagaaataatgattgaaagaaaaacattgaaaaacgattttcatttcgatcaactctcgcactacgtataccgtgtatccattcgaaatcttggggcacgaactctatatattcgaaattcgtatcctcaaagaacacaagtcgggcgtaaacgaccaatgaacaaagaggtaagtgaccaaaaagccaaaaatgctcgtcttgttccagaaatggcatcccagaatttatgctatttaagcatgtcttggagtggattaactgatgggatacaattttgaaaaaataccgctggttatgaggggcatgcaccgattgagacctttgtgggtagttgttactgcgttccaagtttatcatttcctctaattttcgggctaatagcaatcaatattccatcaagatagaaaagcaaccattctctgaggcgacattactggacgatcatttctagaatccgggcaacttgtcaattcctcgagcaagtattattgcgttgtgagcacattatgattcctctaattttttggcaattatcgcttcatcaaagctttttcgcgaaaacacaaccttctctgccaacttgggcaacccacccgcgttttgaataccagggtcgccaggcaaactgccgataaagttaaggcgtacattttcggccggtaaccgatcgaaatctttggggggtaagtgttgtttgcgtttgtacgcaagttcatcattcctctactgttagggccaatatgaatcgtctctccatcaggaagtacctgtatgttaaagtcatcatttcctctaatgttagggccaacaggaaccatctctccatcaacgcgtcaaatggatattgaaagacctggccaagtacaacaagcccactcctgtgccagtgatatgctgtccctatcaagcaagacaagcagcagatatcagtggttataggcgaattatgtgtagcttagcggctttgcttcctatatataccacagttt

SEQ ID NO: 775 - protein, 512 aa, Spizellomyces punctatus
  source 1..512: note = complement(1707..3245), XP_016607519.1, uncharacterized protein CDS
MGVAAPQLIYWWRYRSLPFPHWLGPPQVVRGTLKSNAPIAILRTGSFGRGNPIGGVGHAIRASRVRFGLTRDLSKTSSSLHRRGKRQFRIRWSGYPPHEDTWEPEEALTEASEALEEYWRSRAPTSALVEDSLVVSLAGDAPEDTAYTSDHQCFAVYPDDSSRDNHALSPERKPVSRGLPHQSRTPHQASRSRLRTSELSKSAGDNLKRAPLLAPPLFSSSTTNKLLPLHTHSASQTLSIDTETKAFVSNTMTTNIRGQQGVSILSTLEEGYPWSEVSDAFAAKNSIERLGAAMATWVKVWIHELYKDPNKTLEHYRGEDWVVDGASKPYAMSQPLTMHIAEPYSRASDGGQAAVGIITDAKKIGKRLQDVPCAAWLDAGVPQHAAGNPKMARFTLWPDCEAHDFVDIAIEATRAVLLKLANAAETTEEQLHPKHWEHAYYHFRAVNLKRATETFTALYVTRANGSRTPGAPAPEATDQIWFCANVMGCTTIIWTINEDSLEADDDYPVASW

SEQ ID NO: 776 - protein, 378 aa, Spizellomyces punctatus
  source 1..378: note = 4376..5512, XP_016607520.1, uncharacterized protein CDS
MIAEKTPANAWFYTLEAQETCSWTWKRWKEELLREFRDPLTKSKRKTEYVRCHANPKEFRSFLVFIDHKTHLWRLAYGDRANIECPADQHFDLIVEQLPSDIQIMVKSCNVMNLTKLKDFLRLYFGSDDTRKRDPCYSGAAEAQKKSQKTGIDKGPKQTAQHKTRNPEKGRDGPQKMVPDPNTEPPAPCKFCQKKHWNVFCWQNPNRKDPEDGKKGPYGAPMPAGWKPKQESKKSYIVELDSMSATTETLFSASELERTEAANQGFHTIGFFHSPEHSESTILMTAPLSEVTVTKEEDPRTPTQGWDQVWDNIAIIWGTPQVALMMGNNPRALSFFAKEPKRGAGHLGNDPYAVAWSSHHLYIAAAAEADKDRILRKV

SEQ ID NO: 777 - protein, 348 aa, Spizellomyces punctatus
  source 1..348: note = 5579..6625, XP_016607521.1, uncharacterized protein CDS
MWSSEDPVIFDSYANLQLVAFLLTGNIVRSDYYYRRGNPKFLHVKDHPRLQRHEESEWTCIVMLAIEQVARQNKTTKPQNDKSREHFESAIKATEATINDIAPHFEVAVPSINAFYSVDLGDVLKSQTKTQTQPCWTLAVIAQLWAPVVLDTGACKSLVSDTYQGLLFSETDLQDAETMAFKGIGGRISSTKTVCLETSLRGRGGEYLTFRAYFRVIAYGKPLIILANDILGHLKLQTLVQEPPLPSFAVTLKNPDILIPCSITDELDTDHMRGTPYKTKQGEFMKDVSMPRLTKAKAQKSRLTMLITGQTRVAAQTFLIENPLEATACCKWSQNGAERKLLLHVLPT

SEQ ID NO: 778 - protein, 173 aa, Spizellomyces punctatus
  source 1..173: note = complement(6865..7386), XP_016607522.1, uncharacterized protein CDS
MSPHEAIEKPYKALINLERYWEKMHQKEPEIFSIGDHVRVKHEGNVFKKAHRENFSSNVYRIGKVIKPFDKLRSYRYVVEGIPDRIFNYNELIKTEEPVTIKVAAALQKRDRLQKQAARELEDLIPVRIQPARTRAQQKKLKVRPKGTFSHIEIPRRKMPGAERPIPAGMPRR

SEQ ID NO: 779 - DNA, 21639 bp, Spizellomyces punctatus
  source 1..21639: mol_type = unassigned DNA; note = Origin - Fz = 1428..2312, Fz = complement(18911..19747), Fz = complement(19747..20313)
cgccacattccccaacccacttgcatcagaagctagcgcccttttctctcgtattatctccagctccagttctttggcttttctttcttcctcttttgccgccttctccgcttcctttgccagtctatgctcttgcaatatggagagaatgagctgaagagaggtttccgacgcatcggagggtatcctgtcgataagagctgtgaacgggtccgccattctctagtggtctttctaccacccaacgtccggtctatcgtcatatgcccaaccaaaacactccaattccagcgagaaatattttgggccgtttcggaattcgatgtggagtagcactagaaccacacttggtaggctttggaagcgtcgaaccatagattggaatgcttaaatctgccgctggcttgatcgtccgttccattggacttgaccgttctttacctcttgagatttacatcggtgtgcagttggcataattgaagaaactaaaatccaaacagttctcgctcaagcagaaagacaaactgtatagaataatttattacattctgtgaaggctcttccggaggccagccaaggtcagtccatggcgaatctcatctgaccatagtgtaaatagacatatttctcgattgcagaatgctctcatggaggatggtaagttaatatcaaatggatatttatgatttgtatatgtcagatgtgaagctgtatattttggaggccggtaagctgacacactccgagttaaccgcggctgttccaaatcgctgtcgccatgatgcttttagatgggtatgtgacggagaacatagcggcactgttatcttatgaaatgacacagacatgtaaatcctctctacgtatcgcatgtcgagtgtcggcgtcctgtttctaatatccaacaactaccagaaacattgttaagatttcctatttgtcgtcagcgaacagcagtttactgtaacagaggctgataccgctgaggatggaacagtagcggctaagtgggagaagcacctagatatttttttgatgcagagagactaactatgcaatcagaaagagataattagaagaagaaaagcctgataccgcataaaggaggtatctttgttcgtagttataagcagctagtagtttgcaacgattaagtcgcatgcagatttaggatatcatgaaatgttttcaatatccattccataattctccttcgaacatttatagtgcggagccgatgggtattggcactagtacatattccaaccaatttaatcataattttactcgatttagactcatgaactatggtttgatccaaaaatcctatataagttgtcgtcgcccattttcccaggctttcatctttttctacagatatcatcatgccaccaaagaagaagcaaaagcttgaaaaactcgacaaacccactttacatacctgcaacaagacttcctttgcaaaagctttcctgccaaactatcaccaacggcttcgagattacatcgccatcatccatcaacttgctgatcatgcttcccacgctctcaaattctacatcctatctgcaccaacctttcccacagtaaatgaagatacaatcgaagccatactgtatcttctcaacaagggggaggcttggcaaccaagaatggatgcaaagaaggcgatacgcggatgcttgttgccatatgttcaatggtactgccaaattgtcggcttctttcacccaaatctacgaggcgagcagcagtcaatcaattacctgacagcgagtatgatgacaaacctgaaggtcaacgttcaagaacatttcatgatgatgctgctccgatatatcaatctgcggcttgacgtgaagggacggaaagggcaactgccaccgaaaagcgatgcgcgaaaagctttctttactcggctacgctatttaaagtcagtttttctttttgatatcgtgcccgagtcgctggatgacttgactgctgaagagagtgagcttctagaagagatctggacacttaacctgccatttcctgatcaagacaagctgcttgcctacctcattgccattgacgcgatgtccttctttcctgcatactgttggttgtcaagcctatatgaaaagcatggatttcgatggttcagtgccatacctctgccccgctcactcatccaaagccacattcgcatcgactccaaaatcctgtaccagcatatcctttgcatcacgcagcgagaagcagaagctgtagagaaggtcgatttatggttgcacgtctgtaatctacgtaccaaagcttttcggtctcgctgataatatgatatacccggcttataatatgatatacccggcttataatatgatatacccggcttataatatgatatacccggcttataatatgatatacccggcttataatatgatatacccggcttataatatgatatacctggcttataatatgatatacccggcttataatatgatattaataagccgtattgaagtgtttgcccaatgcattggagtgtttcaaagtgtttcaaagtgtttcgagtcttccaaggtgtttgtccaagtccgggactattgatgaagggatgtgcgcatctacgccgaaaattttctctgacatacacgtaaagttttacgcatctaatatttcgcatgtccaaactccacctaattcaaagtcaacactggttctaacttgacattcgcttcttctcaagactccatggttcgtgttcccttgggcggttcatttggtgattttacttgagcaaattcttgccactaggttcaaatgccacactttatgaaatcactttatcttgggactccatctctccaccttcctttactgatggtactcgggagaccttcagtctcaacacttttcgttgtttgcggtagattgtggaaatctccatcacttggtcttctgtatatcctgcctccatcagcccctgcttgtcttttgcttaaacaagccccattgcttctcctcggcgaaagatgttacatacacagctgcctcttgtggagataagatcgtcctcacaatatgcccgccagcaacgtagcagttggattcaatgtacggttgagcgcttaagtgctaatacgtaacgttgattgcaacactccgaagccagaccctgcatgcatctcagctgtggtgattcaacagtcnnnnnnnnnnnnnnnnnnnnnnnnnnnnnnnnnnnnnnnnnnnnnnnnnnnnnnnnnnnnnnnnnnnnnnnnnnnnnnnnnnnnnnnnnnnnnnnnnnnngtgagttggtagaacctcttcatctcatttagctcttcttcacttgctcgcctcatcattttctccattgttaattgcagctgtattcgaatgttgtatatggaatcgtttttgaaaagaaggcttcgagctggggagaccggcgaccctcttttataaacggaaaaggaactctcccatcttatcgatatgatggccttcttttatgtcccatctgatccatatgtttccttatgtttcctttgaagaataatgattctatcgatactttccctcatatttcatgtgacctttctatcgacagtaacctttcacaaaaaagggaaactaatggagatgctggaaaaaatcctagaactagggctttttcacaacatgcccattttcgctcactgctccacaaaaacagctctagaatcctagccctttttttgcccggtcttctctacttttcaaaaaattttcatttttttttttcaaaattgaaatttgattccatttgtgagatttgacccgggaaaatgggctagaatggctaggattcttgtcttttgctatgtagggtattttatactactaataaataaatatatatattcttatatgttaaattatactacatacatgtagagagaacaaaacctagccatcgaaaaactaggatgagctaggatgtactaggaattctttttcctttcactgctttagcttcttactcctactttttctaccatctctaccttcaattgttctcgcttataccccctagcgccttttgtaatgttttatgcagtagattttccatgctggctctgttaagtggattcttttcttgcagccttcctgtgcacaatctctggttttcctccgacttgtccttgcagaacacgtggtggtaatagccatccctttgcttttctgccagtctggtagacacattgtcttccatgtacgctctttttcatcggaacannnnnnnnnnnnnnnnnnnnnnnnnnnnnnnnnnnnnnnnnnnnnnnnnnnnnnnnnnnnnnnnnnnnnnnnnnnnnnnnnnnnnnnnnnnnnnnnnnnntctgggaatgacaaaaatcacatacttcattgttgagcgcaccttctttcttatactgtttttcacacagtaaacatttccgcatcgtattgacaagttcctgtctcatcttggctgccctttccacctcttcatctgggaaaaaccgctttatacagcagttgccaatgacaagtacctttccggtatagatgttctggacaaaacagttctctttgatgggatgtgtacaaaggcagcggttttccttgtctaagcgaaaactctcaaccttccattcccgaatggcttcctcaaataaatcgctcaaagattcattcggtagttcccttgtgaatgtattgaaatatgatgtcatgcgtgttcaatatacttaccactgtttattgtctatatctttaaatggccgttttgtctgtttttggtaccctacttattgttataaaatcatgccacaaggttctcttgtcgcccatgaccaactttctaaccgttaggtgacataatgataggtctttggcgagtctccttatcgacggtgtgcggatcgaggtctcattaccgaatcggttcaccgtggcaatgtagtcaaatttcgaatgcattagtggtatgttgttttactatactaagaggcatatcatttaagtagtgtcttttttttcatcgcatttgtcgagtttttctggaacaaaaaaaagctacttaaatacatacgtccgtgtgttatacagatatatcaccaaattcaaaccatgccacaaacactgcttttccaaactgccaagaaaatgaagcatgctaatccttcattcaatcctatccccgcatctgtcgaggacaaacgtcctttaggcaagtggagtggtacttcatacctgttcgaaagagattttcctaaacgtgaacaatggcaaccggattgcaatctcggtttactggtatctgatgactatattgtcgtggatgttgacgcaaagccacccgcgcaacgatccaaaagtaaaatctatagtgaagccctcggaacagtcgactttgcagaactggttgagcaaaacgaacctttgcccactacactctcactcaccacacccagtggaggaaaacacttttacttttctttgagtggtaaggatggcgaaagtatcttgaaaaattggacagcatgcatgacgcgggaagacggctctgttatcgcagtcgacattcagacaaaaggcggttacgtaatggttccacccagcaagaagggatgtcaacgctatgaatgggacacaaaggatggtttcaaggtgccgatggctcctttgccaaactggattcttaagaacattcttgatgcacatggcaaacatcctcaacattttgaggctcaggagtttacagaatcgccgcacttaaacaatgaagtcagcaatgaagacattgaaatgttcaaaaaaagcgagttctggaaagactgtttctccatctcttcaagaccagatcacaacaatctgtacattatcacagcaagtgtgccctatgattgctcaatttgcaacagacggcatgttaacaataccaatcatcctttccttgtccgaaatgggtctacgcttcgatttgtctgtagaccagggaaagggttctcaagatgcatctcaaaaaactatgagcagatgtatcgcgactttcatccacttacaaaagaactagtcgagggaatggatgtcaccaaccatgctgtttctgagacccttcataaagaactcaaggatcgagtctttcctacagaaaaacataacaaatggctcatgtatgatcagagtatcgggatctggcgtgaagaagacaagaatgtcattatgcgtccgatccttgatgactatgttcattgtttaaaggaacttgctctaatttgtaataaactaagccaagatgaagaggacgtatggagtgaacgccaggggatctgtaattctttagtctattccatgtctatggtcaagaaaaagaatgatcacttggcctcattctttgaactcattagggatacacgaaaggacgaactgtttaatcaaaagaaacacttgctacactgtgtaaatggagtctacgatctcaaaaagggaaagtttcgcaaggcaaagccaagtgactattcaaaaatgtctacgaagatcacctacctcgactatgatgaacatcctcaggagaaaaaagcacttgttgaaaagtttttaaatgacttcacactggataatgaagaacgtaaaaagttcctgttgaaagcactgtcctcggctctaagcggcgataatgaagatcagcagttttatttctttgatgggagtggcaataatgctaaatcgacactcattaaattaatgaagaaggtactaggagattacggcgctacgctaccgacagcacaagtatcaaaacctaacctcaatgctcaggctgcttctccatccttgatggcgttgttgttcaaacgtggtggctttttaaccgaactggaggaaaaaacactatacactgagtttttaaagatgacggctggaggtgattcgacaagcggtcgacagttgcacaacgaacaaagagaaattgatctgtgggtcaagatattcattgctgtgaatgatctactgcagatcctcaataagactaatggcttttggcaaaaggtcgtagttatcccatgtaatgctcgttttgttcacaatccagaccctgagaagcctgaagaaagaccactcgttgatgggttcactaagcagatacttgattgcgccgatacttttcttgcactcctggtcaagacttacatcactgattacaaaaccgcgggcatgaagaaaaatgttcatctggatgatatattggaacgggttgaaaaatacagagtatctcagaacatcccattgcagtttattagcaatatgatcgagcctgcagacgatacaaatgctgtactcatgaagacattagatatgtctttcaccgaattttgcaaagataaggcctttacaaagacaccacaacttgttagacaggtgtatgaactcatggattcaatgttcccaccatcaaactcgaaacgacagatatggatcgagaagaaaaatctcagaggctggaaaggtgctatgttgaaaaaggatgaagaaagtgaggaagaaagtgaggaagagaaagaagagatagccatatcatatgaagaggtcgaaaaagatttcctacgttctcggtgggctggggcgtgaaacaaattggatttcctagaactagggctttttcgggagatcgccattttcgctcgctgctctgcaaaaacagctctagaatcctagccctttttttgcccggtcttctctacttttcaaaaaaaattcatttttgaaattaaaaattgaaaattgaaaccatttgtgagatttgatgccggaaaatgggctagaatggctaggattcttgtctttcggtatgtagggtatactatactactaataaataaaaatatatattcttatatgttaaattatactacatacatgtagagagagagattcctagcctttgaaaaactagaacaagctaggacgaactagaggatgtcaggcttgtcgacagaaataaactacagtggtgatcattcgctttcatctccactatctgcaaggatgttaaatctcggaagttggttcgcacgttcttccaaccactttctgtaacagtcgctgcacctaggatgacacctgatccaaggaatcattttatgacatccaagacattcacgttgtcggtggttcatattttcaaggttttcttcaagttaatatggtttttttaagtacaacattttcttgtttacaccgtgcaaacggtgttaaaatgttctgtgcctacaatataatggaacaatgatgcttgtttacaccgtgcaaacggtgttaaaatgttctgtgcctacaatataatggaacaatgatgcttgtttacaccgtgcaaacggtgttaaaatgttctgtgcctaaaaatatattggaacaatgaattcttgtttacaccgttgaaacggtgttctgttcttgtaactaaatatgaatgccaagtttttttaatggatgccaagctttttgtttgtaaataagtacatgtggtcatccacttgtaaaagattacacataaatacactgagacttgtaacttgctacacctgtcacttacaaagtacaacgcagccagaaacacaacacaaacacaaaaacgcaaataatggagcaaatactgcatccggacaaccagcgaatgataggaaaccttgtacctcacaatttagaagatgactatcaacccggcgagaacagcaccatgttctgtccaccacaacagttctggctcgttctaggtggagatgatccgttctgtttatactctgcgtcgcatggatcattgccagtaccggtagctcatgaactccacatcggcatgtggcatcacggtaggcttctatactcacttgacgtcagtgacagacaggcgctagatcaagcgtgggtgtgggataatccccatgatgttcgaatacgtcgcaattataacagaacaagttcgaatatttacaacatgacactagattatggactgggaattctggggagcttgagtctacttcggaattcaccatcggcggcaatatatgaacagatgagtcccaatcggagacttgagttacaacagtttgtcattgctcgtccgaacctgcgattcgacagtaccatttatgaccgagcatatgaacaacacctaaactttgatacagctctttacagtaccttttatcatcaacatgtagtacctcgaactcaacaaccgattgacattcctgcggcacttacagctcaagaacctcaacaaccgagtgacattcctgcggcaactccagctcaacaaccgagtgacattcctgcggcaactccagctcaacaaccgagtgacattcctgcggcaactccagctcaacaaccgagtgacattcctgcggcaactccagctcaccaactgagtgacattcctgcggcacttccagctcaagaagctcaacaaccgagtgacattcctgcggcacttccagctcaagaacctcaacaacctcaacaaccgagtgacattcctttgatagcgccaagaccagttgtccctcccctaaacattgtcccttctgcggtggagcctaacccatgcggaatatgtttttcaccactgttgttgcatgaaaactgtacgaccataccttgcggtcatactttccaccatagctgcatatccgagctccttcaaactacacttcctctgttatgccctttatgccgtcatcgatttactagttctgatctcagtagttctacaagaagcagtagttctacaggaagcagtagttctacaggaagcaacaacagacaacgtagaagacgagcaagaggaagagaaggagaagaacgtccctatgtctatcatggtcgtacagttcgtcaggaaggagaatcggaggaagcatatcaacgtcgtgtttgtaacgacgaggacgtcttcgagagatcgcgagtaagcccaaatcggacgcgggaagcacgaatcgcgtgaccaactccaccgattgggttaccgcgaccgaaaaaaccggttcggagaatggcaattggcgcattagatttcagcgtgcctcgtacaacctgtggaggcccgagccagtgcggaaaaggaagagatcggtaccgccaccaataaatcagttgcggtgcagcgacacccattagttcagtttagtttaacagtttatccaagaatcttgtataaaaaggaggtattcaataaaataagtcgggggcagaagccgtagcgacacaaaatccccataactcgcttctcaactccaatcttaggttaacaggaacctaacagagcgcttcaacggcctgatcacccgtaccgaagcctctaaatcctgctcggttcacaactaaccgactctccttgcctctcgcccccaagtcgctaccgacgcccaaagaaaggatttggagactacgattcctagtacggacacccacacaacctgctaggagacccaagttgtctttactgtagtctaccaacaaaaaatccactacatggtggagaagcgcgacgaaccgccttcccctctcaaattcagctgaaaaccttattcggtcgtaccgaaactcttgcgcaaaccgagatccgctcaggtagctactcggaaaccttttctctcgtttcggagacagaacttcacgaaaccgagaatgatgccggtcgaacgctcaccaacgcgaggccgctcacctgtgatccagactcgtagtcagggtcctgcggaggacgtcgaagtccctcccgcaacacgcccaaggcgttcagggaccacttccgtcgaaccggaagcccctaacttggccacgatggcctctgaagtggcagcgttaaaagaagacattgcccgctcgactgctgcaacgcagttggcaactcaaaaccttacggaacagcttcataggctttccgaacgtcagacagcggcggatgagcgcctcgcacgagccttagaagccctagcgcatcgcccgctgcctggacaacctcccatagcacgagctacaagagaacggtccgcaaccccgtgggaaacggcggacacaccaagggagcgtaccgaaccaagtttttcaggtgcggtgcctccaatccaagtgccagcggccccgtgggccagcgacaccaaggtcgattccttgaaagcaaaggacgtacccgagtttacgggcagaagaaaccaagacgttgaagaatggcttaacaaagtccaacttcttcaaaacgttagcgcaacgtcggatgccaggatggtacagctcctaccagccatgatagccaagaaaacccctgctgacgcttggttttacactctggaagcccaggaaactcgctcgtggacctggaaaaggtggaaagaggaactgcttcgagagttccgagatcccctaaccgagtccaagcgcaaaaccgaatatgtgcgctgccatgcgaaccccaaagaatttcgcagctttctcgcgttcatcgaccacaaaactcatctccggcgcctcgcttatggcgaccgggcaaacatagaatgtcccgctgaccagcatttcgacctaatagtcgaacaattgcccagcgacatccaaatcatggtcaaatcctgtaacgtcacgaacctgaccaaattaaaagacttcctgcgcctttatttcggctctgatgacaccagaaaacgagacccttgctacagcggtgctgcagaagctcagaagaagtcacaaaagaccggaaccgacaaaggccctaagcagacggctctgcataaaaccggaaaccccgaaaagggtcgcgatggtcctcagaagatggttccggaccccaacaaggaaccaccggcaccctgcaaattctgtcagaaaaagcattggaatgttttctgctggcagaacccgaaccgaaaagatcctgaagatggaaagaaaggaccatatggagcacccatgccctcaggttggaaacccaaacaggaatcgaagaaggcgtacatagtggagctggactcgacgtccgctaccaccgagactcttttttcggcttcggaactggaaagaacggaagccgctaatcaaggattccacaccatcgggttctttcattcacccaagcactcggaatcaacaattttgatgaccgcacctctttccaaggtcacggtgaccaaggaagaggacccccgcacgcccacgcagggctgggaccgagtctgggacaacatagccatcatctggggcaccccgcaagtggctctgatgatgggcaacaacccccgcgcgctcagcttcttcgccaaagaaccgaagcgaggcgccgggcacctcgggaacgacccctacgcagtcgcgtggagttcccaccacctctacatcgctgccgcagccgaagctgacaaggatcgaatcctgcgaaaggtccgagaagatggtacccctcgtttgattctccttgcctggataaagctcgacgagcacgagaaattcttgatgtggagctctgaagatcctgttatctttgatgcgtacgccaacctgcaactggtggcatttctcctgacaggcaatatcgttcgctcagactattattatcgtcgcggaaaccccaaatttcggcacgttaaagaccatccacgtctccaaagacacgaagagagcgaacggacgcgtatagtcatgctggctatcgaacaagttgctcgccagaataaaacaacaaaaccacaaaacgacaaaactagagaacactttgagagtgtgatcaaggctacggaagcaacaattaacgacatcgcgccccatttcgagatcgcggtgccttctatcaacgccttctactcagtagatttaggcgatgtactcaaaagccagactaagacccaaacgcagccttgctggacgctagccgtcatcgcgcagctctgggcacctgtggtactagacacaggggcctgcgagtctctgatttccgacacgtaccaaggccttctgttctccgaaaccgatttgcaggatgcggaaacgatggctttcaacggcattggtggacgtatctcatctaccaagacagtatgcctcgaaacttccctcagaggccgcggcggagaatacctgactttccgcgcctactttcgggtcatcgcgtacgggaaacctctcatcatcctagccaacgacgttttgggacatttgaaactccaaaccttggttcaggaacccccgttacccagtttcgcggtgacgctcaagaatccagacatccttatcccctgctccataacggatgagctggataccgatcacatgcgcggcacgccatacaaaaccaagcagggtgaattcatgaaggatgtgtcaatgccacggctgaccaaagccaaagctcagaagtctagattaaccatgttaatcacgggacagacgcgcgtggcagcccaaactttcctcatcgaaaaccctcttgatgccaccgcagctagcacaacggccccgttaggcctcaaactgtccaccgcgacccataattcggtcgcggaccccgaagagaacatttccgaagaagaatggcagacacttcggaacaaatggaacctcaactctacagagaaggctccaggggccttcgaagcccaattaaaagacgcggaacgtttccacgtcgatctcaaacgacccaaacccgtggtctgggccctaatcaacattctacgacacttccatcaagccttcagctatgagggtcatctcatagggaactacaccaagattccttatgcgcctcgatttatctcggctccgccacccctttcgaggccacggtcgtactctccgttggagcggacagccctcgagacggagcgagacaccatgatggggcttcagaggtggaaacgaaccaccgaagtaaccttcgccagcgatcctgttattattcgctacgcagacaaacccccgcgggtagccttcgactatcgccgagccaacgactgcatggcctgggatccatatccctttcccatcatgctcgacatcctgaactggatcgttgcagtcccattccgatacatatcgggaggtgacgcaaacaaaggattctaccaaatcgccatcaccgatgcgtcggtacgcaaatggctcgcgctcagactccatgacggcatctacgaaccactctttatgcccttcggacccaagactgccccctcgcacttctgtcgggtgatggacgacaccttgggtccctccaaatggcgaaatatcaacaacttcgtcgacgatatccatacacgagcggagacagccgcggaagccctagatgccatcgcggactggctcgaccgcttttccagggccaaactcaccctaaggctcgacaagtgtcaatggctctttcaccagctcacggccctcggtttcgttgcctcctctcagggtctcgctaccgatccagacaaggtcgcaaccatagtcgattggccacaacccaaattcataggtgacctatggtcattcgtgggtctcctagggttctacgcccaattcatttctcgctacgcggaactcgtccgacccctgcaagacgctatccaagagggcgttcgcgaataccgagaccttaaaaagggtcgcgctgacccgaagaaaggcgctgaaaagctcaattcaccatccatgctcgacacggcggtggcccctacaatcacagccaccggagcccgatttgaggtttcgcaacatccgaaatctagctcctcagacctaccggcggtcaatctacgccaatcatcgctggcggacttacccattgaccccttttgtgtcggacgccttgctcgcaagcgccccgaccaaggtctgcgcagatttatcgcgaagcgtgaagtttcatggaccgattcccgaaactctgccttcgcagccgccaagcaggctctgacaacagctccagtgctcgcggcacccagaaaagggttcccctacacccttcacagtgacgcttcctacacagcgtttaatgtcacgctcgaacagttacagccggatgcttctaaacgcccgctgtgctaccattcccgaggcaccaccacctcggaaaagaaggccccccccgtcgaactcgaggccggatgcctcatttggggcctcggaaaactccgcccatacctcgaaggcctgcctttcacggtcattactgatcaccgagctcttttgtggctcgctaaatacaaaggcgagaaccgtaagcttctccgctgggccctcgatcttagttactggtccgaatggatgacaatcgttcacaaaccaggacgttttcacattgtcgctgatacactttcacggctactaggagcggaaaccctactctgctccaccgcgacccaaatatgggtgtcgaaacgcggaagacgacggctgcgcaccacaccagctgctctcgcaccttcctcgacactggcagatgccgtctttcgtctggccttacagcctgcactcattgccgccatccgcgctggcctcaccggccagctccaccccatagcccaacaggcccgcacgctcctatgggagaccagccccgacacgtacactaccgccgacacgcgctttcttcaggactggcaacgtgcagataacctgctgtggcaccgtttttcagtctccgaagacctttggcgcctttacgtgccccctgcttgcacccctgaggtgcgcaagctttttcacgaggggggaggacacttcggattcgaaagaacctacgctagagctgcagcgcaagtctggtggccgaaaatggcacaagatttcagaaaacactgcgcaggatgtgaaacctgtcaacgctcaaaaagggtaccgcaactgattccggggttgctgaaacccataccaccagctccgggacgctggacagtcatcacgactgacttcgtaaccaagctcccacttacttccagagggtacgacgccttttggttaatagcatgtaaatgctcaaagaggatccacgtatggcccctcaagagcactgcgacagctattcaggtcgcggaactctttatagagcgctacgtcccattgcacggcatcccggagaccattatctcggaccgcgactccaaatttacgagtcgattttggcaggaggtctgcaaaaacctaaagattaatcaagagctcaccacagcctaccaccctcaaggtgatggacaatcagaaagagacaacgcaacggtcttgcaggtccttaccacaatggtcaacacccgattagacgactgggacacctttcttccggttgcggaattcattatcaacgatacggtacacgaggcgacaaaaatgacgcgattcagaatggacctaggctatgagccccacaatccactggcggacatcgtcgaaaggccgtcagaaaccagaaatgcagatgcggaggagctctgtaaacacctcggcgacctaaacatccttatccgagatctgatgatcgaagcccaggattcgcagaaaagatattacgatttatcgcgacgacatttggagttccggagaggagataaggtgcttctgagcacgaaaaacctagcagggtatgagtccaagatcgctccgaaatggctgggaccagtcacggtgaccgactgtaaccctctccgcgacaactacgagttaaaactgccagacaagatgagacgacttcatccatggtttcacatatcgaaattacgtccgtaccagaagcctgtcgacgccgaaactgaggaaaaggtcgcggaagcacaagcggaggattccgacgcttcagatggcgagtttgaagtggaagcgatagtagaccatcgaaccaggcgcggaaaacgtcaatttcgaatacgttggtccggatacccaccccatgaggatacctgggaaccagaggaagccctaacagaggcttccgaagccttagaagagtactggagatccagagctcccactagcgcgctagtagaggactctttggtagtcagccttgcaggcgacgccccggaagatacggcttatgcttccgaccaccaatgcttcgcggtttatccggacgatagctcacgtgataatcacgccctctcaccagaaagaaaaccagtttcgcgtggcttacctcaccagtcgagaacgccacaccaagcctcccgatcacgcttacgcgcgtccgagctgtcaaaatcagccggcgacgaccttaaaaggacgcccctgcacgctccccctcttttttcttcttcaaccgcccacgacctacttcccttacacactcactctgcttcgcaaaccccttctatcgacaccgaaactaaaacttccatttctaacacaatgaacaccgatctcagaggacaagcaggagtgagcgtaccctccacgtacatgtccggctacccttgggaggaagactcgggcgacttcgaggccgagggcgtgctggatcgccttggggttgcgatcgctacctgggttcactcctgggttcatcagcttcggaccaaccccaacgcgccgctgcagactccagggcatgagttttggctgggagtcgacgctccgaaaccttacgcggtgggccagcccctcacaaaccacatcgcggacccctacagcaaggccaccgatggtggtgaagcagcggtcggaatagttgctgacgcgaaaaaacccggaaaaagagggcgcccagctccgtgcgccgcttggctcgaccgcggggttccccaacacgaggcgggaagccgaaaaacggctccgttcaccgattggccgaacgacgacgcccacgagtttgcgtccgccgtcattgaagcagctaggacggtgctcctaaggacggcgaacgcagcggaagcctctgcaaggctcaccagaccccgacatcacgagcacgcggagtaccatttccgcgcgacaaacctgaaaagggccgcggagacctttacggccctctacgtaaccagaactggccccgacgtgaccccgggtaccatcgttcgtaccgcaacagatcaaatctggttttgttgcaacgtcggtggccgtgccagtatcatctgggtcgtgaaccaagatgcagatgaagcggaccccacagatccggtaccgacctggtaattgacgtcccaacacccccgctcggagcgccggtgcgttggctcttcaaaggggggatgtaacgacgaggacgtcttcgagagatcgcgagtaagcccaaatcggacgcgggaagcacgaatcgcgtgaccaactccaccgattgggttaccgcgaccgaaaaaaccggttcggagaatggcaattggcgcattagatttcagcgtgcctcgtacaacctgtggaggcccgagccagtgcggaaaaggaagagatcggtaccgccaccaataaatcagttgcggtgcagcgacacccattagtttagtttagtttaacagtttatccaagaatcttgtataaaaaggatgtattcaataaaataagtcgggggcagaagccgtagcgacaaaaaatccccataactcgcttctcaactccaatcttaggttaacaggaacctaacagagcgcttcaacggcctgatcacccgtaccgaagcctctaaatcctgctcggttcacaactaaccgactctccttgcctctcgccctcaagtcgctaccgacgcccaaagaaaggatttggagactacgattcctagtacggacacccacacaacctgctaggagacccaagttgtctttactgtagtctaccaacaaaaaatccgttacaaatgccaccagttgcaggttggcgtaattcatgtggtgttgaacaattacagctatttcatccattgctaccagatcagagtccacccagaagacatccccaagacagccgtcttctcggacttttcgcaggagtgccatttccatcacgtgtgggcagggtgggagtagaattccttgcgatgatcccaatcagcgcgccgaacaaggagatagcacatgaagtccatgaggttcattgtcttgtgactagggatacgtgattctatgaggtccattcccgcttccttcttcatctgctgccgttcttttgcaaatcgacggcttccagtctccacggctcgctggttggcggtgtagtgaaatgtcataccactgttgtcttggcagtagagaatatcacgcttgtttgggtcgataacgacaacattctctgctgctcgacaagcaggtaagtttttctccatgtattgcactttaacttcgtcctctaaactctttgctgactttctcgctccatgctttccatacttgtctgctcctgggtgctttaggtatacagacaccgaggtcccatccgtcgtgatcgagccttcaaactgcataccgcggcaagaccgaaaagctttggtacgtagattacagatgcgcaaccataaatcgaccttttcgacagtttccgcttctcttcgcgcgatgcaaaggatatgctggtagagaatgatggtgtcgatccgcacatggctttggatgagagactgacgaagagggattgcactgaaccgtcgaaatccatgttgttcatacagcccagagagtttgcagtatgcaggaaagaaggcaagagggtctacagcaaccgaatatgcgagcggctggtcgtcagaaaggggaatgaaggaccacatctcttctagaagtcactctcttcagcggtcaagtcatccagcgactcgggcacgatatcaaaaagaaaaactgactttaaatagcgtagccgagtaaagaaagcttttcgcgcatcgcttttcggtggcagttgccctttccgtcccttcacgtcaagccgcagattaatgtaccgaaggagcatctgcatgaaatgctcttgaacgttgactgtcaggtttgtcatcatactcgctgtcaggtaattgactgattgctgcttgcctcgtagatttgggtgaacgaagccaacgacttggcagtaccattgaacatatggcagcaaacaatcccgccatgccttctttgcttcctttcttggatgccaagcctcccccttgttgagaagatagagaatcactttgatggtctcctcgttcacggtgaaggttggtgcagataggatgtagaatttgagagcatgggaagcgtggtcggcgagttgatggatgatggtgatgtaatctagaagccgttggcaatagtttggcaggaaagcttttgcaaaggaagtcttgttgcaggtatgtaaggtgggtttgtcgagtttttcaagcttttgcttcttttttggtggcattgatgatatctgtgggaaaagatgaaagcctgggaaaatgggcgacgacaacttatataggattttttggatcaaaccatagttcatgagtctaaatcgagtaaaattatgattaaattggttggaatctatgtactagtgccaataccaatcggctccgcactatgtatcgataagttacgtatatgtcatgttgatatttctattactcatgagcgatatcaggaaagcattcgcttcctgctgatccatctctccaccgctcaaatactttagtgcagtcaaaccggggctttccttgtctttcattgacctcgttgtgcacctcacagaaccactggctgagtgctctgttagacgacacgtccggaggccgtcgcaggacctctcctttgagatgctcagcgcaataaccacaagggtagaatcggcccagtgcggatatgagattgcgcatcgagtattgttcagcgaccgaaggattttctgggtaataggccgccattgtatgtagaaaagtccacgtcgatgaaccgagagttccagaatctggtgggcagggaaatggagcatatgcatcagaatttttaggctgagtaggaactgaagcagtcgtaactgcatcagcagtagtcgtcgcaggtgcttttgacttgcgatattccttcgcctgtttccgtctcagtgtgcgaaaatccgaacagacgccacaagatttttgcgtcttcgagtgcgtacttgagtgcggatcccctggactcggggagtgctcggttgaaggcattctgaacagccagatgcgacaacaagcgcgagtctcggaggagacatgctcggctttccacgtgagagagatagcgtggctgtggaggctgaagtggcgtactccacagtacggtgagtgagctgtagtatgcgcgacatggtctcggtgtgttgaaccaatgtgtttgtttaaaagcgtaaactatgcaatgcctcaagtcaagacacccgacagggcgattactggtcaatacgtaatagtcttataacatcgatgcttagcagcgttctcacgtctaatgcagaaaggattcgaacgttctttgaacatgaaaaagtgggaatgatagttccgaataaagaatttcggcattagctctgagacaactaaaaccgcacaatacccgaaatctaagacattggcaccgaaagcgacaatggtatctgagtggcacttcaacacgacagctcaaatatcctgcatcatacaatgttccgttccgggtccgctttgctctg

SEQ ID NO: 780 - protein, 309 aa, Spizellomyces punctatus
  source 1..309: note = 1386..2315, XP_016604334.1, uncharacterized protein CDS
MPPKKKQKLEKLDKPTLHTCNKTSFAKAFLPNYHQRLRDYIAIIHQLADHASHALKFYILSAPTFPTVNEDTIEAILYLLNKGEAWQPRMDAKKAIRGCLLPYVQWYCQIVGFFHPNLRGEQQSINYLTASMMTNLKVNVQEHFMMMLLRYINLRLDVKGRKGQLPPKSDARKAFFTRLRYLKSVFLFDIVPESLDDLTAEESELLEEIWTLNLPFPDQDKLLAYLIAIDAMSFFPAYCWLSSLYEKHGFRWFSAIPLPRSLIQSHIRIDSKILYQHILCITQREAEAVEKVDLWLHVCNLRTKAFRSR

SEQ ID NO: 781 - protein, 833 aa, Spizellomyces punctatus
  source 1..833: note = 5128..7629, XP_016604335.1, uncharacterized protein CDS
MPQTLLFQTAKKMKHANPSFNPIPASVEDKRPLGKWSGTSYLFERDFPKREQWQPDCNLGLLVSDDYIVVDVDAKPPAQRSKSKIYSEALGTVDFAELVEQNEPLPTTLSLTTPSGGKHFYFSLSGKDGESILKNWTACMTREDGSVIAVDIQTKGGYVMVPPSKKGCQRYEWDTKDGFKVPMAPLPNWILKNILDAHGKHPQHFEAQEFTESPHLNNEVSNEDIEMFKKSEFWKDCFSISSRPDHNNLYIITASVPYDCSICNRRHVNNTNHPFLVRNGSTLRFVCRPGKGFSRCISKNYEQMYRDFHPLTKELVEGMDVTNHAVSETLHKELKDRVFPTEKHNKWLMYDQSIGIWREEDKNVIMRPILDDYVHCLKELALICNKLSQDEEDVWSERQGICNSLVYSMSMVKKKNDHLASFFELIRDTRKDELFNQKKHLLHCVNGVYDLKKGKFRKAKPSDYSKMSTKITYLDYDEHPQEKKALVEKFLNDFTLDNEERKKFLLKALSSALSGDNEDQQFYFFDGSGNNAKSTLIKLMKKVLGDYGATLPTAQVSKPNLNAQAASPSLMALLFKRGGFLTELEEKTLYTEFLKMTAGGDSTSGRQLHNEQREIDLWVKIFIAVNDLLQILNKTNGFWQKVVVIPCNARFVHNPDPEKPEERPLVDGFTKQILDCADTFLALLVKTYITDYKTAGMKKNVHLDDILERVEKYRVSQNIPLQFISNMIEPADDTNAVLMKTLDMSFTEFCKDKAFTKTPQLVRQVYELMDSMFPPSNSKRQIWIEKKNLRGWKGAMLKKDEESEEESEEEKEEIAISYEEVEKDFLRSRWAGA

SEQ ID NO: 782 - protein, 421 aa, Spizellomyces punctatus
  source 1..421: note = join(8642..9617,9685..9974), XP_016604336.1, uncharacterized protein CDS
MEQILHPDNQRMIGNLVPHNLEDDYQPGENSTMFCPPQQFWLVLGGDDPFCLYSASHGSLPVPVAHELHIGMWHHGRLLYSLDVSDRQALDQAWVWDNPHDVRIRRNYNRTSSNIYNMTLDYGLGILGSLSLLRNSPSAAIYEQMSPNRRLELQQFVIARPNLRFDSTIYDRAYEQHLNFDTALYSTFYHQHVVPRTQQPIDIPAALTAQEPQQPSDIPAATPAQQPSDIPAATPAQQPSDIPAATPAQQPSDIPAATPAHQLSDIPAALPAQEAQQPSDIPAALPAQEPQQPQQPSDIPLIAPRPVVPPLNIVPSAVEPNPCGISAYPSSFKLHFLCYALYAVIDLLVLISVVLQEAVVLQEAVVLQEATTDNVEDEQEEEKEKNVPMSIMVVQFVRKENRRKHINVVFVTTRTSSRDRE

SEQ ID NO: 783 - protein, 435 aa, Spizellomyces punctatus
  source 1..435: note join(complement(19752..20355),complement(18974..19677)), XP_016604337.1, uncharacterized protein CDS
MPPKKKQKLEKLDKPTLHTCNKTSFAKAFLPNYCQRLLDYITIIHQLADHASHALKFYILSAPTFTVNEETIKVILYLLNKGEAWHPRKEAKKAWRDCLLPYVQWYCQVVGFVHPNLRGKQQSVNYLTASMMTNLTVNVQEHFMQMLLRYINLRLDVKGRKGQLPPKSDARKAFFTRLRYLKSVFLFDIVPESLDDLTAEENPLAFFPAYCKLSGLYEQHGFRRFSAIPLRQSLIQSHVRIDTIILYQHILCIARREAETVEKVDLWLRICNLRTKAFRSCRGMQFEGSITTDGTSVSVYLKHPGADKYGKHGARKSAKSLEDEVKVQYMEKNLPACRAAENVVVIDPNKRDILYCQDNSGMTFHYTANQRAVETGSRRFAKERQQMKKEAGMDLIESRIPSHKTMNLMDFMCYLLVRRADWDHRKEFYSHPAHT

SEQ ID NO: 784 - protein, 192 aa, Spizellomyces punctatus
  source 1..192: note = complement(20561..21139), XP_016604338.1, uncharacterized protein CDS
MPSTEHSPSPGDPHSSTHSKTQKSCGVCSDFRTLRRKQAKEYRKSKAPATTTADAVTTASVPTQPKNSDAYAPFPCPPDSGTLGSSTWTFLHTMAAYYPENPSVAEQYSMRNLISALGRFYPCGYCAEHLKGEVLRRPPDVSSNRALSQWFCEVHNEVNERQGKPRFDCTKVFERWRDGSAGSECFPDIAHE

SEQ ID NO: 785 - DNA, 14675 bp, Spizellomyces punctatus
  source 1..14675: mol_type = unassigned DNA; note = Origin - Fz = 1386..2255, Fz = 12370..13425
gaggaacttgaaggtatggtttccaacccttcgatgcctatagctcatattttagtgttttgtttaattccttgatttttttttagcatgtttggcgtagcaagattatcattatctcgacgctcatacagcaatttatcctttttcttattattgggtttgtctttttccggatatcggatgaccaggcgggtgttcaaaaccgatatggagtcttattctttatttgtatcaatcaggcacggaaacagttataaatatggcagattgggagcaaagctaacccgtaaaacatattttttttcagacattttcgttcctcatgcccatcatcaccgtgttcccactcgaacgacgcatcatcctccgagaacgtgctgcaggatcataccgagtttccgcggcttacctcgcaaaatctctctcccaatggcctctagccatctgcgcatccctcttgtttagtctgcccgtatattggctcatagggctgcagccaaatgtgggtcgatggattttgtttattgttattacgcaatgtctggtttttgcggcgcagagtttggggatgcttattgggtccaggtgcgttgtatatgcgttctgtcgaatcatatcatgccctaactatgtatatagtgttccaaatgtgcaaatggctcaagtgtttggaccgctcgttgtggttctgtttgttatttttggaggaaactttgcgaatcaggatagtattacgccggttttgaggtggattcaatggtaaagtgtcttttatttcaatcgttgattttgaacggtactgaaatggaaatgtgtaggatatcaatcattcgttatgcgtatggggcgtatatgcaaaacgaattttacggactagagtttcagtgtccggggggaggtggtggtgcaagcggaggtgcactctgtgcagctcaaggagagcaaatcgttaaatcgtttggactggtatgtacaacccaagtgcactttcaagcccacattttctcattctgttcatgcataattatataggacacaccttcgaaagcagtgtgtattatcgtgcttgtgggtcttggactggcgtttcaagtactggctgcactggtactgcgacggacgacgagattgagaatcaagatcatttaaaagaaatgatattttttaatattggttttttaatgggtggggtaaacagtaggtaatcattgttaatcagaaacatagtgcggagccgatgggtattggcactagtacaaagattccaaccaatttaatcataattttactcgatttagactcatgaactatggtttgattcaaaaaatcctatgtaagtcatcgtccattttcccaggctttcatctttttctacagatatcatcatgccaccaaagaagaagcaaaagctcgaaaggctcgaaaaacttgacaaacccaccttacatacctgcaacaagacgtccttcacaaaggctttcttgcctaatgagacctaccagcagcgtcttctagattacatcgccatcatccatcaactcgctgaccatgcttcccacgctctcaaattctacatcctatatgcaccaacctttcccacggtaaatgaagatacaattgaagcgattctctatcttctcaacaagggggaggcttggcatccaagaaaggaagcaaagaaggcatggcgggattgtttgctgccatatgttcaacggtactgccacatcatcagcttcgttcatccaaatctacaaaaagagcagcagtcaatcaattacctgacagcgagtatgatgacgaacctgaaagtcaacgttcaagagcatttcatgcagatgctccttcggtatatcaatctgcggctcgatgtgaagggacagaagcagcgactgccactgaaaagcgatgcatggaaagccttctttactcggctacgctacttaaagtcagtttttctttttgatatcgtgcccgagtcgctggatgacttgactgctgaagagagtgagcttctagaagagatgtggtccttcattcccctttccgaccagccgcttgcatattcggttgctgttgaccctctcgctttctttcctgcttactgcaaactctctgtgctgtatgaacgacatggcttccgtcggttcagcgcaatacctcttcatcggtctctgattcagtcccatattcgcatcgacacggtcatcctgtaccagcatatcctttgcatcatgcgacgggaagcggaaacttgtaacggattttttgttggtagactacggtaaagacaacttgggtctcctagcaggttgtgtgggtgtccgtactaggaatcgtagtctccaaatcctttctttgggcgtcggtagcgacttgagggcgagaggcaaggagagtcggttagttgtgaaccgagcaggatttagaggcttcggtacgggtgatcaggccgttgaagcgctctgttaggttcctgttaacctaagattggagttgagaagcgagttatggggatttttttgtcgctacggcttctgcccccgacttattttattgaatacatcctttttatacaagattcttggataaactgttaaactaaactaaactaatgggtgtcgctgcaccgcaactgatttattggtggcggtaccgatctcttccttttccgcactggctcgggcctccacaggttgtacgaggcacgctgaaatctaatgcgccaattgccattctccgaaccggttttttcggtcgcggtaacccaatcggtggagttggtcacgcgattcgtgcttcccgcgtccgatttgggcttactcgcgatctctcgaagacgtcctcgtcgttacatcccccctttgaagagccaatgcaccggcgctccgagcgggggtgttgggacgtcaattaccaggtcggtaccggatctgtggggtccgcttcatctgcatcttggttcacgacccagatgatactggcacggccaccgacgttgcaacaaaaccagatttgatctgttgcggtacgaacgatggtacccggggtcacgtcggggccagttctggttacgtagagggccgtaaaggtctccgcggcccttttcaggtttgtcgcgcggaaatggtactccgcgtgctcgtgatgtcggggtctggtgagccttgcagaggcttccgctgcgttcgccgtccttaggagcaccgtcctagctgcttcaatgacggcggacgcaaactcgtgggcgtcgtcattcggccaatcggtgaacggagccgtttttcggcttcccgcctcatgttggggaaccccgcggtcgagccaagcggcgcacggagctgggcgccctctttttccgggttttttcgcgtcggcaactattccgaccgctgcttcaccaccatcggtggccttgctgtaggggtccgcgatgtggtttgtgaggggctggcccaccgcgtaaggtttcggagcgtcgactcccagccaaaactcatgccctggagtctgcagcggcgcgttggggttggtccgaagctgatgaacccaggagtgaacccaggtagcgatcgcaaccccaaggcgatccagcacgccctcggcctcgaagtcgcccgagtcttcctcccaagggtagccggacatgtacgtggagggtacgctcactcctgcttgtcctctgagatcggtgttcattgtgttagaaatggaagttttagtttcggtgtcgatagaaggggtttgcgaagcagagtgagtgtgtaagggaagtaggtcgtgggcggttgaagaagaaaaaagagggggagcgtgcaggggcgtccttttaaggtcgtcgccggctgattttgacagctcggacgcgcgtaagcgtgatcgggaggcttggtgtggcgttctcgactggtgaggtaagccacgcgaaactggttttctttctggtgagagggcgtgattatcacgtgagctatcgtccggataaaccgcgaagcattggtggtcggaagcataagccgtatcttccggggcgtcgcctgcaaggctgactaccaaagagtcctctactagcgcgctagtgggagctctggatctccagtactcttctaaggcttcggaagcctctgttagggcttcctctggttcccaggtatcctcatggggtgggtatccggaccaacgtattcgaaattgacgttttccgcgcctggttcgatggtctactatcgcttccacttcaaactcgccatctgaagcgttggaatcctccgcttgtgcttccgcgaccttttcctcagtttcggcgtcgacaggcttctggtacggacgtaatttcgatatgtgaaaccatggatgaagtcgtctcatcttgtctggcagttttaactcgtagttgtcgcggagagggttacagtcggtcaccgtgactggtcccagccatttcggagcgatcttggactcataccctgctaggtttttcgtgctcagaagcaccttatctcctctccggaactccaaatgtcgtcgcgataaatcgtaatatcttttctgcgaatcctgggcttcgatcatcagatctcggataaggatgtttaggtcgccgaggtgtttacagagctcctccgcatctgcatttctggtttctgacggcctttcgacgatgtccgccagtggattgtggggctcatagcctaggtccattctgaatcgcgtcatttttgtcgcctcgtgtaccgtatcgttgataatgaattccgcaaccggaagaaaggtgtcccagtcgtctaatcgggtgttgaccattgtggtaaggacctgcaagaccgttgcgttgtctctttctgattgtccatcaccttgagggtggtaggctgtggtgagctcttgattaatctttaggtttttgcagacctcctgccaaaatcgactcgtaaatttggagtcgcggtccgagataatggtctccgggatgccgtgcaatgggacgtagcgctctataaagagttccgcgacctgaatagctgtcgcagtgctcttgaggggccatacgtggatcctctttgagcatttacatgctattaaccaaaaggcgtcgtaccctctggaagtaagtgggagcttggttacgaagtcagtcgtgatgactgtccagcgtcccggagctggtggtatgggtttcagcaaccccggaatcagttgcggtaccctttttgagcgttgacaggtttcacatcctgcgcagtgttttctgaaatcttgtgccattttcggccaccagacttgcgctgcagctctagcgtaggttctttcgaatccgaagtgtcctcccccctcgtgaaaaagcttgcgcacctcaggggtgcaagcagggggcacgtaaaggcgccaaaggtcttcggagactgaaaaacggtgccacagcaggttatctgcacgttgccagtcctgaagaaagcgcgtgtcggcggtagtgtacgtgtcggggctggtctcccataggagcgtgcgggcctgttgggctatggggtggagctggccggtgaggccagcgcggatggcggcaatgagtgcaggctgtaaggccagacgaaagacggcatctgccagtgtcgaggaaggtgcgagagcagctggtgtggtgcgcagccatcgtcttccgcgtttcgacacccatatttgggtcgcggtggagcagagtagggtttccgctcctagtagccgtgaaagtgtatcagcgacaatgtgaaaacgtcctggtttgtgaacgattgtcatccattcggaccagtaactaagatcgagggcccagcggagaagcttacggttctcgcctttgtatttagcgagccacaaaagagctcggtgatcagtaatgaccgtgaaaggcaggccttcgaggtatgggcggagttttccgaggccccaaatgaggcatccggcctcgagttcgacggggggggccttcttttccgaggtggtggtgcctcgggaatggtagcacagcgggcgtttagaagcatccggctgtaactgttcgagcgtgacattaaacgctgtgtaggaagcgtcactgtgaagggtgtaggggaacccttttctgggtgccgcgagcactggagctgttgtcagagcctgcttggcggctgcgaaggcagagtttcgggaatcggtccatgaaacttcacgcttcgcgataaatctgcgcagaccttggtcggggcgcttgcgagcaaggcgtccgacacaaaaggggtcaatgggtaagtccgccagcgatgattggcgtagattgaccgccggtaggtctgaggagctagatttcggatgttgcgaaacctcaaattgggctccggtggctgtgattgtaggggccaccgccgtgtcgagcatggatggtgaattgagcttttcagcgcctttcttcgggtcagcgcgaccctttttaaggtctcggtattcgcgaacgccctcttggatagcgtcttgcaggggtcggacgagttccgcgtagcgagaaatgaattgggcgtagaaccctaggagacccacgaatgaccataggtcacctatgaatttgggttgtggccaatcgactatggttgcgaccttgtctggatcggtagcgagaccctgagaggaggcaacgaaaccgagggccgtgagctggtgaaagagccattgacacttgtcgagtcttagggtgagtttggctctggaaaagcggtcgagccagtccgcgatggcgtctagggcttccgcggctgtctccgctcgtgtgtggatatcgtcgacgaagttgttgatatttcgccatttggagggacccaaggtgtcgtccatcacccgacagaagtgcgagggggcagtcttgggtccgaagggcataaagagtggttcgtagatgccgtcatggagtctgagcgcgagccatttgcgtaccgacgcatcggtgatggcgatttggtagaatcctttgtttgcgtcacctcccgatatgtatcggaatgggactgcgacgatccagttcaggatgtcgagcatgatgggaaagggatatggatcccaggccatgcagtcgttggctcggcgatagtcgaaggctacgcgcgggggtttgtctgcatagcgaatgataacaggatcgctggcgaaggttacttcggtggttcgtttccacctctgaagccccatcatggtgtctcgctccgtctcgagggctgtccgctccaacggagagtacgaccgtggcctcgaaaggggtggcggagccgagataaatcgaggcgcataaggaatcttggtgtagttccctatgagatgaccctcatagctgaaggcttgatggaagtgtcgtagaatgttgattagggcccagaccacgggtttgggtcgcttgagatcgacgtggaaacgttccgcgtcttttaattgggcttcgaaggcccctggagccctctccgtagagtcgaggttccatttgttccgaagtgtctgccattcttctttggaaatgttctcttcggggtccgcaaccgaattatgggtcgcggtggacagtttgaggcctaacgggaccgttgagctagcagcggtggcctcaagagggttttcgatgagaaaagtttgggctgccacgcgcgtctgtcccgtgattaacatggttaatctagacttctgagctttggctttggtcagccgtggcattgacacatccttcatgaattcaccctgcttggtcttgtatggcgtgccgcgcatgtgatcggtgtccagctcatccgttatggagcaggggataaggatgtctggattcttgagcgtcaccgcgaaactgggtaacgggggttcctgaaccaaggtttggagtttcaaatgtcccaaaacgtcgttggctaggatgatgagaggtttcccgtacgcgatgacccgaaagtaggcgcggaaagtcaggtattctccgccgcggcctctgagggaagtttcgaggcatactgtcttggtagatgagatacgtccaccaatgccgttgaaagccatcgtttccgcatcctgcaaatcggtttcggagaacagaaggccttggtacgtgtcggaaatcagagactcgcaggcccctgtgtctagtaccacaggtgcccagagctgcgcgatgacggctagcgtccagcaaggctgcgtttgggtcttagtctggcttttgagtacatcgcctaaatctactgagtagaaggcgttgatagaaggcaccgcgatctcgaaatggggcgcgatgtcgttaattgttgcttccgtagccttgatcacactctcaaagtgttctctagttttgtcgttttgtggttttgttgttttattctggcgagcaacttgttcgatagccagcatgactatacgcgtccgttcgctctcttcgtgtctttggagacgtggatggtctttaacgtgccgaaatttggggtttccgcgacgataataatagtctgagcgaacgatattgcctgtcaggagaaatgccaccagttgcaggttggcgtacgcatcaaagataacaggatcttcagagctccacatcaagaatttctcgcgctcgtcgagctttatccaggcaaggagaatcaaacgaggggtaccgtcttctcggacctttcgcaggattcgatccttgtcagcttcggctgcggcagcgatgtagaggtggtgggaactccacgcgactgcgtaggggtcgttcccgaggtgcccggcgcctcgcttcggttctttggcgaagaagctgagcgcgcgggggttgttgcccatcatcagagccacttgcggggtgccccagatgatggctatgttgtcccagactcggtcccagccctgcgtgggcgtgcgggggtcctcttccttggtcaccgtgaccttggaaagaggtgcggtcatcaaaattgttgattccgagtgcttgggtgaatgaaagaacccgatggtgtggaatccttgattagcggcttccgttctttccagttccgaagccgaaaaaagagtctcggtggtagcggacgtcgagtccagctccactatgtacgccttcttcgattcctgtttgggtttccaacctgagggcatgggtgctccatatggtcctttctttccatcttcaggatcttttcggttcgggttctgccagcagaaaacattccaatgctttttctgacagaatttgcagggtgccggtggttccttgttggggtccggaaccatcttctgaggaccatcgcgacccttttcggggtttccggttttatgcggagccgtctgcttagggcctttgtcggttccggtcttttgtgacttcttctgagcttctgcagcaccgctgtagcaagggtctcgttttctggtgtcatcagagccgaaataaaggcgcaggaagtcttttaatttggtcaggttcgtgacgttacaggatttgaccatgatttggatgtcgctgggcaattgttcgactattaggtcgaaatgctggtcagcgggacattctatgtttgcccggtcgccataagcgaggcgccggagatgagttttgtggtcgatgaacgcgagaaagctgcgaaattctttggggttcgcatggcagcgcacatattcggttttgcgcttggactcggttaggggatctcggaactctcgaagcagttcctctttccaccttttccaggtccatgagcgagtttcctgggcttccagagtgtaaaaccaagcgtcagcaggggttttctcggctatcatggctggtaggagctgtaccatcctggcatccgacgttgcgctaacgttttgaagaagttggactttgttaagccattcttcaacgtcttggtttcttctgcccgtaaactcgggtacgtcctttgctttcaaggaatcgaccttggtgtcgctggcccacggggccgctggcacttggattggaggcaccgcacctgaaaaacttggttcggtacgctcccttggtgtgtccgccgtttcccacggggttgcggaccgttctcttgtagctcgtgctatgggaggttgttcaggcagcgggcgatgtgctagggcttctaaggctcgtgcgaggcgctcatccgccgctgtctgacgttcggaaagcctatgaagctgttccgtaaggttttgagttgccaactgcgttgcagcagtcgagcgggcaatgtcttcttttaacgctgccacttcagaggccatcgtggccaagttaggggcttccggttcgacggaagtggtccctgaacgccttgggcgtgttgcgggagggacttcgacgtcctccgcaggaccctgactacgagtctggatcacaggtgagcggcctcgcgttggtgagcgttcgaccggcatcattctcggtttcgtgaagttctgtctccgaaacgagagaaaaggtttccgagtagctacctgagcggatctcggtttgcgcaagagtttcggtacgaccgaataaggttttcagctgaatttgagaggggaaggcggttcgtcgcgcttctccaccatgtaacggattttttgttggtagactacagtaaagacaacttgggtctcctagcaggttgtgtgggtgtccgtactaggaatcgtagtctccaaatcctttctttgggcgtcggtagcgacttgggggcgagaggcaaggagagtcggttagttgtgaaccgagcaggatttagaggcttcggtacgggtgatcaggccgttgaagcgctctgttaggttcctgttaacctaagattggagttgagaagcgagttatggggattttgtgtcgctacggcttctgcccccgacttattttattgaatacatcctttttatacaagattcttggataaactgttaaactaaactaaactaatgggtgtcgctgcaccgcaactgatttattggtggcggtaccgatctcttccttttccgcactggctcgggcctccacaggttgtacgaggcacgctgaaatctaatgcgccaattgccattctccgaaccggttttttcggtcgcggtaacccaatcggtggagttggtcacgcgattcgtgcttcccgcgtccgatttgggcttactcgcgatctctcgaagacgtcctcgtcgttacagatatctgttcttgatggtgatcttgttcagagccctgtagtccacacacatcctcaaagacccttctttcttcttgacaaagaggatgggtgctccaaatgggctcttggatggtctgatgtggcctgcctccagaagttctgaaagctgcttcctcagttcttctaactccaaagaagagaggtggtaggttggtctccagggggtctggttggggtcactgagttcaattctgtgatctactgatctctcagggggaagtcctgggggaatgtgacagaattcttctgtcagtgctatggttatactggttagatgtggttccaaactagtggtcacatgactttgctgatggtgtcagcattcatttgaccagaattagataaataagcagatttagccatttctggctaaattagatgagtatcctgacacactggcatctgcccctttcaatcaagtggcacagtgtatttaggatgacttgtctcacttgtgattggctataaatggtgcaataggctgacaaatagtttaggatgacatgtacaagatctgattggttgcaaatggtgcaataggctgacaaatagtttaggatgacatgtatgagttctgaatttgagaggggaaggcggttcgtcgcgcttctccaccatgtaacggattttttgttggtagactacggtaaagacaacttgggtctcctagcaggttgtgtgggtgtccgtactaggaatcgtagtctccaaatcctttctttgggcgtcggtagcgacttgagggcgagaggcaaggagagtcggttagttgtgaaccgagcaggatttagaggcttcggtacgggtgatcaggccgttgaagcgctctgttaggttcctgttaacctaagattggagttgagaagcgagttatggggatttttttgtcgctacggcttctgcccccgacttattttattgaatacatcctttttatacaagattcttggataaactgttaaactaaactaaactaatgggtgtcgctgcaccgcaactgatttattggtggcggtaccgatctcttccttttccgcactggctcgggcctccacaggttgtacgaggcacgctgaaatctaatgcgccaattgccattctccgaaccggttttttcggtcgcggtaacccaatcgtggagttggtcacgcgattcgtgcttcccgcgtccgatttgggcttactcgcgatctctcgaagacgtcctcgtcgttacaactgttgaaaggtcgacttatggttgcgcatctgtaatctgcggaacaaggcttttagatctcgttgtggaatgtgttttgaaggctcgatcacgacagacggtaccttggtgtcagtttacttgaaacatcctgaagctgacaagtatggaaagtgcagcggcggagggaaaaagtcagcaaacacaacggaggcagaggttaaagcgcaatatgtggagaaaaacttacctgcttgtcgagtagcagagaatgttgttgttatcgacccaaacaagcgcgacattctctactgccaagacaacagtggtatgacattttgctacaccgccaaccagcgagccgtggagactggaagccgtcgatttgcaaaagaacggcagcagatgaagaaggaagcgggaatggacctcatagaatcacgtatccctagtcacaagacaatgaacctcatggacttcatgcgctatctccttgttcggtgcgctgattgggatcgtcgcaaggaattctactcccaccctgcccacacgcgatggaaatggcactccttcatcaatcggcagtgaagcgaatcagacctcatatccaacatgcgcaacaagtttgggaactttaccgttgtgatgggtgattggagcgacgctggtcgaactgcgagatttcagacctcatcaaagacaaaaggctggcgcaccctctttaagcggaacaggatcaactgcttccttctcgacgagtacaagacctcatctgtctgccctcactgttcctctggcgttgaaaaaggcttcaaaacacgacctcattcaagaccttggcgccgtcgcgaaggcaagattgaaaaagtccacggattgctgggttgtaccaaccctaactgtttacagcaatcctggacgatgcgctactggaacagggacacgctgagcacctgcaacatgctgatgattgtgcaatcaatgttggatgggcactgtagaccagaagtgttcagcaggagtgttccagccgtagcttagattggttagattaggttttccgagccggttgtcgcgcggttcaatccctggtgcgggtgctagtgccaatacccatcggctccgcactaatcatttattctgtcactagtataaaaatattcacacattttatttttttacatgagccttctctgttaacatgcgcggcaactaagctcacatgtccaaagtgtagatgtaagcagttgtagtcataactcgtaatcagcggccgcgatctttgccgcagaaaatgtcacatttgggttttcccacccccccaaaaattcccacaccgtcaataataaggaaaactctaaagttatttttagctttttttttaaagtgatgttgggatattgttgagtctttgcaggaatcatcttaagaaccctaatgggcttgaaagagttcgatggcatgagtaaagggtgaacgataaacaaccaaaaaacgaacaacaacaacaacaacaacaacaaggacatagagttgaaaaaacagacccttgacaaggcaccctcacactctaaaaccatgacctcaaaaaaagaccctagtaagatgcccgacattcatctcgccgtcgacgaataccctctcacaagtacttcaacacccacctcctcgctctcgtcgctggacaacaccccagcacgaagtaaaccccttccaaccaaactctccaaaacgtacgcaacgcaccttgatgcactctgcagggatcccagtgtgttgacaacgtcgcgggtggtatcgacgaggacgttattgtggtggaggcttggggcggcgttttggacggtgtttattataccgtggagtttggcgagaggggaggctcagacttatttgttttattttacgcatttgacgtgggtggggttgggtgtatggtttttggtaagtgatgagtcggaatgttgttcgagttttttgttgtgtgttgacattatttggataggtttcggcgttccagacgtggagattcaaaagagatggatccatgaacgcttttttaaagcaatgcaagtttacgcagtggattacttggaatctctatgtgttgcctgcaacctttcattggattgtcccagttgagtcgtctttttatccctctttccttgcgtttacatgaaacttatagtgtttttggtagattgtgtattgggcgctattatcaggaagtctcttacggaccggtaaagccatcgacgtaagtccaccaaaaaaaaaaaaataatcca

SEQ ID NO: 786 - protein, 300 aa, Spizellomyces punctatus
  source 1..300: note = 1386..2288, XP_016606932.1, uncharacterized protein CDS
MPPKKKQKLERLEKLDKPTLHTCNKTSFTKAFLPNETYQQRLLDYIAIIHQLADHASHALKFYILYAPTFPTVNEDTIEAILYLLNKGEAWHPRKEAKKAWRDCLLPYVQRYCHIISFVHPNLQKEQQSINYLTASMMTNLKVNVQEHFMQMLLRYINLRLDVKGQKQRLPLKSDAWKAFFTRLRYLKSVFLFDIVPESLDDLTAEESELLEEMWSFIPLSDQPLAYSVAVDPLAFFPAYCKLSVLYERHGFRRFSAIPLHRSLIQSHIRIDTVILYQHILCIMRREAETCNGFFVGRLR

SEQ ID NO: 787 - protein, 142 aa, Spizellomyces punctatus
  source 1..142: note = 13000..13428, XP_016606933.1, uncharacterized protein CDS
MRNKFGNFTVVMGDWSDAGRTARFQTSSKTKGWRTLFKRNRINCFLLDEYKTSSVCPHCSSGVEKGFKTRPHSRPWRRREGKIEKVHGLLGCTNPNCLQQSWTMRYWNRDTLSTCNMLMIVQSMLDGHCRPEVFSRSVPAVA

SEQ ID NO: 788 - protein, 293 aa, Spizellomyces punctatus
  source 1..293: note = join(13966..14331,14393..14524,14588..14644), XP_016606934.1, uncharacterized protein CDS
MTSKKDPSKMPDIHLAVDEYPLTSTSTPTSSLSSLDNTPARSKPLPTKLSKTYATHLDALCRDPSVLTTSRVVSTRTLLWWRLGAAFWTVFIIPWSLARGEAQTYLFYFTHLTWVGLGVWFLVSAFQTWRFKRDGSMNAFLKQCKFTQWITWNLYVLPATFHWIVPIVYWALLSGSLLRTGKAIDWWTNVNVHALDFVFIMVEFYLNRVPMYYSQWPPVIGSGLAYLGYAFFQHGVYQGYDKADYPDGWWVYSFLNTSKASAWVYYLVLPLGFVGVFLFVVWLHKIRDRRREQ

SEQ ID NO: 789 - DNA, 24002 bp, Spizellomyces punctatus
  source 1..24002: mol_type = unassigned DNA; note = Origin - Fz = 1050..1601, Fz = 21796..22866
cggctatacccacgacgttcaagtcgttaactacaagggacctgattctcgctaccgtggtcgggagattgcgttcgcatccaatgaggatactgtcacattctgggacgttactgacaagtcgtcgcccaagatactctctcgcactggatacacgggtgctgcgtacactcaccagggatggctgaccgaggaccatcagtactttctcgttgacgacgaactcgacgagaagaatggttcagacaagcacaccaagacctacatctgggacgtccgctccctcactgctcccaagcatattggtacctacagcgccccggtaacctcaatcgaccacaacctgtacatcaagggcaactatgcttacctcgcaaactacggctccggcttgcgcgtcctcgatatttcaaaggttgcgcaagcgaagctgcaagaagttgcttactttgatgtcacccccgagaagaatgaggccgtctttgaaggatcttggtctagctacatctactttccctctggaaacattgttgtgaactctattgagagaggattctttgtggtcaagacgaccaccatttagactatgctataataaccgtgcgtaggataggataccctgtagttctagtagttctatgaaactttgtacctcgtcattgttgatcaatcgcaggcataatgcagataattgcaagccagaataagacctcggctcctgtagtcacgtgactaaagattatgtaataagatgaggaacgaccagaagaagagggggttgtagagatatgatgagtcacatcaaacgcgttcctctctgctttcttccctcttcacactttgaataatcatagtgcggagccgattggtattggcactagtacatagattccaaccaatttaatcataattttactcgatttagactcatgaactatggtttgatccaaaaaatcctatataagttgtcgtcgcgcattttcccaggctttcatctttttccacagatatcatcaatgccaccaaaaaagaagcaaaagcttgaaaaccctacttgcttacatacctgcaacaagacttcctttgcaaaagctttcctgccaaatgacatctaccgccaatggcttttagattacatcgccatcatccatcaactcgccgaccacgcttcccatgctctcaaattctacatcctatctgcaccaaccttcaccgtgaacgaggagaccatcgaagcgattctctatcttctcaacaagggggaggcttggcatccaagaaaggaagcaaagaaggcatggcgggattgtttgctgccatatgttcaacggtactgccacatcatcagcttcgttcatccaaatctacaaaaagagcagcagtcaatcaattacctgacagcgagtatgatgacgaacctgaaagtcaacgttcaagagcatttcatgcagatgctcctttggtacattaatctgcggctcgatgtgaagggacagaagcagcgactgaaaagcgatgcgcgaaacgctttctttgctcgtcttcactacttgaagtcaattttcctttttgatatcgtgcccgagtcactcgatgacttgtgtaacgacgaggacgtcttcgagagatcgcgagtaagcccaaatcggacgcgggaagcacgaatcgcgtgaccaactccaccgattgggttaccgcgaccgaaaaaaccggttcggagaatggcaattggcgcattagatttcagcgtgcctcgtacaacctgtggaggcccgagccagtgcggaaaaggaagagatcggtaccgccaccaataaatcagttgcggtgcagcgacacccattagtttagtttagtttaacagtttatccaagaatcttgtataaaaaggatgtattcaataaaataagtcgggggcagaagccgtagcgacaaaaaatccccataactcgcttctcaactccaatcttaggttaacaggaacctaacagagcgcttcaacggcctgatcacccgtaccgaagcctctaaatcctgctcggttcacaactaaccgactctccttgcctctcgccctcaagtcgctaccgacgcccaaagaaaggatttggagactacgattcctagtacggacacccacacaacctgctaggagacccaagttgtctttactgtagtctaccaacaaaaaatccgttacacttgactgagaagcgcgacgaaccgccttcccctctcaaattcagctgaaaaccttattcggtcgtaccgaaactcttgcgcaaaccgagatccgctcaggtagctactcggaaaccttttctctcgtttcgggagacagaacttcacgaaacccgagaatgatgccggtcgaacgctcaccaacgcgaggccgctcacctgtgatccagactcgtagtcagggtcctgcggaggacgtcgaagtccctcccgcaacacgcccaaggcgttcagggaccacttccgtcgaaccggaagcccctaacttggccacgatggcctctgaagtggcagcgttaaaagaagacattgcccgctcgactgctgcaacgcagttggcaactcaaaaccttacggaacagcttcataggctttccgaacgtcagacagcggcggatgagcgcctcgcacgagccttagaagccctagcgcatcgcccgctgcctgaacaacctcccatagcacgagctacaagagaacggtccgcaaccccgtgggaaacggcggacacaccaagggagcgtaccgaaccaagtttttcaggtgcggtgcctccaatccaagtgccagcggccccgtgggccagcgacaccaaggtcgattccttgaaagcaaaggacgtacccgagtttacgggcagaagaaaccaagacgttgaagaatggcttaacaaagtccaacttcttcaaaacgttagcgcaacgtcggatgccaggatggtacagctcctaccagccatgatagccgagaaaacccctgctgacgcttggttttacactctggaagcccaggaaactcgctcatggacctggaaaaggtggaaagaggaactgcttcgagagttccgagatcccctaaccgagtccaagcgcaaaaccgaatatgtgcgctgccatgcgaaccccaaagaatttcgcagctttctcgcgttcatcgaccacaaaactcatctccggcgcctcgcttatggcgaccgggcaaacatagaatgtcccgctgaccagcatttcgacctaatagtcgaacaattgcccagcgacatccaaatcatggtcaaatcctgtaacgtcacgaacctgaccaaattaaaagacttcctgcgcctttatttcggctctgatgacaccagaaaacgagacccttgctacagcggtgctgcagaagctcagaagaagtcacaaaagaccggaaccgacaaaggccctaagcagacggctccgcataaaaccggaaaccccgaaaagggtcgcgatggtcctcagaagatggttccggaccccaacaaggaaccaccggcaccctgcaaattctgtcagaaaaagcattggaatgttttctgctggcagaacccgaaccgaaaagatcctgaagatggaaagaaaggaccatatggagcacccatgccctcaggttggaaacccaaacaggaatcgaagaaggcgtacatagtggagctggactcgacgtccgctaccaccgagactcttttttcggcttcggaactggaaagaacggaagccgctaatcaaggattccacaccatcgggttctttcattcacccaagcactcggaatcaacaattttgatgaccgcacctctttccaaggtcacggtgaccaaggaagaggacccccgcacgcccacgcagggctgggaccgagtctgggacaacatagccatcatctggggcaccccgcaagtggctctgatgatgggcaacaacccccgcgcgctcagcttcttcgccaaagaaccgaagcgaggcgccgggcacctcgggaacgacccctacgcagtcgcgtggagttcccaccacctctacatcgctgccgcagccgaagctgacaaggatcgaatcctgcgaaaggtccgagaagacggtacccctcgtttgattctccttgcctggataaagctcgacgagcgcgagaaattcttgatgtggagctctgaagatcctgttatctttgatgcgtacgccaacctgcaactggtggcatttctcctgacaggcaatatcgttcgctcagactattattatcgtcgcggaaaccccaaatttcggcacgttaaagaccatccacgtctccaaagacacgaagagagcgaacggacgcgtatagtcatgctggctatcgaacaagttgctcgccagaataaaacaacaaaaccacaaaacgacaaaactagagaacactttgagagtgtgatcaaggctacggaagcaacaattaacgacatcgcgccccatttcgagatcgcggtgccttctatcaacgccttctactcagtagatttaggcgatgtactcaaaagccagactaagacccaaacgcagccttgctggacgctagccgtcatcgcgcagctctgggcacctgtggtactagacacaggggcctgcgagtctctgatttccgacacgtaccaaggccttctgttctccgaaaccgatttgcaggatgcggaaacgatggctttcaacggcattggtggacgtatctcatctaccaagacagtatgcctcgaaacttccctcagaggccgcggcggagaatacctgactttccgcgcctactttcgggtcatcgcgtacgggaaacctctcatcatcctagccaacgacgttttgggacatttgaaactccaaaccttggttcaggaacccccgttacccagtttcgcggtgacgctcaagaatccagacatccttatcccctgctccataacggatgagctggacaccgatcacatgcgcggcacgccatacaagaccaagcagggtgaattcatgaaggatgtgtcaatgccacggctgaccaaagccaaagctcagaagtctagattaaccatgttaatcacgggacagacgcgcgtggcagcccaaacttttctcatcgaaaaccctcttgaggccaccgctgctagctcaacggtcccgttaggcctcaaactgtccaccgcgacccataattcggttgcggaccccgaagagaacatttccaaagaagaatggcagacacttcggaacaaatggaacctcgactctacggagagggctccaggggccttcgaagcccaattaaaagacgcggaacgtttccacgtcgatctcaagcgacccaaacccgtggtctgggccctaatcaacattctacgacacttccatcaagccttcagctatgagggtcatctcatagggaactacaccaagattccttatgcgcctcgatttatctcggctccgccacccctttcgaggccacggtcgtactctccgttggagcggacagccctcgagacggagcgagacaccatgatggggcttcagaggtggaaacgaaccaccgaagtaaccttcgccagcgatcctgttatcattcgctatgcagacaaacccccgcgcgtagccttcgactatcgccgagccaacgactgcatggcctgggatccatatccctttcccatcatgctcgacatcctgaactggatcgtcgcagtcccattccgatacatatcgggaggtgacgcaaacaaaggattctaccaaatcgcatcaacggatgcgtcggtacgcaatgnnnnnnnnnnnnnnnnnnnnnnnnnnnnnnnnnnnnnnnnnnnnnnnnnnnnnnnnnnnnnnnnnnnnnnnnnnnnnnnnnnnnnnnnnnnnnnnnnnnnnnnnnnnnnnnnnnnnnnnnnnnnnnnnnnnnnnnnnnnnnnnnnnnnnnnnnnnnnnnnnnnnnnnnnnnnnnnnnnnnnnnnnnnnnnnnnnnnnnnnnnnnnnnnnnnnnnnnnnnnnnnnnnnnnnnnnnnnnnnnnnnnnnnnnnnnnnnnnnnnnnnnnnnnnnnnnnnnnnnnnnnnnnnnnnnnnnnnnnnnnnnnnnnnnnnnnnnnnnnnnnnnnnnnnnnnnnnnnnnnnnnnnnnnnnnnnnnnnnnnnnnnnnnnnnnnnnnnnnnnnnnnnnnnnnnnnnnnnnnnnnnnnnnnnnnnnnnnnnnnnnnnnnnnnnnnnnnnnnnnnnnnnnnnnnnnnnnnnnnnnnnnnnnnnnnnnnnnnnnnnnnnnnnnnnnnnnnnnnnnnnnnnnnnnnnnnnnnnnnnnnnnnnnnnnnnnnnnnnnnnnnnnnnnnnnnnnnnnnnnnnnnnnnnnnnnnnnnnnnnnnnnnnnnnnnnnnnnnnnnnnnnnnnnnnnnnnnnnnnnnnnnnnnnnnnnnnnnnnnnnnnnnnnnnnnnnnnnnnnnnnnnnnnnnnnnnnnnnnnnnnnnnnnnnnnnnnnnnnnnnnnnnnnnnnnnnnnnnnnnnnnnnnnnnnnnnnnnnnnnnnnnnnnnnnnnnnnnnnnnnnnnnnnnnnnnnnnnnnnnnnnnnnnnnnnnnnnnnnnnnnnnnnnnnnnnnnnnnnnnnnnnnnnnnnnnnnnnnnnnnnnnnnnnnnnnnnnnnnnnnnnnnnnnnnnnnnnnnnnnnnnnnnnnnnnnnnnnnnnnnnnnnnnnnnnnnnnnnnnnnnnnnnnnnnnnnnnnnnnnnnnnnnnnnnnnnnnnnnnnnnnnnnnnnnnnnnnnnnnnnnnnnnnnnnnnnnnnnnnnnnnnnnnnnnnnnnnnnnnnnnnnnnnnnnnnnnnnnnnnnnnnnnnnnnnnnnnnnnnnnnnnnnnnnnnnnnnnnnnnnnnnnnnnnnnnnnnnnnnnnnnnnnnnnnnnnnnnnnnnnnnnnnnnnnnnnnnnnnnnnnnnnnnnnnnnnnnnnnnnnnnnnnnnnnnnnnnnnnnnnnnnnnnnnnnnnnnnnnnnnnnnnnnnnnnnnnnnnnnnnnnnnnnnnnnnnnnnnnnnnnnnnnnnnnnnnnnnnnnnnnnnnnnnnnnnnnnnnnnnnnnnnnnnnnnnnnnnnnnnnnnnnnnnnnnnnnnnnnnnnnnnnnnnnnnnnnnnnnnnnnnnnnnnnnnnnnnnnnnnnnnnnnnnnnnnnnnnnnnnnnnnnnnnnnnnnnnnnnnnnnnnnnnnnnnnnnnnnnnnnnnnnnnnnnnnnnnnnnnnnnnnnnnnnnnnnnnnnnnnnnnnnnnnnnnnnnnnnnnnnnnnnnnnnnnnnnnnnnnnnnnnnnnnnnnnnnnnnnnnnnnnnnnnnnnnnnnnnnnnnnnnnnnnnnnnnnnnnnnnnnnnnnnnnnnnnnnnnnnnnnnnnnnnnnnnnnnnnnnnnnnnnnnnnnnnnnnnnnnnnnnnnnnnnnnnnnnnnnnnnnnnnnnnnnnnnnnnnnnnnnnnnnnnnnnnnnnnnnnnnnnnnnnnnnnnnnnnnnnnnnnnnnnnnnnnnnnnnnnnnnnnnnnnnnnnnnnnnnnnnnnnnnnnnnnnnnnnnnnnnnnnnnnnnnnnnnnnnnnnnnnnnnnnnnnnnnnnnnnnnnnnnnnnnnnnnnnnnnnnnnnnnnnnnnnnnnnnnnnnnnnnnnnnnnnnnnnnnnnnnnnnnnnnnnnnnnnnnnnnnnnnnnnnnnnnnnnnnnnnnnnnnnnnnnnnnnnnnnnnnnnnnnnnnnnnnnnnnnnnnnnnnnnnnnnnnnnnnnnnnnnnnnnnnnnnnnnnnnnnnnnnnnnnnnnnnnnnnnnnnnnnnnnnnnnnnnnnnnnnnnnnnnnnnnnnnnnnnnnnnnnnnnnnnnnnnnnnnnnnnnnnnnnnnnnnnnnnnnnnnnnnnnnnnnnnnnnnnnnnnnnnnnnnnnnnnnnnnnnnnnnnnnnnnnnnnnnnnnnnnnnnnnnnnnnnnnnnnnnnnnnnnnnnnnnnnnnnnnnnnnnnnnnnnnnnnnnnnnnnnnnnnnnnnnnnnnnnnnnnnnnnnnnnnnnnnnnnnnnnnnnnnnnnnnnnnnnnnnnnnnnnnnnnnnnnnnnnnnnnnnnnnnnnnnnnnnnnnnnnnnnnnnnnnnnnnnnnnnnnnnnnnnnnnnnnnnnnnnnnnnnnnnnnnnnnnnnnnnnnnnnnnnnnnnnnnnnnnnnnnnnnnnnnnnnnnnnnnnnnnnnnnnnnnnnnnnnnnnnnnnnnnnnnnnnnnnnnnnnnnnnnnnnnnnnnnnnnnnnnnnnnnnnnnnnnnnnnnnnnnnnnnnnnnnnnnnnnnnnnnnnnnnnnnnnnnnnnnnnnnnnnnnnnnnnnnnnnnnnnnnnnnnnnnnnnnnnnnnnnnnnnnnnnnnnnnnnnnnnnnnnnnnnnnnnnnnnnnnnnnnnnnnnnnnnnnnnnnnnnnnnnnnnnnnnnnnnnnnnnnnnnnnnnnnnnnnnnnnnnnnnnnnnnnnnnnnnnnnnnnnnnnnnnnnnnnnnnnnnnnnnnnnnnnnnnnnnnnnnnnnnnnnnnnnnnnnnnnnnnnnnnnnnnnnnnnnnnnnnnnnnnnnnnnnnnnnnnnnnnnnnnnnnnnnnnnnnnnnnnnnnnnnnnnnnnnnnnnnnnnnnnnnnnnnnnnnnnnnnnnnnnnnnnnnnnnnnnnnnnnnnnnnnnnnnnnnnnnnnnnnnnnnnnnnnnnnnnnnnnnnnnnnnnnnnnnnnnnnnnnnnnnnnnnnnnnnnnnnnnnnnnnnnnnnnnnnnnnnnnnnnnnnnnnnnnnnnnnnnnnnnnnnnnnnnnnnnnnnnnnnnnnnnnnnnnnnnnnnnnnnnnnnnnnnnnnnnnnnnnnnnnnnnnnnnnnnnnnnnnnnnnnnnnnnnnnnnnnnnnnnnnnnnnnnnnnnnnnnnnnnnnnnnnnnnnnnnnnnnnnnnnnnnnnnnnnnnnnnnnnnnnnnnnnnnnnnnnnnnnnnnnnnnnnnnnnnnnnnnnnnnnnnnnnnnnnnnnnnnnnnnnnnnnnnnnnnnnnnnnnnnnnnnnnnnnnnnnnnnnnnnnnnnnnnnnnnnnnnnnnnnnnnnnnnnnnnnnnnnnnnnnnnnnnnnnnnnnnnnnnnnnnnnnnnnnnnnnnnnnnnnnnnnnnnnnnnnnnnnnnnnnnnnnnnnnnnnnnnnnnnnnnnnnnnnnnnnnnnnnnnnnnnnnnnnnnnnnnnnnnnnnnnnnnnnnnnnnnnnnnnnnnnnnnnnnnnnnnnnnnnnnnnnnnnnnnnnnnnnnnnnnnnnnnnnnnnnnnnnnnnnnnnnnnnnnnnnnnnnnnnnnnnnnnnnnnnnnnnnnnnnnnnnnnnnnnnnnnnnnnnnnnnnnnnnnnnnnnnnnnnnnnnnnnnnnnnnnnnnnnnnnnnnnnnnnnnnnnnnnnnnnnnnnnnnnnnnnnnnnnnnnnnnnnnnnnnnnnnnnnnnnnnnnnnnnnnnnnnnnnnnnnnnnnnnnnnnnnnnnnnnnnnnnnnnnnnnnnnnnnnnnnnnnnnnnnnnnnnnnnnnnnnnnnnnnnnnnnnnnnnnnnnnnnnnnnnnnnnnnnnnnnnnnnnnnnnnnnnnnnnnnnnnnnnnnnnnnnnnnnnnnnnnnnnnnnnnnnnnnnnnnnnnnnnnnnnnnnnnnnnnnnnnnnnnnnnnnnnnnnnnnnnnnnnnnnnnnnnnnnnnnnnnnnnnnnnnnnnnnnnnnnnnnnnnnnnnnnnnnnnnnnnnnnnnnnnnnnnnnnnnnnnnnnnnnnnnnnnnnnnnnnnnnnnnnnnnnnnnnnnnnnnnnnnnnnnnnnnnnnnnnnnnnnnnnnnnnnnnnnnnnnnnnnnnnnnnnnnnnnnnnnnnnnnnnnnnnnnnnnnnnnnnnnnnnnnnnnnnnnnnnnnnnnnnnnnnnnnnnnnnnnnnnnnnnnnnnnnnnnnnnnnnnnnnnnnnnnnnnnnnnnnnnnnnnnnnnnnnnnnnnnnnnnnnnnnnnnnnnnnnnnnnnnnnnnnnnnnnnnnnnnnnnnnnnnnnnnnnnnnnnnnnnnnnnnnnnnnnnnnnnnnnnnnnnnnnnnnnnnnnnnnnnnnnnnnnnnnnnnnnnnnnnnnnnnnnnnnnnnnnnnnnnnnnnnnnnnnnnnnnnnnnnnnnnnnnnnnnnnnnnnnnnnnnnnnnnnnnnnnnnnnnnnnnnnnnnnnnnnnnnnnnnnnnnnnnnnnnnnnnnnnnnnnnnnnnnnnnnnnnnnnnnnnnnnnnnnnnnnnnnnnnnnnnnnnnnnnnnnnnnnnnnnnnnnnnnnnnnnnnnnnnnnnnnnnnnnnnnnnnnnnnnnnnnnnnnnnnnnnnnnnnnnnnnnnnnnnnnnnnnnnnnnnnnnnnnnnnnnnnnnnnnnnnnnnnnnnnnnnnnnnnnnnnnnnnnnnnnnnnnnnnnnnnnnnnnnnnnnnnnnnnnnnnnnnnnnnnnnnnnnnnnnnnnnnnnnnnnnnnnnnnnnnnnnnnnnnnnnnnnnnnnnnnnnnnnnnnnnnnnnnnnnnnnnnnnnnnnnnnnnnnnnnnnnnnnnnnnnnnnnnnnnnnnnnnnnnnnnnnnnnnnnnnnnnnnnnnnnnnnnnnnnnnnnnnnnnnnnnnnnnnnnnnnnnnnnnnnnnnnnnnnnnnnnnnnnnnnnnnnnnnnnnnnnnnnnnnnnnnnnnnnnnnnnnnnnnnnnnnnnnnnnnnnnnnnnnnnnnnnnnnnnnnnnnnnnnnnnnnnnnnnnnnnnnnnnnnnnnnnnnnnnnnnnnnnnnnnnnnnnnnnnnnnnnnnnnnnnnnnnnnnnnnnnnnnnnnnnnnnnnnnnnnnnnnnnnnnnnnnnnnnnnnnnnnnnnnnnnnnnnnnnnnnnnnnnnnnnnnnnnnnnnnnnnnnnnnnnnnnnnnnnnnnnnnnnnnnnnnnnnnnnnnnnnnnnnnnnnnnnnnnnnnnnnnnnnnnnnnnnnnnnnnnnnnnnnnnnnnnnnnnnnnnnnnnnnnnnnnnnnnnnnnnnnnnnnnnnnnnnnnnnnnnnnnnnnnnnnnnnnnnnnnnnnnnnnnnnnnnnnnnnnnnnnnnnnnnnnnnnnnnnnnnnnnnnnnnnnnnnnnnnnnnnnnnnnnnnnnnnnnnnnnnnnnnnnnnnnnnnnnnnnnnnnnnnnnnnnnnnnnnnnnnnnnnnnnnnnnnnnnnnnnnnnnnnnnnnnnnnnnnnnnnnnnnnnnnnnnnnnnnnnnnnnnnnnnnnnnnnnnnnnnnnnnnnnnnnnnnnnnnnnnnnnnnnnnnnnnnnnnnnnnnnnnnnnnnnnnnnnnnnnnnnnnnnnnnnnnnnnnnnnnnnnnnnnnnnnnnnnnnnnnnnnnnnnnnnnnnnnnnnnnnnnnnnnnnnnnnnnnnnnnnnnnnnnnnnnnnnnnnnnnnnnnnnnnnnnnnnnnnnnnnnnnnnnnnnnnnnnnnnnnnnnnnnnnnnnnnnnnnnnnnnnnnnnnnnnnnnnnnnnnnnnnnnnnnnnnnnnnnnnnnnnnnnnnnnnnnnnnnnnnnnnnnnnnnnnnnnnnnnnnnnnnnnnnnnnnnnnnnnnnnnnnnnnnnnnnnnnnnnnnnnnnnnnnnnnnnnnnnnnnnnnnnnnnnnnnnnnnnnnnnnnnnnnnnnnnnnnnnnnnnnnnnnnnnnnnnnnnnnnnnnnnnnnnnnnnnnnnnnnnnnnnnnnnnnnnnnnnnnnnnnnnnnnnnnnnnnnnnnnnnnnnnnnnnnnnnnnnnnnnnnnnnnnnnnnnnnnnnnnnnnnnnnnnnnnnnnnnnnnnnnnnnnnnnnnnnnnnnnnnnnnnnnnnnnnnnnnnnnnnnnnnnnnnnnnnnnnnnnnnnnnnnnnnnnnnnnnnnnnnnnnnnnnnnnnnnnnnnnnnnnnnnnnnnnnnnnnnnnnnnnnnnnnnnnnnnnnnnnnnnnnnnnnnnnnnnnnnnnnnnnnnnnnnnnnnnnnnnnnnnnnnnnnnnnnnnnnnnnnnnnnnnnnnnnnnnnnnnnnnnnnnnnnnnnnnnnnnnnnnnnnnnnnnnnnnnnnnnnnnnnnnnnnnnnnnnnnnnnnnnnnnnnnnnnnnnnnnnnnnnnnnnnnnnnnnnnnnnnnnnnnnnnnnnnnnnnnnnnnnnnnnnnnnnnnnnnnnnnnnnnnnnnnnnnnnnnnnnnnnnnnnnnnnnnnnnnnnnnnnnnnnnnnnnnnnnnnnnnnnnnnnnnnnnnnnnnnnnnnnnnnnnnnnnnnnnnnnnnnnnnnnnnnnnnnnnnnnnnnnnnnnnnnnnnnnnnnnnnnnnnnnnnnnnnnnnnnnnnnnnnnnnnnnnnnnnnnnnnnnnnnnnnnnnnnnnnnnnnnnnnnnnnnnnnnnnnnnnnnnnnnnnnnnnnnnnnnnnnnnnnnnnnnnnnnnnnnnnnnnnnnnnnnnnnnnnnnnnnnnnnnnnnnnnnnnnnnnnnnnnnnnnnnnnnnnnnnnnnnnnnnnnnnnnnnnnnnnnnnnnnnnnnnnnnnnnnnnnnnnnnnnnnnnnnnnnnnnnnnnnnnnnnnnnnnnnnnnnnnnnnnnnnnnnnnnnnnnnnnnnnnnnnnnnnnnnnnnnnnnnnnnnnnnnnnnnnnnnnnnnnnnnnnnnnnnnnnnnnnnnnnnnnnnnnnnnnnnnnnnnnnnnnnnnnnnnnnnnnnnnnnnnnnnnnnnnnnnnnnnnnnnnnnnnnnnnnnnnnnnnnnnnnnnnnnnnnnnnnnnnnnnnnnnnnnnnnnnnnnnnnnnnnnnnnnnnnnnnnnnnnnnnnnnnnnnnnnnnnnnnnnnnnnnnnnnnnnnnnnnnnnnnnnnnnnnnnnnnnnnnnnnnnnnnnnnnnnnnnnnnnnnnnnnnnnnnnnnnnnnnnnnnnnnnnnnnnnnnnnnnnnnnnnnnnnnnnnnnnnnnnnnnnnnnnnnnnnnnnnnnnnnnnnnnnnnnnnnnnnnnnnnnnnnnnnnnnnnnnnnnnnnnnnnnnnnnnnnnnnnnnnnnnnnnnnnnnnnnnnnnnnnnnnnnnnnnnnnnnnnnnnnnnnnnnnnnnnnnnnnnnnnnnnnnnnnnnnnnnnnnnnnnnnnnnnnnnnnnnnnnnnnnnnnnnnnnnnnnnnnnnnnnnnnnnnnnnnnnnnnnnnnnnnnnnnnnnnnnnnnnnnnnnnnnnnnnnnnnnnnnnnnnnnnnnnnnnnnnnnnnnnnnnnnnnnnnnnnnnnnnnnnnnnnnnnnnnnnnnnnnnnnnnnnnnnnnnnnnnnnnnnnnnnnnnnnnnnnnnnnnnnnnnnnnnnnnnnnnnnnnnnnnnnnnnnnnnnnnnnnnnnnnnnnnnnnnnnnnnnnnnnnnnnnnnnnnnnnnnnnnnnnnnnnnnnnnnnnnnnnnnnnnnnnnnnnnnnnnnnnnnnnnnnnnnnnnnnnnnnnnnnnnnnnnnnnnnnnnnnnnnnnnnnnnnnnnnnnnnnnnnnnnnnnnnnnnnnnnnnnnnnnnnnnnnnnnnnnnnnnnnnnnnnnnnnnnnnnnnnnnnnnnnnnnnnnnnnnnnnnnnnnnnnnnnnnnnnnnnnnnnnnnnnnnnnnnnnnnnnnnnnnnnnnnnnnnnnnnnnnnnnnnnnnnnnnnnnnnnnnnnnnnnnnnnnnnnnnnnnnnnnnnnnnnnnnnnnnnnnnnnnnnnnnnnnnnnnnnnnnnnnnnnnnnnnnnnnnnnnnnnnnnnnnnnnnnnnnnnnnnnnnnnnnnnnnnnnnnnnnnnnnnnnnnnnnnnnnnnnnnnnnnnnnnnnnnnnnnnnnnnnnnnnnnnnnnnnnnnnnnnnnnnnnnnnnnnnnnnnnnnnnnnnnnnnnnnnnnnnnnnnnnnnnnnnnnnnnnnnnnnnnnnnnnnnnnnnnnnnnnnnnnnnnnnnnnnnnnnnnnnnnnnnnnnnnnnnnnnnnnnnnnnnnnnnnnnnnnnnnnnnnnnnnnnnnnnnnnnnnnnnnnnnnnnnnnnnnnnnnnnnnnnnnnnnnnnnnnnnnnnnnnnnnnnnnnnnnnnnnnnnnnnnnnnnnnnnnnnnnnnnnnnnnnnnnnnnnnnnnnnnnnnnnnnnnnnnnnnnnnnnnnnnnnnnnnnnnnnnnnnnnnnnnnnnnnnnnnnnnnnnnnnnnnnnnnnnnnnnnnnnnnnnnnnnnnnnnnnnnnnnnnnnnnnnnnnnnnnnnnnnnnnnnnnnnnnnnnnnnnnnnnnnnnnnnnnnnnnnnnnnnnnnnnnnnnnnnnnnnnnnnnnnnnnnnnnnnnnnnnnnnnnnnnnnnnnnnnnnnnnnnnnnnnnnnnnnnnnnnnnnnnnnnnnnnnnnnnnnnnnnnnnnnnnnnnnnnnnnnnnnnnnnnnnnnnnnnnnnnnnnnnnnnnnnnnnnnnnnnnnnnnnnnnnnnnnnnnnnnnnnnnnnnnnnnnnnnnnnnnnnnnnnnnnnnnnnnnnnnnnnnnnnnnnnnnnnnnnnnnnnnnnnnnnnnnnnnnnnnnnnnnnnnnnnnnnnnnnnnnnnnnnnnnnnnnnnnnnnnnnnnnnnnnnnnnnnnnnnnnnnnnnnnnnnnnnnnnnnnnnnnnnnnnnnnnnnnnnnnnnnnnnnnnnnnnnnnnnnnnnnnnnnnnnnnnnnnnnnnnnnnnnnnnnnnnnnnnnnnnnnnnnnnnnnnnnnnnnnnnnnnnnnnnnnnnnnnnnnnnnnnnnnnnnnnnnnnnnnnnnnnnnnnnnnnnnnnnnnnnnnnnnnnnnnnnnnnnnnnnnnnnnnnnnnnnnnnnnnnnnnnnnnnnnnnnnnnnnnnnnnnnnnnnnnnnnnnnnnnnnnnnnnnnnnnnnnnnnnnnnnnnnnnnnnnnnnnnnnnnnnnnnnnnnnnnnnnnnnnnnnnnnnnnnnnnnnnnnnnnnnnnnnnnnnnnnnnnnnnnnnnnnnnnnnnnnnnnnnnnnnnnnnnnnnnnnnnnnnnnnnnnnnnnnnnnnnnnnnnnnnnnnnnnnnnnnnnnnnnnnnnnnnnnnnnnnnnnnnnnnnnnnnnnnnnnnnnnnnnnnnnnnnnnnnnnnnnnnnnnnnnnnnnnnnnnnnnnnnnnnnnnnnnnnnnnnnnnnnnnnnnnnnnnnnnnnnnnnnnnnnnnnnnnnnnnnnnnnnnnnnnnnnnnnnnnnnnnnnnnnnnnnnnnnnnnnnnnnnnnnnnnnnnnnnnnnnnnnnnnnnnnnnnnnnnnnnnnnnnnnnnnnnnnnnnnnnnnnnnnnnnnnnnnnnnnnnnnnnnnnnnnnnnnnnnnnnnnnnnnnnnnnnnnnnnnnnnnnnnnnnnnnnnnnnnnnnnnnnnnnnnnnnnnnnnnnnnnnnnnnnnnnnnnnnnnnnnnnnnnnnnnnnnnnnnnnnnnnnnnnnnnnnnnnnnnnnnnnnnnnnnnnnnnnnnnnnnnnnnnnnnnnnnnnnnnnnnnnnnnnnnnnnnnnnnnnnnnnnnnnnnnnnnnnnnnnnnnnnnnnnnnnnnnnnnnnnnnnnnnnnnnnnnnnnnnnnnnnnnnnnnnnnnnnnnnnnnnnnnnnnnnnnnnnnnnnnnnnnnnnnnnnnnnnnnnnnnnnnnnnnnnnnnnnnnnnnnnnnnnnnnnnnnnnnnnnnnnnnnnnnnnnnnnnnnnnnnnnnnnnnnnnnnnnnnnnnnnnnnnnnnnnnnnnnnnnnnnnnnnnnnnnnnnnnnnnnnnnnnnnnnnnnnnnnnnnnnnnnnnnnnnnnnnnnnnnnnnnnnnnnnnnnnnnnnnnnnnnnnnnnnnnnnnnnnnnnnnnnnnnnnnnnnnnnnnnnnnnnnnnnnnnnnnnnnnnnnnnnnnnnnnnnnnnnnnnnnnnnnnnnnnnnnnnnnnnnnnnnnnnnnnnnnnnnnnnnnnnnnnnnnnnnnnnnnnnnnnnnnnnnnnnnnnnnnnnnnnnnnnnnnnnnnnnnnnnnnnnnnnnnnnnnnnnnnnnnnnnnnnnnnnnnnnnnnnnnnnnnnnnnnnnnnnnnnnnnnnnnnnnnnnnnnnnnnnnnnnnnnnnnnnnnnnnnnnnnnnnnnnnnnnnnnnnnnnnnnnnnnnnnnnnnnnnnnnnnnnnnnnnnnnnnnnnnnnnnnnnnnnnnnnnnnnnnnnnnnnnnnnnnnnnnnnnnnnnnnnnnnnnnnnnnnnnnnnnnnnnnnnnnnnnnnnnnnnnnnnnnnnnnnnnnnnnnnnnnnnnnnnnnnnnnnnnnnnnnnnnnnnnnnnnnnnnnnnnnnnnnnnnnnnnnnnnnnnnnnnnnnnnnnnnnnnnnnnnnnnnnnnnnnnnnnnnnnnnnnnnnnnnnnnnnnnnnnnnnnnnnnnnnnnnnnnnnnnnnnnnnnnnnnnnnnnnnnnnnnnnnnnnnnnnnnnnnnnnnnnnnnnnnnnnnnnnnnnnnnnnnnnnnnnnnnnnnnnnnnnnnnnnnnnnnnnnnnnnnnnnnnnnnnnnnnnnnnnnnnnnnnnnnnnnnnnnnnnnnnnnnnnnnnnnnnnnnnnnnnnnnnnnnnnnnnnnnnnnnnnnnnnnnnnnnnnnnnnnnnnnnnnnnnnnnnnnnnnnnnnnnnnnnnnnnnnnnnnnnnnnnnnnnnnnnnnnnnnnnnnnnnnnnnnnnnnnnnnnnnnnnnnnnnnnnnnnnnnnnnnnnnnnnnnnnnnnnnnnnnnnnnnnnnnnnnnnnnnnnnnnnnnnnnnnnnnnnnnnnnnnnnnnnnnnnnnnnnnnnnnnnnnnnnnnnnnnnnnnnnnnnnnnnnnnnnnnnnnnnnnnnnnnnnnnnnnnnnnnnnnnnnnnnnnnnnnnnnnnnnnnnnnnnnnnnnnnnnnnnnnnnnnnnnnnnnnnnnnnnnnnnnnnnnnnnnnnnnnnnnnnnnnnnnnnnnnnnnnnnnnnnnnnnnnnnnnnnnnnnnnnnnnnnnnnnnnnnnnnnnnnnnnnnnnnnnnnnnnnnnnnnnnnnnnnnnnnnnnnnnnnnnnnnnnnnnnnnnnnnnnnnnnnnnnnnnnnnnnnnnnnnnnnnnnnnnnnnnnnnnnnnnnnnnnnnnnnnnnnnnnnnnnnnnnnnnnnnnnnnnnnnnnnnnnnnnnnnnnnnnnnnnnnnnnnnnnnnnnnnnnnnnnnnnnnnnnnnnnnnnnnnnnnnnnnnnnnnnnnnnnnnnnnnnnnnnnnnnnnnnnnnnnnnnnnnnnnnnnnnnnnnnnnnnnnnnnnnnnnnnnnnnnnnnnnnnnnnnnnnnnnnnnnnnnnnnnnnnnnnnnnnnnnnnnnnnnnnnnnnnnnnnnnnnnnnnnnnnnnnnnnnnnnnnnnnnnnnnnnnnnnnnnnnnnnnnnnnnnnnnnnnnnnnnnnnnnnnnnnnnnnnnnnnnnnnnnnnnnnnnnnnnnnnnnnnnnnnnnnnnnnnnnnnnnnnnnnnnnnnnnnnnnnnnnnnnnnnnnnnnnnnnnnnnnnnnnnnnnnnnnnnnnnnnnnnnnnnnnnnnnnnnnnnnnnnnnnnnnnnnnnnnnnnnnnnnnnnnnnnnnnnnnnnnnnnnnnnnnnnnnnnnnnnnnnnnnnnnnnnnnnnnnnnnnnnnnnnnnnnnnnnnnnnnnnnnnnnnnnnnnnnnnnnnnnnnnnnnnnnnnnnnnnnnnnnnnnnnnnnnnnnnnnnnnnnnnnnnnnnnnnnnnnnnnnnnnnnnnnnnnnnnnnnnnnnnnnnnnnnnnnnnnnnnnnnnnnnnnnnnnnnnnnnnnnnnnnnnnnnnnnnnnnnnnnnnnnnnnnnnnnnnnnnnnnnnnnnnnnnnnnnnnnnnnnnnnnnnnnnnnnnnnnnnnnnnnnnnnnnnnnnnnnnnnnnnnnnnnnnnnnnnnnnnnnnnnnnnnnnnnnnnnnnnnnnnnnnnnnnnnnnnnnnnnnnnnnnnnnnnnnnnnnnnnnnnnnnnnnnnnnnnnnnnnnnnnnnnnnnnnnnnnnnnnnnnnnnnnnnnnnnnnnnnnnnnnnnnnnnnnnnnnnnnnnnnnnnnnnnnnnnnnnnnnnnnnnnnnnnnnnnnnnnnnnnnnnnnnnnnnnnnnnnnnnnnnnnnnnnnnnnnnnnnnnnnnnnnnnnnnnnnnnnnnnnnnnnnnnnnnnnnnnnnnnnnnnnnnnnnnnnnnnnnnnnnnnnnnnnnnnnnnnnnnnnnnnnnnnnnnnnnnnnnnnnnnnnnnnnnnnnnnnnnnnnnnnnnnnnnnnnnnnnnnnnnnnnnnnnnnnnnnnnnnnnnnnnnnnnnnnnnnnnnnnnnnnnnnnnnnnnnnnnnnnnnnnnnnnnnnnnnnnnnnnnnnnnnnnnnnnnnnnnnnnnnnnnnnnnnnnnnnnnnnnnnnnnnnnnnnnnnnnnnnnnnnnnnnnnnnnnnnnnnnnnnnnnnnnnnnnnnnnnnnnnnnnnnnnnnnnnnnnnnnnnnnnnnnnnnnnnnnnnnnnnnnnnnnnnnnnnnnnnnnnnnnnnnnnnnnnnnnnnnnnnnnnnnnnnnnnnnnnnnnnnnnnnnnnnnnnnnnnnnnnnnnnnnnnnnnnnnnnnnnnnnnnnnnnnnnnnnnnnnnnnnnnnnnnnnnnnnnnnnnnnnnnnnnnnnnnnnnnnnnnnnnnnnnnnnnnnnnnnnnnnnnnnnnnnnnnnnnnnnnnnnnnnnnnnnnnnnnnnnnnnnnnnnnnnnnnnnnnnnnnnnnnnnnnnnnnnnnnnnnnnnnnnnnnnnnnnnnnnnnnnnnnnnnnnnnnnnnnnnnnnnnnnnnnnnnnnnnnnnnnnnnnnnnnnnnnnnnnnnnnnnnnnnnnnnnnnnnnnnnnnnnnnnnnnnnnnnnnnnnnnnnnnnnnnnnnnnnnnnnnnnnnnnnnnnnnnnnnnnnnnnnnnnnnnnnnnnnnnnnnnnnnnnnnnnnnnnnnnnnnnnnnnnnnnnnnnnnnnnnnnnnnnnnnnnnnnnnnnnnnnnnnnnnnnnnnnnnnnnnnnnnnnnnnnnnnnnnnnnnnnnnnnnnnnnnnnnnnnnnnnnnnnnnnnnnnnnnnnnnnnnnnnnnnnnnnnnnnnnnnnnnnnnnnnnnnnnnnnnnnnnnnnnnnnnnnnnnnnnnnnnnnnnnnnnnnnnnnnnnnnnnnnnnnnnnnnnnnnnnnnnnnnnnnnnnnnnnnnnnnnnnnnnnnnnnnnnnnnnnnnnnnnnnnnnnnnnnnnnnnnnnnnnnnnnnnnnnnnnnnnnnnnnnnnnnnnnnnnnnnnnnnnnnnnnnnnnnnnnnnnnnnnnnnnnnnnnnnnnnnnnnnnnnnnnnnnnnnnnnnnnnnnnnnnnnnnnnnnnnnnnnnnnnnnnnnnnnnnnnnnnnnnnnnnnnnnnnnnnnnnnnnnnnnnnnnnnnnnnnnnnnnnnnnnnnnnnnnnnnnnnnnnnnnnnnnnnnnnnnnnnnnnnnnnnnnnnnnnnnnnnnnnnnnnnnnnnnnnnnnnnnnnnnnnnnnnnnnnnnnnnnnnnnnnnnnnnnnnnnnnnnnnnnnnnnnnnnnnnnnnnnnnnnnnnnnnnnnnnnnnnnnnnnnnnnnnnnnnnnnnnnnnnnnnnnnnnnnnnnnnnnnnnnnnnnnnnnnnnnnnnnnnnnnnnnnnnnnnnnnnnnnnnnnnnnnnnnnnnnnnnnnnnnnnnnnnnnnnnnnnnnnnnnnnnnnnnnnnnnnnnnnnnnnnnnnnnnnnnnnnnnnnnnnnnnnnnnnnnnnnnnnnnnnnnnnnnnnnnnnnnnnnnnnnnnnnnnnnnnnnnnaatggaacctcgactctacggagagggctccaggggccttcgaagcccaattaaaagacgcggaacgtttccacgtcgatctcaagcgacccaaacccgtggtctgggccctaatcaacattctacgacacttccatcaagccttcagctatgagggtcatctcatagggaactacaccaagattccttatgcgcctcgatttatctcggctccgccacccctttcgaggccacggtcgtactctccgttggagcggacagccctcgagacggagcgagacaccatgatggggcttcagaggtggaaacgaaccaccgaagtaaccttcgccagcgatcctgttatcattcgctatgcagacaaacccccgcgcgtagccttcgactatcgccgagccaacgactgcatggcctgggatccatatccctttcccatcatgcttgatttggatgtcactgggcaattgttcgactattaggtcgaaatgctggtcagcgggacattctatgtttgcccggtcgccgtatgcgaggcgctggagatgagttttgtggtcaatgaacgcgagaaagctgcaaaattctttggggttcacgtggcagtgcacatattcggttttgcgcttggactcggttaggggatctcggaactctcgaagcagttcctctttccaccttttccaggtccatgagcgagtttcctgggcttccagagtgtaaaaccaagcgtcagcaggggttttctcggctatcatggctggtaggagctgtaccatcctggcatccgacgttgcgctaacgttttgaagaagttggactttgttaagccattcttcaacgtcttggtttcttctgcccgtaaactcgggtacgtcctttgctttcaaggaatcgaccttggtgtcgctggcccacggggccgctggcacttggattggaggcaccgcacctgaaaaacttggttcggtacgctcccttggtgtgtccgccgtttcccacggggttgcggaccgttctcttgtagctcgtgctatgggaggttgtccaggcagcgggcgatgcgctagggcttctaaggctcgtgcgaggcgctcatccgccgctgtctgacgttcggaaagcctatgaagctgttccgtaaggttttgagttgccaactgcgttgcagcagtcgagcgggcaatgtcttcttttaacgctgccacttcagaggccatcgtggccaagttaggggcttccggttcgacggaagtggtccctgaacgccttgggcgtgttgcgggagggacttcgacgtcctccgcaggaccctgactacgagtctggatcacaggtgagcggcctcgcgttggagagcgttcgaccggcatcattctcagtttcgtgaagtctgtttccgaaacgagagaaaaggtttccgagtagctacctgagcggatctcggtttgcgcaagagtttcggtacgaccgaataaggatttcagctgaatttgagaggggaaggcagttcgtcgcgcttctccaccatgtaacggattttttgttggtagactatggtaaagacaacttgggtctcctagcaggttgtgtgggtgtccgtactaggaatcatagtctccaaatcctttctttgggcgtcggtagcgacttgagggcgagaggcaaggagagtcggttagttgtgaaccgagcaggatttagaggcttcggtgcgggtgatcaggccattgaagcgctctgttaggttcctgttaacctaggattggggttgagaagctagttgtggggattttttgtcgctacggcttctgcccccgacttattttattgaatacatcctttttatacaagattcttggataaactgttaaactaaactaaactaatgggtgtcgctgcaccgcaactgatttattggtggcggtaccgatctcttccttttccgcactggctcgggcctccacaggttgtacgaggcacgctgaaatctaatgcgccaattgccattctccgaaccggttttttcggtcgcggtaacccaatcggtggagttggtcacgcgattcgtgcttcccgcgtccgatttgggcttactcgcgatctctcgaagacgtcctcgtcgttacaatcctctgcatcgcccgccaagaagcacaagccatagagaaggtcgatttatggatgcgcatctgcaatctacgtaccaaggcttttcggtctcgccgcgatatgcagtttgaaggctcgatcacgacagatggcacctcggtgtcagtttacttgaaacatcctgaagctgacaagtatggaaagcgcagcagcggagggaagaagtcagcaaagaccctagaagctgaggtgaaggcagtatatgtggagaacaacttgcctgcctgtcgagcagcagagaatgtcatcgttatcaacccaaacaagcgcgacattctctactgccaagacagtaatggcatgacatttcgctacactgccaaccagcgagccgtggagactggaagccgtcaatttgcaaaagaacggcagcagatgaaagccggcagtattgacctcatagaatcatgaataccatctcacaagacgatgaacctcatggactttactcgctaccttctcattcgctgtgcagattcggatcattgaaaggagttctactcacatcctgcccacacgcggtggaagtggcatacatttataaaccatcagaagagtgaatcaaacctcatatccaacatgcgcaacaagtttgggaacttcaccattgtgatgggtgattggagcgatgccagtcgaactgcaagatttcagacctcatcaaagacgaaaggttggcgcaccctctttaagcgcaacaggatcaactgcttccttctcaacgagtacaagacctcatctgtctgccctcactgtttggcctcatccgctgacttccttgaaaaaggcttcaaaacacgacctcattcaagaccttggcgccgtcgcgaaggcaagattgaaaaagtccatggattgctgggttgtaccaaccctaactgtcagcaagcctggacgatgcgctactggaacagggacacgctgagcacctgcaacatgctgatgatcgtgcaatcaatgttagatggacacggtagaccagaggtgttcaggaggggtgttccagtggtagcgtagcgtagactagttagattaaggtttccgaactggttgtcgccggttcaatccctggtgcgggtgctagtgccaatacccatcggctccgcactaacaatcatacccatcaaaccaaaccaacagcgacaacttccaaccctcgtgcgatggccaagattgaagaagaaaaacccgtacatgcctattttaacaaaatatttccggaacgatggaaccctccccatttctggggaaatggaggcagtccactgaaggagcaagctcatcacatctggaaaacgtcgcttctcaatcttttgtcgtgtctggactaagcaagagctgagagagctgctgctttgttgaagatggatcaggttcgttgcttcagccattttacacaaacgcgtcgttcattaacatgatacaccttgaatagttctacttttagagtcctaaaccggagttccattgtcataaaaaaaaacaaaatcgctgatacccaagggagcgtaaacttaaccggtgcgtccatctcaatggagccgcaaacacctgtaatccagacgccaaacgtgagtctttgtagtagttgtttatcatgtcaatgtaatactcacagttcatttaggtcggtatgaaattatccggatttaaggaaaggttaacgaaacgctcgtttgcggatgcgttcgacgatgatgatgatacgatcgacactcctacgcgccataccaagaccacccaactcgaagcaccgtacaagtcaaaagatgaaacccttactcgatattatattcgcttggcgcagcactgtgagaggactggacatatcactcgcccccaacttggattcacggttcgctgcattactgacaccgagcaccagtatcacaaggcagtaatggatgtgctcgctgtctacgatgagactcggatgggatgtacctttggctccttcttggaggaaatttaccccaacaatacgaccaaaatgaagagtctggtaaaagaatccttgatgaaacaggcttcctcacaagctatgtcggcggcctgtacgatgctctctaatggtgtagcggcttttggtgctatccttctcgcgagagcatttgggtggaacgtcaagggtgacgcaaggttgatgccta

SEQ ID NO: 790 - protein, 193 aa, Spizellomyces punctatus
  source 1..193: note = <1..583, XP_016610126.1, regulatory P domain-containing protein CDS
GYTHDVQVVNYKGPDSRYRGREIAFASNEDTVTFWDVTDKSSPKILSRTGYTGAAYTHQGWLTEDHQYFLVDDELDEKNGSDKHTKTYIWDVRSLTAPKHIGTYSAPVTSIDHNLYIKGNYAYLANYGSGLRVLDISKVAQAKLQEVAYFDVTPEKNEAVFEGSWSSYIYFPSGNIVVNSIERGFFVVKTTTI

SEQ ID NO: 791 - protein, 247 aa, Spizellomyces punctatus
  source 1..247: note = 930..1673, XP_016610127.1, uncharacterized protein CDS
MNYGLIQKILYKLSSRIFPGFHLFPQISSMPPKKKQKLENPTCLHTCNKTSFAKAFLPNDIYRQWLLDYIAIIHQLADHASHALKFYILSAPTFTVNEETIEAILYLLNKGEAWHPRKEAKKAWRDCLLPYVQRYCHIISFVHPNLQKEQQSINYLTASMMTNLKVNVQEHFMQMLLWYINLRLDVKGQKQRLKSDARNAFFARLHYLKSIFLFDIVPESLDDLCNDEDVFERSRVSPNRTREARIA

SEQ ID NO: 792 - protein, 1115 aa, Spizellomyces punctatus
  source 1..1115: note = join(2364..5575,5635..5770), XP_016610128.1, uncharacterized protein CDS
MPVERSPTRGRSPVIQTRSQGPAEDVEVPPATRPRRSGTTSVEPEAPNLATMASEVAALKEDIARSTAATQLATQNLTEQLHRLSERQTAADERLARALEALAHRPLPEQPPIARATRERSATPWETADTPRERTEPSFSGAVPPIQVPAAPWASDTKVDSLKAKDVPEFTGRRNQDVEEWLNKVQLLQNVSATSDARMVQLLPAMIAEKTPADAWFYTLEAQETRSWTWKRWKEELLREFRDPLTESKRKTEYVRCHANPKEFRSFLAFIDHKTHLRRLAYGDRANIECPADQHFDLIVEQLPSDIQIMVKSCNVTNLTKLKDFLRLYFGSDDTRKRDPCYSGAAEAQKKSQKTGTDKGPKQTAPHKTGNPEKGRDGPQKMVPDPNKEPPAPCKFCQKKHWNVFCWQNPNRKDPEDGKKGPYGAPMPSGWKPKQESKKAYIVELDSTSATTETLFSASELERTEAANQGFHTIGFFHSPKHSESTILMTAPLSKVTVTKEEDPRTPTQGWDRVWDNIAIIWGTPQVALMMGNNPRALSFFAKEPKRGAGHLGNDPYAVAWSSHHLYIAAAAEADKDRILRKVREDGTPRLILLAWIKLDEREKFLMWSSEDPVIFDAYANLQLVAFLLTGNIVRSDYYYRRGNPKFRHVKDHPRLQRHEESERTRIVMLAIEQVARQNKTTKPQNDKTREHFESVIKATEATINDIAPHFEIAVPSINAFYSVDLGDVLKSQTKTQTQPCWTLAVIAQLWAPVVLDTGACESLISDTYQGLLFSETDLQDAETMAFNGIGGRISSTKTVCLETSLRGRGGEYLTFRAYFRVIAYGKPLIILANDVLGHLKLQTLVQEPPLPSFAVTLKNPDILIPCSITDELDTDHMRGTPYKTKQGEFMKDVSMPRLTKAKAQKSRLTMLITGQTRVAAQTFLIENPLEATAASSTVPLGLKLSTATHNSVADPEENISKEEWQTLRNKWNLDSTERAPGAFEAQLKDAERFHVDLKRPKPVVWALINILRHFHQAFSYEGHLIGNYTKIPYAPRFISAPPPLSRPRSYSPLERTALETERDTMMGLQRQTPARSLRLSPSQRLHGLGSISLSHHARHPELDRRSPIPIHIGR

SEQ ID NO: 793 - protein, 370 aa, Spizellomyces punctatus
  source 1..370: note join(complement(20050..21056),complement(19871..19976)), XP_016610129.1, uncharacterized protein CDS
MMPVERSPTRGRSPVIQTRSQGPAEDVEVPPATRPRRSGTTSVEPEAPNLATMASEVAALKEDIARSTAATQLATQNLTEQLHRLSERQTAADERLARALEALAHRPLPGQPPIARATRERSATPWETADTPRERTEPSFSGAVPPIQVPAAPWASDTKVDSLKAKDVPEFTGRRNQDVEEWLNKVQLLQNVSATSDARMVQLLPAMIAEKTPADAWFYTLEAQETRSWTWKRWKEELLREFRDPLTESKRKTEYVHCHVNPKEFCSFLAFIDHKTHLQRLAYGDRANIECPADQHFDLIVEQLPSDIQIKHDGKGIWIPGHAVVGSAIVEGYARGPIMVSRSVSRAVRSNGEYDRGLERGGGAEINRGA

SEQ ID NO: 794 - protein, 116 aa, Spizellomyces punctatus
  source 1..116: note = 21913..22263, XP_016610130.1, uncharacterized protein CDS
MQFEGSITTDGTSVSVYLKHPEADKYGKRSSGGKKSAKTLEAEVKAVYVENNLPACRAAENVIVINPNKRDILYCQDSNGMTFRYTANQRAVETGSRQFAKERQQMKAGSIDLIES

SEQ ID NO: 795 - protein, 186 aa, Spizellomyces punctatus
  source 1..186: note = join(23388..23423,23480..>24002), XP_016610131.1, uncharacterized protein CD
MEPQTPVIQTPNVGMKLSGFKERLTKRSFADAFDDDDDTIDTPTRHTKTTQLEAPYKSKDETLTRYYIRLAQHCERTGHITRPQLGFTVRCITDTEHQYHKAVMDVLAVYDETRMGCTFGSFLEEIYPNNTTKMKSLVKESLMKQASSQAMSAACTMLSNGVAAFGAILLARAFGWNVKGDARLMP

SEQ ID NO: 796 - DNA, 33826 bp, Spizellomyces punctatus
  source 1..33826: mol_type = unassigned DNA; note = Origin - Fz = 1431..2054, Fz = 6641..7141, Fz = 31571..32275
attgcccacagccgggtttgtctcaatgcaaacagtgccagaacgggatatgcggcagcataataaagcgtggtgaagaagtctttgtttccgcacgcgccgcccccaagccctcccgttttatcaatgtcaaagaagtcgcacagtttcatttcgactgcaaatacaacgggccaactccaacatgtaaagagcaaaaatatttgccatgatgcatagcgatatcggggtacatcaaagacgaccagtattggaatcaagagggagaagaagccgacaatgccaatgtatgagtacatatcgtaggtgttccaagggcggggaatcaggccgagagcaagtatccatgatagtagaataaacaaagcagccatcagagccagtggtttgcgcatgtaccaattctgcattagaatgttattgatcagcataaaaccaaactttgccaagcaggaccagtcactgattaacgtgcctctttttgatagtgtctttccacactttcgtcatcgaacgatagatcaaagtagttttttatctttggccacattccaaaccgcatcgttctcacaaaccacgttctgacagccctggtactactttgactgatttccgaccacccgggatctgtgtcgtagttatcttcttgtaccggtgcttcctttacgctgctggccattgaagactgtctacggctgccagttgtggatacagcagcaggaagcaatagtgagtcaacaatgatctcatcagcaggttcttcgtcctcgtccagcgagccgcggggtttatttgggtctcgcggagcggggggtgtggattcagaggacgtcaaatcgactaggtacgactcggaaggcagggatgcaggtaaatgtaatgccttgagttttcgcactattttccctagccgatctctgtatttgaaatggatgcctcttgaaggcatcattgttggtaaaaggaggagtggacaaacaccgtggttatgaagaccaaaggccagagcgcgaacaaagggacgcagcacgggaaaacccttgactctgccaaccctgaccctcggctacgcgcccttgtgtgaaaggatagagttcaaaacaccttttgcagtgttcaaagatttaatggacgttctatcacatgacccgatcaaggacccaatccgtccgatcggtaactgaatttgatggaaaaggtaatccataactccgactttttttatagtgcggagccgattggtattggcactagtacatagattccaaccaatttaatcataattttactcgatttagactcatgaactatggtttgatccaaaaaatcctatataagttgtcgtcgcccattttcccaggctttcatcttttcccacagatatcatcatgccgccaaagaaaaagcaaaagcttgaaaaactcgacaaacccaccttacatacctgcaacaagacttcctttgcaaaagctttcctgccaaactatcgccaacggcttctagattacatcgccatcatccatcaactcgccgaccacgcttcccatgctctcaaattctacatcctatctgcaccaaccttcaccgtgaatgaggagaccatcgaagcgattctctatcttctcaacaagggggaggcttggcatccaagaaaggaagcaaagaaggcatggcgggattgtttgctgccatatgttcaacgctactgccacatcgtcagcttcgttcatccaaatctacaaaaagagcagcagtcaatcaattacctgacagcgagtatgatgacgaacctgaaagtcaacgttcaagagcatttcatgcagatgctccttcggtacattaatctgcagctcgatgtgaagggacagaagcagcgactgaaaagcgatgcgcgaaacgctttctttgctcgtcttcgctacttgaagtcaattttcctttttgatatcgtgcccgagtcgctcgatgacttgactgctgaagagagtgaacttctagaagagatttggtcgctcgatctgccttttcttattgaccatccactcgcctatgtaacgacgaggacgtcttcgagagatcgcgagtaagcccaaatcggacgcgggaagcacgaatcgcgtgaccaactccaccgattgggttaccgcgaccgaaaaaaccggttcggagaatggcaattggcgcattagatttcagcgtgcctcgtacaacctgtggaggcccgagccagtgcggaaaaggaagagatcggtaccgccaccaataaatcagttgcggtgcagcgacacccattagtttagtttagtttaacagtttatccaagaatcttgtataaaaaggatgtattcaataaaataagtcgggggcagaagccgtagcgacaaaaaatccccataactcgcttctcaactccaatcttaggttaacaggaacctaacagagcgcttcaacggcctgatcacccgtaccgaagcctctaaatcctgctcggttcacaactaaccgactctccttgcctctcgccctcaagtcgctaccgacgcccaaagaaaggatttggagactacgattcctagtacggacacccacacaacctgctaggagacccaagttgtctttactgtagtctaccaacaaaaaatccgttacatggtggagaagcgcgacgaaccgccttcccctctcaaattcagctgaaaaccttattcggtcgtaccgaaactcttgcgcaaaccgagatccgctcaggtagctactcggaaaccttttctctcgtttcggagacagaacttcacgaaaccgagaatgatgccggtcgaacgctcaccaacgcgaggccgctcacctgtgatccagactcgtagtcagggtcctgcggaggacgtcgaagtccctcccgcaacacgcccaaggcgttcagggaccacttccgtcgaaccggaagcccctaacttggccacgatggcctctgaagtggcagcgttaaaagaagacattgcccgctcgactgctgcaacgcagttggcaactcaaaaccttacggaacagcttcataggctttccgaacgtcagacagcggcggatgagcgcctcgcacgagccttagaagccctagcgcatcgcccgctgcctgaacaacctcccatagcacgagctacaagagaacggtccgcaaccccgtgggaaacggcggacacaccaagggagcgtaccgaaccaagtttttcaggtgcggtgcctccaatccaagtgccagcggccccgtgggccagcgacaccaaggtcgattccttgaaagcaaaggacgtacccgagtttacgggcagaagaaaccaagacgttgaagaatggcttaacaaagtccaacttcttcaaaacgttagcgcaacgtcggatgccaggatggtacagctcctaccagccatgatagccgagaaaacccctgctgacgcttggttttacactctggaagcccaggaaactcgctcatggacctggaaaaggtggaaagaggaactgcttcgagagttccgagatcccctaaccgagtccaagcgcaaaaccgaatatgtgcgctgccatgcgaaccccaaagaatttcgcagctttctcgcgttcatcgaccacaaaactcatctccggcgcctcgcttatggcgaccgggcaaacatagaatgtcccgctgaccagcatttcgacctaatagtcgaacaattgcccagcgacatccaaatcatggtcaaatcctgtaacgtcacgaacctgaccaaattaaaagacttcctgcgcctttatttcggctctgatgacaccagaaaacgagacccttgctacagcggtgctgcagaagctcagaagaagtcacaaaagaccggaaccgacaaaggccctaagcagacggctccgcataaaaccggaaaccccgaaaagggtcgcgatggtcctcagaagatggttccggaccccaacaaggaaccaccggcaccctgcaaattctgtcagaaaaagcattggaatgttttctgctggcagaacccgaaccgaaaagatcctgaagatggaaagaaaggaccatatggagcacccatgccctcaggttggaaacccaaacaggaatcgaagaaggcgtacatagtggagctggactcgacgtccgctaccaccgagactcttttttcggcttcggaactggaaagaacggaagccgctaatcaaggattccacaccatcgggttctttcattcacccaagcactcggaatcaacaattttgatgaccgcacctctttccaaggtcacggtgaccaaggaagaggacccccgcacgcccacgcagggctgggaccgagtctgggacaacatagccatcatctggggcaccccgcaagtggctctgatgatgggcaacaacccccgcgcgctcagcttcttcgccaaagaaccgaagcgaggcgccgggcacctcgggaacgacccctacgcagtcgcgtggagttcccaccacctctacatcgctgccgcagccgaagctgacaaggatcgaatcctgcgaaaggtccgagaagacggtacccctcgtttgattctccttgcctggataaagctcgacgagcgcgagaaattcttgatgtggagctctgaagatcctgttatctttgatgcgtacgccaacctgcaactggtggcatttctcctgacaggcaatatcgttcgctcagactattattatcgtcgcggaaaccccaaatttcggcacgttaaagaccatccacgtctccaaagacacgaagagagcgaacggacgcgtatagtcatgctggctatcgaacaagttgctcgccagaataaaacaacaaaaccacaaaacgacaaaactagagaacactttgagagtgtgatcaaggctacggaagcaacaattaacgacatcgcgccccatttcgagatcgcggtgccttctatcaacgccttctactcagtagatttaggcgatgtactcaaaagccagactaagacccaaacgcagccttgctggacgctagccgtcatcgcgcagctctgggcacctgtggtactagacacaggggcctgcgagtctctgatttccgacacgtaccaaggccttctgttctccgaaaccgatttgcaggatgcggaaacgatggctttcaacggcattggtggacgtatctcatctaccaagacagtatgcctcgaaacttccctcagaggccgcggcggagaatacctgactttccgcgcctactttcgggtcatcgcgtacgggaaacctctcatcatcctagccaacgacgttttgggacatttgaaactccaaaccttggttcaggaacccccgttacccagtttcgcggtgacgctcaagaatccagacatccttatcccctgctccataacggatgagctggacaccgatcacatgcgcggcacgccatacaagaccaagcagggtgaattcatgaaggatgtgtcaatgccacggctgaccaaagccaaagctcagaagtctagattaaccatgttaatcacgggacagacgcgcgtggcagcccaaacttttctcatcgaaaaccctcttgaggccaccgctgctagctcaacggtcccgttaggcctcaaactgtccaccgcgacccataattcggttgcggaccccgaagagaacatttccaaagaagaatggcagacacttcggaacaaatggaacctcgactctacggagagggctccaggggccttcgaagcccaattaaaagacgcggaacgtttccacgtcgatctcaagcgacccaaacccgtggtctgggccctaatcaacattctacgacacttccatcaagccttcagctatgagggtcatctcatagggaactacaccaagattccttatgcgcctcgatttatctcggctccgccacccctttcgaggccacggtcgtactctccgttggagcggacagccctcgagacggagcgagacaccatgatggggcttcagaggtggaaacgaaccaccgaagtaaccttcgccagcgatcctgttatcattcgctatgcagacaaacccccgcgcgtagccttcgactatcgccgagccaacgactgcatggcctgggatccatatccctttcccatcatgctcgacatcctgaactggatcgtcgcagtcccattccgatacatatcgggaggtgacgcaaacaaaggattctaccaaatcgccatcaccgatgcgtcggtacgcaaatggctcgcgctcagactccatgacggcatctacgaaccactctttatgcccttcggacccaagactgccccctcgcacttctgtcgggtgatggacgacaccttgggtccctccaaatggcgaaatatcaacaacttcgtcgacgatatccacacacgagtggagacagccgcggaagccctagacgccatcgcggactggctcgaccgcttttccagagccaaactcaccctaagactcgacaagtgtcaatggctctttcaccagctcacggccctcggtttcgttgcctcctctcagggtctcgctaccgatccagacaaggtcgcaaccatagtcgattggccacaacccaaattcataggtgacctgaattttccctgcctactgtcggttgtcaagcctatatgaaaagcatggatttcgacggttcagtgcaatccctcttcgtcggtcgctgattcagtcccatattcgcatcgacacggtcattctctacgcccacatcctctgcatcacccgccaagaagcacaagccgtagagaaggtcgatttatggatgcgcgtctgcaatctacgtaccaaggcttttcggtctcaccgcgatatgcagtttgaaggctcgatcacgacggacggcacctcggtgtcagtttacttgaaacatcctgaagctgacaagtatggaaagcacagcggcggagggaagaagtcagcaaagaccctagaagctgaggtgaaggcagtatatgtggaaaacaacttatctgcttgtcaagagaacattgtcgttatcgatccaaacaagcgcgatcttctctactgccaagacaacaagggcaccatcttccgttacaccgcctgtggtagtgcatgcctgtggtatataccacaggcatgcactaccacagtgcccatagtcagcttcactgtaccaaaacccatagtatggaagaatgtaccaaaacccatagtacggaagaatgtaccaaaacccatagtacggaagaatgtaccaaaacccatagtacggaagaatgtaccaaaacccatagtacggaagaatgtaccaaaacccatagtacggaagtgtttgcccaatgcattggagtgtttcaaagtgtttcgagtcttccaaggtgtttgcccaatgcattggagtgtttcaaagtgtttcgagtcttccaaggtgtttgcccaatgcattggagtgtttcaaagtgtttcgagtcgtccaaggtgtttgtccaagtccgggactattgatgaagggatgatatgcggtatagtgcacttacatgtcaaattttacgcatctaatatttcacgtgtccaaactccacctaattcaaagtcaacactggttctaacttgacattcgcttcttctcaagactccatgatatcacttcatcttgggactccatctctcagccttcgacatcgtagcttgtggactcgtctgtggactcgtctctccacatatctcttccaacaaggatagcatcgaaacttgtatcctttctgtccaattcttcgcaattgaaacctccttccacaatccatgcagatttgctctagactttggtgtccattgttccctgaaagcaaccattccaatatccatctcggcaccagcacacaatcattcacatagtccattgttaattgttgtatatgggaatcgtttttgaaaagaaggcttcgagctggggggactggcgggaccggcgaccctcttttataaacggataaggaactctcccatcttatcgataagatggttcactagtcctctcatcctatcgatataacatgttcgatctctcatcgacaaagtgttgatttttttgcccttcatgcatagtagagcatttgtaagtgtgcatttaattatgtagagcaggatgtagagccgtgcacacttgcacacttacacacttccatttgggttgctttagggaaaaagttacttaatactaatattattattagtatgtcctcaatttctctctcaaagaacctgaaaactaagtgtgcaagtgtgcaagtgtgcatgtagaccattcttcattgatttctttccgactttcactagagaacaatggaagactagctaatcatttctgatattatctacaatcacctagtcgcacacttcctacacatttccatttctaaatgtgcaagtgtgcatttgtctaattcacttttgacatcctcactgctatccgcgtccctccatgcctgtggtgtgataggtttgctatctgtaccatccgcctgatatagaaatagcatgaactctttgctactgggtttgctttaaactcactttttacttctgagttgcgtagttgcgtttgatggaagatggtcgtagaggcagcaaggaaaggatcagtggagggattccaagaggagaactaaagcgagttcggataccatcacgtgatctaaaatttgaatgcattgcgcaaagtggcacagtcaacctaatgccaaagtctatcggctgcacactatataatcgagtgccacttatgtaatggacccgtgcatcgctgcacaaaaagctgtgttggcatctgtgtttcagatgcatgtggtttctttttcgtttctttttgtggtcagtccaacgaaagaagccatgaaaaggaaaggactgtatgacccaatggggatacagttctccatctgcatccccatcttttatagagaaaaaaaagggaagccgcgttcacccaatttccatccgcatttctagaacaaagagcctttcattatgattgtgtcctaagagaacgcaatcctgcaagatggccaagtagccggaatttcgaaagcagatttcatccagtttcttcaagtggacgattgacattatctctttgaagatgtgttcgttctggtctgttttcggaagaaacaatatgatacgttttttatctcctgtcatcatacctcgacagtacctccagaatttatccatgtcacccttcacagcgtccttgatgttcaatactgaatgaccttcaatatccgcgcgtcgcattcttatcttgcatagcttcttttttaaatgatggcaaatgaagttcctttctttaagaccctaattccattacctctataatggttacatctgcgcttgtgtccggtgctgcatttactgctgaaaaattggtaaaatatgctacatcaggaactaaccccgacacaatgaatgaggcataaattgttctgttcactccagcattatagttaaaatcactggaaaagactgacggcatcgaaccggcattagttcctagatacacattgagtgttcctcctgcattattggtgccatgcaagttgatggtatagcgtatcaacgcccggccggctgtagaaacatagaacgtctttgttccgctaccagttgtgattacatctttagttagcattttgaacacctgaacctttggaaactgtacttgagatgacacccaggcttgcgtcgcacagatctgaccattcgagtaaactggcccatttgaatacaagttgcctcctgcaacaacatgtgcaccaaccgcaactcctccattcacaaccaatgcgcccgttgtactcgataacactggagtggtgctttcaacaacgacattacctgtgttaggataaatgtaaataccttttgctccctgtgattgaaggcgtacggcaccgacgtcattcctgagcgtgagtgtattagcgcctccatctactgttcgatttgagccattcataaaaagaacggaagaacccgcggccgtcgttaaatagtaaattggtgctgcattcgttcctgtgtctacattcttgacctgaatgcttcttaaagcatttacactggtgtttccgatgatgacatctctatcaaaataagcatttccggttgctccattaagcgacatacttcgaatagatgcgttgctttgtccgacatagaaattcaggtctacattgttactaccaggcaaataggattgtatagaacatatattttgcattgcgtgtgaaaacatgagggtattggtttggccaacactatagttagtattttggatggtcatttgtgccccagaaacccatagtttcttagcgattccaagccctcctgcaacttgaaaagcacccatcgttgaggatgtagagtcagtggtcgtattcaacaggagagtacctgtattacctaataccatccattgggtgccgttgttcatggtgctaaaatatagtggggccgcactattagtggtattattcaatccgctttgaatgtaattagcaccgctggtgctaacaaatcacatacaactaggagttgcacccgtgtccattagataatgcgatacaccacccgactggccttgcatgatattttttgaaatccctacacctcctttaacctgtagagcacctgtagagactgttgttgcatcgcttgtatcattagcaacaatggtagcgacagacaagggtgtagtcattgtgattatatcttgtttcgaagatagcgatgtttgcaatgaagatatgtctgacccgtaatcgacaatgttcaaaatacttcgaacttcaatgtcgttttgaagaataagaccattgacatcatcacccatgacaaacatattgctcatcggttgcatggatgcaatggaatcaagtaaaggacttgcatcttgcttaccagataggtcaacactcgttacacccagaatgtctcgtacctctgctggcgtcttcacagaaaaggtagttccatcatttcctatgataaaggaatttgttgatggaacaagaccacttaaagaggacaacaaaggactcgatggttgtaatgtggaaatcgctgaggaaacataactctgtgttgcgacttgagcactatttgcaaaaatgttaccaccgacataaagcgccttaccaattccaacaccacccttgacttggaatccccctgttgttgacgatgtagagtcggttgtggtattcactaccacggaaccagaggacaatatgtctaaagtagatgtggtatttgtagtcccaaagcggaagttcgtacctatagtccgcatacatacatcattggccaaatcattgaaaaacatttgaccattggttgatggactgaacgaaacaaagtctccggcatttgtccctgtaccccatctgaaacctagtcctgtacctttaccactgtataccgaacttccaacataaagatttttagagaccccgactccacctgcaacctgtaatgtgcctgtagccgttgacgaggagtcagaagtacatgtaacttgggttattccggtgttggaaattttgaagacatagccgatgttgttataactgcaattcaatccgaagccccctgcggctaatactccatccggcgaagcccctgctacgcgaagcccccatgtcacattcgatgccgaattgaccagcgacatgaatgttggcgaagatccattttgaacactcaaataaccatttgcagtaacagaagcaagactcagattagttgatgtagtgatgttgttctgtttcccagaaagcagtgtgttcacaccagcatttgtagcaatatcgaggatgccttttacttgagtcgaagtgacattatccaaagttgttcccgttgaggaatacaaccaagagtcaggctgcaccgtcatcatgtacaggctattagttgtagcgttcataggctgcttcgatgcgagtgcagtagtgacggcattgttgttgttattaactgtggttgtcaatgaagacaaggtttgacttattggagcggtgttatcaattacaaatttctgagttgcaacttcaatacctccgatgtaagccattccaccaatatatgcatcagttgatactcctagcccgccgctcataacaacattccctgtggggtccactcgaaaaacatatcccttatcttggaaagaagagtataggccgagaactccagaaggtaggtttccatttgcagtaccggaaacatgaattccccatgtctgtgctgcgctagtgttcccaagtgtaattgcagtagcattggtgtttgaattctgtactgttaaaccgctcaggttaagcgaacttgttgcgcttattaatggctgatatgcgctgaggatttcatctttgggtacaatccggaaaaaaccgccatttccacccatcaaaaaagtgccatcggccggggtcagactactgatattgtcaagcaaaggagataagttttgcttcaattctaatcctgttgttacaaaggattccgtggctactttcactccatttgtgtatatatcaccaccaaatgtaacattattcgaagttaatgccgttatctggcttgtcacccaaggcttgatcaactcgttatcataatcccttagcatagagaggttgattgcttgctgagggtactcatatttgatgcctcgataacatgaaggcgtatcaaacaagagacgagtacaacctccaataggatcagaagcaattgcgacattgctcccgggttcaagtggtggcatgaaggtaacagggtctattggttcataaacggggtttccatcgccatcgagtataggttggccttccgcatctcgttgaaccttacgtttgcgtgaccctccgaaaatcattccccaagggaacgttgagatgattgggaggatggagtttacagccatagggactgtcaagggcggggagaccatcgctggaaaaggtacggttgataatggagttgctctggacaaaataacagtgttgcctgatggaacatccgtttttaacacttctgtggtatcagtctgttcagtattatcggtatccctttgtttcgataacggcgtagggtcaatgagtgtaaagttgtagagcgggtacgaacctgttattataaggtttggactgttacttacgaattgtggcagaatcatgttatactgaatggtattgccgacaacgaccacactcccgtatgaattggttgatccgatgtaattgcctttcaaagtatcccccacccgaagaacggtatcgcttcctgtaagagaacatgaaatcagatctcccgaaacttgcacgccattaatacctcttaggttcgttgacaaaatcgcaccatttttttgcagtccaattcccgcagcgatgtttgaactcagaacaccattgtttagagtaagatcgggtgactgtgctgttaaactcagtctgaggtcgttgcccaccctggttactccttgggaggcggtaaacttatcgcctatggtcccgcggctgagcatcgttaagccagagttggcatcaacttttagatcgagttgaaggtcattctgtactctctcaataccattgctgcaagtcagtacgtctttaatggtatctgctttgaccatttggagacaactgccagcctcgcatttgagagagagcaccacatcattggtcgttcccagtctaatggagacgccattaaagtcctgaaaaatgtagccacctgttaactggttacctataactcgaactgttttgttatcaacgagcacaccgatttcgcgtcttccactgaactctggtccgacagcaatagccccggtttggctgccttggtaaaaattggccatgtaatctttactcactgcataagagcctcctccaatagcaggtaatgttccgcttaactttacattcgggacacgcaactcttgaagcgtggacgaataggtgaatgaaggacttcctgaaaaaccgtatgttagattcccatacaggatttgttcatagccgggtgatttcagggataatctagagccggcttgagtgaatgtagaggtatcagtcatcaatctaattgccgttgtgtctacttcccctaaagcatctgttagttcactcagagatgagaagccgaaatctagccaactgcttcctatatctaagattgagtctgctccagacgatgtttttatcgccccgaacgccttgaacagttgactagtattggtttccaattcgtcttcattgttcacctttagacttttatgaagtttgattccaaggccattatcgcgatacaatggtttcttgagtgtttccaaaggcggaggtggtggaaagtttactgataagccattttcagtaatggataatgaatcgtctgcacgaataccaactgtgcgtatttcataatccctatacagtggaaactcataattgtccggaatcacttttagtttttcttgttctacagttaaagatgaatcgtcaatctgaagttggatatcatgatcctctttcgagtagacaagaggttgatgcacagatgcgtcgattgtggtcaaccgactctcctcatcaatttcaagcctcttgttatcaacatttaatccaatggatacgacgccatgttcattcgtacaaggtaagcattcagaggtggtttcaacctcgttgactttaagttcaccattttcattagataaatgcttaaattctccaacatcgaacccctttatcttggctccagcatcgaagcctaccatttcgcctgtcacatatggagataagagatttgtgttatctatggtacgtaaccccgttgaatttctactgtttattccactcatgttatattgtagctaggaagtaaaatttgaggagcttggcaaaagacgaagcgctcgacggtgcccatcttatcgataagatgggcgataaaacctttacactatcttctgtttcttcctcggtggaagtgtgacatcctctgcaccttttcttcttctacttcgaactgtaggttccacacgcagtgtcgattgtgtttgtgcaggagggacaacatattccgcttcacgttgtcctcttagacaagcgagaggacgtacttcgcttcccaagtctgcggttagcggtactagcgttggagggttaagtgccgtcggtgctaagactggatcaacatttacccttctcctgcgggaagcacgtacagacctctcgacttcttcaggattttgcaacactatctcctctagaggaggctcctctacatgatcggcaattctccgtctttttaccgtctgcttatcatctggttgtttatactgtcttctttttgtaccatgaggagcaaccccagcaaaaatcacatccggaggatgtggagcaacaggtgttgctggaggagttactggctctatcgcatcatgctccgctcctcctgttttttgcttctttttattccctctaggaatcggcgggggtgcatttgctttccttttagaacctgctaatatggttgcttccttacctttgaagtgaaatggtgttcttgcaggtaccgagacaaactgatcattgatggagtttctctctaaaacatccgctacaccagatggatcatggcggtcattcagaagtactgtatcatgtggaattgttgcgctacgaggcattgtttccacggaggcatcgatttgaggagattccacatgtatctgttgagtcgacccaggaaatcctcctggaataggtggaatgtaactatcagccattagatgcgctggcagtgaaactgcaatgccagtcgcatgattgacacggtcatttccaactgcatctcttcgtatctctgtttctcgagtcaggatgactggctctacaggaacactgtttacattgcgtggttgcgccggtatctcatttccattcggtggtgcctgaaacattaagcctgtttgggaagtcactgatgctggataggaatacacatgccctgattcatcaggaatcggtaatcctgaaagggaattttgcgttccaatggtcaatgcactcccttgtcgacttggagtaatcgaatcaagatacttctgtttcttacgataatcttcttctgctttcacatactcaagaccatccttataagcctttgttgtttgttgggcagccgataatttcagaacatcagaagacgagagcctcggttcatatttaggttcaacgtaattggtctttgtcgctaagtctttttgatggatcaacctgttccacgaatacactacttgtggtcgcccgaggtcatcgacctttgaatagtctagagcgaccccaacttgtctcttttgcaaattaggaatcggtggcgaaacagcatatgtatcactcaagtaattggctcggtaatatgccatactaggttttttcctttgctatgtagagctgaaaaaataatatctcttctgttctataaatcaagatgcctaattggttttctaaagcgaaagcaaaggcaaatgttctgtggaataacgcgccgagttttcttacaaaggcccgcaactttgctaacaatgctgtgaagcatgctgttacagtaaataaacatgtccaacatgtgaataaacaagtacaagaatctcctttattttcacagggtattcgggaaaagtcacacaagatttccagtcatggtgagactggggtgaggaaactacaagaactccacaagaacgctgacgactttgtggaacgggtaaggggaggtcctatcgagtaaacctattttgttcacttcacagcgctccttcgagtttgaaaagcaagagcttccttttttacagaaaatgtttatgcatcgaataattcaaaaattacatcacaccacagttactactgctccaatagaaagtgtaacattctcgtggtatgacgttaccagcctaaccttttgggtcggtgcgactgcgtgttgggtgtgtatgcgcataattccgtcactgccagtaaatgagagtgccgcattactgccttcatcctttgatgcaaatgaccagccaaatgagaatgccttggaatcatagtcggcgtatgacgtatccatctccccgagttggtcaaagttgttatttgacaactgggtgacaagcagtgtttgattatcacttggtgaatgcgtaaaaccctggtttccagcaggaatggtaagattagggcctagtgaaattctccactcgcgtagtccctgtgaagaatacattaacgctttatcttttgtctggtcattgagaacgtcgtcgtccacaaaggctgattcgaacccaaccagtgagcgaacaccgctcatgtggagaaggaatgtatttctgttaccaccggagcaagcattctcggtctgtgttgatctaacatagtcatagaatattgacttaccatctgatatagcacgagtcgcgttaaccacagtagtaggcggtggtgtaatgtatggaactaaacagcggatattggaaacccaaatctcacctacaccagcacttgtaaaaactgtgttcgggtctgcgagggtgatgataatttccaatgcctgattactcagactccaaactgggaagtactggtcattcgatggatggcagaaaccgactaaggggtggtgattaatggaaatggtacttgatgttgcaaagatattggtgtttccatatccggaaagttggctcaacaatttcttactaccggcggatagattgcggtatgtttgtactagataaagaggatagtttggaatgttaacaacagtttctccccctgctttgatggttaatgattgaataatggattctaagccaagatacatgtttttaacacctgtaccaggagttatcaagtttcctgcattatcgtatgcagaaacatccatggagagaatgagtttttgcagaatgaaactcaccgaattagagtcacaagttatcttgattggggtcaggttacgactttttgtcatatatgtgctttgaccaatcggactatagattgacacgccttccccacgggggtctgagtaccccctcgcgaacgtattcgtcgagaacagccaattacatggtactgcaacttcttctgacatgtttgtttactgaattgcaaaggaaaaaaaaatggaagatttttcagccaaaaatgccaccatagttgtcctcctcaacattgtcctcctcaaagaacggtgatctagagtcaaagaatggttcatcatcaccgaatttcaaaattacgctcttttttttagatggacgtattgctgctggctgcgcctttgctgctagtttggttctcttgctcctagttgttgttggtgttggtgttggtgttgccttcattcctcgcttcgtgtttcgtcgttcttcccttgctaatcgcttctgttccttctcctcttcaaggatgcgtttggcctcatcgattttacgcttcttctcttcctctttcctttgctcttcacatttcgcctgcatctcacgtaactgtgcggctcgggccttttgggccttctccaatgctgccctttgcttatccgtcattggacgttttactttctgcgtaggagtttgttctggtttcttttctgctttttgaacaggtgcttgttcagcgggtgattctacattctcttgtggaatggtactcgattcttgatgatcttgagtttgctcttccattgttttttcttacttagcttctgagaaaaaaaaaattagacatcaattagacatccgcaacatcgtctgaaaatgcaaaccgaacggttaacgggctgttgagtgcaacttccaaaccggtcatcaagtcaataagatagaattcgattttggagatagtgtcatcaacagggagccattctcccgcatcatttgtccaggtgattacatctccaaaactatctgggacaacagtggctactactgattgcacggaatcatcgaagtcactgaggtagcggcttcccttgacttgaatgttgctggttaaaagcaccaggtaacttcccgagaggttaactggattcttcaatgttaccgtttggtaatacccagtctcggtccatcttgacattcctgtaagtatgtacgccgttgttcctctcgacgctggcaaaattttgaatttcttaggccctgtcgcagttatggaaatcttcctgctcacaccatcataagtaacagtatagccctgtgttccggccgtgctcatagcgtcagccactgcgtttggaaaattggcgatactatagttcccaggagcaatggttccactataaatcgtgctatctccttcctctgcaaaggctatagtattgtttgcagaggaaacaaggtcccaatcttggagaaaggaaaccgagagaaccttcatcatttccattctccgggggggaatactgaatgatcgagattttaaggaacaatatgtgacttcgttaatcatttcctttccttcctttatgtaaagaacaaggaaattttaaaatgggatataagccacgtgcaatttttcctgtgcataaaaagaaaagagatccaagagttccagaagacattgctagcctccctatatgcacgactttgatcgcacctcgaaaaagtgggaagagcgctcttgtttgtggtctgataaatgatgtatatgccaagttagtcgatcgagtgataataatgtcagatacggttgcatacgacgcatctgtgaaggtattggctgaaaccacaaagcataaaaacatctactatactgatgatgtgtctaatgcatccatagcaaagattgttgatgaacaaaaagcggcacctgacaagtcacttctattgttcatcgatgattctggagatagtgcccagtcaaaggaattaaacaaggaattgtccaaactctatacgaaagggagacatttcaatatttctacaatcgtagccattcagagtgtgactgggcagttgagtaataaaatgaagggatgttcgactgaatttattatttttcgtaacaatgcggaggatctgaaactccttgctaagatgctcacttctgcttacaagacatatgaagaggttcttgcctatcttactgaatctacaaaggaaccctatgctttctgttacatgaatttagcagcaaacaacgccagagaaatgtatcgatactgtgactctattgggtttcacgattactttctaaacagttgagcgcatgtccctttgaccacctagttcctgaagcgcagccagtttctgaagttcagcttctttcatcttgtcgaagaggtattcatattcatcggcatagccattgaggaaggaacgaagatcatctggacagtcgtcgtagtcagtaaatccctcgatgttgttgataaaatagccctggcatgtcgcttctgcattataataaatttgacagagttccaggtagcagtccaagtcgggcccacttaggtttgcaatattcttggcttcccgcctaatccattcttccttcggaacctcaacgaaatcaatgtgttcgagatcttcttcagtgaagttgaatttcgacatcgttgctcagatggtaagactcttgcaattgggaaaagtcattggagggaatcgagcatggccttttaagcaaaacagaggaaatcatcgatcgattgaaatgatgtaactgcacatcaataatcacacatctgtcgtatttccatcgaaagactcgaagatgtgactctattgggttcaaggattatttctgagcggaaatgtaaacagaataagaagatgtcttggagagtattgactccagatgagagggagaaagtagagaatgtttataaaacattcaaaacagggcgggataacctctggagaaaaacacgtgaagtatacccggacttcaaaggaagccaacgcagcgtattgaatgattttctaaagtaccagcccgaatggcaaactcatgtgaagccaccgaaacaatcatctattgcgccactacaattcaccaaggcaggttacctccaggcagatctggtttccatgcgtagttatccagatgccggatatactgcgttttttcatatgattgacgggtttacaaagaaatcttggggcaaaccacttcgaggtgagtcggaacaagaggttagtaatgcagcagaagaatgcatacaacaatctggaaagcgcatctcgacaatgcaaacagacaatggaccacattttcagagaatctttactagaatgttggagagacataatatcaaacacttttattcccaagcggcaagaccacaatctaatgccttcattgaacggagaggtggagatataaaacgacaactcttcgctctcatggagtccgcaggcgataagaaatgggtgcagaactttcagatggttctggacaatatcaacggcagtgtgtccagggcaacgggacaatctcctaatgaaatggaaaatggggatgcagaagtccaacaagaagccgtcgctcgaatccagaaaaacattgcatcaaggtatcgcaccaggcaaattgggacaccattgtttgtaggtcaaaaggtacgaaagaaacgagtattacaaggcagcgttaggaaaccaggattgctgggcttctgggacaaggacgtctacgagattgttcaatgcattgattctcagcatccaagtttcattccgtcgtatcgcatagccacagccacaggtcatattctatatggccgcttccctagaacaagtttgctacccattccgcccatattatctcatgatttagtagatcttgacaatgaagaacaacgcgctgagtcgctgcaagttccaaacgagttagtaccagcaccagagccacgtcgatcattacgattggatcaagaacgtgaagatgaatacgaagtagaccatattgttgggaagcggagatatcgcgggagaacccagtataaaatcagatggctaggttatggccaagaggatgatagttggcaagatgtagaggatctcgccaacgcacccgaaaaggttgcagagtacgagcgcattcatagttaaaaattattatctgctgcacaaatggactagagctaaacttaaaaccacaaagcaacaaccctatgtggcagcatctttgcaataggcgagattctctgcttcgttgtggtgatgttgttttgacataaaggtagatgccgcacgcttcaaatgccgctttctaatatgcgtaatttgcacactacggagcaaacggacaccatagttcttgtctttgttgttcgttgctttgctccaggcattttgaatgcaattgcgaaatgtgtcaattacaaaaggttcctccttgctgtttaaaaagatgtactcagactccatacgaaacctggtaacaaagcgaacgagttccttagcaacataggatgggtccactgactccgcaatttctggaaaatgaggtgtagtcattgattgcaaaaaaggttcattcaggtagcggtcattatcttctgtatcatttagtttcttagcagatgtttttgcagcggagatacgatcttgctttctgtcattccaaaggatacaagcatttccagcattgtcatatacgaaaatattgtccttcttccaattgacaccagggtgcttgaaatttttcaacgttccatagtttgcatggacgttgtaaaagtgggatgtgaaaagtccaatttttgcatcctggagcgcatagatctcatacttgtttggatacggcttatcatagattttattctgctcttcgttataggctctcatcatagcacattctgcatcccagtcttcaatggtaccatccattgggcgttctcctgtgtctccaagatctttgtaagccttcttcgcatcacgagcagcgttgtaaagtggtttcgtaagttcatcatgtttgctcttctctaatccacagaaatcgtgacctgcatttctaataatgcaggctattaacccgagatctgtagagtacgtgttatgggtgggttcaccattttttgtctttgttgctgtacggtctttcacgagtgacttctgaaatgagatgtcctggattttccctagggacgaaaaagcacctctacgctgataatcttgtgctttagccaagtctgtcgcatatgatcttgagttctcattgaggaatccagcaagattggcggtatgtaacggaaaagtagccatgtggtctttgacagaaggtgaataaattttttacactacagataaacccatatccttagctcgctcctcttatatagacattttatttcatgttttatcgatagattttctccatcaacctatgccagaacatgttgtctttgatgccaaatcatctattgtagataagatttttcctctagtcgaacaactgtaccggattcttgccaatgcttctgggaaatcacccacaccaccacctgatggtaagacgatcaatataatgttagcggaagacgaacccgttttaagatcaatgtttatgaggttctggaagagagaatctaatgttacagtattcacagcgtctgatggtattgaggccgttgaactctttaaaaagcaacgattgaatatcatttttgttgatatcgacatgccttacaaaaatggagtggaagtaacacgtgaaataagacagtatgagagggaccacaatctagatcaaacgcctataataggagtgtctggattcacggagcgtcagtacgaggaacaggcctttgctgccggtatgaacaaatttgtatcaaaaggaacagggtatcaattgaaagatatttacagaatcgttgtagaatactgtggagatccaaagacctaacaaaacggtggtcacacctgtttgtgtatttttcgctgatacaaaaagacaaagcagactaaaaactacaatatcgtacatccgtcccatgctattccttctttatagcttcttcccatcctccgtcaaagtaagcccctcccatagcgtagtcggattgtctgtcgtctttccatcgaggctatctacttgcttcagacgctgtttcacaacttgaaatgaatccttgtgatgcttaagaagatagtcacctatgtcctccttccgagggtaaggattttctccgtattttttctcttgcttcacccacgcttcgtatgctctgcgaaaactatcggggtacatccgccttcccgtctcccactttacgtactttgccacaaagcgtcccagaggatcgagctgagaagtaaactcgtttgtcttttcgctcacttcatcaggaaccggctgaagcgatcgttctccggttcggatttcgaccagacgacggatgaggaaactcataaacacatccttgtattctactatacgtttctccagttcctgtatcccgacaaacttctttgcatctttgccacctttcttgttagcttcctcctctgttctgcaaaactcggacaacatgggaaacacttcgaatcgacgagtgacaccatgagcgtggtcgtagacaatcggtaaccagttcatggcacccagaagaagagcgttcattttgaaggcaccagtggtggtgtcattaacttgtcgggcattaacccagccattgatcagcttcttaaatgtgtcccctcgccattgctcattcttattcacttcgtccacgcatacggtaaacttcccatcacatcccttcagctcgcagttaggcctcgtactatcaatgttcttaccgagttggctactctgcatgctgtgcgctttcacactaaaagttgccattatcaagtcgataatgaccgttttcccatttgccccctcccccaacaaaatgaccattttctgtggttgatttgcgtccagagtcatacacaaatgatcaaagaggtactcgcgaaccttctcagaggtgaccatggtagagaagcgagccataaggtaatcgaaccgttcttcattcagctccgaccacccctcccctttcacatactgctcatccagagcataaccgaggtaatctctcgtatcaacacagtagtccgtttgctgccctggacgtagctttaacatttcaaaatcaaagacaccattgtcaaaacacaaaatacgcttcttttctttcacatggttcaaaaaatcctcgatgtgtaacttcgtcttcatgctttgtacaacatttctagagctctttttgacaatcattgtaaaggcttcgtcctcgtcctcgttgaaataatgctccattgtcacttggaagagctcctctgcaatccggctaaattgttcatcggtaatagtttgatagctgtgtacagctttgttgaatcgataccattttccatgggttttcgacccggcatgcacaaactctccccaccactgcctctctgcaaaatcaacgatgcacaatttgaaattttgttcccacttcttgtgcctgttattaaagatctcgcgacatttatttccaatctttccggcagcttcctgtagagactcgggaggggttgtcctgggaacataggggatgttgcctttgaccatgttaggtgcctggttctcgggtgccttgagtgtgctttcattagctgctttgttctcctcgggtaccttgagtgtggtatcattagctgctttgttctcctcgggtgccttgagtgtgctttcattagctgcttcgttctcctcgggtgctttgaggttgtcctgcttgtcatcgccgccgaacgtgcttgaaccatatgtttcgagatcgaaatcgagattcccaatatcctcgagattctcaaaacctaaaatgggacttgcttttatttctggctgtgtctcgcgtcttacatgcttatcttgtcgcaccctcttagtttgacgggaatcgtcctcatcaggatctctcctcctagtcgaccctgaaccacgtgttttagatgtgtctgtactcatggcgttcgttagttgtagcatgagtgtcagacaagggggcgggcttggctatatagacttcgagaagttgctatcaatagaactctctttctttttcttataccttttcttggcgtacatcgacagaaatagtaacagccgctttctcagtttgcgctaagatgccacatcatatcatcctttctttttcttataccttttcttggcgtagatcgacagaaatagtaacagccgcttttctcagtttgcgctaagacgccgttcacctccattggttaccatctacataaacgctcgcacctctgtcggttaccatctacatgaatgctcgcacctctgtcggttaccatctacatgaatgctcgcacctctgtcagttaccatctacatgaatgctcgcacctctgtcagttaccatctacatgaatgcttgcacctctgtcggttaccatctacatgaatgctcgcacctctgtcggttaccatctacatgaatgctcgcacctctgtcagttaccatctacatgcggtgctaagcctgcattgtagatagctttgagctggagtgcatgccttatgtagatgttaaccgatggaggtgcaagcatgcatgtagatgggtttgagctggagtgcatgccttatgtagatgttaacgatggaggtgcaagcatgcatgtagatgggtttgagctggagtgcatgatcttatgtagatgttaaccgatggaggtgcaagcatgcatgtagctggagtgcatgccttatgtagggttttgagctggggacccattagcctttgtgcatcgaaatgcacgggtttttagggggttgtttacataagcacttgttgttggttctcgggaaaagctgcaaatctttgtactttaaaaaaaggttattaaacttgaagaaaccttgaaagcatggattcaaactgccgccaacatgaatgtctgggatgtcgaaaaattatcccttggctcaggtgccgtccgagatgtaccgattgttatttgaaatggttagagcagcgcgctaaccaacttccgagatttaatatccttgcgccagatagtgaagatgaaagcacgtgatgtcaactttcagtctcaaccacccgacaatttatcagtggattcacggctcctctgaagttgcactggtaaccaagaagcaacatcgccatgataaaatcaccattcatcatatatagtccggttctttcttctaagacatgctttaaaccatatgatgtgatctttgacatacttcattgtacccgaaacacctttggaattagttgtatccccctttcaatgttggataaattgaacatcttcacattatcttctaaggtcggtctttcttttgacggctttttcaatgatgtcccagcaagttcatttccatattcagttaacaatacattagcaggaagcctcgaaagcacattcttgatttcatctaaggttaccatttcgatgtttcttgtgtgtttatataagctcccagaaaaataacattatgtgcgtttattgcgtttctctcaataactgcaattattgcgtttaggagcagcgataaaaatctcgactgactatcaacaaacctcataatggaatctccgtctagagtctgcaaaaatttaaaacgctctgcccccgtgaagcatgtggcgggtgcagaaatgaggcttacacctaaaaagcaaaaaaaaacggataataaagcgcgcccaactgtggaagataacaccctcaaggttgaccttgacgctgaggaagatttcatcacaaagactgaacaggtacatcttggccatctcaaaaagttagtcagaatccaaaaactcttcgttccgagtagcgttgaagactgcaaagacaaggactactcagtgctgttaaaatcatactacagtaaggtagacaagaatggcaacttgtccgtgacataccgattcaagaacaatggtcagtttggacggctgtttgctaaagggatggcatccccatattttccatctactgtaagggactttttgtttccagattacatcaatgttgacatgagggctgcagtcttcacaatctaccgtcactacagcgagcgctacaacatccccagtcctgaactcttgcagttattagaaaagagggatgagatcttgcagaagaaacaactcaccaaaaagaagttgaacgctctcatgaatacaatgaccccacctaagcgtgataagttcctcatcaatcttcacggttggatacacagcaagttgctgcctaaactcaaggtagacccagagtacaagaacttgtggattgcgatcgacaaatcaccggacgctgaccctgtgactgggaagaagaagaacaaggatgtgagtttcctttgcctgtgctatcagaccatagaacggcacatccttatacacatgtcagagttttttgagaaccgtggctggacggttggcgctctgatttacgatggactcctcgtgcaaaaggataaagacaagattctcaatgatgcattgctccgtgaatgtgaggagtcgatttacaaccgcctcaagatacgggtcacacttgccgagaaacccagggatattgatgaaacctttctcaagagaaaccatctcgaccttgaggatgtggacccggataatgatcttgacgacactgatctcgatactgatcttgacaaccgtgatgtggtggatctggtgccagatgatgaacccttgagcctcgcaaaatctgctaaaatttttggcaaaggtaccaatctgaaaggtctgattcgttatctaaacaacttcttcactaaaataacagaagaagatactgcattatactgctatcgagagaagcgcagtgatccttggatctgtcgaacatataaaaacacctcgagcgctttatcccatctgtttttacactccattgataaaaacggcaaaggagtgataatttccctcttcgaccagtgggcaggcagccaaagaattatcacatacaaaaaagtggtattcgatccatcctacatcggtgacataccattcaaagaaatcaacctcttcaagggcttccaggcaacactcttagatcagtatgacgaaaagataatcgaaccagtactttcccacattcgccaagttcttaacggcagtgttgaggaatgttggcaatacacagaaaagtggatggcatcaattgtgcagcatcctcagatcaaaaccgaagtggcccttgtcttccacggctctcagggaacagggaagaacttgttgatggacaattttttcggtaggcttgtgatcggtatgaagcactttctgaacacgaacaatctcgatgatcttaccggtcaattcactggccatctctccgcaaagattttcacgattggagatgaagttctgtttgccggtggtcacaaaactaacaacatattgaaatcacgcatcacgcagaatgtgcaaaagatggaaaagaagggagttgatgcaattaccattggcgactttaacaactacagttttctgtctaatcacgatgatgctgtgaagatcgaaaacaccgaccgtaggtattttgtgaaacgtgcttcagacattcataaaggagacacagaatactttgcaacatttgcggaaaagtgtctgaatcaagagacagcggatcacttttacacctatctgatgcagatggatctcactggtttcaacctttgtaaaatacctgttactgaggagaaagcagagatggccatctactcgatggacccactagaactctttgtggatgatctactcaacggcaacatcagcaaaggtttcacgtatgtagatggtgaaagaacacaggaatggatgttgccaggtgaaacatacgagatgaccatggatgagttgttttcactgtaccaaacatttctacaatctggcgcagccggtaggagattagtagatatgtctaaaatgggatttagcaagaagatcaggcggatggtacagatagcaaacctatcacaccacaggcatggagggacgcggatagcagtgaggatgtcaaaagtgaattagacaaatgcacacttgcacatttagaaatggaaatgtgtaggaagtgtgcgactaggtgattgtagataatatcagaaatgattagctagtcttccattgttctctagtgaaagtcggaaagaaatcaatgaagaatggtctacatgcacacttgcacacttgcacacttagttttcaggttctttgagagagaaattgaggacatactaataataatattagtattaagtaactttttccctaaagcaacccaaatggaagtgtgtaagtgtgcaagtgtgcacggctctacatcctgctctacataattaaatgcacacttacaaatgctctactatgcatgaagggcaaaaaaatcaacactttgtcgatgagagatcgaacatgttatatcgataggatgagaggactagtgaaccatcttatcgataagatgggagagttccttatccgtttataaaagagggtcgccggtcccgccagtccccccagctcgaagccttcttttcaaaaacgattccatatacaacaattaacaatggactatgcgaatgattgtgtgctggtgccgagatggatattggaacggttgctttcagggaacaatggacaccaaagtctagagcaaatctgcatggattgtggaaggaggtttcaattgcgaagaattggacagaaaggatacaagtttcgatgctatccttgttggaagagatatgtggagagacgagtccacagacgagtccacaagctacgatgtcgaaggctgagagatggagtcccaagatgaagtgatatcatggagtcttgagaagaagcgaatgtcaagttagaaccagtgttgactttgaattaggtggagtttggacacgtgaaatattagatgcgtaaaatttgacgtgtaagtgcactataccgcatatcatcccttcatcaatagtcccggacttggacaaacaccttggacgactcgaaacactttgaaacactccaatgcattgggcaaacaccttggaagactcgaaacactttgaaacactccaatgcattgggcaaacaccttggaagactcgaaacactttgaaacactccaatgcattgggcaaacacttccgtactatgggttttggtacattcttccgtactatgggttttggtacattcttccgtactatgggttttggtacattcttccgtactatgggttttggtacattcttccgtactatgggttttggtacattcttccgtactatgggttttggtacattcttccgtactatgggttttggtacagtgaagctgactatgggcactgtggtagtgcatgcctgtggtatataccacaggcatgcactaccacaccgccaaccagcgagccgtggagactggaagccgtcgatttgcaaaagaacggcagcggatgaaagccggcggtattgacctcatagaatcacgtatcccaagccacaagacgatgaacctcatagacttcatgcgttaccttctcgttcgccgcactgattgggatcgtcgaaaggagttctactcccaccctgctcatactcgatggaaatggcacgcattcataaaccgtcagaagagcgaatcagacctcatatccaacatgcgcaacaagtacggcgacaactttactgtcgtgatgggtgattggagcgacgccggtcgaactgcgagatttcagacctcatcaaagacgaaaggttggcgcaccctcttcaagcgcaacaggatcaactgcttccttctcgacgagtacaagacctcatctgtctgccctcactgtttggcctcatccgctgacttccttgaaaaaggcttcaaaacacgacctcattcaagaccttggcgccgtcgcgaaggcaagattgaaaaagtccatggattgctgggttgtaccaaccctaactgtcagcaagcctggacgatgcgctactggaacagggacacgctgagcacctgcaacatgctgatgatcgtgcaatcaatgttagatggacacggtagaccagaggtgttcaggaggggtgttccagtggtagcgtagcgtagactagttagattaaggtttccgaactggttgtcgccggttcaatccctggtgcgggtgctagtgccaatacccatcggctccgcactaactattataccaaactagtttcagactgttctcgcgttaaagatcccaatcacttgcaacgttggagtcgttgtcccaagattcccaaaggttgacaggcatgcatgggttgcaaagcaaatgtgtgttttttaagccccagcccgcaaaccgctcagcaagtgctgaccagtaacaatgccttggtcaacagtcagccgaaatgaccaaggatgactttatcttcttccttacggctggccgagagtctaataaaacatctccaacaatcgtccacagcggcaattttgtcccgttattttgtcaccataccagggtcgaagttacgcgatgcaaagcgacctccatacaaatatcaccagatccccacaaccgctgacgatacgccgcattcaaagattattcttgtcgtattttccacaatatggtactgggcttaataagactgagggccccctggcagaggaagaatagttagatccggatactttgtcaaaattggatccgggttgaatgcaccagaaggccatgtccagtggaacacttcacaccataccaagatcacttcataatgacccgaaccgatcccctcgatgcttttaaagcgtggctctctgaaaacggagcaagtttcccttctctctccttcaaagcttcacgctctgggtgcgaatctcgcgggagaggactgtttaccacgaaccgaataacactagaggaagggaaatccatcgcaaccgtgccagctaaactggtcatcaacacttctttagttgtacgaattgcaaagtatggacgaacaacaccggctaagaagttggctcaatgtgtggacgggttgagaaaagggggtttgagtgcggaaggcgcggcttgggagagggtatgcttgttagtgttcctcctttgggggtgggtgtattctgaaccgttgagagaagagacaggcagggagagggacagtggtgaaattgtagaagaagatccggcactttccatcgacttttggcttccctatgttcgtatacttcctgatatagacggccttgatacgccggtattttggtcaggatcgccagcattgtcactacttaagggtatggaactagatgatgcagtaagggccaaaaaactgaagcttactcgcgaatacagcgagcttctcccccatttgtcgattcttgataatgcgaagggtcgcatcacgctagaaagatttatgtgggcggatggtgttttttggagtcgtgtgctatcatttggatctgcgttggaaggaaccgatacgaccacaagcgatgattaccacttagttccactggtagacttttgcaatcattcatttgaccagcacattggatggcatatttctgaatccgcgtcttgccgagtggaattgagggcagtcgatatggctgttggggatgttgccgccgacaccgagctttttatcag

SEQ ID NO: 797 - protein, 232 aa, Spizellomyces punctatus
  source 1..232: note = 1389..2087, XP_016605239.1, uncharacterized protein CDS
MPPKKKQKLEKLDKPTLHTCNKTSFAKAFLPNYRQRLLDYIAIIHQLADHASHALKFYILSAPTFTVNEETIEAILYLLNKGEAWHPRKEAKKAWRDCLLPYVQRYCHIVSFVHPNLQKEQQSINYLTASMMTNLKVNVQEHFMQMLLRYINLQLDVKGQKQRLKSDARNAFFARLRYLKSIFLFDIVPESLDDLTAEESELLEEIWSLDLPFLIDHPLAYVTTRTSSRDRE

SEQ ID NO: 798 - protein, 278 aa, Spizellomyces punctatus
  source 1..278: note = complement(9377..10213), XP_016605240.1, uncharacterized protein CDS
MSLNGATGNAYFDRDVIIGNTSVNALRSIQVKNVDTGTNAAPIYYLTTAAGSSVLFMNGSNRTVDGGANTLTLRNDVGAVRLQSQGAKGIYIYPNTGNVVVESTTPVLSSTTGALVVNGGVAVGAHVVAGGNLYSNGPVYSNGQICATQAWVSSQVQFPKVQVFKMLTKDVITTGSGTKTFYVSTAGRALIRYTINLHGTNNAGGTLNVYLGTNAGSMPSVFSSDFNYNAGVNRTIYASFIVSGLVPDVAYFTNFSAVNAAPDTSADVTIIEVMELGS

SEQ ID NO: 799 - protein, 1422 aa, Spizellomyces punctatus
  source 1..1422: note = complement(10607..14875), XP_016605241.1, uncharacterized protein CDS
MVGFDAGAKIKGFDVGEFKHLSNENGELKVNEVETTSECLPCTNEHGVVSIGLNVDNKRLEIDEESRLTTIDASVHQPLVYSKEDHDIQLQIDDSSLTVEQEKLKVIPDNYEFPLYRDYEIRTVGIRADDSLSITENGLSVNFPPPPPLETLKKPLYRDNGLGIKLHKSLKVNNEDELETNTSQLFKAFGAIKTSSGADSILDIGSSWLDFGFSSLSELTDALGEVDTTAIRLMTDTSTFTQAGSRLSLKSPGYEQILYGNLTYGFSGSPSFTYSSTLQELRVPNVKLSGTLPAIGGGSYAVSKDYMANFYQGSQTGAIAVGPEFSGRREIGVLVDNKTVRVIGNQLTGGYIFQDFNGVSIRLGTTNDVVLSLKCEAGSCLQMVKADTIKDVLTCSNGIERVQNDLQLDLKVDANSGLTMLSRGTIGDKFTASQGVTRVGNDLRLSLTAQSPDLTLNNGVLSSNIAAGIGLQKNGAILSTNLRGINGVQVSGDLISCSLTGSDTVLRVGDTLKGNYIGSTNSYGSVVVVGNTIQYNMILPQFVSNSPNLIITGSYPLYNFTLIDPTPLSKQRDTDNTEQTDTTEVLKTDVPSGNTVILSRATPLSTVPFPAMVSPPLTVPMAVNSILPIISTFPWGMIFGGSRKRKVQRDAEGQPILDGDGNPVYEPIDPVTFMPPLEPGSNVAIASDPIGGCTRLLFDTPSCYRGIKYEYPQQAINLSMLRDYDNELIKPWVTSQITALTSNNVTFGGDIYTNGVKVATESFVTTGLELKQNLSPLLDNISSLTPADGTFLMGGNGGFFRIVPKDEILSAYQPLISATSSLNLSGLTVQNSNTNATAITLGNTSAAQTWGIHVSGTANGNLPSGVLGLYSSFQDKGYVFRVDPTGNVVMSGGLGVSTDAYIGGMAYIGGIEVATQKFVIDNTAPISQTLSSLTTTVNNNNNAVTTALASKQPMNATTNSLYMMTVQPDSWLYSSTGTTLDNVTSTQVKGILDIATNAGVNTLLSGKQNNITTSTNLSLASVTANGYLSVQNGSSPTFMSLVNSASNVTWGLRVAGASPDGVLAAGGFGLNCSYNNIGYVFKISNTGITQVTCTSDSSSTATGTLQVAGGVGVSKNLYVGSSVYSGKGTGLGFRWGTGTNAGDFVSFSPSTNGQMFFNDLANDVCMRTIGTNFRFGTTNTTSTLDILSSGSVVVNTTTDSTSSTTGGFQVKGGVGIGKALYVGGNIFANSAQVATQSYVSSAISTLQPSSPLLSSLSGLVPSTNSFIIGNDGTTFSVKTPAEVRDILGVTSVDLSGKQDASPLLDSIASMQPMSNMFVMGDDVNGLILQNDIEVRSILNIVDYGSDISSLQTSLSSKQDIITMTTPLSVATIVANDTSDATTVSTGALQVKGGVGISKNIMQGQSGGVSHYLMDTGATPSCM

SEQ ID NO: 800 - protein, 490 aa, Spizellomyces punctatus
  source 1..490: note = complement(15056..16528), XP_016605242.1, uncharacterized protein CDS
MAYYRANYLSDTYAVSPPIPNLQKRQVGVALDYSKVDDLGRPQVVYSWNRLIHQKDLATKTNYVEPKYEPRLSSSDVLKLSAAQQTTKAYKDGLEYVKAEEDYRKKQKYLDSITPSRQGSALTIGTQNSLSGLPIPDESGHVYSYPASVTSQTGLMFQAPPNGNEIPAQPRNVNSVPVEPVILTRETEIRRDAVGNDRVNHATGIAVSLPAHLMADSYIPPIPGGFPGSTQQIHVESPQIDASVETMPRSATIPHDTVLLNDRHDPSGVADVLERNSINDQFVSVPARTPFHFKGKEATILAGSKRKANAPPPIPRGNKKKQKTGGAEHDAIEPVTPPATPVAPHPPDVIFAGVAPHGTKRRQYKQPDDKQTVKRRRIADHVEEPPLEEIVLQNPEEVERSVRASRRRRVNVDPVLAPTALNPPTLVPLTADLGSEVRPLACLRGQREAEYVVPPAQTQSTLRVEPTVRSRRRKGAEDVTLPPRKKQKIV

SEQ ID NO: 801 - protein, 417 aa, Spizellomyces punctatus
  source 1..417: note = complement(16993..18246), XP_016605243.1, uncharacterized protein CDS
MSEEVAVPCNWLFSTNTFARGYSDPRGEGVSIYSPIGQSTYMTKSRNLTPIKITCDSNSVSFILQKLILSMDVSAYDNAGNLITPGTGVKNMYLGLESIIQSLTIKAGGETVVNIPNYPLYLVQTYRNLSAGSKKLLSQLSGYGNTNIFATSSTISINHHPLVGFCHPSNDQYFPVWSLSNQALEIIITLADPNTVFTSAGVGEIWVSNIRCLVPYITPPPTTVVNATRAISDGKSIFYDYVRSTQTENACSGGNRNTFLLHMSGVRSLVGFESAFVDDDVLNDQTKDKALMYSSQGLREWRISLGPNLTIPAGNQGFTHSPSDNQTLLVTQLSNNNFDQLGEMDTSYADYDSKAFSFGWSFASKDEGSNAALSFTGSDGIMRIHTQHAVAPTQKVRLVTSYHENVTLSIGAVVTVV

SEQ ID NO: 802 - protein, 182 aa, Spizellomyces punctatus
  source 1..182: note = complement(18290..18838), XP_016605244.1, uncharacterized protein CDS
MEEQTQDHQESSTIPQENVESPAEQAPVQKAEKKPEQTPTQKVKRPMTDKQRAALEKAQKARAAQLREMQAKCEEQRKEEEKKRKIDEAKRILEEEKEQKRLAREERRNTKRGMKATPTPTPTTTRSKRTKLAAKAQPAAIRPSKKKSVILKFGDDEPFFDSRSPFFEEDNVEEDNYGGIFG

SEQ ID NO: 803 - protein, 218 aa, Spizellomyces punctatus
  source 1..218: note = complement(18885..19541), XP_016605245.1, uncharacterized protein CDS
MEMMKVLSVSFLQDWDLVSSANNTIAFAEEGDSTIYSGTIAPGNYSIANFPNAVADAMSTAGTQGYTVTYDGVSRKISITATGPKKFKILPASRGTTAYILTGMSRWTETGYYQTVTLKNPVNLSGSYLVLLTSNIQVKGSRYLSDFDDSVQSVVATVVPDSFGDVITWTNDAGEWLPVDDTISKIEFYLIDLMTGLEVALNSPLTVRFAFSDDVADV

SEQ ID NO: 804 - protein, 120 aa, Spizellomyces punctatus
  source 1..120: note = complement(20348..20710), XP_016605246.1, uncharacterized protein CDS
MSKFNFTEEDLEHIDFVEVPKEEWIRREAKNIANLSGPDLDCYLELCQIYYNAEATCQGYFINNIEGFTDYDDCPDDLRSFLNGYADEYEYLFDKMKEAELQKLAALQELGGQRDMRSTV

SEQ ID NO: 805 - protein, 365 aa, Spizellomyces punctatus
  source 1..365: note = complement(22271..23368), XP_016605247.1, uncharacterized protein CDS
MATFPLHTANLAGFLNENSRSYATDLAKAQDYQRRGAFSSLGKIQDISFQKSLVKDRTATKTKNGEPTHNTYSTDLGLIACIIRNAGHDFCGLEKSKHDELTKPLYNAARDAKKAYKDLGDTGERPMDGTIEDWDAECAMMRAYNEEQNKIYDKPYPNKYEIYALQDAKIGLFTSHFYNVHANYGTLKNFKHPGVNWKKDNIFVYDNAGNACILWNDRKQDRISAAKTSAKKLNDTEDNDRYLNEPFLQSMTTPHFPEIAESVDPSYVAKELVRFVTRFRMESEYIFLNSKEEPFVIDTFRNCIQNAWSKATNNKDKNYGVRLLRSVQITHIRKRHLKRAASTFMSKQHHHNEAENLAYCKDAAT

SEQ ID NO: 806 - protein, 140 aa, Spizellomyces punctatus
  source 1..140: note = join(23490..23613,23713..24011), XP_016605248.1, uncharacterized protein CDS
MPEHVVFDAKSSIVDKIFPLVEQLYRILANASGKSPTPPPDASDGIEAVELFKKQRLNIIFVDIDMPYKNGVEVTREIRQYERDHNLDQTPIIGVSGFTERQYEEQAFAAGMNKFVSKGTGYQLKDIYRIVVEYCGDPKT

SEQ ID NO: 807 - protein, 667 aa, Spizellomyces punctatus
  source 1..667: note = complement(24114..26117), XP_016605249.1, uncharacterized protein CDS
MSTDTSKTRGSGSTRRRDPDEDDSRQTKRVRQDKHVRRETQPEIKASPILGFENLEDIGNLDFDLETYGSSTFGGDDKQDNLKAPEENEAANESTLKAPEENKAANDTTLKVPEENKAANESTLKAPENQAPNMVKGNIPYVPRTTPPESLQEAAGKIGNKCREIFNNRHKKWEQNFKLCIVDFAERQWWGEFVHAGSKTHGKWYRFNKAVHSYQTITDEQFSRIAEELFQVTMEHYFNEDEDEAFTMIVKKSSRNVVQSMKTKLHIEDFLNHVKEKKRILCFDNGVFDFEMLKLRPGQQTDYCVDTRDYLGYALDEQYVKGEGWSELNEERFDYLMARFSTMVTSEKVREYLFDHLCMTLDANQPQKMVILLGEGANGKTVIIDLIMATFSVKAHSMQSSQLGKNIDSTRPNCELKGCDGKFTVCVDEVNKNEQWRGDTFKKLINGWVNARQVNDTTTGAFKMNALLLGAMNWLPIVYDHAHGVTRRFEVFPMLSEFCRTEEEANKKGGKDAKKFVGIQELEKRIVEYKDVFMSFLIRRLVEIRTGERSLQPVPDEVSEKTNEFTSQLDPLGRFVAKYVKWETGRRMYPDSFRRAYEAWVKQEKKYGENPYPRKEDIGDYLLKHHKDSFQVVKQRLKQVDSLDGKTTDNPTTLWEGLTLTEDGKKL

SEQ ID NO: 808 - protein, 824 aa, Spizellomyces punctatus
  source 1..824: note = 27736..30210, XP_016605250.1, uncharacterized protein CD
MESPSRVCKNLKRSAPVKHVAGAEMRLTPKKQKKTDNKARPTVEDNTLKVDLDAEEDFITKTEQVHLGHLKKLVRIQKLFVPSSVEDCKDKDYSVLLKSYYSKVDKNGNLSVTYRFKNNGQFGRLFAKGMASPYFPSTVRDFLFPDYINVDMRAAVFTIYRHYSERYNIPSPELLQLLEKRDEILQKKQLTKKKLNALMNTMTPPKRDKFLINLHGWIHSKLLPKLKVDPEYKNLWIAIDKSPDADPVTGKKKNKDVSFLCLCYQTIERHILIHMSEFFENRGWTVGALIYDGLLVQKDKDKILNDALLRECEESIYNRLKIRVTLAEKPRDIDETFLKRNHLDLEDVDPDNDLDDTDLDTDLDNRDVVDLVPDDEPLSLAKSAKIFGKGTNLKGLIRYLNNFFTKITEEDTALYCYREKRSDPWICRTYKNTSSALSHLFLHSIDKNGKGVIISLFDQWAGSQRIITYKKVVFDPSYIGDIPFKEINLFKGFQATLLDQYDEKIIEPVLSHIRQVLNGSVEECWQYTEKWMASIVQHPQIKTEVALVFHGSQGTGKNLLMDNFFGRLVIGMKHFLNTNNLDDLTGQFTGHLSAKIFTIGDEVLFAGGHKTNNILKSRITQNVQKMEKKGVDAITIGDFNNYSFLSNHDDAVKIENTDRRYFVKRASDIHKGDTEYFATFAEKCLNQETADHFYTYLMQMDLTGFNLCKIPVTEEKAEMAIYSMDPLELFVDDLLNGNISKGFTYVDGERTQEWMLPGETYEMTMDELFSLYQTFLQSGAAGRRLVDMSKMGFSKKIRRMVQIANLSHHRHGGTRIAVRMSKVN

SEQ ID NO: 809 - protein, 238 aa, Spizellomyces punctatus
  source 1..238: note = 31562..32278, XP_016605251.1, uncharacterized protein CDS
MHYHTANQRAVETGSRRFAKERQRMKAGGIDLIESRIPSHKTMNLIDFMRYLLVRRTDWDRRKEFYSHPAHTRWKWHAFINRQKSESDLISNMRNKYGDNFTVVMGDWSDAGRTARFQTSSKTKGWRTLFKRNRINCFLLDEYKTSSVCPHCLASSADFLEKGFKTRPHSRPWRRREGKIEKVHGLLGCTNPNCQQAWTMRYWNRDTLSTCNMLMIVQSMLDGHGRPEVFRRGVPVVA

SEQ ID NO: 810 - protein, 294 aa, Spizellomyces punctatus
  source 1..294: note = 32943..>33826, XP_016605252.1, uncharacterized protein CDS
MTRTDPLDAFKAWLSENGASFPSLSFKASRSGCESRGRGLFTTNRITLEEGKSIATVPAKLVINTSLVVRIAKYGRTTPAKKLAQCVDGLRKGGLSAEGAAWERVCLLVFLLWGWVYSEPLREETGRERDSGEIVEEDPALSIDFWLPYVRILPDIDGLDTPVFWSGSPALSLLKGMELDDAVRAKKLKLTREYSELLPHLSILDNAKGRITLERFMWADGVFWSRVLSFGSALEGTDTTTSDDYHLVPLVDFCNHSFDQHIGWHISESASCRVELRAVDMAVGDVAADTELFI

SEQ ID NO: 811 - DNA, 6793 bp, Spizellomyces punctatus
  source 1..6793: mol_type = unassigned DNA; note = Origin - Fz = 3934..4731
aggcccctggagccttctctgtagagttgaggttccatttgttccgaagtgtctgccattcttcttcggaaatgttctcttcggggtccgcgaccgaattatgggtcgcggtggacagtttgaggcctaacggggccgttgtgctagctgcggtggcatcaagagggttttcgatgaggaaagtttgggctgccacgcgcgtctgtcccgtgattaacatggttaatctagacttctgagctttggctttggtcagccgtggcattgacacatccttcatgaattcaccctgcttggttttgtatggcgtgccgcgcatgtgatcggtatccagctcatccgttatggagcaggggataaggatgtctggattcttgagcgtcaccgcgaaactgggtaacgggggttcctgaaccaaggtttggagtttcaaatgtcccaaaacgtcgttggctaggatgatgagaggtttcccgtacgcgatgacccgaaagtaggcgcggaaagtcaggtattctccgccgcggcctctgagggaagtttcgaggcatactgtcttggtagatgagatacgtccaccaatgccgttgaaagccatcgtttccgcatcctgcaaatcggtttcggagaacagaaggccttggtacgtgtcggaaatcagagactcgcaggcccctgtgtctagtaccacaggtgcccagagctgcgcgatgacggctagcgtccagcaaggctgcgtttgggtcttagtctggcttttgagtacatcgcctaaatctactgagtagaaggcgttgatagaaggcaccgcgatctcgaaatggggcgcgatgtcgttaattgttgcttccgtagccttgatcacactctcaaagtgttctctagttttgtcgttttgtggttttgttgttttattctggcgagcaacttgttcgatagccagcatgactatacgcgtccgttcgctctcttcgtgtctttggagacgtggatggtctttaacgtgccgaaatttggggtttccgcgacgataataatagtctgagcgaacgatattgcctgtcaggagaaatgccaccagttgcaggttggcgtacgcatcaaagataacaggatcttcagagctccacatcaagaatttctcgcgctcgtcgagctttatccaggcaaggagaatcaaacgaggggtaccgtcttctcggacctttcgcaggattcgatccttgtcagcttcggctgcggcagcgatgtagaggtggtgggaactccacgcgactgcgtaggggtcgttcccgaggtgcccggcgcctcgcttcggttctttggcgaagaagctgagcgcgcgggggttgttgcccatcatcagagccacttgcggggtgccccagatgatggctatgttgtcccagactcggtcccagccctgcgtgggcgtgcgggggtcctcttccttggtcaccgtgaccttggaaagaggtgcggtcatcaaaattgttgattccgagtgcttgggtgaatgaaagaacccgatggtgtggaatccttgattagcggcttccgttctttccagttccgaagccgaaaaaagagtttcggtggtagcggacgtcgagtccagctccactatgtacgccttcttcgattcctgtttgggtttccaacctgagggcatgggtgctccatatggtcctttctttccatcttcaggatcttttcggttcgggttctgccagcagaaaacattccaatgctttttctgacagaatttgcagggtgccggtggttccttgttggggtccggaaccatcttctgaggaccatcgcgacccttttcggggtttccggttttatgcggagccgtctgcttagggcctttgtcggttccggtcttttgtgacttcttctgagcttctgcagcaccgctgtagcaagggtctcgttttctggtgtcatcagagccgaaataaaggcgcaggaagtcttttaatttggtcaggttcgtgacgttacaggatttgaccatgatttggatgtcgctgggcaattgttcgactattaggtcgaaatgctggtcagcgggacattctatgtttgcccggtcgccataagcgaggcgccggagatgagttttgtggtcgatgaacgcgagaaagctgcgaaattctttggggttcgcatggcagcgcacatattcggttttgcgcttggactcggttaggggatctcggaactctcgaagcagttcctctttccaccttttccaggtccatgagcgagtttcctgggcttccagagtgtaaaaccaagcgtcagcaggggttttctcggctatcatggctggtaggagctgtaccatcctggcatccgacgttgcgctaacgttttgaagaagttggactttgttaagccattcttcaacgtcttggtttcttctgcccgtaaactcgggtacgtcctttgctttcaaggaatcgaccttggtgtcgctggcccacggggccgctggcacttggattggaggcaccgcacctgaaaaacttggttcggtacgctcccttggtgtgtccgccgtttcccacggggttgcggaccgttctcttgtagctcgtgctatgggaggttgttcaggcagcgggcgatgcgctagggcttctaaggctcgtgcgaggcgctcatccgccgctgtctgacgttcggaaagcctatgaagctgttccgtaaggttttgagttgccaactgcgttgcagcagtcgagcgggcaatgtcttcttttaacgctgccacttcagaggccatcgtggccaagttaggggcttccggttcgacggaagtggtccctgaacgccttgggcgtgttgcgggagggacttcgacgtcctccgcaggaccctgactacgagtctggatcacaggtgagcggcctcgcgttggtgagcgttcgaccggcatcattctcggtttcgtgaagttctgtctccgaaacgagagaaaaggtttccgagtagctacctgagcggatctcggtttgcgcaagagtttcggtacgaccgaataaggttttcagctgaatttgagaggggaaggcggttcgtcgcgcttctccaccatgtaacggattttttgttggtagactacggtaaagacgacttgggtctcctagcaggttatgtgggtggccgtactaggaatcatagtctccgaatcctttctttgggcgtcggtagcgacttgggggcgagaggcaaggagagtcggttagttgtgaaccgagcaggatttagaggcttcggtacgggtgatcaggccgttgaagcgctctgttaggttcctgttaacctaagattggagttgagaagcgagttatggggattttgtgtcgctacggcttctgcccccgacttattttattgaatacatcctttttatacaagattcttggataaactgttaaactaaactaaactaatgggtgtcgctgcaccgcaactgatttattggtggcggtaccgatctcttccttttccgcactggctcgggcctccacaggttgtacgaggcacgctgaaatctaatgcgccaattgccattctccgaaccggttttttcggtcgcggtaacccaatcggtggagttggtcacgcgattcgtgcttcccgcgtccgatttgggcttactcgcgatctctcgaagacgtcctcgtcgttacattaggatgacatgtatgagttctgattggttgcaaatggtgcaataggctgacaaatagtttaggatgatgtgggtgagatctgattgggtagttaggatatagcatttgtcagcccctttgtctataaaaagaggacctctctgaggccgctcaaagggagaacaagtagtaaccaagtcttccctagttttctgttgtcttcttgtccctgctagcctgttacatacctgcttgtcaagcagagaatgttgtcgttatcaacccaaacaagtgcaacattctctactgccaggacagcaatggtacaacattttgctacaccacaaaccagcaagccatggagacaggcagctgtcggcagcaaaaggaacgacagcagatgaagaaggaagcgggaatggacatcatagaatcatgaataccatctcacaagacaatgaacctcagggacttcactcactaccttctcattcactgcgcagattcagatcatcacaaggaattctactcccatcccgcccacacatggtggaagtggcattccttcatcagtcagcagcgaagcgaatcagacctcataagtgccatgcacaacaaatacagtgaaaactttaccattgtgatgggtgattggagcaatgccggttgaactgcgagatttcagacctcatcaaagatgaaaggttggcacaccctgttcaagcgcaaccacattgattgttttcttcttgatgaacacaagacctcatctgtttgccctcactgttcatcctctgagtttgtcgagaaagaattcaaagaacaacctcattcaagaccttggcaccatcacgaaggcaagatggaaaaagtccacggattgctgggttgtaccaaccctaactgtttgcagcaagcctggacgatgcgctactggaaccgagatatgctggcaacctttaatatgctgacaatcgtgcaatcaatgttggatgggcacggtagaccagaggtgttcagcaggggtgttccagccgtagcgtagattggttagattagcttatccgaactggttgtcgccggttcaattcctggtgcgggtgctagtgccaatacccatcggctccgcactatgagcagcatacacagattgccttgttcaacaacaggtggaataccaaaatcaaaagcacaattttcctgctgcagtggcattaacaattgctatacaatctcaaacgccagctggatgggactcttcaaaccaaacaagccctctgaataatacatcaaatccgcaatgtggagagcattcatcagttcctttcctgcgtagaaatccttgcatcgcttccacagagccctaatttcgggggtagcttcatgaattcgacaatgctcgatgttgaggtaatcaagacgatccagacataagtgcaccggtaccagggcttcagcagttagaccttggcaatcgtaaaggcacaagcgctctagacgccgacagctggttgcaatgcgtgaaactcccgtatttgtgacattaggagatgagaatattcctagctccacaaggttgggaaggtatttagagatggatatgagtgaagcgtcggttatgtggcgaagaagagccagggtgagacccgtaaggttacgacagtgggtagcgagggtataaatggaagggtcacgaatatgctcgctgagcccgatggtaagctgtgtgagtcgagtgccgatattgtgtgcaatatactcgatcgtcgcattcgtacactagagatattgccatatgtcagggagagtcatacgagtgaagattggacgtggggcttacctgtctacaatcaagtaacgacaagtccgttaattggggacaggattttagcagtccagctattgtatcgtcgcggagcatgtcacagtgctgaatccatattcgttccacgtttggaagagcagacaaggcccgcactaatccaggccccgtcacctcaggagaaagtgttaaggatatgttcttcacattcggtcggagctcaggaaacatctctcggagagcttcatcattcagagtccgaattcccgtcaagtccatttgttccaatgataaacatcgcacaacgatcctccctattccatgggcagtggccctctgacatcgttcgacattgagaacccgcaggctgggacaagcctcagcaatgcttatcaacatccgatctgtgacgttatcggcaatgtccgacagatgcaatgtcctgacaaaacttccatacactatcggacatggaacgctccgaagaacacgccgtcgaatgggtgacactgcagtatccgagacgtttccgccacgccgtaagacgtacaggaagtcttgccaagtgtctggtcgcagcggaggtttgcgctatacagataacaaatgggttggtcttaaactctggctttaggccctgtcattcccataccacctacccaaagcagtcggactgcagcatggaaccatgcccggttgactctcgctggactaagaaggtcacgctctgaccctactcggacaagaaagttaaggatatgattcaaaagctctggtgccaacgtcgcagccagtgcggggaatgtcccagttgtatgcggctggcacggctcccgcattttcgcttttgagcgccgtttgttgtgcttgtgcgttgggctttctggacggcttgaagcagatagcggtgactgtatgagttccggtgcagcagcaagaaggcgctctcgcctgcgcagaccagccgacgacgacattttcttaatgccgcaaactatttcctacggtgccttgccagcttaacgcgtccaaaaacttgcaacaaagagatcgcacggggcaaagcctgcagcgatcagtcaccagcaacagtccttcctccccagcaggcccggctcatcacttccacattctttcgcaggcttctggccgactcgctgtgccttgttcagcgcactagccccagcacaacatgtcaccaccgttgaacgaatctaccaacagtctcgctgggagtcacttattcggaagcagtgaagggcttactggacgggatctcgag

SEQ ID NO: 812 - protein, 481 aa, Spizellomyces punctatus
  source 1..481: note = join(complement(6171..6488), complement(5530..6102), complement(4914..5468)), XP_016611175.1, uncharacterized protein CDS
MSSSAGLRRRERLLAAAPELIQSPLSASSRPESPTHKHNKRRSKAKMREPCQPHTTGTFPALAATLAPELLNHILNFLVRVGSERDLLSPARVNRAWFHAAVRLLWRKPPLRPDTWQDFLYVLRRGGNVSDTAVSPIRRRVLRSVPCPIVYGSFVRTLHLSDIADNVTDRMLISIAEACPSLRVLNVERCQRATAHGIGRIVVRCLSLEQMDLTGIRTLNDEALREMFPELRPNVKNISLTLSPEVTGPGLVRALSALPNVERIWIQHCDMLRDDTIAGLLKSCPQLTDLSLLDCRQCTNATIEYIAHNIGTRLTQLTIGLSEHIRDPSIYTLATHCRNLTGLTLALLRHITDASLISISKYLPNLVELGIFSSPNVTNTGVSRIATSCRRLERLCLYDCQGLTAEALVPVHLCLDRLDYLNIEHCRIHEATPEIRALWKRCKDFYAGKELMNALHIADLMYYSEGLFGLKSPIQLAFEIV

SEQ ID NO: 813 - DNA, 9693 bp, Spizellomyces punctatus
  source 1..9693: mol_type = unassigned DNA; note = Fz = 6802..7764
cttcaagcacagactgctagaggactaacaatacaggcaaacactggtatcattacactggatagcacaagcgtatcaacctctccaacaaccggttccctagtaagtcctggtggtgttggtattgcaaaggatgtattcattggtggtaatatcttcgcctccaccaatatgaaggtagccacagaatcctttgtaacaacaggattagcatcgaagcaaaacttatctcctttgctcgacaatataagtagtctgaccccgaccgatggtacttttttaatgggaaatggtggttttttccggatcgtacctaaagatgaaatcctcagcacatatcagcccctgattacacctgcgagttcgcttaacctgagcggtttaacggtacaaaattcaaacaccaatgctacagcattcacactagggaacactagcactgcacagacatggggcgttcatgtttccggtacttcaaatggaaacctactttctggagcattaggcttttactcgtcataccaagataaaggatacgtgttctgaattgacccatcaggtaatatggtcgtgagtggcggcctaggagtatcaactgatgcatatatcggtggaatggcttacatcggaggtctcgaagttgcatctcaaaaatttgtaattgataacaccgctccaataagtcaaaccttgtcttcactatcaacaactgttactaataacaataatgccattaatactgcactcgcatcgaagcaaccaatgaacagcgctaccaactctctgtacacaatgacggtacagcctgacagttggctttattcttctgctgggactacgttcgagaatgttacttccactcaagtgaaaggcatcctcaatatagcaaccaatgctaacgtgaatacactcctttctggtaaacagaacaacatcaccacatcaactaatttgagtcttgcctcagttacggctagtggttatgtaacagtaattaatggtgccaatccaacatatatgtccctggtcaactcttcatcgaatatcacttggggtcttcgagtagcaggttcttcagccgatggctctaacccagcaggtgggtttgggatcaactcttcatataacaacgtcggttatgtgttaaagatttctaatactggtattacatatattacaaataccacacagtcaactagtttgactacaggagcacttctagtaagtggtggtttaggtgttgcaaaggacttgtatgctggaggaaatgtaattggtaactcctctgtggatgctccaaactgggttcaatctcgaaacgtttcgtctggcgttaatgcctacacagccattggttgtgccaatgacagcggcaatggtgcgttacttttcctcaactcttctacaaggactgcagatggagccgggaacaacgctacactttggaatgactgtggagacatgaacatccaaggaaaatctggtctaggattaggtctacagattgtatccatttcgaatgaagttaaggtgttgactgctacagactcctcgtctgcgacatcaggagccttgcaggtatctgggggtgttggaattgcgaagactctgtgggttggtaataaggtaaccagtggaaaagggactggctatggttttggatggggtagcatcggtggaaatgtcaatactggtgacatgacattcttctccccatctttgaatggacaagccttcttcaacgatcagattaacgatgtctgcctgcgggcatggaatactaacatgagatttggtgttacaaatagttcatctcaattagatattctctcatctgggaatgttattatcaatacgacgacagattgtacttccacaacaactggcgcattccaagtcaaagggggagttggaattagtaaagcgctttatgtcggtggaaatgttttctcaaatggtataaaactagcaaccgagagttatgtaggtacagccattgcttcaaaacagacattgagtccgctcctagattctatcagtggactcgcaatatctgcaaattcatttattgttggaagttctgctacatcattctccacgaaaaccgttgaagaggtgaagtcaattctaggagttatgaatgtcgacatctcagggaagcaaaatgctagtcctttactctctactctcgctgcgatgtcaccaatgagcaatatgtttctcatgggagatgatgtccaaggattcactctcacaaatgacatcgaagtacgaagcattttaaacattgtcgactatgcccccagcatatcagcactgcaaggaagcgttgcaaccctacaaacatcagtatcatcaaagcaggataccatatccagtagtaccgcattatcaacaggaacacttgttgtaaatgacataactgattccacatcagccatcactggagcacttcaagtgaagggtggagcaggaatcgctaagaaactatgggtttctggtgcacaaatgaccgtccaaaatactaactatagtgttggccaaaccaataccctcatgttttcacacgcaacacaaaatatatgttctatacaatcctatttgcctggtagtaacaatgttgacctgaatttctatgtcggacaaagcaacgcatctattcgaagtatgtcgcttaatggagcaaccagaaatgcttattttgatagagatgtcatcatcggaaacaccagtgtaaatggtttaagaagcattcaggtcaagaatgtagacctcggttcgaatgcagcaccaatttactatttaacgacggccgtgggttcttccgttctttttatgaatggctcaaatcgaacagtagatggaggcgctaatacactcacactcaggaatgacgttggtgccgtacgccttcaatctcagggagcaaaaggtatttacgtttatcctaacacaggtaatgtcgttgttgaaagcaccactccagcgttatcgagtacaactggcgctttggttgttgcaggtggaattgcggtcggtgcccatgtcgtatcaggtgggaatctgtattcaaatggtgctgtgtatagcaacggacaggtctgcgctactcaagcatgggtgtcatctcaagtacagtttcctaaggttcaggtgttcaaaatgctaactaaagatgtaatcacaactggtagcggaacaaagacgttctatgtttctacagccggccgggcgttgatacgctataccatcaacttgcatggcaccaataatgcaggaggaacgctcaatgtgtatctaggaactaatgccagttcgatgccgtcagtcttttccagtgattttaactataatgctggagtgaacagaacaatttatgcctcattcattgtgtcggggttagttcctgatgtagcatattttaccaatttttcagcagtaaatgcagcactggacacaagcgcagatgtaaccattatagaggtaatggaattagggtcttaaagaaaggaacttcatttgccatcatttaaaaaagaagctatgcaagataagaatgcgacacgcggatattgaaggtcattcagtattgaacatcaaggacgctgtgaagggtgacatggataaattctggaggtactgtcgaggtatgatgacaggagataaaaaacgtatcatattgtttcttccgaaaacagaccagaatgaacacatcttcaaagagattttgtcaatcgtccacttgaagaaactggatgaaatctgctttcgaaattccggctacttggccatcttgcaggattgcgttctcttaggacacaatcataatgaaaggctctttgttctagaaatgcggatggaaagtgcgtgaacgcggcttcccttttttttctctataaaaagatggggatgcagatggagaactgtatccccattgggtcatacagtcctttccttttcatggcttctttcgttggactgaccacaaaaagaaacgaaaaagaaaccacacgcatctgaaacacagatgccaacacagctttttgtgcagcaatgcacgggtctggaaactaatgtttcatccgcagttctattcaacacacaacaacctcattatccatcgaactagatagactcttagtacaatgaaggattaagtctaattgttcgacaacaaatgattccttttcactcttatgctgcatttgacgatatgttcctatagtggtagatagtaagagaatcataccaggccaactagtttcaaaatgtgtaggatattcgaaaatatgttgagccgcccattgaagtgcctcaagtgcagccttgagatggtcttcttcatcatccgccgcagagagtattccatctatcgctcggtaaatagtctgggaataaaaagcacatcggaactgctttgtatgtttaggttcttggtcagacgacattttttagttatacaatactgccaacatgtgaacgttaagatactttatataataatgacgctttacatcgtgttctacatcatgtggccattgctatcatcgatacagatgcccacagcttccattctacttttcttaagcctgccatcctccaatcccatcccagtggtactccagactacataaatctactcgatatgcttgccagtcgggattccctagctgactgcattcagctatccactccatcagaaaactatggacgctgaacaacatgtcaacaacaccgatttcctctccaacttcgtcaagttcttctccatattttctcactttttctttgttgtcaacaaaaggaaccctcgtataaggactcttctctgggtttgtcacgatgaaattaatgatgtctaagacaattgctacgattcgtctttcctcatccgagttagcattgtagcccattgtaggaataagaagagagccatccgtaggcgcgctgaatgtgatattgaagaattccttgaaactcgtcatactgttttgtgaannnnnnnnnnnnnnnnnnnnnnnnnnnnnnnnnnnnnnnnnnnnnnnnnnnnnnnnnnnnnnnnnnnnnnnnnnnnnnnnnnnnnnnnnnnnnnnnnnnnnnnnnnnnnnnnnnnnnnnnnnnnnnnnnnnnnnnnnnnnnnnnnnnnnnnnnnnnnnnnnnnnnnnnnnnnnnnnnnnnnnnnnnnnnnnnnnnnnnnnnnnnnnnnnnnnnnnnnnnnnnnnnnnnnnnnnnnnnnnnnnnnnnnnnnnnnnnnnnnnnnnnnnnnnnnnnnnnnnnnnnnnnnnnnnnnnnnnnnnnnnnnnnnnnnnnnnnnnnnnnnnnnnnnnnnnnnnnnnnnnnnnnnnnnnnnnnnnnnnnnnnnnnnnnnnnnnnnnnnnnnnnnnnnnnnnnnnnnnnnnnnnnnnnnnnnnnnnnnnnnnnnnnnnnnnnnnnnnnnnnnnnnnnnnnnnnatatatatttatttattagtagtataaaataccctacatagcgaaagacaagaatcctagccattctagcccatttcccgggtcaaatctcacaaatggaatcaaatttcaattttgaaaaaaaaaaatgaaaattttttgaaaagtagagaagaccgggcaaaaaaagggctaggattctagagctgtttttgtggagcagtgagcgaaaatgggcatgttgcgaaaaagccctagttctaggattttttccagcatctccattagtttcccttttttgcgaaaggttactgttgatagaaaggtcacatgaaatatgagggaaagtatcgatagaatcattattcttcaaaggaaacataaggaaacatatggatcagatgggacataaaagaaggccatcatatcgataagatgggagagttccttttccgtttataaaagagggtcaccggtctccccagctcgaagccttcttttcaaaaatgattccatatacaacattcgaatacagctgcaattaacaatggagaaaatgatgaggcgagcaagtgaagaagagctaaatgagatgaagaggttctaccaactcacagttgacaatgagatgcaccaagcagtcgtaacaacgaatcgccgtagaaaggaggcaattgaaaggaaaatggttaagaaggatgtgaggacaatcataggcgaagatggttcaaatatgtatgtggcatcactagtagaggagaagctaagtgctttggtggatgacgtcaagcaggggctgatggaggcaggatatacagaagaccaagtgatggagatttccacaatctaccgcaaacaacgaaaagtgttgagactgaaggtctcccgagtaccatcagtaaaggaaggtggagagatggagtcccaagataaagtgatttcataaagtgtggcatttgaacctagtggcaagaatttgctcaagtaaaatcaccaaatgaaccgcccaagggaaacgaaccatggagtcttgagaagaagtgaatgtcaagttagaaccagtgttgactttgaattaggtggagtttggacacgcgaaatattagatgcataaaactttacatgtatgtcagagaaaattttcggcgtagatgcgcacatcccttcatcaatagtcccggacttggacaaacaccttggaagactcgaaacactttgaaacactttgaaacactccaatgcattgggcaaacacttcaatacggcttattaatatcatattataagccgggtatatcatattataagctgggtatatcatattataagccggctgatacagtgcatatgacttatctgatgcactgtatcactcgccgcggtatgcagtttgaaggctcgatcaccatggatggaacctcggtgtctgtatacctaaagcacccagaagcagacaagtatgggaagcgcagtggtgggaaaaagtcagcaacaactcttacagctgaggtgacagcactttatgtggagaaaaacttacctgcttgtcgagcagcagagaatgtcattgttatcgacccaaacaagcatgacattctctactgccaagacggcaatggtacgtttcgctacactgccaaccagcgagccatggagaccggaagccgtcgatttgcaaaagaacggcagcagatgaaagccggcggtattgacctcatagaatcacgaataccatctcacaagacgatgaacctcatggactttactcgctatctcctcgttcgccgtgccgactggaactgccgcaaggacttctatttgcatcctgcccacatgcggtggaagtggcatgcatttataaaccgtcagaagagtgaatcagacctcataagcaacatgcgcaacaagtttgggaactttaccattgtgatgggtgattggagtgatgccggtcgaactgcgagatttcagacctcatcaaagatgaaaggttggcgcaccctctttaagtggaacaggatcaactgctttcttctcgacgaatacaagacctcatctgtttgccctcgctgttcctcatctgagtttgtcgagaaaggcttcaaagaatgacctcattcaagaccttggcggtgacgcgaaggcaagattgaaaaagtccatggattgctgggttgtaccaaccctaactgtttgcagcaagactggacgtcgagaatgcgctactggaaccgagatacgctggcaacctgtaatatgctaacgatcgtgcaatcaatgttggatgggcacggtagaccagaggtgttcagcaggggtgttccagcggtagcgtagcgtagtttagttagattagcttttccgaactggttgtcgccggttcaatccctggtgcgggtgctagtgccaatacccatcggctccgcactaaagaaactgctgaaaataagattaattagggattagcctttaaaggacatattaaagcgatcaaattaaggttaaatttacctcacattcagtttatatgcaggtgtaattacgactaccaagatgggtttgaatttaaacggttgcagacagcgaaactgccattactctgaggtttttttccttttttttgacatctaggtcccattacgatagttttctaccgccttactacatttctccttgtagtcgtcgtcgccctcttaatcgaactggaacgatgaaaggagagggggctcgagtggaaaatattctgacgaggtcatggattacacaaacccaatgttttgcagttgccaactacgtttctcctttagtaagaggctcatacgctacagtgcgcaccatcgaagctggttagacaaagtctgtatacgagtcatgtctctcatcgtctgcatcgctcagacttcgacagcagctcgccgcacaaaagccattgttcttcaaattacactaatattatatatccttaccaagggtgttatatcatagttattaacggcgtcccttcaatgatttccgacgactactcaagcctgtcaaaggtcagagcaatttccattccgccagcatgttttcaaagggatcaggatcagcttggaatgttaatctatcaccagtcgcgctttcccaacacgattactgaggtagggcttttttgccaggtaaaggattgaatgagtggtgcgaataatcagcgttctccgctttattagagatgcatgtccggagcagtagctactttgtcttgtcaatgcaacgaaaacttttcactgactgattcttctttcgttgttgttttacgaatgtgtgaagttccgaatcaacgatctcttctctttttgcatcaagttgtttgtgcatgttgaaaattcgtcgattgttccccatattaaacgccaaatacggtttgaaggttctgctagctttgaacacccggcttattgcacgagcggccttgtgtgtaataccactggtttcgtggtccagtgtatggcaaaatcttcgatctctacatgcgcttgtcaactctcaactagacttctcagctgtggctatactccccgcccaagcagagatcactagggcttgttgaccacgacgacatcatttgatgtgtaaatgggggttaagtgataggatggagagcggacgtcgtgattacgagtgctctcacattcgtctttggtccaggaggtcagaggtatttggttcatgttacgggccggttaagaggatggagacaaagaatcctgccaactgtttctttgagcgcgttttcctgggtgcagggcatgtactgtagtcacaatgtttacactacccggcctttataacgtttgaacagttgaactgcatgaactgcggctatggaatacacgataaaggagactattctactggcttaaaaatgataagtcaccctcactacacttcttaaccttctctactggacggcccaatccggaactcgccctcaattatcccttcatagcactggatcaatcgagtcaacatgtacagtacattcgcgttcaagccaaatttcgatcaaggaccggccgaagccgacgaagcactacacccaaaggaggctacccacacgatggtaaaccgtacgccttcgacaaacctatcacgtacgtgggtacacgaatgttctacaaaacggcctcggctataaagctgaactatacaacgccgatatatatataacacaaaataaaaggtcagtactgcctgcccgtcttatgcatcatctgagccgct

SEQ ID NO: 814 - protein, 1137 aa, Spizellomyces punctatus
  source 1..1137: note = join(<1..469,560..3504), XP_016611171.1, uncharacterized protein CDS
LQAQTARGLTIQANTGIITLDSTSVSTSPTTGSLVSPGGVGIAKDVFIGGNIFASTNMKVATESFVTTGLASKQNLSPLLDNISSLTPTDGTFLMGNGGFFRIVPKDEILSTYQPLITPASSLNLSGLTVQNSNTNATAFTLGNTSTAQTWGVHVSGNMVVSGGLGVSTDAYIGGMAYIGGLEVASQKFVIDNTAPISQTLSSLSTTVTNNNNAINTALASKQPMNSATNSLYTMTVQPDSWLYSSAGTTFENVTSTQVKGILNIATNANVNTLLSGKQNNITTSTNLSLASVTASGYVTVINGANPTYMSLVNSSSNITWGLRVAGSSADGSNPAGGFGINSSYNNVGYVLKISNTGITYITNTTQSTSLTTGALLVSGGLGVAKDLYAGGNVIGNSSVDAPNWVQSRNVSSGVNAYTAIGCANDSGNGALLFLNSSTRTADGAGNNATLWNDCGDMNIQGKSGLGLGLQIVSISNEVKVLTATDSSSATSGALQVSGGVGIAKTLWVGNKVTSGKGTGYGFGWGSIGGNVNTGDMTFFSPSLNGQAFFNDQINDVCLRAWNTNMRFGVTNSSSQLDILSSGNVIINTTTDCTSTTTGAFQVKGGVGISKALYVGGNVFSNGIKLATESYVGTAIASKQTLSPLLDSISGLAISANSFIVGSSATSFSTKTVEEVKSILGVMNVDISGKQNASPLLSTLAAMSPMSNMFLMGDDVQGFTLTNDIEVRSILNIVDYAPSISALQGSVATLQTSVSSKQDTISSSTALSTGTLVVNDITDSTSAITGALQVKGGAGIAKKLWVSGAQMTVQNTNYSVGQTNTLMFSHATQNICSIQSYLPGSNNVDLNFYVGQSNASIRSMSLNGATRNAYFDRDVIIGNTSVNGLRSIQVKNVDLGSNAAPIYYLTTAVGSSVLFMNGSNRTVDGGANTLTLRNDVGAVRLQSQGAKGIYVYPNTGNVVVESTTPALSSTTGALVVAGGIAVGAHVVSGGNLYSNGAVYSNGQVCATQAWVSSQVQFPKVQVFKMLTKDVITTGSGTKTFYVSTAGRALIRYTINLHGTNNAGGTLNVYLGTNASSMPSVFSSDFNYNAGVNRTIYASFIVSGLVPDVAYFTNFSAVNAALDTSADVTIIEVMELGS

SEQ ID NO: 815 - protein, 132 aa, Spizellomyces punctatus
  source 1..132: note = 5978..6376, XP_016611170.1, uncharacterized protein CDS
MEKMMRRASEEELNEMKRFYQLTVDNEMHQAVVTTNRRRKEAIERKMVKKDVRTIIGEDGSNMYVASLVEEKLSALVDDVKQGLMEAGYTEDQVMEISTIYRKQRKVLRLKVSRVPSVKEGGEMESQDKVIS

SEQ ID NO: 816 - protein, 234 aa, Spizellomyces punctatus
  source 1..234: note = 6838..7542, XP_016611169.1, uncharacterized protein CDS
MDGTSVSVYLKHPEADKYGKRSGGKKSATTLTAEVTALYVEKNLPACRAAENVIVIDPNKHDILYCQDGNGTFRYTANQRAMETGSRRFAKERQQMKAGGIDLIESRIPSHKTMNLMDFTRYLLVRRADWNCRKDFYLHPAHMRWKWHAFINRQKSESDLISNMRNKFGNFTIVMGDWSDAGRTARFQTSSKMKGWRTLFKWNRINCFLLDEYKTSSVCPRCSSSEFVEKGFKE

SEQ ID NO: 817 - DNA, 3811 bp, Spizellomyces punctatus
  source 1..3811: mol_type = unassigned DNA; note = Fz = 1951..2142
attatattatgattagaactgaaagtatcctatatcatcaaccctagctactctggtgccgatgaagtgtacaaccctaagaatgtctctagaattgtacacgaagccatcgggcagagtaatatacttgttggataacatattttatactcggccgccatttggaaggcgcgcaacaatgtagttatgatcggcggaccatcatcgtttgcgtgtcccaagaacaaactcatattgaataccatttcattttctgcaaactgtattgctttacatgtgcttgttgacacgtcggtgaagcttggagttgagctcaaagatactgtacaagtatagaagccccgaaatcgccgaattttaaaaccgtgctgttccgggaacctgactgacggtttccgtagaatattctgcttcttgatcagcagtccgtgtttgccttgcgatttggacgcgtgcagcgggtagcactcatcaatgatgcaagtcctagtctaatcgttggtttcaatattgatacatgtacgcgaaggcgctacaatcatctactagactggcatatcataatactgtcacaagtatatacataacctgagcatccagtatcatctcgtctggctagtagtccagcatgatggcaattctacctattggattttcttgatatcttcggctaccaaagactgatggcacatgattcccgcaatggatccatcggcgaccgccaccgccctataaattaaagaatcccaagaatcaaccatttcagtaaatcccaaagtcaccacaaaccggaagaccaaacagaaaaacttacacattcataggcctcacagagtcaccagccgcgtaaacgcccggaatcgacgtaacttgcgtcgccgggtcaactttaatcaagtccacaccaaacggactcggtgtcacatcgcaaccgagatcagcgacgagattgggtgtagacagggtcaaaggtgggaggagtaatactccccttcgctcaattttccgaccatccgataattccacgtaggagagttcggactcggcatttgaatcccgaacgaatttgctcactggcgtgtgctccaattttattcccaatttctcccacaacgccgtctcttcagtgctcaattgaacagcagggaacacggactcggtaccattgatcgcaccacccgtaaagaggataatatcctttgtaaggtctggtaacaagcgagcttgatgactctggataggagtggtatagaggagtcccaagggcttgccgcggaattcgtatccgtggcagtaagggcaatgaaagacggatttgccccaggattcttggaggccttcaacaggaggaaggttgtccttgaggcctgtggcgaggataatgcggcgggtgtgcaaggttttttcatcggatgtaacaacgttgaaagagggactggctcccttttctgcagtcaagttttggatggagacaacacgcacattctcaacaatcgtacaatcagagtatcgcctcaactgcgctttggactctgttaaaatatcactgggagattttccgtcgtgacccaggaacccatgagcatgttgtgcaaagcggttccggttttcactgctgtcaatgaccagaactttacgacaggagcgggcgatctggagggccgcggagagaccggcaaacgagccgccaatgacgattgtctcgtaggttgtggtggaggtggacattgttaaaggatgaacggtataaaaacgctgcgacacctcccgccgtgtccgtcacttacatagcacacatatcataattttactcgatttagactcatgaactatggtttgatccaaaaatcctatataagttgtcgtgcccattttcccaggctttcatctttttccacagagatcatcatgccgccaaagaaaaagcaaaagcttgaaaaactcgacaaacccaccttacatacctgtaacaaaacttcctttgcaaaagctttcctgccaaactaccaccaatggcttctagattacatcgccatcatccatcaacttgctgaccatgcttcccatgctctcaaattctacatcctatctgcaccatcctttcccacggtagatcaagatacaatcgaagcgattctccacccagccacgcatctggatatggatgacagtgtattccagccttttttacaatatctgctatgaacagattgaacagaacgaatgagatcctgaacagagagtgccattttacaatgaatgccgatgacaacactgcaaactgattacaaaggaaatatgccattgatcgcaaaacggagctggaattctcaacatgtatcaacaagatcgaagagaacgatagctcatgaacaaaataaggcattccatgtgtcccaaccatttgacgccattggaaactctgaataaaaataaaacgatgcttgaaaaaaacgtctttcatgtccgttctgttcaaatacaaaaagagcaaaaatcgcggcggaatactaagcctccgatatctaccacgtgacctatgatcatgaataccataaatggagaaatgaattatctcatcaaatttcacaccttttgcatttctttttccttcaattgggaaagcggaccgcgtgtgtgacgggcagcggttgaccgttttgcactttttgattgggggggggggggggctgctcgtaggttggtttcttggaaaaagggtgtcaagaaacaaaaggcattcgagtattggaggaggggttcaagttttttttgtctttttggcatttcaagaccggcagtaagagttctataaagagtgatccgatcggagccacgacctcattgtgtggaatatggcacatggaaaaggactcgtattgtcgggattgctggttggggtagcattctggggtgtgaatgcacagacgacttcggacctaggaccaggagctggtgtgccagctggcatagcagggcagcctacgtgcttttcactcgctgggacgacaacctgtaccgcatggaaaggtacgtcgggcgacgcgggctcccaaaagtttttttgttcttggcgttttaacagtctgtcatataactcgttccaactattcgcagactacactattcaagcttctactagctttgccaatctgaccgcatttgacgcttacattcaatccctttacgacaacaccacaacttcccttgctacatttcaacgagataatgcttgtcccacttggaatggcaaggggcgacgatatcacatttccttcctctgcggaatggtcattgacgtctcgactgtgaacggctgtaaccctaccaacatcccagggccactgtgtagcaaaacagcaaagcaggccgttgatagtttgacagagatttatgcagacgcaaagagttgcacgccaggcgtcgccagaccgtttccgaatactactgaaacgtttatgaggaggatgaccacggatgtggactgtgttgctgcattgccgtttgaatgggccatgtgcggtacgtctttgaatccgctgttcgggcatggatgacgtaactcacacaattcactttgttatgacaggattttggacagatgctgaagccacggcttattgtagtgcagccgctacatcctcggatctctgttgtcaagcgcagaaagccaaactagccaatcaacccatcgtagttcccacatctgtgggcggcccaacgtccaccacacgaggtggtggctcgcaggggacaactccagggggaacagggggaactgcttcaacctctggagtaaacgggcccagca

SEQ ID NO: 818 - protein, 332 aa, Spizellomyces punctatus
  source 1..332: note = join(complement(815..1728),complement(645..729)), XP_016605628.1, FAD-dependent pyridine nucleotide-disulfide oxidoreductase CDS
MSTSTTTYETIVIGGSFAGLSAALQIARSCRKVLVIDSSENRNRFAQHAHGFLGHDGKSPSDILTESKAQLRRYSDCTIVENVRVVSIQNLTAEKGASPSFNVVTSDEKTLHTRRIILATGLKDNLPPVEGLQESWGKSVFHCPYCHGYEFRGKPLGLLYTTPIQSHQARLLPDLTKDIILFTGGAINGTESVFPAVQLSTEETALWEKLGIKLEHTPVSKFVRDSNAESELSYVELSDGRKIERRGVLLLPPLTLSTPNLVADLGCDVTPSPFGVDLIKVDPATQVTSIPGVYAAGDSVRPMNVAVAVADGSIAGIMCHQSLVAEDIKKIQ

SEQ ID NO: 819 - protein, 267 aa, Spizellomyces punctatus
  source 1..267: note = join(2856..3030,3118..3522,3590..>3811), XP_016605627.1, uncharacterized protein CDS
MAHGKGLVLSGLLVGVAFWGVNAQTTSDLGPGAGVPAGIAGQPTCFSLAGTTTCTAWKDYTIQASTSFANLTAFDAYIQSLYDNTTTSLATFQRDNACPTWNGKGRRYHISFLCGMVIDVSTVNGCNPTNIPGPLCSKTAKQAVDSLTEIYADAKSCTPGVARPFPNTTETFMRRMTTDVDCVAALPFEWAMCGFWTDAEATAYCSAAATSSDLCCQAQKAKLANQPIVVPTSVGGPTSTTRGGGSQGTTPGGTGGTASTSGVNGPS

SEQ ID NO: 820 - DNA, 43112 bp, Spizellomyces punctatus
  source 1..43112: mol_type = unassigned DNA; note = Fz = 1172..2080,  Fz = 40950..41912
tggggagtagatcccggatttttgtcaccagaatactgaacatgttcactacaggcagacatcatttgtagaaaatacaataaaaacatcttgcctgctgacaatgtgcataaaaggacgacgagcaggtaacgttcctcctttcattcaccatcttctctttgggtattgtaaacctcgccaaacattcaacaaaaaaaaagcaaaacccaaaccaaaaaaaaccagcgaccccaagaaatgacctgcttttcgcgcatctacgcaatcttgttcgtcgttctcgccttgctaggcgtatcagctctggccgctccattccctcaaaatgcagcaccgagacccagagccgttaaaatcgttcccgggcccatcaaatttccaagcccgccagccatccccaaaacgaacttaccaaaaggcgagagagttcccgttaaagataacaaatatccgagcccgcctcctaacgttggcggaggggataacgttactcctacccgacccggcggcggtgatccgaaaaaatgatcaatgtgccatgtcgaaacgttggtgaattcgtgtatggactggcttgtatataaaacaaaaaaagaaaaaaatgtgtacatagtggaagtaggtaaaaggccattaagcgttcggcaacgatggaggaaacttgtatggaaattcgaaatggactggcttgtacatacaatataaaaataaaaaaaaaagttttgggtgagcggagatgctggatttctgtcatttacattgactgaaggaagtccaaccattggaaatacctcggggacctctaaaacctcttttgaaatattcttgtgatgaaagcctttttttttttttggtgccgaatgatagtcggaattaagaaactgggtttcaaaacgtattttgagaatggggagtatttcaccaaagatggggaccaaaaaaccaaacattttggagataccataaactgcatagtgcggagccgatgggtattggcactagtacatagattccaaccaatttaatcataattttactcgatttagactcatgaactatggtttgatccaaaaaatcctatataagttgtcgtgcccattttcccaggctttcatctttttccacagatatcatcatgccaccaaaaaagaagcaaaagcttgaaaaccctaccttacatacctgcaacaagacttcctttgcaaaagctttcctgccaaacgacatctaccgccaacggcttttagattacactgccatcatccatcaacttgctgaccatgcttcccacgctctcaaattctacatcctatctgcaccatcctttcccacggtagatcaagatacaatcgaagcgattctctatcttctcaacaaaggagaggcttggcaaccaaaagctgatgcgaaaaaggcattgcgcaaatccttgttgctgtatgtccaacagtactgccacattgtcggcttcgttcatccaaatctacaaaaagagcagcaatcagtcaattacctgacagcgagtatgatgacgaacctgaaagtcaacgttcaagagcatttcatgcagatgctccttcggtatatcaatctgcggctcgatgtgaagggacagaagcagcgactgccactgaaaagcgatgcacggaaagctttctttactcggctatgctacttaaagtcaattttcctttttgatatcgtgcccaagtcacttgatgacttgaccgctgaagagagtgagcttctagaagagatgtggtccttcattcccctttccgaccagccgctcgcatattcagttgctgttgaccctctcgctttctttcctgcttactgcaaactctctgtgctgtatgaacgacatggcttccatcggttcagtgcaatacctcttcgtcggtctctgattcagtcccatatttgcatcgacacggtcatcctgtaccagcatatcctttgcatcatgcgacgggaagtggaaactgttgaaaaggtcaacttatggttgcgcatctgtaatctgcggaacaaggcttttagatctcattgtaacggattttttgttggtagactatggtaaagacaacttgggtctcctagcaggttgtgtgggtgtccgtactaggaatcgtagtctccaaatcctttctttgggcgtcagtagcgacttgagggtgagaggcaaggagagtcggttagttgtgaaccgagcaggatttagaggcttcagtgtgggtgatcaggccgttgaagcgctctgttaggttcctgttaacctaggattggggttgagaagctagttgtggggatttttttgttgctacggcttctggccgccgacttattttattgaattcctctttttatacaagaatatgctacagtaacgtctacactagtttctgtagccttcattagggtggcggtgtccaatcttcccatctcggaccatcgccatgatcgatcatggctgcgtaacgtatccttcacgctgcactggtgtagcccagaaccgagcttgatcttaggggtttcgaagcttaggttacaattgcggaaacctcaatcatggtcacctgatgcctttgagcgaaccagtttatcagagtcgttcgctacatccccccttcgaaaaagaaggttcggcgactcgtctgtgagtgcccgaacctcgcttctaccatgacgcaactggatagtcgttgtcagcttcaaggctgtctttgttgatcgtccagattatggtagcgtgccccatgacgttcgcgcagaaccaaatttggtcagtggcttccggagccggggttccaggtgtcctggaactgttgggtcaggttacatagagggctgtgaacgtctctgcggcccttttcaagttaaccactcgaaagtggtaataggcgtgctcccgatgcttgggacagagctgctcttctgtggtttcagctgcattggctagctttaacaacactgctctcgcggcttcgatggctatgtccgcgaaatcgtgggcctcgtgatcaggccagagggtgaagcgggccattttggggtttccggccgcatgttgagggaccccagcatcaagccaggcagcgcagggtatgtcccgtaatctcttgcctatcttttttgcatcggcgacaataccgacagcagcttgaccgccgttggaagccctactgtagggctccgtgatatgcatcatgaggggctggctcatggcgtaaggcttcgaagccccgtcaaccacccaatcttcaccacaatagtgttcaagggttttgtttgggtcttcatacaactcacgaatccaaacttcgacccaggtggccatggctgctccgagccgctcgatagagttctcggcagcgaaggcgtcgcttacttctgaccagggatagccttcctcaagggtagagaggatgctgactccttgttgtcctcggatatcagtggtcatggtgttggaaatgaaagcttttgtttcggtgtcgatagaaagggtttgcgaagcagagtgagtgtgtaagggaagtagttcgttggtagttgaagaagaaaaatgagggggggcgagcaggggcgcccttttaaggtcgtcgccggctgattttgacagctcggacgcgcgtaagcgtgatcgggaggcttggtgtggcgttctcgactggtgaggtaagccacgcgaaactggttttctttctggtgagagggcatgattatcatgtgagctatcgtccggataaactgcgaagcattggtggtcggaagcgtaagccatatcttccggggcgtcgcctgcaaggctgactactgaagagtcatctactagtgtgctagtgggggctctggatctccagtactcttctaaggcttcggaagcctctgttagggcttcctctggttcccaggtatcctcatggggtgggtatccggaccaacgtattcgaaattgacattttccgcgcctggttcgatggtctactattgcttccacttcaaactcgccctctgaagcgttggaatcctccgcttgtgcttccgcgaccttttcctcagttttggcgtcgacaggcttctggtacggatgtaatttcgatatgtgaaaccatggatgaagtcgtctcatcttgtctggcagttttaactcgtagttgtcacggagagggttacagtcggtcaccgtgactggtcccagccatttcggagtgatcttggactcataccctgctaggttttttgtgctcagaagcaccttatctcctctctggaactccaaatgtcgtcgcgataaatcataatatcttttctgcgaatcctgggctttgatcatcagatcttggataaggatgtttaggtcgccgaggtgtttacagagctcttccgcatctgcatttctggtttctgacggcctttcgacgatatccgccagtggattgtggggctcatagcctaggtccattctgaatcgcgtcatttttgtcgcctcatgtaccatattgttgataatgaattccgcaaccagaagaaaggtgtcccagtcgtctaatcgggtgttgaccattgtggtaaggacctgcaagaccgttgcgttgtctctctctgattgtccatcaccttgagggtggtaggctgtggtgagctcttgattaatctttaggtttttgcagacctcctgccaaaatcgactcgtaaacttggggtcgtggtccgagataatagtctccggaatgccgtgcaatgggacgtagcattctataaagagttccgcgacctgaatagctgtcgcagtgctcttgaggggccatacgtggatcctctttgagcatttacatgctattagccaaaaggcgtcgtaccctctggaagtaagtgggagcttggttacgaagtcagtcgtgatgactgtccagcatcctggagctggtggtatgggtttcagcaaccccggaatcagttgcggtaccctttttgagcgttgacagatttcacatcctgcgcagtgttttctgaaatcttgtgccatctttggccaccagacttgcgctgcggctctggcataggttctttcgaatccgaagtgtcctcccccctcgtgaaaaagcttgcgcaccttgggggtgcaagcagggggcacgtagaggcgccaaaggtctttggagactgaaaaacggtgccacagcaggttatctgcacgttgccagtcctgaagaaagcgtgtgtcggctgtagtgtaggtgtcggggctggtctcccataggagcgtgcgggcctgttgggctatggggtggagctggccggtgaggccagtgcagatggcggcaatgagtgcaggctgtaatgccagacggaaggcggcatctgccagtgtcaaggaaggtgcgagagccgctggtgtggtgcgcagccgtcatcttccgcgttccgccacccatatttgggtcgcgctggagcagaggagggtttctgctcctagtagccgtgaaagtgtatcagcgacaatgtgaaaacgtcctggtttgtgaacgattgtcatccattcagaccagtaactaagatcgagggcccagcggagaagcttacggttctcacctttgtatttagcgagccacaaaagagctcggtgatcggtaatgaccatgaaaggcaggccttcgaggtatgggcggagttttctgaggccccaaatgaggcatccggcctcgagttcgacagggggggccttcttttccgaggtggtggtgcctcaggaatggtagcacagcgggcgtttagaagcatccggctgtaactgttcgagcatgacattaaacactgtgtaggaagcatcactgtgaagggtgtaggggaacccttttctgggtgccgcaagcactggagctgttgtcagagcctgcttggcggctgtgaaggcagagtttcgggaatcggtccatgaaacttcatgcttcgcgataaatctgcacagaccttggtcggggcacttgcgagcaaggcgtctgacacaaaaggggtcaatgggcaagtccaccaacgatgattggcatagattgaccgccggtaggtctgaggagctagatttcggatgttgcgaaacctcaaatcggactccagtggctgtgattgtaggggccaccgccgtgtcgagcatggatggtgaattgagcttttcagcgcctttctttgggtcagcacgaccctttttaaggtctcggtattcgcgaatgccctcttggatagcgtcttgcaggggtcggatgagttccgcgtagcgggggatgaattgggcatagaaccctaggagacccacgaaggaccataggtcacctatgaatttgggtcgtggccaatcgactatggttgcgaccttgtctggatcagtagcgagaccctgagaggaggcaacgaaaccgagagccatgagctggtgaaagagccattgacacttgtcgagtcttagggtgagtttggctctggaaaagcagtcgagccagtccgcgatggcgtctagggcttccgcggctgtctccactcgtgtgtggatatcgtcgacgaagttgttgatatttcaccatttggagggacccaaggtgtcgtccatcacccgacagaagtgcgaaggggcagtcttgggtccgaagggcataaagagtggttcgtagatgccgtcatggagtctgatcgcgagccatttgcgtaccgacgcatcggtgatggcgatttggtaaaatcctttgtttgcgtcacctcccgatatgtatcggaatgggactgtgatgatccagttcaggatgtcgagcatgatgggaaagggatatgggtcccaggccatgcagtcattggctcggcgatagtcgaaggctacccgcaggggtttgtctgtgtagcgaatgataacaggatcgctggcaaaggttacttcggtggttcgtttccacctctgaagccccatcatggtgtctcgctccgtctcaagggctgtccgctccaacggagagtacgaccgtggcctcgaaaggggtggcggagccaagataaatcgaggcacataaggaatcttggtgtagttccctatgagatgaccctcatagctgaaggcttgatggaagtgtcatagaatgttgattagggcccagaccacgggtttgggtcgcttgagatcgatgtggaaacgttctgtgtcttttaattgggcttcgaaggcccctggagccctctccgtagagtcgaggttccatttgttctgaagtgtctgccattcttctttggaaatgttctcttcggggtccgcaaccgaattatgggtcgcggtggacagtttgaggcctaacggggccgttgagctagcagcggtggcctcaagagggttttcgatgagaaaagtttgggctgccacgcgcatctgtcccgtgattaacatggttaatctagacttctgagctttggctttggtcagccgtggcattgacacatccttcatgaattcaccctgcttggtcttgtatggcatgccgcgcatgtgatcggtgtccagctcatccgttatggagcaagggataaggatgtccggattcttgagcatcaccgcgaaactgggtaacgggggttcctgaaccaaggtttggagtttcaaatgtcccagaacatcgttggctaggatgatgagaggtttcccgtatgcaatgactcggaaataggcacggaaagtcaggtattctcctctgcggcctctgagggaagtttcgaggcatactgtcttggtagatgagatacgtccaccaatgcctttgaaagccatcgtttctgcatcctgcaaattggtttcggagaacagaaggccctggtacgtgtcggaaaccagagactcgcaggctcctgtgtctagtaccacaggtgcccagagctgagcgatgacggctagcgtccagcaaggctgtgtttgggtcttggtctggcttttgagtacattgcctaaatctaccgactagaaggcgttgatggaaggcaccgcaactacaaagtgaggcactttgagacaatttcatcaaaaatattcccaggaagaaagtgccacaggataaaaccaatggtaaaaattggaagcttatggaaagtaaaaaattatgtagagacatgtagggatgagaaatgtccccattttcctagcaagattgcaaaaagaatagaaatatccacatgtttaaatggcaacattggtttccttgtttacacaaaaatccacagaagatgtaggcaactcaggcgtcagaactcatcccatctcaacattaccttcgaggcataccatgctctggaaacattctcttccctacatccctgacggcatcttccgccgcttttgatgctactttttttacatgtagccctgggatttcgttttctttcttcatgcatgccggcacggcgagcggcgaaagcggtagatatgtactgttgacaatcatgatgaacaatagcatgatttcgaccatgcgaatagttttttagtttatccaaacattcatagcaggaatacacagcgcatttcagacatatgcagagttgatattctttaaagcctgtacaagtatcgcaacgcatcgaaacgcgcatttttattataatgagtggaagattattcagcgtgcgttttaagtacctttagaagcaatattcttcaactgagcatattctttccccacattcataatgtggtcatccatgtccaatagagtttcctgatgctgcaatatgcatttgcagatcgcccttttatctagcgtaggatccttgatgacaggcattagggttttcaggtttatggtgataagatgctttcgatttctgaaaaatgctatagacgaataatttatgaagccattatggtttgtatcagataatgtagggtcttgaaatgacagcgagaattgcttcgtttgtagaatatcagagaagtctttgatcatgtttttgaatgatccttgatgtaggtcatcaaacatggttataaagtcgtctttggtagaccgtacagatatgaaatgcattctatttgactctcatctctaaaaaaaacagccgttcgtttctcgaatgacccaacaatacaaaattgttgagaatagcgagataaccactacgcttgaagcataattggtcgagtttcttcaagtggacgatggagagaatctcttgaaagatatgttcattttcaggtgtttggggtaaatagagaattaccctgctcttgtcccctcttaacatactttcacaaaatttccaaaatttatccatgtcatcctttacagcatctcttatattgaaaactgaatgactttcaatatccgcgcgtcgcattcttatcttgcatagcttcttttttaaatgatggcagtgcgcgcgtcatctattgtccgagttcagtgattttaatgagggaaacatcagttgtgttatcgggagcagcctgactgatactaaaatttgtgaagtaagcaacgttatcggccatccctgtaacaatgaatgatgctgtgattgtatgattgaccccggaattaaagttaaagtcgctcgagtacacgagaggcatcgacccagcgctttggccgagaaatattgacaatgtaccatttgagtttgctgtgccatggaggttgaccgtccactccataagtactttacctggtgttgaaacatagaagaccttcgaggcattgttggattgccacacgtctttagtcaaaagtttgaacacttgaacatttcttagaaatgtttgactggaaacccatggttgagtagcacaaacctgaccattgctatagacagcaccgttcgaatacagattctctcctgcaacaacatgtgcaccaatagcaacacctccattcaccaccaacgcacctgttgtactcgataaagccggagtggtactttcaatgatgacatttcctgtcgacgatgcaatagtaatacccttcgctccctgcgcttgcaatcgcaccgcacctgcattgttcctgattgtgaaggtgttcacgcctccatccacagtcctattgttcccattcaaaaacataacagcactccctgcggcattctggaagtattggattgcgcaactattgcttccaggatcaaggtttttaagaataatagcccgtaacctgttaagtggcgaaccaatagttagattaccggacgagatgaggtctccggtgtaggtgttaactgagaatcggctattccatgttccaaaggtatcactggaataatgaccgaattcataacgacgttggtctatgctatcagacgagccggcgaggtgaacatgaagggcgtctccggaattgttatagccgatagtataatcacctttcgttgcaggagtatcacttctcaacttgaaatatccacctgtagaggcggctatgagaacttttcctgtaatgtttccacctgagaagatacttttagaaacccctattcctccttttacctgtagagccccacttgatacggttgttgcctcggatgtatcattagcaagaattgtatttaccgacagattgctggtaggtgtgagtaaatcttgtttcgatgtttgcagtgctgatatgctgggggcatagtcaacaatgtttaaaatacttcgcacagcgacgtcatttgtgagagtgaatccttggacatcatctcccatgagaaacatattgctcattggtgacatcgcagcgagagtagagagtaagggtgatgcattttgcttcactgagagatcgacatttgtaatgcctaataatgtcttcacctcttcaggagttttcaccgcgaatgtcgttgcagaactccctaaaatgaaagaatttgcagatagtgtgactccactaatggaatctaggagcagactcgatgtctgttttgaagcaatggctgcccctacataactctcggttgcaactttcagattattggagtacagactccctccacagtagagattcttcgatattccaacacctccctttacttggaacgcacctgtgattgatgatgaagcatctgtgcttgtatttacaatgacattcccagatgagagaatatctagttgagatgaactatttgttacaccgaatctcaggttcgtattccacgccctcaggcagacgtcgttaatctgatcgttgaagaaggcttggccattcgaagatggggagaagaatgtcatgtcaccagtattgacatttccacctatgctaccccatccaaaaccataccctgttcctttcccacttgttaccttattaccaacccacagagtcttcgatattcctacacctcctaatacctgtaaagcccctgttgttgcagacgaggagtctgtagcagtcaacaccttaacttcgtttgaaatagaaacaatccgcagacctaatcctagaccagatttcccttggatgttcatgtctccacaatcgttatgaagagtagcgttatttgacgagccatcagcagtccttgtagaagagttgagaaaaagtaaggctgcatttccgctatcattggaacaaccaatagcagtgtatgcgtttacgccagatgaaatgtttctagattgcacccagtttggagcatccacagaggtgctaccaattacatttcctccagcatacaagtccttggcaacacctaaaccaccacttactagaagtgctcctgtagtcgaactagtcgattgtgaggtatttgttatctgtgtaataccggtattagaaatcttgaacacatagccaatgttgttatatgaagagttgattccgaacctgcctgctgggttagagccatcggcggttgaacctgcaactcgaataccccaagtcacgtttgatgaagtatttaccagtgacataaaggtgggattggcgccattttgaacactcaaataaccatttgcagtaacagaagcaagactcagatttgttgatgttgtgatactgggttgtttcccagaaagaagtgtgttcacgctagcatttgtagcaatatcgaggatgcctttcacttgactggaagtaacattctcgaatgtagtcccagcagaagaataaagccaactgtctggctgcaccatcatcgtgtacaggctattagttgtagcgttcataggctgcttcgaggcgagtgcagaagtgagggaattgttgttattagttaccgtcgttgtcaatgaagacaaggattgacttattggagcagtgttatcaattacaaatttttgagaagcaacttcgagacctccgatgtaagccattccaccgatatacgcatcagttgatactcctaggcctccactcacgaccgtattacctgatgggtcaattcagaatatgtatcctttatcttggtatgacgagtaaaagcctaatgctccagaaattaggtttccattcgatgaaccagccacatggatattccatgtctgtgcagcgctagaatttcctagtgtgattgccgtagcattggtgtttgaattctgtaccgttagaccgctaaggttaaggacactcgctggtgtaatcaacggctgatatgcgctgaggatttcatctttaggtacaatccggaaaaaaccaccatttccacccatcaaaaaagtgccatcagtcggggtcagactactgatattgtcgagcaaaggagataagttttgcttcgatgctaatccagtcataacgaatgtttccgttgctactttcatattggtggaggcatagatattaccaccaatgaatatgtcctttgcaataccgacaccaccaggacaaactagggcacccgttgttgaagatgttgatactgttgtgctatccagtgtaacaattccagtgtttgcctgtattgttagtcctctagcggtctgtgcttggagccgaagatttccaatatcgtttctcaatgtcattgtgttttgccctccatcgacactccggttgtttccgttcaaaaacatcactccagaccctcctgaggccgtaagacaaagaatactacatgcgtttcctcctgtattagtattgctcaaaacgagataacgtaaactgtttacagaagaggctccaactgttaggtcgccccctacagcacatgaaccatttgtgtccactcttagacctagagtaggcgtgctagatgtcctaggatatatgaacatgggtaaatcctgagcaccgagccatgttgaagcaccggggttgtatcctaagaatcctgttccatcgagcccgaaccatgaactcttagttccatcgaatgttgaatatgtcgtgaccgatgaagtgcctgtcatagatggagaaatattcaatctggttccactgattactttaccaccgatattaccactgaatgtcacattattcgaagttaatgccgttatctggcttccaacccaaggtttgatgacttcggtatcataatcccttagcatagagaggttaattgcttgctgagggtattcgtatttgatgcctcaataacatgaaggcgtatcaaacaagagacgagtacaacctcctatgggatcagaagcaattgtgacattgctcccgggttcaagtggtggcatgaaggtaacagggtctattggttcataaacggggtttccatcgccatcgagtataggttggccttccgcatctcgttgaaccttacgtttgcatgaccctccgaaaatcattccccaagggaacgttgagacgattgggaggatggagtttacagccatagggactgtcaagggtggggagaccatcgctggaaaaggtacggttgataatggagttgctccggacaaaataacagtgttgcctgatggaacatccatttttaacacttctgcggtatcactctgttcagtattatcggtatccctttgctttgataatggcatagggtcaatgagggtaaagttataaagtggatacgaacctgtaatgatgagatttggactgttacttacgaattgaggaggaatcatgttatactgaatcatatttccaacaacaataatacttccatatgagttggtactgcccacataattacctcttaaggtatcgcctacgcgaagaatagtatcgcttcctgaaatcgaacatgaaatcaaatcaccgctaacttgcactccattgatacctcttaggtttgttgacaaaatcgcaccatttttttgcagtccaattcccgcagcgatgtttgaactcagaacaccattgtttagagtaagatcgggtgactgtgctgttaaactcagtctgaagtcgttccccgtcctggttaccccttgggaggctgtgaaggtatcccgtatggttcccctgttgaccatagccaaacctgaattagcatcaacttttagatcgagttgaaggtcattctgtactctctcaataccattgctgcaagtcagtacatctttaatggtatctgctttgaccatttggagacaactgccagcctcgcatttaagagataataccacatcattggtcgttccaggtcgaatagatacgccattaaagtcctgaaaaatgtacccacctgtgagtgcatttccaacaattctgatggtctgattatcgaccaaacagcctatctctcgacgtccgttaaactcgggtcccactgcaagcactcctgtttgagagccttgataaaattgggaaagatagtctttactcactgcatatgagccacctccaatagcaggaaatactccagttaatttgacatttggtacacacaactcctgaagcgtggacgaataagtgaatgaagaacttcccgagtagccataagtaaggttcccatacaggatttgttcatagccaggtgatcgtaatgaaagtttcgatcccgcttgactgaatgtagaagaatcgaccattaagcgaattgctgtggtgtctacttctcctaacacatcagtcatttcggtcaaactattgaatccaaagtcgagccatgaagacccgatgtctaacagcatatccgcacctgaactcgatttcagagcgccaaatgcttttagtaccgactgaatgttagtttccaattcgtcattattgttcacctttagacttttatgaagtttgattccaaggccgctctggtcacgatacaacggctttttcagcatctcaggatcaggaaaattaaccgatagaccgttttcagttataagcaaagtatcatctgcttgtaaaccaaccgtatgtgattcggcatccctgtagagtggaaaatcatagttataaggtatgactgttaattttccacccccaacttttagttcatcatcatcaatgtttaggcttactgttcgtgagttgggagccctatagagaggttgcaggagtgtctctggtttaacagataagccgtcttctgttataagcagagtatcgtctgttacaagcctgacatcatgttcatcattaattaatggaaaaacataagttgtctcggcaagagagatggtatatttacctttatttttctgaatggagagactgggcgtttgactatccaaatcgagtatagtgactataccatctttatttcgtaggctctctccatagatagaattggctttaacttttccggacttgaaattatctaggacttctaaatttcttcgaaccgtatatgtgccttgaatgctattaggcaaaggcatcttcttattcctttatatcatcatagcttagaaaatgaattgcatgccgacatttggtctatacaatctcatcaaagacgggatatggctctgcgccgggatccctgccgggataggccactccgtgcccggcatgcctgccgggatatggctctgcgccgggatccctgccgggattggccactccgtgcccggcatgcctgccgggatatggctctgcgccgggatccctgccgggattggccactccatgcccggcatactcatgtccatttttaaaacggactacatctgcgcgagtgggatgaacagggcgagttctctttctcttgatgactttaagaacctcataatcatcatcatctgaagaatcatctgacgattcctcaactacaatctgccgtctttttttcggtattggcattttaattcacttcgctttagtcttgtgactttgtaagtccttcatatagttgcggagcctagcctcgacacatttttcctgttccactctaagggcttcggccttagcaagaatccgttcatcctcttttctcttcttttctagttctctctcttcttttctcttggcggcaagttctcgtctaacctgaagagccttttcttggcttttttctaaatgtgctcgctgcttctctgatgcagtatgttttttgggagcgctggtattgacctctccgggattggccgctccgcgcccggcatgcctgccggcatttggctctgcgccggcatatttgtttacaagttcttgaacatagtcttgatgatcatcgtcattagtttcatcatcatcattcaaactttgttcttcatctgtaatgtcctggtcaggtatgcctgccggcatttggctctgcgccggcatagattccttttttttaggcattttagctttgtaaatagaaaataaaaaaacccaaatatgcttagcgaggttcttttgtccatgatgatggtaccttataagaattactcgcccactctttcttaagttccttgtgtaccttaccattttttctaatccaattaccggttcttggattgtaaacttcctgcaaggatgaatctctcgggtttcttctctcatgaagccttggcgatggctgcattgttgtgaagtcaaatgcagttgatgatggagatggtgatgcatccatcggcgttagtgatggtaagcctgaggttggtgattcagatcgcctatgtagaactaattgtgtaggtggcatgcctccttcctcataaaagatgttctcagacaaagcaggagtaggtcgtatcacgccacgttgcatgttgtattcatctcttgaggcagaaatgtctgtgccccgcgttcctaagccagttgtttctagcaaactctccccaggattgtgaataccatgtgaagagtggaaatgctgtatgtcagccaattccttacgtttttcctcttttataaactcttcataaccttcgtgcattcgtcggatgcatgcaatcaaatctatgtcatttttgtatccatcgcgaccatggattatcggataccgagtctcttgattagatttgggatggtaatcaactgaacgcccagaagccatccgtttgagttctgcatctgaaacaactggccgaaaggtatcaggatccaaagaccggccgttagcatcccttagttcaccgaagcatctattatcaatttcgatatagtatgggtcactgacaaattgtgtatctaccttaccaaatgaatgatacttgtttaacaatgggtgcttgaaatagcctgtaggtaactttgaatcaacccattttctcttctctctccaaaacacatcacgttcgacctgctcagagttgtaatcagttacatcagtgttgcccttctgtaatagttttaccaattcggcaacagacatattgtactattctgtattttactatattagtattattaaaaaaaagaagcatgtcgtctcaacaaaggaaggaatggatacaagagcgtttgaggaggaagttggctgaaaggcatgccgggcgcggaggacccgtcaaagacgattccgactcattaggagtgccaatgccgggctcaggcatgacgaatatatacagtaaggaaaccatcattccagacgctgatgcgagtgatattaactggaatgagtatgttattattcctgaaaatcctctttacattgatgacttgaatgaaatcatttgacgctaaaagtagcattaataccccgctaattcgacaggaagcgatttccttagcgctgaatcaaaattctgttggatctcataggattgccctagacctttatggagatcatcgatataacctcatcctcgtgaaattgtctctcttactttgatgggtacagattcgtcatggactagagattgatgaacctttccataaatatctctggcttggccggcatggtttacaaattgtcaaattccattgtttactttgctgtaactgttcaacgcccgaagaccaaagttctttgcacttgagagaaagtttgcaaatttttgacgcaacatcttttacatgttccaaatgaaaaaaaattaatcatctgcaaagccggaggaatgacaatcgagaaccaaagtgaaccctttgccctgtaaatcaatcggtaatagcatttcagcatcaagcaaacggatgttgatggtactaacaaggcctgactctgtgtcaatgaagttggtatcgaaataattctgcgcacacagcacggtgtctatttcctggcttattggaatcgatgctagaatatttagatcatcggctccagcaactataacatcgctagaacataagtttgtcgatgagacgagcaccatcttaacacctgtcaaatcgattggattcgcgaaagttattgatctcccagggtcagattgctgcgtctgaactaatccaagcagtttgctcgctgttgtttgagggtagagaactttgaatggtgttgtacccgcggtcactgttatttgactgtttatatgattgtattctacagtgtatgcttgcgtcccagtcgagttgaatccagcagtcagtgcatccactaaatcatctggagagtaagtaccaggaggaatagcaaaagtccttgcagcattacccatcccagcatcataaaaggagacaatattgttcttgtcatttactatgttccacgaaaggggcaaaatgatcgaattgtattgaattttatcacatgcgatgggtttggctagagtccatttaggttcattcttgtttctgttcgtcgccctgttgctatcgagaatcaactttttcatttcttctaatgtattatagatacagagagcaaataaaaacaagtgcaatgaagccaatcacaatagcccctttacctagtcaagtctctggatgcataaaggataatacagatccacggcttcctagaaagtatggttttatcatatacaatggcgctcgatttagcggtaaaacgctaaacattgctgtgatatgcaaattgttcttgaagaagcagtattcgaatatcataatattcacaccaaatccgcatgacaccaattggaaccccttaagaacgagcaaaaaggttcatatatttgacaagatttccaatgaaatactcaattttatacacgaagagcaactttatgaatttgttcgaagtggaagaaaacgagacctgcttctaatcatagatgactacaacatgcaaaagggacataagaagtcactcgatgagttggcaacttgtggaaggcatgctggtatcacttgcatcctgtcgagtcaatatttttatcacaatagtcccgctgtacgtagcaatgcaacaaactggatcatttttagacctttgaaaagcgaacttaagaaaatggtcgaagcaggcttatctctcgctttacctgaagatgtatttgaaaagttcgttatggataatacaaagaaactgtttcattttgtgcacataaatctacaaagttcgaaacgaccatttagagttggtttttcataacgacttttttttttctagatgtgtaaagtaaaccatgtcatccgatattgaagtaacagaggtcagacgtgtcccatcggcatttacttataaaagatccgcaaaaaatggagtcattctaaacttccagccatctagtcaggttcgcttcgagccaacaaacggaagtggagattgccgaccaggcgggaaactagtttttaaaatagcagacgacaagcgcttctggctcgttaatgaaacgctgcacaaatatcgtgtagtcggcttaaaagcagatggtttgccagcagtagcagttaatgctgactacaggctctgtcaatctggaactgatgctgtatggaaacgtcaatctctcctgattaatggaaggatcattgaagatctcaatgactataatttgttcactgtgcatgaaaatgccttaacatcatgggaaaccaaacaacatctaggccaatgcgagtattattcaagtgaggataacaaccgttcagcagtggtcgctcaaaacaacgcatacaccgttaccgggtcattgctatcattctttcaaaatgaagtggcttttcctctctgtcttgtgaaaggaggagtaagcctggagatgaccgccgagacagacctttccaaaatattcccaaaatccacagggattacgtccttcaaagtagaacaaaacaaattaatatgtcagtttgctgaaccggtcaaggcttactatgataaagtgcttgctttgatgcaggctgaggatcctacacccctgactatccccactcaaatagtatggagtcaagaatttgcaggacaagatagttgagtacaacaactctcgcttgtaacaggtgagcagtcctctgtttcgtcattgatgttggtgacaactgacaatgttctaacagatgtagacaaactgaattattcggacgatgcaggtattagaacagtgtctatgcaagtaggaatggaacggttcccacaagggaaggctattggacatggctctgagaaaacaggatttgtctctactattgaccctgagatgtatgcattgagtcaacgtaacaaggatttcaatgatgtgaagtttgcgcccactatgtctgatttgaaaggatgggatctaggaggcaaaaagataaaacattggtcatggagacaaaatttcaagcaaaccccagacatgattggcagcggtcttcagactctagccgatggacgaattttaatcaatgtttctcaatatccaaatcctccagaaacagccgatttcccaagcgaaactataactacaggaaccggagattcacaaacgacatcgcctaaccccgcttacattcctacattcaagaacaagatgtttcatgtattttggactactgatcatgtgatgagcatcgacaaagatggtattagattggttccggcatagtaatgcgaacaattatattcttcacatatgtataggactacctaatattgaatcacattatggctaagaaatcccatagaaaactcgtcaacatatcggctatgccaaataaaggacttagagcggctgctcgtgcaagaaacaggcacatcattgctgctagaaaagccgcagcaacacgtaagcgacgctacggttctggaagagtcgtgaggcgtgttgtttatgtttaaaaaaacggcgccaagaaatgccaagactatgccgggcgcagcggcctatcccggcaggggatgccaagattctttccattgaatggaagggcatccctgagtacaagccggtggcataaaaaggcactcggtgtatcttttctcccattagcacaagtacgggtttgaaatatcaggtatgattcgaaacatttaaccgaatctgaaacatccgatacgtgttctgaaacacacgccataattctgaaacatctaaccgaatctgaaacatagctacattttctgaaacacctaaccgaatttgaaacatgtccatgtcaaagagtcaatgggggcaagcgactagctatgtcggaggcttgctacatcccctagcgcgtcgtgctatcaagactgaactagaggatctcaccttcgagcaaagcgagtgtttattagaaaatataactgataataagaaaagggttaagaaagacaaggggttgctaagatcacttaaaggtcatctgggacgactcctagagcggaaggagcgagaagaggataaatggaaatcttcatctctcaagttaaagagaaagttcaaagatttcgagtctgatggtgaaaccttgagttctggttctgacgatgattccgatgatgccgatgacagcgattacagtccacaaaaggctaaacgcagatgtgtcaagcggtcaagccctgagcatgatggggaacccgctaatttagagccatcgctcatggagcgtctcgagcggcaacagatgcagattaacgcactcctagcagctagcactcctaagcgcagaaagagcgtcaaggctaaagtgagcgatcaggacattgtccatgctgatgttatcaatcctccagatgtaggaagcagtagcgccgctgcttgattctcttcaattaccgttgacacacgctaaaaaatccatgaaatcaacaaaaaaattacaaaacaacaaaaccagaaaaaaaatacaaaacgacaaaaacagtctgtaaaggtgtttcgtagcacaatgtacatagatatccctttgtttagcgtcatgtaggggcgttgttatagagcttttgtacaacgtttgctaataaacacacacgtttaaacaaagagaaataatattttgtatacacaatatattttaacatgggacgcaaatcaggatcgataaacacgaaggatcgctacagggtatacaagatcgaagaagatggttctagaacatttgtaaatgactatcgggcagccatagagattgctaacaggttaggtgtctcgcgctcgtacattcataatataatacatgggttagcagaatcgcctatttcaaagatgtatgctatagaaaagttaccatgtatacgaaaaccaccacctcgtcctaagcggagatgctttaaaataaatcgaaaagtggctattcctgatgatccagtaaaagttgctcacttcgcatgaacatccctgccgggattggccgctccgcgcccggcatcatttgaagaacaaatacgtttaaagctttgaaaatatttattttttaacactatatatttctatttactatgcctttgatttttaacccaatcaccaacagacacgtaaaagaagactcgaagccttttgagaggatgatgcgaaagattgtatctggaaacttctctagtgaaaactggactaagaaacaactagatgcactagagaaccttcaaatacatcgagtaccaagattcctacaatctgagcgagaaaaaagaattgctgctgcgagacgcactgaggctcaaaagcaggctattgctgaaaaggccagagagacgagaaggcttaataaagaagcagaagagcgcgagatgagagaaattcaagagagggctcaggctgctattaaaaagcgaaaggaagccactaagaaggctgctgcgagacgcactgaggctcaaaagcaggctattgctgaaaaggccagagagacgagaaggcttaataaagaagcaaaagagcgtcagatgagagaaattcaagagagggctgaggctgctattaaaaagcgaaaggaagccgctaagaaggctgctgccactagggctaaacgtaagtataatcttcgaaagcatcaagaatcattctcacctttaatatctgtcaaagagatcaaaatcaaaggtatcggttatacaaaggaactttatcggttcaatccaaagtacaccttcgctactcatgatgatattgtttcatttttcaatgatgtcatcaaggaatcacttgtaggccttgaacgcggtgacaaagtgcaaatagggtttcaacatcaaagtctacacaatggattttggtcatcaaaagttgtatcagttagtgatctgattgcttctgatgtgatagacgatattactgcgagaatgcaatcggctgaaatagcatcaatcgatgaaagcatgactatcgaggtgcgtcgtttagtttcggtaaagggcggcgccttcaaaaactatcatgaccatctatcagcacagtcaaaaagatgtgtcattgttgtgaaaaacaatggtaacgattgtggtatgagagcagttgccttatccgtagcattccatacaatggatcactcaacaaatgaatatgcgtacatcatgaaacaaagaaagccactggacaaaattgttactaactattatgaaggatgcgggttacctgttggtcagaagatgtcttacggcgattttccaaagttggtttcattcctcaaaaggaacatcattattgttgatctagagaacggtggtaaacctctcatggtcaaaggtgttaacaatgagtgatacgatgagaaacctgctactatcctacgtaaaggggatcatttcgattgcataaccaagattaacgccttttactgtgcattgtatttttgtttccaatgcatgaaaggacacaagcataccaatcataaatgtgataagaaacgaggatgcaacctttgtggttgggtcacatgtaaacaaggatctcccgatgatctagtgttgtgtttaagttgtaacttaggtcacttttcaggagattgtgatgattatcacaaggagaaaaaatgtgataaaatatggaaatgtaacaaggaaggcggctgcgggcgtgtatttgagcgtgcttattatgatggtaattgtgctgagttacacgattgcaaccaccatctctgccgtccttgcaaggcttatgtcactcctgaccatcgatgcttcatacagaaaaagaaacccagaaagcacattagcaagatcatagcatttgattttgaatcagagtttctacatgatggtgaacatcgtgtaaagtttacggattgcaaggtagtttgtaccggtctatgccaatctgtgtgccaatgtcatgagcatcactccttctttgaatttgacgctttttatcaattcatcttcaagaaccctaatacaacattcattgctcacaatggtaagggttacgatttccactttctcttcaaaaagttcaatgacaacggtgttaagcctaagtatatctcaaatgggttgaagatcatttcaatggtgctgcccaagttcaacatccggttcattgatagcatgttgtttttgcctatgggactgtcaaagttgccttccatgtttggattagaggaacatgttcgtaagggttactttccacattggttcaaatgttcaaatgattataaaggcgttttaccatctttggatgatttccgatttgacagtatgccctatgataaacgcgctgatgcacaacgctggtacaagaaaaccctacgcaaatgcatgaagggtaggtatgtttttgattacactaaggaacttgttgaatactgcaagaatgatgtcgatattctagcagcggccgtgaaattgttccgagagcaattccttgtagcaaccgatggtgaaattgatccttgggcttataaaaccatagcatcggcatgtatggggacttacaggcatatgttcatgcctgaagaaagcatacccacacatcatgaagaaggaatgcggcgtcattcagacaaggctgtccagtggctcgaatatctacgcgataatggcattctggatatgcgacgtgttctacgtggtggagagaaatggattgaccgattaaatgggaaaaaattctatgccgatggctattctccttcgacaaatactgtgtatgaatttaatggttgtgaattccatgggtgtaaacaatgcaaagacgatgatgccgttaattatcatggtgtcccttataagtctttgagacgatataccgataataagcatgaagaattgattgctctaggttacaattatgtctcgatctcagagtgtgaatatgnnnnnnnnnnnnnnnnnnnnnnnnnnnnnnnnnnnnnnnnnnnnnnnnnnnnnnnnnnnnnnnnnnnnnnnnnnnnnnnnnnnnnnnnnnnnnnnnnnnnaaacaagaagatatgtgattatgttatgagtaaagacctcgacattgaatatatccgacctctagatcctcgtaacgcattttttggtggtagaacaaatgccagcaaactttactacaaatgttctgagaaggaaagagtgaaatactgcgattttacatcacagtatccttgggtaaatgcttttggagagtacccatgctactcgttccccacaaggattcttaacaactttgatggccaactgaactacaatggtttcatcaagtgtcgaatagtaccccctcgtgggttatatcaccctgtacttcctgataagattaacaacaagaccatgtttgttctttgtaagaattgtgctgaaaaaggtatctctgtttgtcgccactctgttgaacagagggcttttgttgggacttggtgcattccagaagtgaagttagtgctttcaaagggctatgtcatttctcaagtttatgaggttcttcatttcgaaaatacgggatctgatcttttcaaagattacatcttcacatttctcaaaatcaagcaggaagcatcagggtaccctaaatggtgtaaaaatgatgacgacagaaaaaagtatattgacgactacaaaagcaagcaaggtattcgtcttgatccagccaaaattgtctacaatgaaggattacgtctcgtggctaagttgatgctcaattcattgtggggtaaattcggtcaaaagaacaacatgcgtaagcatatcacgatcaatgctgaggaaaatcctgatgaatactactccatcatgttcaatgctaaatatatcgtacatgacatagttgattatgataatggtcgcactttggatctgtcatactccttgcataaggctgctgttcgtgatgacaagaatactagtattttcattgctgcatacactaccgctttggctcattgtaaactttacagtgttctggatactgtaggggaaaaggtgttgtactatgatactgattctattatatatgttgatgatgatataggatcaactgaaaagactttgccctatggtaattatcttggagacctgacagatgaattgaaaggcgaccatattgtagaatttgtttcaggtggcgctaagaattactcttacattctcaacaaaacagggagagcaaagacggtctgtaaaggcttcacactttcatatgaaaatggactcaatcttggacatgagtctatgaaggatatagtatttaaccctaggtacattgatgatgaagggattgagaaagagagttgtgttaattttaactttagcgaaatcaacattagtaaaacacacagtgtgcgtaacaagacaaagatcatcataccagaaaaaaataacttacccagcaaaaagtacaagtttgtctacaacaaacgtgtggttcaagaatttaactctgagtctaaggtcatagagacacttcctttcggtttttaaaatggggacaaaaaccgaactaatcaagaaagtttactatgatcccaagactggacttcagagcgtagaaaagctctaccagagactcaaggatcagggtatttccagaaaggatataaagacattcatcgacagtcagcatgtgcaacaagtacacaaacctcttgtcaagcctaactacatgcatataacagccaatggtgttgatcacatatggcaatcggatttgtgcgacatgcagaaatatgctacctacaacaacggttaccattatctgttatgtattgtagacatgtactctcgttatgcctttgtttttcctctcaagaataaaaccagagaaaagattgctgattgttttacaaagttactcgctaggcggcgtcctaaaaatatcacgactgataggggttcagagtacaacaacattgtttttgagcaattgctctataagtatggtataaaccattacatggctgaagttgctgaccataaccatatgggtctggtcgaaaggtttaattgtacactgaaaagtgttatctccagatacatgaccatatttaaaactaagcgctacatagatgctcttcctgaccttgttatgaactacaatacttcatatcacagtctattgaaaaaggcacctgtcaatgttgctgatggtgattatgtgcgcgataatagcaaggctgtaagtgatttcaagaagtttgacattggcgaccatgtaagaatattactcaaatgggatattttcaaaaaaggatatgaggcaaaatggtctgatgaagtataccatatagtcaatgtcgatggctatcgattcatagtagcatacgccaatggtaaagaaatagaccagtgtttcaaatactatgaattacagaaaaccaatgcaccgattaccgagaaaccaggtcatcgaccagtaaaattgactagaacacaaaaagaagttcgcaaagaaattcgtcagttggagcctgtacaaacacgacctactaaaaccagattgcaacagaaaaagttaaaagttcatctgaagggtacattttcacacatagaaattccgcggcggaagatgccgtcagggatgtagggaagagaatgtttccagagcatggtatgcctcgaaggtaatgttgagatgggatgagttctgatgcctgagttgcctacatcttctgtggatttttgtgtaaacaaggaaaccaatgttgccatttaaacatgtggatatttctattctttttgcaatcttgctaggaaaatggggacatttctcatccctacatgtctctacataattttttactttccataagcttccaatttttaccattggttttatcctgtggcactttcttcctgggaatatttttgatgaaattgtctcaaagtgcctcactttgtagtaccgcaacctcgaaatggggcacgatgtcattaattgttgcttccatagccttgatcgcactctcaaagtgctctctagatttgtcattttgtggttttgttgttttattctggcgagcaacttgttcaatagccagcatgactatacacgtccgttcactctcttcgtgtctttggagacgtggatggtctttaacgtgcagaaatttggggtttccgcgacgataataatagtctgagcgaacgatattgcctgtcaggagaaatgtgtaacgacgaggacgtcttcgagagatcgcgagtaagcccaaatcggacgcgggaagcacgaatcgcgtgaccaactccaccgattgggttaccnnnnnnnnnnnnnnnnnnnnnnnnnnnnnnnnnnnnnnnnnnnnnnnnnnnnnnnnnnnnnnnnnnnnnnnnnnnnnnnnnnnnnnnnnnnnnnnnnnnnnnnnnnnnnnnnnnnnnnnnnnnnnnnnnnnnnnnnnnnnnnnnnnnnnnnnnnnnnnnnnnnnnnnnnnnnnnnnnnnnnnnnnnnnnnnnnnnnnnnnnnnnnnnnnnnnnnnnnnnnnnnnnnnnnnnnnnnnnnnnnnnnnnnnnnnnnnnnnnnnnnnnnnnnnnnnnnnnnnnnnnnnnnnnnnnnnnnnnnnnnnnnnnnnnnnnnnnnnnnnnnnnnnnnnnnnnnnnnnnnnnnnnnnnnnnnnnnnnnnnnnnnnnnnnnnnnnnnnnnnnnnnnnnnnnnnnnnnnnnnnnnnnnnnnnnnnnnnnnnnnnnnnnnnnnnnnnnnnnnnnnnnnnnnnnnnnnnnnnnnnnnnnnnnnnnnnnnnnnnnnnnnnnnnnnnnnnnnnnnnnnnnnnnnnnnnnnnnnnnnnnnnnnnnnnnnnnnnnnnnnnnnnnnnnnnnnnnnnnnnnnnnnnnnnnnnnnnnnnnnnnnnnnnnnnnnnnnnnnnnnnnnnnnnnnnnnnnnnnnnnnnnnnnnnnnnnnnnnnnnnnnnnnnnnnnnnnnnnnnnnnnnnnnnnnnnnnnnnnnnnnnnnnnnnnnnnnnnnnnnnnnnnnnnnnnnnnnnnnnnnnnnnnnnnnnnnnnnnnnnnnnnnnnnnnnnnnnnnnnnnnnnnnnnnnnnnnnnnnnnnnnnnnnnnnnnnnnnnnnnnnnnnnnnnnnnnnnnnnnnnnnnnnnnnnnnnnnnnnnnnnnnnnnnnnnnnnnnnnnnnnnnnnnnnnnnnnnnnnnnnnnnnnnnnnnnnnnnnnnnnnnnnnnnnnnnnnnnnnnnnnnnnnnnnnnnnnnnnnnnnnnnnnnnnnnnnnnnnnnnnnnnnnnnnnnnnnnnnnnnnnnnnnnnnnnnnnnnnnnnnnnnnnnnnnnnnnnnnnnnnnnnnnnnnnnnnnnnnnnnnnnnnnnnnnnnnnnnnnnnnnnnnnnnnnnnnnnnnnnnnnnnnnnnnnnnnnnnnnnnnnnnnnnnnnnnnnnnnnnnnnnnnnnnnnnnnnnnnnnnnnnnnnnnnnnnnnnnnnnnnnnnnnnnnnnnnnnnnnnnnnnnnnnnnnnnnnnnnnnnnnnnnnnnnnnnnnnnnnnnnnnnnnnnnnnnnnnnnnnnnnnnnnnnnnnnnnnnnnnnnnnnnnnnnnnnnnnnnnnnnnnnnnnnnnnnnnnnnnnnnnnnnnnnnnnnnnnnnnnnnnnnnnnnnnnnnnnnnnnnnnnnnnnnnnnnnnnnnnnnnnnnnnnnnnnnnnnnnnnnnnnnnnnnnnnnnnnnnnnnnnnnnnnnnnnnnnnnnnnnnnnnnnnnnnnnnnnnnnnnnnnnnnnnnnnnnnnnnnnnnnnnnnnnnnnnnnnnnnnnnnnnnnnnnnnnnnnnnnnnnnnnnnnnnnnnnnnnnnnnnnnnnnnnnnnnnnnnnnnnnnnnnnnnnnnnnnnnnnnnnnnnnnnnnnnnnnnnnnnnnnnnnnnnnnnnnnnnnnnnnnnnnnnnnnnnnnnnnnnnnnnnnnnnnnnnnnnnnnnnnnnnnnnnnnnnnnnnnnnnnnnnnnnnnnnnnnnnnnnnnnnnnnnnnnnnnnnnnnnnnnnnnnnnnnnnnnnnnnnnnnnnnnnnnnnnnnnnnnnnnnnnnnnnnnnnnnnnnnnnnnnnnnnnnnnnnnnnnnnnnnnnnnnnnnnnnnnnnnnnnnnnnnnnnnnnnnnnnnnnnnnnnnnnnnnnnnnnnnnnnnnnnnnnnnnnnnnnnnnnnnnnnnnnnnnnnnnnnnnnnnnnnnnnnnnnnnnnnnnnnnnnnnnnnnnnnnnnnnnnnnnnnnnnnnnnnnnnnnnnnnnnnnnnnnnnnnnnnnnnnnnnnnnnnnnnnnnnnnnnnnnnnnnnnnnnnnnnnnnnnnnnnnnnnnnnnnnnnnnnnnnnnnnnnnnnnnnnnnnnnnnnnnnnnnnnnnnnnnnnnnnnnnnnnnnnnnnnnnnnnnnnnnnnnnnnnnnnnnnnnnnnnnnnnnnnnnnnnnnnnnnnnnnnnnnnnnnnnnnnnnnnnnnnnnnnnnnnnnnnnnnnnnnnnnnnnnnnnnnnnnnnnnnnnnnnnnnnnnnnnnnnnnnnnnnnnnnnnnnnnnnnnnnnnnnnnnnnnnnnnnnnnnnnnnnnnnnnnnnnnnnnnnnnnnnnnnnnnnnnnnnnnnnnnnnnnnnnnnnnnnnnnnnnnnnnnnnnnnnnnnnnnnnnnnnnnnnnnnnnnnnnnnnnnnnnnnnnnnnnnnnnnnnnnnnnnnnnnnnnnnnnnnnnnnnnnnnnnnnnnnnnnnnnnnnnnnnnnnnnnnnnnnnnnnnnnnnnnnnnnnnnnnnnnnnnnnnnnnnnnnnnnnnnnnnnnnnnnnnnnnnnnnnnnnnnnnnnnnnnnnnnnnnnnnnnnnnnnnnnnnnnnnnnnnnnnnnnnnnnnnnnnnnnnnnnnnnnnnnnnnnnnnnnnnnnnnnnnnnnnnnnnnnnnnnnnnnnnnnnnnnnnnnnnnnnnnnnnnnnnnnnnnnnnnnnnnnnnnnnnnnnnnnnnnnnnnnnnnnnnnnnnnnnnnnnnnnnnnnnnnnnnnnnnnnnnnnnnnnnnnnnnnnnnnnnnnnnnnnnnnnnnnnnnnnnnnnnnnnnnnnnnnnnnnnnnnnnnnnnnnnnnnnnnnnnnnnnnnnnnnnnnnnnnnnnnnnnnnnnnnnnnnnnnnnnnnnnnnnnnnnnnnnnnnnnnnnnnnnnnnnnnnnnnnnnnnnnnnnnnnnnnnnnnnnnnnnnnnnnnnnnnnnnnnnnnnnnnnnnnnnnnnnnnnnnnnnnnnnnnnnnnnnnnnnnnnnnnnnnnnnnnnnnnnnnnnnnnnnnnnnnnnnnnnnnnnnnnnnnnnnnnnnnnnnnnnnnnnnnnnnnnnnnnnnnnnnnnnnnnnnnnnnnnnnnnnnnnnnnnnnnnnnnnnnnnnnnnnnnnnnnnnnnnnnnnnnnnnnnnnnnnnnnnnnnnnnnnnnnnnnnnnnnnnnnnnnnnnnnnnnnnnnnnnnnnnnnnnnnnnnnnnnnnnnnnnnnnnnnnnnnnnnnnnnnnnnnnnnnnnnnnnnnnnnnnnnnnnnnnnnnnnnnnnnnnnnnnnnnnnnnnnnnnnnnnnnnnnnnnnnnnnnnnnnnnnnnnnnnnnnnnnnnnnnnnnnnnnnnnnnnnnnnnnnnnnnnnnnnnnnnnnnnnnnnnnnnnnnnnnnnnnnnnnnnnnnnnnnnnnnnnnnnnnnnnnnnnnnnnnnnnnnnnnnnnnnnnnnnnnnnnnnnnnnnnnnnnnnnnnnnnnnnnnnnnnnnnnnnnnnnnnnnnnnnnnnnnnnnnnnnnnnnnnnnnnnnnnnnnnnnnnnnnnnnnnnnnnnnnnnnnnnnnnnnnnnnnnnnnnnnnnnnnnnnnnnnnnnnnnnnnnnnnnnnnnnnnnnnnnnnnnnnnnnnnnnnnnnnnnnnnnnnnnnnnnnnnnnnnnnnnnnnnnnnnnnnnnnnnnnnnnnnnnnnnnnnnnnnnnnnnnnnnnnnnnnnnnnnnnnnnnnnnnnnnnnnnnnnnnnnnnnnnnnnnnnnnnnnnnnnnnnnnnnnnnnnnnnnnnnnnnnnnnnnnnnnnnnnnnnnnnnnnnnnnnnnnnnnnnnnnnnnnnnnnnnnnnnnnnnnnnnnnnnnnnnnnnnnnnnnnnnnnnnnnnnnnnnnnnnnnnnnnnnnnnnnnnnnnnnnnnnnnnnnnnnnnnnnnnnnnnnnnnnnnnnnnnnnnnnnnnnnnnnnnnnnnnnnnnnnnnnnnnnnnnnnnnnnnnnnnnnnnnnnnnnnnnnnnnnnnnnnnnnnnnnnnnnnnnnnnnnnnnnnnnnnnnnnnnnnnnnnnnnnnnnnnnnnnnnnnnnnnnnnnnnnnnnnnnnnnnnnnnnnnnnnnnnnnnnnnnnnnnnnnnnnnnnnnnnnnnnnnnnnnnnnnnnnnnnnnnnnnnnnnnnnnnnnnnnnnnnnnnnnnnnnnnnnnnnnnnnnnnnnnnnnnnnnnnnnnnnnnnnnnnnnnnnnnnnnnnnnnnnnnnnnnnnnnnnnnnnnnnnnnnnnnnnnnnnnnnnnnnnnnnnnnnnnnnnnnnnnnnnnnnnnnnnnnnnnnnnnnnnnnnnnnnnnnnnnnnnnnnnnnnnnnnnnnnnnnnnnnnnnnnnnnnnnnnnnnnnnnnnnnnnnnnnnnnnnnnnnnnnnnnnnnnnnnnnnnnnnnnnnnnnnnnnnnnnnnnnnnnnnnnnnnnnnnnnnnnnnnnnnnnnnnnnnnnnnnnnnnnnnnnnnnnnnnnnnnnnnnnnnnnnnnnnnnnnnnnnnnnnnnnnnnnnnnnnnnnnnnnnnnnnnnnnnnnnnnnnnnnnnnnnnnnnnnnnnnnnnnnnnnnnnnnnnnnnnnnnnnnnnnnnnnnnnnnnnnnnnnnnnnnnnnnnnnnnnnnnnnnnnnnnnnnnnnnnnnnnnnnnnnnnnnnnnnnnnnnnnnnnnnnnnnnnnnnnnnnnnnnnnnnnnnnnnnnnnnnnnnnnnnnnnnnnnnnnnnnnnnnnnnnnnnnnnnnnnnnnnnnnnnnnnnnnnnnnnnnnnnnnnnnnnnnnnnnnnnnnnnnnnnnnnnnnnnnnnnnnnnnnnnnnnnnnnnnnnnnnnnnnnnnnnnnnnnnnnnnnnnnnnnnnnnnnnnnnnnnnnnnnnnnnnnnnnnnnnnnnnnnnnnnnnnnnnnnnnnnnnnnnnnnnnnnnnnnnnnnnnnnnnnnnnnnnnnnnnnnnnnnnnnnnnnnnnnnnnnnnnnnnnnnnnnnnnnnnnnnnnnnnnnnnnnnnnnnnnnnnnnnnnnnnnnnnnnnnnnnnnnnnnnnnnnnnnnnnnnnnnnnnnnnnnnnnnnnnnnnnnnnnnnnnnnnnnnnnnnnnnnnnnnnnnnnnnnnnnnnnnnnnnnnnnnnnnnnnnnnnnnnnnnnnnnnnnnnnnnnnnnnnnnnnnnnnnnnnnnnnnnnnnnnnnnnnnnnnnnnnnnnnnnnnnnnnnnnnnnnnnnnnnnnnnnnnnnnnnnnnnnnnnnnnnnnnnnnnnnnnnnnnnnnnnnnnnnnnnnnnnnnnnnnnnnnnnnnnnnnnnnnnnnnnnnnnnnnnnnnnnnnnnnnnnnnnnnnnnnnnnnnnnnnnnnnnnnnnnnnnnnnnnnnnnnnnnnnnnnnnnnnnnnnnnnnnnnnnnnnnnnnnnnnnnnnnnnnnnnnnnnnnnnnnnnnnnnnnnnnnnnnnnnnnnnnnnnnnnnnnnnnnnnnnnnnnnnnnnnnnnnnnnnnnnnnnnnnnnnnnnnnnnnnnnnnnnnnnnnnnnnnnnnnnnnnnnnnnnnnnnnnnnnnnnnnnnnnnnnnnnnnnnnnnnnnnnnnnnnnnnnnnnnnnnnnnnnnnnnnnnnnnnnnnnnnnnnnnnnnnnnnnnnnnnnnnnnnnnnnnnnnnnnnnnnnnnnnnnnnnnnnnnnnnnnnnnnnnnnnnnnnnnnnnnnnnnnnnnnnnnnnnnnnnnnnnnnnnnnnnnnnnnnnnnnnnnnnnnnnnnnnnnnnnnnnnnnnnnnnnnnnnnnnnnnnnnnnnnnnnnnnnnnnnnnnnnnnnnnnnnnnnnnnnnnnnnnnnnnnnnnnnnnnnnnnnnnnnnnnnnnnnnnnnnnnnnnnnnnnnnnnnnnnnnnnnnnnnnnnnnnnnnnnnnnnnnnnnnnnnnnnnnnnnnnnnnnnnnnnnnnnnnnnnnnnnnnnnnnnnnnnnnnnnnnnnnnnnnnnnnnnnnnnnnnnnnnnnnnnnnnnnnnnnnnnnnnnnnnnnnnnnnnnnnnnnnnnnnnnnnnnnnnnnnnnnnnnnnnnnnnnnnnnnnnnnnnnnnnnnnnnnnnnnnnnnnnnnnnnnnnnnnnnnnnnnnnnnnnnnnnnnnnnnnnnnnnnnnnnnnnnnnnnnnnnnnnnnnnnnnnnnnnnnnnnnnnnnnnnnnnnnnnnnnnnnnnnnnnnnnnnnnnnnnnnnnnnnnnnnnnnnnnnnnnnnnnnnnnnnnnnnnnnnnnnnnnnnnnnnnnnnnnnnnnnnnnnnnnnnnnnnnnnnnnnnnnnnnnnnnnnnnnnnnnnnnnnnnnnnnnnnnnnnnnnnnnnnnnnnnnnnnnnnnnnnnnnnnnnnnnnnnnnnnnnnnnnnnnnnnnnnnnnnnnnnnnnnnnnnnnnnnnnnnnnnnnnnnnnnnnnnnnnnnnnnnnnnnnnnnnnnnnnnnnnnnnnnnnnnnnnnnnnnnnnnnnnnnnnnnnnnnnnnnnnnnnnnnnnnnnnnnnnnnnnnnnnnnnnnnnnnnnnnnnnnnnnnnnnnnnnnnnnnnnnnnnnnnnnnnnnnnnnnnnnnnnnnnnnnnnnnnnnnnnnnnnnnnnnnnnnnnnnnnnnnnnnnnnnnnnnnnnnnnnnnnnnnnnnnnnnnnnnnnnnnnnnnnnnnnnnnnnnnnnnnnnnnnnnnnnnnnnnnnnnnnnnnnnnnnnnnnnnnnnnnnnnnnnnnnnnnnnnnnnnnnnnnnnnnnnnnnnnnnnnnnnnnnnnnnnnnnnnnnnnnnnnnnnnnnnnnnnnnnnnnnnnnnnnnnnnnnnnnnnnnnnnnnnnnnnnnnnnnnnnnnnnnnnnnnnnnnnnnnnnnnnnnnnnnnnnnnnnnnnnnnnnnnnnnnnnnnnnnnnnnnnnnnnnnnnnnnnnnnnnnnnnnnnnnnnnnnnnnnnnnnnnnnnnnnnnnnnnnnnnnnnnnnnnnnnnnnnnnnnnnnnnnnnnnnnnnnnnnnnnnnnnnnnnnnnnnnnnnnnnnnnnnnnnnnnnnnnnnnnnnnnnnnnnnnnnnnnnnnnnnnnnnnnnnnnnnnnnnnnnnnnnnnnnnnnnnnnnnnnnnnnnnnnnnnnnnnnnnnnnnnnnnnnnnnnnnnnnnnnnnnnnnnnnnnnnnnnnnnnnnnnnnnnnnnnnnnnnnnnnnnnnnnnnnnnnnnnnnnnnnnnnnnnnnnnnnnnnnnnnnnnnnnnnnnnnnnnnnnnnnnnnnnnnnnnnnnnnnnnnnnnnnnnnnnnnnnnnnnnnnnnnnnnnnnnnnnnnnnnnnnnnnnnnnnnnnnnnnnnnnnnnnnnnnnnnnnnnnnnnnnnnnnnnnnnnnnnnnnnnnnnnnnnnnnnnnnnnnnnnnnnnnnnnnnnnnnnnnnnnnnnnnnnnnnnnnnnnnnnnnnnnnnnnnnnnnnnnnnnnnnnnnnnnnnnnnnnnnnnnnnnnnnnnnnnnnnnnnnnnnnnnnnnnnnnnnnnnnnnnnnnnnnnnnnnnnnnnnnnnnnnnnnnnnnnnnnnnnnnnnnnnnnnnnnnnnnnnnnnnnnnnnnnnnnnnnnnnnnnnnnnnnnnnnnnnnnnnnnnnnnnnnnnnnnnnnnnnnnnnnnnnnnnnnnnnnnnnnnnnnnnnnnnnnnnnnnnnnnnnnnnnnnnnnnnnnnnnnnnnnnnnnnnnnnnnnnnnnnnnnnnnnnnnnnnnnnnnnnnnnnnnnnnnnnnnnnnnnnnnnnnnnnnnnnnnnnnnnnnnnnnnnnnnnnnnnnnnnnnnnnnnnnnnnnnnnnnnnnnnnnnnnnnnnnnnnnnnnnnnnnnnnnnnnnnnnnnnnnnnnnnnnnnnnnnnnnnnnnnnnnnnnnnnnnnnnnnnnnnnnnnnnnnnnnnnnnnnnnnnnnnnnnnnnnnnnnnnnnnnnnnnnnnnnnnnnnnnnnnnnnnnnnnnnnnnnnnnnnnnnnnnnnnnnnnnnnnnnnnnnnnnnnnnnnnnnnnnnnnnnnnnnnnnnnnnnnnnnnnnnnnnnnnnnnnnnnnnnnnnnnnnnnnnnnnnnnnnnnnnnnnnnnnnnnnnnnnnnnnnnnnnnnnnnnnnnnnnnnnnnnnnnnnnnnnnnnnnnnnnnnnnnnnnnnnnnnnnnnnnnnnnnnnnnnnnnnnnnnnnnnnnnnnnnnnnnnnnnnnnnnnnnnnnnnnnnnnnnnnnnnnnnnnnnnnnnnnnnnnnnnnnnnnnnnnnnnnnnnnnnnnnnnnnnnnnnnnnnnnnnnnnnnnnnnnnnnnnnnnnnnnnnnnnnnnnnnnnnnnnnnnnnnnnnnnnnnnnnnnnnnnnnnnnnnnnnnnnnnnnnnnnnnnnnnnnnnnnnnnnnnnnnnnnnnnnnnnnnnnnnnnnnnnnnnnnnnnnnnnnnnnnnnnnnnnnnnnnnnnnnnnnnnnnnnnnnnnnnnnnnnnnnnnnnnctggcgagcaacttgttcaatagcgtcggtggccgtgcacagtatcatctgggtcgtgaaccaagatgcagatgaagcggaccccacagatccggtaccgacctggtaattgacgtcccaacacccccgctcggagcgccggtgcgttggctcttcaaaggggggatgtaacgacgaggacgtcttcgagagatcgcgagtaagcccaaatcggacgcgggaagcacgaatcgcgtgaccaactccaccgattgggttaccgcgaccgaaaaaaccggttcggagaatggcaattggcgcattagatttcagcgtgcctcgtacaacctgtggaggcccgagccagtgcggaaaaggaagagatcggtaccgccaccaataaatcagttgcggtgcagcgacacccattagtttagtttagtttaacagtttatccaagaatcttgtataaaaaggatgtattcaataaaataagtcgggggcagaagccgtagcgacaaaaaatccccataactcgcttctcaactccaatcttaggttaacaggaacctaacagagcgcttcaacggcctgatcacccgtaccgaagcctctaaatcctgctcggttcacaactaaccgactctccttgcctctcgccctcaagtcgctaccgacgcccaaagaaaggatttggagactacgattcctagtacggacacccacacaacctgctaggagacccaagttgtctttactgtagtctaccaacaaaaaatccgttacaaatgccaccagttgcaggttggcgtaagaatcaaagataacaggatcttcggagctccacatcaagaatttctcatgctcgtcgagccttatccaggcaaggaggatcaaacgaggggtaccgtcttctcggacttttcgcaggattcgatccttgtcagctttggctgcggcagcaatgtagaggtggtgggaactccacacgactgcgtaggggtcattcccgaggtgcccggcgcctcgcttcggttctttggcaaagaagctgagcgcgcgggggttgttgcccatcatcagagccacttgcggggtgccccagatgatggctatgttgtcccagacttggtcccagccctgcgtgggcgtgcgggggtcctcttccttagtctccgtgacctcggaaagaggtgcagtcatcaaaattgttgattccgagtgcttgggtgaatgaaagaatccgatggtgtggaatccttgattagcggcggctgtcctttccagttccgaagccgaaaaaagagtctcggtggtagcagacgtcaagtccagctccactatgtaagacttcttggactcctgtttgggtttccaacctgcgggcgtgggtgctccatatggtcctttctttccatcttcaggatcttttcagttcgggttctgccagcagaaaacgttccaatgctttttctgacagaatttgcagggtgctggtggttccttgttggggtccggaaccatcttctgaggaccgttgcgaccctttttggggtttctggttttatgttgagccgtctgcttagggcctttgtcagttccggtcttttgtgacttcttctgagcttcagcagcaccgctgtagcaagggtctcgttttctggtgtcatcagagccgaaataaaggcgcaggaagtcttttaatttggtcaggttcgtgacgttacaggatttgaccatgatttggatgtcgctgggcaattgttcaactattaggtcgaaatgctggtcagcgggacattctatgtttgcccggtcaccgtatgcgaggcgccagagatgagttttgtggtcaatgaatgtgagaaagctgcaaaattctttggggtttgcgtggcagcgcacatattcggttttgcgcttggactcagttaggggatctcggaactctcgaagcagttcttctttccaccttttccaggtccatgagcgagtttcctgggcttccagagtgtaaaaccaagcatcggcaggggttttctcagctatcatggctggtaggagctgtaccatcctggcatctgacgttgcgctaatgttttgaagaagttggactttgttgagccattcttcaacgtcttggtttcttttgcccgtaaactcgggtacatcctttgctttcaaggaatcgaccttggtgtcgctggcccacggggccgctggcacttggattggaggcaccggacctgaaaaacttggttcggtatgctcccttggtgtgtctgatgtttcccatggggttgcggaccattctcttgtagctcgtgctatgagaggtagttcaggcagcgggcgatgcgctagggcttctaaggctcgtgtgaggtgctcatccgccgctgtctgacgtttggaaagcctatgaagctgttccataagattttgagttgccaactgcattgcagcagtcgagcgggccatgtcttcttttaacgctgccacttcagaggccatcgtggccaagttaggggcttccggttcgatggaagtggtccctgaacgccttgggcatgttgcgggagggacttcgacgtcctccgcaggaccctgactatgagtctggatcacaggtgagcggccttgcgttggagagcgttcgaccggcatcattctcggtttcatgaagtctgtttccgaaatgagagaaaaggtttctgagtagctacctgagcggatctcggtttgcgcaagagtttcagtatgaccgaataaggttttcagctgaatttgagaggggaaggcagttcatcgcgcttctccaccatgtaatggattttttgttggtagactatggtaaagacaacttgggtctcctagcaggttgtgtgggtgtccgtactaggaatcgtagtctccaaatcctttctttgggcgtcggtagcgacttgagggcgagaggcaaggagagtcggttagttgtgaaccgagcaggatttagaggcttcagtgcgggtgatcaggccgttgaagcgctctgttaggttcctgttaacctaggattggggttgagaagctagttgtggggatttttttgtcgctatggcttctggccaccaacttattttattgaattcctctttttatacaagaatatgctacggtaacatctacactagtttctgtagccttcattagggtggcggcgtccgatcttcccatctcggaccatcgccatgatcgatcatggctgcgtaatgtatccttcacgctgcgctggtgtagcccagaaccgagcttgatcttaggggtttcgaagcttaggttacaattgcggaaacctcaatcatggtcacctgatgcctttgagcgaaccggtttatcagagtcgttcactacatcatcgtggaatgtgttttgaaggctcgatcacgacagatggtacctcggtgtcagtttacttgaaacatcctgaagctgacaagtatggaaagcgcagcggcggagggaaaaagtcagcaaacacaatggaggcagaggttaaagtgcaatatgtggagaaaaacttacctgcttgtcgagtagcagagaatgttgttgttatcgacccaaacaagtgtgacattctctactgccaagacagcattggtatgacatttcgctacacctccaaccagcaagccatggagacaggtagccgttgacagcaaaaggaacgacagcagatgaagaagggggaaattgacctcatagaatcacatatccctagccacaaaacaatgaacctcatggattttactcgctaccttctcattcgctgtgctgattcggatcgttgcaaggaattctactcacatcctgcccacacgcggtggaagtggcactccttcatcaatcagcagcgaagtgaatcagacctcataagtgccatgcacaacaaatacagtgaaaactttaccattgtgatgggtgattggagcgatgccggtcgaactgccagatttcagacctcatcaaagacaaaaggttggcacaccatctttaagcggaacaggatcaactgcttccttcttgatgagtacaagacctcatctgtctgccctcactgttcatccgatgacttccttgaaaaaggcttcaaaacacgacctcattcaagaccttggtgacgaagagaaggcaaggttgaaaaagtccatggattgctgggttgtaccaaccctaactgtttgcagcaagactggacatcgggaatgcgctactggaacagggacacactgagcacctgcaatatgctgatgatcgtgcaatcaatgttggatggacatggtagaccagaggtgttcagcaggagtgttccagccgtagcctagattggttagattagcttttccgaaccggttatcgccggttcaatccctggtgcgggtgctagtgccaatacccatcggctccgcactaacaatgatgattgtgaacatacgatatgactacagatttaaatatattggcagaggaacgtcttagggttacctgtttgtcctgtccgcctttgaagaacactgcgctccgtttgtttcttgcatgggtttttttgaaacgtttttgcattggataacaaagatgcgatacagtagaacattgggaacgatgggttcagacattttggcgtaaaggacgtttgcacaatgtaggtttaggtcaaacccccacatattgggattcggataagaatgttggtttggggaaagagtttgaacacattgggaagaataaaaaaacaagagtaatccttcatctttacaaacacaaaaaagccttttatttacaaaccggcaatcggatacgtatttcacaacggtatacacctttttttcctatatacaagccagttgacttgtgaatttccatacgagtttcgacttgggtttcgtttgccaaactcttagtttgggttacttttactttgcggctttcttcgctccacctggcgcgggtgctgcattcttctgtgccttctgggagtgctacggccggtaatttcttccctacgattttttcttttccgagcttcgacccttgaggggatggagcctaccaaggcgaggacaacaaacaatgtgtgtaaatgcttgaaaagtagcaggtcattcctaaagtcctagtcttgttttcgtttgttggtcaagtttttgcagttgaatgaatgaaagaaaggatgttatctgcgtcgttgtctttgttttgtcttggtttggggtttacgagatacatgctttcccaatacacattttttttgttttacatacaagccagtcgagtttcgacatgggctttttcccgtcgtttgctgaactctttcaagtgggtttgaccggcgtttatttctttgcagataaaagcggtacggctttatttacaatggtttcagaggccagtacggtcttctttgtaggcgttaggactgtgaagtggtttgatatatcttgccaacaaatcccaagtctaccctgcgtagacaacgcagaggctgttaaactgggcttgcgatatgcattgtctttgagcca

SEQ ID NO: 821 - protein, 1330 aa, Spizellomyces punctatus
  source 1..1330: note join(complement(12469..13498),complement(9416..12378)), XP_016607267.1, uncharacterized protein CDS
MLRDYDTEVIKPWVGSQITALTSNNVTFSGNIGGKVISGTRLNISPSMTGTSSVTTYSTFDGTKSSWFGLDGTGFLGYNPGASTWLGAQDLPMFIYPRTSSTPTLGLRVDTNGSCAVGGDLTVGASSVNSLRYLVLSNTNTGGNACSILCLTASGGSGVMFLNGNNRSVDGGQNTMTLRNDIGNLRLQAQTARGLTIQANTGIVTLDSTTVSTSSTTGALVCPGGVGIAKDIFIGGNIYASTNMKVATETFVMTGLASKQNLSPLLDNISSLTPTDGTFLMGGNGGFFRIVPKDEILSAYQPLITPASVLNLSGLTVQNSNTNATAITLGNSSAAQTWNIHVAGNTVVSGGLGVSTDAYIGGMAYIGGLEVASQKFVIDNTAPISQSLSSLTTTVTNNNNSLTSALASKQPMNATTNSLYTMMVQPDSWLYSSAGTTFENVTSSQVKGILDIATNASVNTLLSGKQPSITTSTNLSLASVTANGYLSVQNGANPTFMSLVNTSSNVTWGIRVAGSTADGSNPAGRFGINSSYNNIGYVFKISNTGITQITNTSQSTSSTTGALLVSGGLGVAKDLYAGGNVIGSTSVDAPNWVQSRNISSGVNAYTAIGCSNDSGNAALLFLNSSTRTADGSSNNATLHNDCGDMNIQGKSGLGLGLRIVSISNEVKVLTATDSSSATTGALQVLGGVGISKTLWVGNKVTSGKGTGYGFGWGSIGGNVNTGDMTFFSPSSNGQAFFNDQINDVCLRAWNTNLRFGVTNSSSQLDILSSGNVIVNTSTDASSSITGAFQVKGGVGISKNLYCGGSLYSNNLKVATESYVGAAIASKQTSSLLLDSISGVTLSANSFILGSSATTFAVKTPEEVKTLLGITNVDLSVKQNASPLLSTLAAMSPMSNMFLMGDDVQGFTLTNDVAVRSILNIVDYAPSISALQTSKQDLLTPTSNLSVNTILANDTSEATTVSSGALQVKGGIGVSKSIFSGGNITGKVLIAASTGGYFKLRSDTPATKGDYTIGYNNSGDALHVHLAGSSDSIDQRRYEFGHYSSDTFGTWNSRFSVNTYTGDLISSGNLTIGSPLNRLRAIILKNLDPGSNSCAIQYFQNAAGSAVMFLNGNNRTVDGGVNTFTIRNNAGAVRLQAQGAKGITIASSTGNVIIESTTPALSSTTGALVVNGGVAIGAHVVAGENLYSNGAVYSNGQVCATQPWVSSQTFLRNVQVFKLLTKDVWQSNNASKVFYVSTPGKVLMEWTVNLHGTANSNGTLSIFLGQSAGSMPLVYSSDFNFNSGVNHTITASFIVTGMADNVAYFTNFSISQAAPDNTTDVSLIKITELGQ

SEQ ID NO: 822 - protein, 735 aa, Spizellomyces punctatus
  source 1..735: note = complement(13541..15748), XP_016607268.1, uncharacterized protein CDS
MPLPNSIQGTYTVRRNLEVLDNFKSGKVKANSIYGESLRNKDGIVTILDLDSQTPSLSIQKNKGKYTISLAETTYVFPLINDEHDVRLVTDDTLLITEDGLSVKPETLLQPLYRAPNSRTVSLNIDDDELKVGGGKLTVIPYNYDFPLYRDAESHTVGLQADDTLLITENGLSVNFPDPEMLKKPLYRDQSGLGIKLHKSLKVNNNDELETNIQSVLKAFGALKSSSGADMLLDIGSSWLDFGFNSLTEMTDVLGEVDTTAIRLMVDSSTFSQAGSKLSLRSPGYEQILYGNLTYGYSGSSSFTYSSTLQELCVPNVKLTGVFPAIGGGSYAVSKDYLSQFYQGSQTGVLAVGPEFNGRREIGCLVDNQTIRIVGNALTGGYIFQDFNGVSIRPGTTNDVVLSLKCEAGSCLQMVKADTIKDVLTCSNGIERVQNDLQLDLKVDANSGLAMVNRGTIRDTFTASQGVTRTGNDFRLSLTAQSPDLTLNNGVLSSNIAAGIGLQKNGAILSTNLRGINGVQVSGDLISCSISGSDTILRVGDTLRGNYVGSTNSYGSIIVVGNMIQYNMIPPQFVSNSPNLIITGSYPLYNFTLIDPMPLSKQRDTDNTEQSDTAEVLKMDVPSGNTVILSGATPLSTVPFPAMVSPPLTVPMAVNSILPIVSTFPWGMIFGGSCKRKVQRDAEGQPILDGDGNPVYEPIDPVTFMPPLEPGSNVTIASDPIGGCTRLLFDTPSCY

SEQ ID NO: 823 - protein, 572 aa, Spizellomyces punctatus
  source 1..572: note = join(complement(16732..17676), complement(16202..16643), complement(15807..16138)), XP_016607269.1, uncharacterized protein CDS
MSVAELVKLLQKGNTDVTDYNSEQVERDVFWREKRKWVDSKLPTGYFKHPLLNKYHSFGKVDTQFVSDPYYIEIDNRCFGELRDANGRSLDPDTFRPVVSDAELKRMASGRSVDYHPKSNQETRYPIIHGRDGYKNDIDLIACIRRMHEGYEEFIKEEKRKELADIQHFHSSHGIHNPGESLLETTGLGTRGTDISASRDEYNMQRGVIRPTPALSENIFYEEGGMPPTQLVLHRRSESPTSGLPSLTPMDASPSPSSTAFDFTTMQPSPRLHERRNPRDSSLQEVYNPRTGNWIRKNGKVHKELKKEWASNSYKESMPAQSQMPAGIPDQDITDEEQSLNDDDETNDDDHQDYVQELVNKYAGAEPNAGRHAGRGAANPGEVNTSAPKKHTASEKQRAHLEKSQEKALQVRRELAAKRKEERELEKKRKEDERILAKAEALRVEQEKCVEARLRNYMKDLQIEESSDDSSDDDDYEVLKVIKRKRTRPVHPTRADVVRFKNGHEYAGHGVANPGRDPGAEPYPGRHAGHGVANPGRDPGAEPYPGRHAGHGVAYPGRDPGAEPYPVFDEIV

SEQ ID NO: 824 - protein, 418 aa, Spizellomyces punctatus
  source 1..418: note = join(19841..20627,20775..21244), XP_016607270.1, uncharacterized protein CDS
MSSDIEVTEVRRVPSAFTYKRSAKNGVILNFQPSSQVRFEPTNGSGDCRPGGKLVFKIADDKRFWLVNETLHKYRVVGLKADGLPAVAVNADYRLCQSGTDAVWKRQSLLINGRIIEDLNDYNLFTVHENALTSWETKQHLGQCEYYSSEDNNRSAVVAQNNAYTVTGSLLSFFQNEVAFPLCLVKGGVSLEMTAETDLSKIFPKSTGITSFKVEQNKLICQFAEPVKAYYDKVLALMQAEDPTPLTIPTQIVWSQEFAGQDRMERFPQGKAIGHGSEKTGFVSTIDPEMYALSQRNKDFNDVKFAPTMSDLKGWDLGGKKIKHWSWRQNFKQTPDMIGSGLQTLADGRILINVSQYPNPPETADFPSETITTGTGDSQTTSPNPAYIPTFKNKMFHVFWTTDHVMSIDKDGIRLVPA

SEQ ID NO: 825 - protein, 199 aa, Spizellomyces punctatus
  source 1..199: note = 21786..22385, XP_016607271.1, uncharacterized protein CDS
MSMSKSQWGQATSYVGGLLHPLARRAIKTELEDLTFEQSECLLENITDNKKRVKKDKGLLRSLKGHLGRLLERKEREEDKWKSSSLKLKRKFKDFESDGETLSSGSDDDSDDADDSDYSPQKAKRRCVKRSSPEHDGEPANLEPSLMERLERQQMQINALLAASTPKRRKSVKAKVSDQDIVHADVINPPDVGSSSAAA

SEQ ID NO: 826 - protein, 532 aa, Spizellomyces punctatus
  source 1..532: note join(23128..23590,23648..23949,24751..24852,24946..25324, 25391..25720,25792..25814), XP_016607272.1, uncharacterized protein CDS
MMRKIVSGNFSSENWTKKQLDALENLQIHRVPRFLQSEREKRIAAARRTEAQKQAIAEKARETRRLNKEAEEREMREIQERAQAAIKKRKEATKKAAARRTEAQKQAIAEKARETRRLNKEAKERQMREIQERAEAAIKKRKEAAKKAAATRAKQIKIKGIGYTKELYRFNPKYTFATHDDIVSFFNDVIKESLVGLERGDKVQIGFQHQSLHNGFWSSKVVSVSDLIASDVIDDITARMQSAEIASIDESMTIEKKKPRKHISKIIAFDFESEFLHDGEHRVKFTDCKNPNTTFIAHNGKGYDFHFLFKKFNDNGVKPKYISNGLKIISMVLPKFNIRFIDSMLFLPMGLSKLPSMFGLEEHVRKGYFPHWFKCSNDYKGVLPSLDDFRFDSMPYDKRADAQRWYKKTLRKCMKAAAVKLFREQFLVATDGEIDPWAYKTIASACMGTYRHMFMPEESIPTHHEEGMRRHSDKAVQWLEYLRDNGILDMRRVLRGGEKWIDRLNGKKFYADGYSPSTNTVYEFNVFETIYR

SEQ ID NO: 827 - protein, 484 aa, Spizellomyces punctatus
  source 1..484: note = 26002..27456, XP_016607273.1, uncharacterized protein CDS
MSKDLDIEYIRPLDPRNAFFGGRTNASKLYYKCSEKERVKYCDFTSQYPWVNAFGEYPCYSFPTRILNNFDGQLNYNGFIKCRIVPPRGLYHPVLPDKINNKTMFVLCKNCAEKGISVCRHSVEQRAFVGTWCIPEVKLVLSKGYVISQVYEVLHFENTGSDLFKDYIFTFLKIKQEASGYPKWCKNDDDRKKYIDDYKSKQGIRLDPAKIVYNEGLRLVAKLMLNSLWGKFGQKNNMRKHITINAEENPDEYYSIMFNAKYIVHDIVDYDNGRTLDLSYSLHKAAVRDDKNTSIFIAAYTTALAHCKLYSVLDTVGEKVLYYDTDSIIYVDDDIGSTEKTLPYGNYLGDLTDELKGDHIVEFVSGGAKNYSYILNKTGRAKTVCKGFTLSYENGLNLGHESMKDIVFNPRYIDDEGIEKESCVNFNFSEINISKTHSVRNKTKIIIPEKNNLPSKKYKFVYNKRVVQEFNSESKVIETLPFGF

SEQ ID NO: 828 - protein, 678 aa, Spizellomyces punctatus
  source 1..678: note join(complement(39024..40212),complement(38116..38963)), XP_016607274.1, uncharacterized protein CDS
MPVERSPTQGRSPVIQTHSQGPAEDVEVPPATCPRRSGTTSIEPEAPNLATMASEVAALKEDMARSTAAMQLATQNLMEQLHRLSKRQTAADEHLTRALEALAHRPLPELPLIARATREWSATPWETSDTPREHTEPSFSGPVPPIQVPAAPWASDTKVDSLKAKDVPEFTGKRNQDVEEWLNKVQLLQNISATSDARMVQLLPAMIAEKTPADAWFYTLEAQETRSWTWKRWKEELLREFRDPLTESKRKTEYVRCHANPKEFCSFLTFIDHKTHLWRLAYGDRANIECPADQHFDLIVEQLPSDIQIMVKSCNVTNLTKLKDFLRLYFGSDDTRKRDPCYSGAAEAQKKSQKTGTDKGPKQTAQHKTRNPKKGRNGPQKMVPDPNKEPPAPCKFYGKKGPYGAPTPAGWKPKQESKKSYIVELDLTSATTETLFSASELERTAAANQGFHTIGFFHSPKHSESTILMTAPLSEVTETKEEDPRTPTQGWDQVWDNIAIIWGTPQVALMMGNNPRALSFFAKEPKRGAGHLGNDPYAVVWSSHHLYIAAAAKADKDRILRKVREDGTPRLILLAWIRLDEHEKFLMWSSEDPVIFDSYANLQLVAFVTDFLLVDYSKDNLGLLAGCVGVRTRNRSLQILSLGVGSDLRARGKESRLVVNRAGFRGFGTGDQAVEALC

SEQ ID NO: 829 - DNA, 3350 bp, Spizellomyces punctatus
  source 1..3350: mol_type = unassigned DNA; note = Fz = 2001..3248
tagcggttcttataatattatcgtctgcttccacgtggttgctctcccctacttcctggtgtaaatacccgagctctatgatgaagttgatctgcttttcgtgaacgctgtgcctggcggccaccaaaagtccgaggccatgatgaatattgcactgtctccacagttctttcagccaaaagacctgctcgaatcttggcatcaatcctgcgtctcttttggctcttccgtcgacggccgggtttatggttggtcgaggtctcaggttgacatggaatagtgatcacccttgtactccaagcatcctatcatgatatacagattattcatgtgcttccctcccacactacactcttagtttttcttacccgtgacacatgtgactcctttcgtatttgttctgggctgatgataacgtctcggaagcatcgtctgcgctcagcctcaaggtcactagttgcgcgaatgtggaagtctttcattaccaacgaaaatcaaataccagtttcctttcagcccatacctgtctatttcatactcatggggtagtctttctggaagaatctcttggggatttaaattaatacgtgagaggggagtggaaaaaagtcggaaccctgtgaagtagtaactgcattgtcattatcccctgatataaatagcaatgtctggtcgtgctgatataaacccataccttccccaggtccttcctcttcattaacgtatatcttagtcccttcctccagcctgctcactcccattggctccacctcgaacagttctgtaaggtaactctcaagtcgttgtgctgccgcatcgtcaagggtatcctctcctggcaaaactggatacaggattgagcgtacagagctcgcggtatttggtcctactgaactacatgaaacctcgctgcattttactggggacatcgtgcaagagttgaatgtgccctcttctgcttgtgcgggaatgctgacccaacccgacttgttgacacggcaaccgatcgctgcttacgtaacgagtaatttgtcaacgggaaatacaatttgatgccatagtgcggagccgatgggtattggcactagcacccgcaccagggattgaaccggcgacaaccagttcggaaaaggtaatctaactaatctacgctacggctggaacacccctgctgaacacttttggtctaccgtgtccatctaacattgattgcacgatcatcagcatgttgcaggtgctcagcgtgtccctgttccagtagcgcatcgtccaggcttgctgacagttagggttggtacaacccagcaatccatggactttttcaatcttgccttcgcgacggcgccaaggaaacactttgaaacactttgaaacactttgaaacactccaatgcattgggcaaacacttcaatacggcttattatatagaatattataagccgggtatatcatattattgtaacgacgaggacgtcttcgagagatcgcgagtaagcccaaatcggacgcgggaagcacgaatcgcgtgaccaactccaccgattgggttaccgcgaccgaaaaaaccggttcggagaatggcaattggcgcattagatttcagcgtgcctcgtacaacctgtggaggcccgagccagtgcggaaaaggaagagatcggtaccgccaccaataaatcagttgcggtgcagcgacacccattagtttagtttagtttaacagtttatccaagaatcttgtataaaaaggatgtattcaataaaataagtcgggggcagaagccgtagcgacaaaaaatccccataactcgcttctcaactccaatcttaggttaacaggaacctaacagagcgcttcaacggcctgatcacccgtaccgaagcctctaaatcctgctcggttcacaactaaccgactctccttgcctctcgccctcaagtcgctaccgacgcccaaagaaaggatttggagactacgattcctagtacggacacccacacaacctgctaggagacccaagttgtctttactgtagtctaccaacaaaaaatccgttacatggtggagaagcgcgacgaaccgccttcccctctcaaattcagctgaaaaccttattcggtcgtaccgaaactcttgcgcaaaccgagatccgctcaggtagctactcggaaaccttttctctcgtttcggagacagaacttcacgaaaccgagaatgatgccggtcgaacgctcaccaacgcgaggccgctcacctgtgatccagactcgtagtcagggtcctgcggaggacgtcgaagtccctcccgcaacacgcccaaggcgttcagggaccacttccgtcgaaccggaagcccctaacttggccacgatggcctctgaagtggcagcgttaaaagaagacattgcccgctcgactgctgcaacgcagttggcaactcaaaaccttacggaacagcttcataggctttccgaacgtcagacagcggcggatgagcgcctcgcacgagccttagaagccctagcgcatcgcccgctgcctgaacaacctcccatagcacgagctacaagagaacggtccgcaaccccgtgggaaacggcggacacaccaagggagcgtaccgaaccaagtttttcaggtgcggtgcctccaatccaagtgccagcggccccgtgggccagcgacaccaaggtcgattccttgaaagcaaaggacgtacccgagtttacgggcagaagaaaccaagacgttgaagaatggcttaacaaagtccaacttcttcaaaacgttagcgcaacgtcggatgccaggatggtacagctcctaccagccatgatagccgagaaaacccctgctgacgcttggttttacactctggaagcccaggaaactcgctcatggacctggaaaaggtggaaagaggaactgcttcgagagttccgagatcccctaaccgagtccaagcgcaaaaccgaatatgtgcgctgccatgcgaaccccaaagaatttcgcagctttctcgcgttcatcgaccacaaaactcatctccggcgcctcgcttatggcgaccgggcaaacatagaatgtcccgctgaccagcatttcgacctaatagtcgaacaattgcccagcgacatccaaatcatggtcaaatcctgtaacgtcacgaacctgaccaaattaaaagacttcctgcgcctttatttcggctctgatgacaccagaaaacgagacccttgctacagcggtgctgcagaagctcagaagaagtcacaaaagaccggaaccgacaaaggccctaagcagacggctccgcataaaaccggaaaccccgaaaagggtcgcgatggt

SEQ ID NO: 830 - protein, 184 aa, Spizellomyces punctatus
  source 1..184: note = join(755..864,897..1341), XP_016607744.1, uncharacterized protein CDS
MSFGWESTLRNLTQWASPSQTTSWTPTARPPTVVKQRKRGRPAPCATWLDRGVPEHEAGSQKTAPFTDWLNDDAHEFVSAVIEAARMVLLRMANTAEASARLTRPRHHKHVEYHFHVTNLKRATDTFMALYVTRTGPDVTPGTIICTATDQIWFCCNVSGRASIIWVMNQNADEADPTDLVLTW

SEQ ID NO: 831 - DNA, 3379 bp, Spizellomyces punctatus
  source 1..3379: mol_type = unassigned DNA; note = Fz =  2009..2293
atgatttaggcagacaaagttgtgtttggtacaccagttgttggtatctacgtagaattgcatattgaaatcgttagcggcagcaagcatccttcgtaaatagatgtatttatatttgtgagcgcactgtaacacatgaagcccaggcaatttcattattgacccgtcatcaggcagaaaagaagcgggagccaaccatgtgtccattactagtgctacaattctaatcacaccaatgattgctacagataatctaacctgcaccggttgtcctgccatctagcgggccctgcacacggcactgcctagccttcaaagccaaaagatgacttttgtgagatggagaggacaaggacccgtcttcatcgatttgataagaggtatactcccatcagatttatgatgccaaagttccagtttgatcgtcatcagattcggcaaccttcgggctttgccttttaatctgatcccaaaatcctcccaacagcggatcacctttgacaacgctgggatctacaaagaaacccctcttttttcctctaacatctggtactgtttcccatacttgcgtcacccagccgggtttatagcgaagacgggacaacgggaccacagtctcacgacgtgcaccccagagagtgcgggtttcgaatgcaaagagttccgcaagggagtgatttttgcctgcccctccaggctgctgttgcggtgggtacctatagagtttggtcacatagttttttgataatacgtgtaggacaatccacggtatggccgatgttgctcccactgtcataaatttgttgtcatacggaccgtgagattctgttgtcatatctcttttttctcattatagactgcagttgcacttacgccaaggaagtagttgtgggagcgttacaacactcttctcgaggatccacggcaagcttacaagcgggaccacagtcatcgctccagcaaacagcctgcaacgatgtatccagctgttgagcgagccggtgtatatcagtgttctaccaccttccccagagctgatattcccaaaaaaggtgtagtctccagaggctcctaggcgatcagtgttgtgggagccatgctgagatttgtgtatgacggtcgcggaagacggtggtcgggaggaaggtatggggcttcgggaggcagaggaactagaccttgcaggtaccgcaagattgcacagctgaatatggacaaccctccggccgcatagaaatcgcacggctacagggtgcatttccaaaaggacgtccaaactcgccagatctggaaaagccctcacggttatcatccagcagtcacgtgccttggttggactgtgatattatggtgcggagccgatgggtattggcactagtacaaagattccaaccaatttaatcataattttactcgatttagactcatgaactatggtttgatccacaaaatcctatataagtcatcgtccattttcccaggctttcatctttttctacagatatcatcatgccaccaaagaagaagcaaaagcttgaaaaacttgacaaacccactttacatacctgcaacaagacttcctttgcaaaagctttcctgccaaactatcaccaatggctttgagattacatcaccatcatccatcaacttgctgatcatgcttcccatgctctcaaattctacatcctatctgcaccaacctttcccacagtaaatgaagatacaatcgaagccatcctgtatcttctcaacaaggcggaggcttggcaaccaagaacggatgcaaagaaggtgatatgcagatgcttgttgccatatgttcaacggtactgccaaattgtcagcttctttcacccaaatctatgaggcaagcagcagtcaatcaattacctgacagtgagtatgatgacaaacctgaaggtcaacattcaagaacatttcatgatgatgctgtgtaacgtcaatcgaccagattgctctagttgacatttttcttgtgaattgttgggccctgcgagagggctgtataaagactttgttgttaatacaagataaaggggactattgatagttcctcgcgttgctaactaggctagttgttcttctagtttttccttgcttgctgccctccttcctgaggggttttggagcagcgctctttttatgcttgctccctccttcagcagggcgttggcctgagatttcccgcctccgctggtgcggtccctcttgcaccaatcggaagtgattggcgctagcaaataaagggacaaataatcttctaactacggggccgccgcggaaccgaacgactttgacaggtcatcagcatggcggggcttacataatctaactactgttacgtgctgtgccatactttggccatacatggctacatgatcactatagctatatatggtgatgtgagggcaagatgcgtcgcgaaaatctaagttcacacgaaagtgcaaatactaaaggacaggtctaccttacaatgctgctccgatatatcaatctgcggcttgatgtgaagggatggaaagggcaactgccaccgaaaagtgatgcacgaaaagctttctttactcagctacactatttaaagtcagtttttctttttgatatcatgcctgagtcgctggatgacttgactgctgaagagagtgagcttctagaagagatctggacacttaacctgccatttcctgatcaagacaagctgcttgcctacctcattgccattgacgtgatgtccttctttcctgcatactgtcggttgtcaagcctatatgaaaagcatggatttcaacggttcagtgccatacctctgcaccactcgctcatccaaagccacattcgcatcgactccaaaatcctgtaccagcatatcctttgcatcatgcagcgagaagcagaagccatagagaaggtcgatttatggttgcgtgtctgtaatctatgtaccaaaacttttcggtctcactgtgatatgcagtttgaaggctcgatcacaatggatggtacctcggtgtctgtgtatttgaaacaccccaatgccaacaagtacggaaagcatggagtgagaaagtcagcaaagaccctagaagctgaggtgaaggcagtatatgtggagaacaacttaccttgtgacagaattcttctgtcagtgctatggttatactggttagatgtggttccaaactagtggtcacatgactttgctgatggtgtcagcattcatttgaccagaattagataaataagcagatttagccatttctggctaaattagatgagtatcctgacacactggcatctgcccctttcaatcaagtggcacagtgtatttaggatgacttgtctcacttgtgattgg

SEQ ID NO: 832 - protein, 258 aa, Spizellomyces punctatus
  source 1..258: note = join(complement(874..1258),complement(398..789)), XP_016604860.1, uncharacterized protein CDS
MHPVAVRFLCGRRVVHIQLCNLAVPARSSSSASRSPIPSSRPPSSATVIHKSQHGSHNTDRLGASGDYTFFGNISSGEGGRTLIYTGSLNSWIHRCRLFAGAMTVVPLVSLPWILEKSVVTLPQLLPWLGATSAIPWIVLHVLSKNYVTKLYRYPPQQQPGGAGKNHSLAELFAFETRTLWGARRETVVPLSRLRYKPGWVTQVWETVPDVRGKKRGFFVDPSVVKGDPLLGGFWDQIKRQSPKVAESDDDQTGTLAS

SEQ ID NO: 833 - protein, 184 aa, Spizellomyces punctatus
  source 1..184: note = join(2498..2932,2999..>3115), XP_016604861.1, uncharacterized protein CDS
MLLRYINLRLDVKGWKGQLPPKSDARKAFFTQLHYLKSVFLFDIMPESLDDLTAEESELLEEIWTLNLPFPDQDKLLAYLIAIDVMSFFPAYCRLSSLYEKHGFQRFSAIPLHHSLIQSHIRIDSKILYQHILCIMQREAEAIEKFEGSITMDGTSVSVYLKHPNANKYGKHGVRKSAKTLEAE

SEQ ID NO: 834 - DNA, 3980 bp, Spizellomyces punctatus
  source 1..3980: mol_type = unassigned DNA; note = Fz = 2009..2293
gggagatcttccatcaagtcgtcagcttgaaatcgctgtctggcaacctcgtcggttagggatagggcaaaatggattgaggaactcgtcaaattgatacgaactcgagcaataattttatcagctgccacgtgtttgcctccattttccaccatcgcagttccattgcctccttagtgacgttaaaaatcggatcagacgtctccacctcgtgtagctctttcactctaccatgaatgtacagtatcagtcttttaaaatcaagcaagaaccttccaagcgatatgacgcacttattgaggcaatatgcttggtattggtcaaccagtccgttttcaaaaagaagatccttcacattgctgtccttgagcatcgtcgcaaaatttacataatcttctccgataatgtattcttcgcctgttataagtgttggaaagattggccaggccgtaaggatcgcagctcatcaatctcgcgccattaccttgcgcggtctttatgacattctgcattgagtcaagaaatcctccacgtaaggctcctatcaccaaaagcaacgagaaagatgaaaggtactcacatcagctcgctgaagaagagatgtatacagtgaattcggatcctaaaattggagcatttttcagtcggaggtacagatgggtctttcagttcaagtacctaccctaacactttctacttgtggccgagagtgcctacggacttctgcaaaagacccatacttttacagccgcatcatgaatgaaggagccatatctaggtactcacttcggcggttagaggaaaccggcaaggaactgttccctagatggtcattggggtgggaggattgtgcagatgaaccgatggatgaagcccatggctgcgaagtgctggatccccgtgctatcaagtataaactttaagatggggcctccagaagatcgctcttcaaacaggttaccaaccctgcgaatgtaggaatggtcgtcctggcgttgcaaatgctctttccatttgttagacaaaggcggtgaagtgagagcagagggctatacggtaggaaagctgccaagcgcttcgttacaactgatataaaaaaacagttcccattaaggtcgctcacatggtaagttcagtgataacaagcagggtacctcgcgccagaaaatgctacccccacaggctgttgcaagagccttttcgcctgagcccctgtatacgtctcggagcaacgatgatttacagtgatctactgaacaatgacagcttcagtgcgcgctgttccatagtgcggagccgatgggtattggcactagtacatagattccaaccaatttaatcataattttactcgatttaggcaaatgaactatgcccacagagatgctccaccattgaaaaaccggcaatgaacggattgcaattactatccctttgcagccatctatgagaggaatattctgcagttgccacaggggtccaatgtgcgcattgtcatatttctatataaacccgccttctcttcccatttcccaggttttcatcttttcccacagatatcatcatgccaccaaagaaaaagcaaaagcttgaaaaactcgacaaactgtgaaagggacgtctagtagaagaacttagcgtgtagatgattgtattgcacgtgacaggataacctagtacggtcaggtgacctagtagatcaggccatgctggactacaagccgtaaaaaggtttttcagactagttgtaggtcttaggacagatataaatacgggagccccaggcccccgggagaaagataagctgaactgtagatgacaatacagtacggattaactcagatatataagacggacagttagttcttagtacggcgtaaagccgtatactaatcccaacacgggatcccattactagcacccgtcctactgaggtacagacggactaggccataggtactgccgtatcacctaagtcactggatagagttaccttctactacagcactccagctcttgcccagtagttaggatagttacagtacggtagattccatggcccgaacctacgagaggacggtgtacttgtgtcgacatcttgtcacgcattgagccatgcaccaccaccctttcacacaaccctaactgtttgcagcaagcctggacattgggaatgcgttactggaatcgagatacactgagcacctgcaatatggtaacgatcgtgcaatcaatgttggatggacacggtagaccagaggtgttcagccgcaggagtgttccagccgtagcgtagattagctagttagcttttccgaatcggttgtcgccggttcaatccctggtgcgggtgctagtgccaatacccattggctccgcactaaatgggcagattatatcaccacgtgacaaatatcaaagtctccgttcaacaatggccgttagtaaataaaataaaaataatgcaggaaaaacaacaaaatgtaaagatggtggtgatgcgatgtctatcctgatgccggctgccttgttacgtcctttgtccacccttccaagcgctccagcgcgtgttgaacatcctcgatcccttcctccgcactacgcccatctatccacgactctaaagcaccaagagcccgtgagacatcctcgccgctcctgacgctagctgccgcatcggcgaccccgtgtgccgcagctctgacaaccgccgtgcgagctgcttcaatctgacgttcgggtctgggaccctgcgcacgcaaattccaagcaccaatcttgtccagcccttcagcagaactgaatgccatggcattgtactcgggctttcgggcccgttcgataacttgtgcaaacgctttgccgaggccatcggtagttaggggcgcaccacgagttacggcaactccaagcaaatcattcaatatgcgtggggcctgccgccggtcacggacacttcgtagtaagtcgagggctgatctctcgtcattcgaacccgccgcaaacacggccgctgcagacttgggatccgacgcaaggcgcgacccgaaggcgcgtacgaatgcacgattgagccgagtgtcgttcggatctattcgagctagcagggcagcttcaggcgtctcgtcttcgactgtcttacggacaactggtacgtctttgccctccgcctttgacttcatcaatcggtacagataccatagacctcggatatcgccagcccttcccatggcatcaataagctccacaaatgtccgtatagttggcgcttgtgacctctcctttaaaccattccatatgcgccacgctacttcctcctcccgacgatcaacgcctccttgttctgcatcgcgaccaacagatcggagcagacccagtaaagtgtcttcgtgaggctgaattgtgaaccgcgataatcgttcggcgaaatccaaacctccccttgcagaaccagagtcggtgtacgcctgaagaactactctggcggactcgggatataagggtactccaagaccagcatatcgattggcccaatccaagcattgcgagagggcgttcgtcggcccagcaatttgtgaagcagtacggagtaccttcgcttgaatgcgagacgaccgaactagcgaccatttctgaacgtcgcggaagaccaactcgatatctgcctctgaccgacattgcttaagcagtatgcaggcagtggttgaatttgggccagtgcgacacccaggtttgatgggatagatttgttggagcaattgaaacacttttgacgcttcctggcgatattttccccctgcagtgaaacaaaggtcaagtaccttattcagagttgccagccgtggtcgcatatttggtgtgttggcgatcatttggaggatttgcagtgctgtttcgacctcttcaggctcacatgctcggattaggatgctataagttcgcgagttgggactgatgcccgtgttgtgcatctcctgtaa

SEQ ID NO: 835 - DNA, 4850 bp, Spizellomyces punctatus
  source 1..4850: mol_type = unassigned DNA; note = Fz = 2000..2812
gtaaactttacagtgttctggatactgtaggggaaaaggtgttgtactatgatactgattctattatatatgttgatgatgatataggatcaactgaaaagactttgccctatggtgattatcttggagacctgacagatgaattgaaaggcgaccatattgtagaatttgtttcaggtggcgctaagaattactcttacattctcaacaaaacggggagagcaaagacggtctgtaaaggcttcgcactttcatatgaaaatggactcaatcttggacatgagtctatgaaggatatagtatttaaccctaggtacattgatgatgaagggattgagaaagagagttgtgttaattttaactttagcgaaatcaacattagtaaaacacacagtgtgcgtaacaagacaaagatcatcataccagaaaaaaataactcacccagcaaaaagtacaagtttgtctacgacaaacgtgtggttcaagaatttaactctgagtctaaggtcatagagacacttcctttcggtttttaaaatggggacaaaaaccgaactaatcacgaaagtttactatgatcccaagactggacttcagagcatagaaaagctctaccagagactcaaggatcagggtatttccagaaaggatataaagacattcatcgacagtcagcatgtgcaacaagtacacaaacctcttgtcaagcctaactacatgcatataacagccaatggtgttgatcacatatggcaatcggatttgtgtgacatgcagaaatatgctacctacaacaacggttaccgttatctgttatgtattgtagacgtgtactcttgttatgcctttgtttttcctctcaagaataaaaccagagaaaagattgctgattgttttacaaagttactcgctaggcggcgtcctaaaaatatcacgactgataggggttcagagtacaacaacattgtttttgagcaattgctcaataagtatggtataaaccattacatggctgaagttgctgaccataaccatatgggtctggtcgaaaggtttaatcgcacactgaaaagtgttatctccagatacatgaccgtatttaaaactaagcgctacatagatgctcttcctgaccttgttatgaactacaatacttcatatcacagtctattgaaaaaggcacctgtcgatgttgctgatggtgattatatacgcgataatagcaaggctgtaagtgatttcaagaagtttgacattggtgaccatgtaagaatattactcaaacgggatattttcaaaaaaggatatgaggcaaaatggtctgatgaagtataccatatagtcaatgtcgatggctatcgattcgtagtagcatatgccaatggtaaagaaatagaccagcatttcaaatactatgaattacagaaaaccaatgcaccgattaccgagaaaccaggtcatcgaccagtaaaattgactagaacacaaaaagaagttcgcaaagaaattcgtcagttggagcctgtacaaacacgacctactaaaacaagattgcaacagaaaaagttaaaagttcgtccgaagggtacattttcacacatagaaattccgcggcggaagatgccggtgcagatgtagtccatttgaagaatggacatgaggaccccggcaggcatgccgggcgcggagcggccaatcccggctggtatgcctcgaaggtaatgttgagatgggatgagttctgatgcctgagttgcctacatcttctgtggaattttgtgtaaacaaggaaaccaatgttgccatttaaacatgtggatatttctattctttttgcaatcttgctaggaaaatggggacatttctcatccctacatgtctctacataattttttactttccataagcttccaatttttaccattggttttatcctgtggcactttttccctgggaatatttttgatgaaattgtcccacagtgcctcactttgtagtcaacttacctgcttgtcgagcagcagagaatgtcatcgttatcgacccaaacaagcgcgacattctctactgccaagacagcaatggtacgacatttcgctacaccgccaaccagcgagccgtggagactggaagccagtgatttgcaaagagacgagaagcaatgaaggaagaagctggagttgatctcatagaatcacgaataccatcccacaaaacaatgaacctcatggacttcactcgctaccttctcgttcgccgcgctgattgggatcgtcgcaaggaattctattcgcatcctgctcatactcgatggaaatggcactccttcataaaccgtcagaagagcgaatcagacctcataagtaacatgcgcaacaagtacggtgaaaactttactgttgtgatgggtgattggagcgatgctggtcgaactgcaaaatttcagacctcatcaaagacaaaaggctggcgcaccctctttaagcggaacaggataaactgcttccttctcgatgagtacaagacctcatctgtttgccctcgctgttcatcctctgagtttgtcgagaaaggcttcaaagaacgacctcattcaagaccttggcagcgaggcaaggttgaaaaagtccatggattgctgggttgtaccaaccctaactgtttgcagcaagactggacgttgagaatgcgctactggaaccgagatacgctggcaacctgtaatatgctaacgatcgtgcaatcaatgttggatggacacggtagaccagaggtgttcagcaggagcagcaggagtgttccagcggtagcgtagcgtagattagttagattagcttttccgaactggttgtcgccggttcaatccatggtgcgggtgctagtgccaatacccaccggctccgcactatcgacaccagcaagatcgcatccgcaaggttcacatagtataaaactttgggcaacgcttccgcaaccgagcggatgcgctacagatgattgaaatgaagcatatattatatatccaagtcggaggcctagtggcaggagaggagatcccctactgaatgagctaggctctgccgcgacggcacagtggcggtttatggatactttacgaggtgcagctgtcgcgcagcgacgggaaggaaccttccgatatgcgtttgaacttggagcgaaaccttcctggtaaggtactctcaaattttccatttgttcataagcttctaatcgatggctcaaatgaaatcgagagcttgacttactagcctcgccgtgtaaatcttaatagggattgtagctctcatggcaccttcatgttgtgaaggttaagagtctggcccgaatgatgggctgggagggcaggtttggctatactggtcacagccaagccttcccagtacggcccaccattgttgcgacgaacattgagcggaacgtacccgtttctaagatgtaaatgccaaatatgcaagatcatccaaccaaacctctgaatctacacatccatattccctgacggaaataaatgctgttgtccttgctgcctccaatgacggtagattatggtcttagatcgcaccccgtagaccaattataagtagtgaaaattgcccagagaagattatggtatctcgtatggcaggtgtacgattgcaaatcctgtaataaagttccagatcaggatccaaaaacgagcctaaccttctgttgaagacagtcaaattcactacacataactagactgctatgcaagccatcttgagtttgtcattgctatctttttcccttttctctgcaccgagcatggtgaaataatattcgatgggtgattttctattttaaggtgcagaggacccattcacgccctcttttccagaatctaatcctgtccacacttgcttctgacaatgccttccagaaccctcaaacgcgcctgttggtataagaaaccatcatggctgacagagggaaacctcgttagactgcagccattctgataccgcaaccaagagtgcccgagttcatctaacaaattatcattcaacatggcacctcaataccaggatgtttcgttagcgcccgtcgtagactcgaaagaaagcatggaacgagagattgaagcctatgccgagcatattaggaacctgtttgcagatgttcccgcccttaagccaaaggtgggctttatagcaaagaatcagtggcttatcgtatatggaatggtgcattgctaactctgggagatatctgttatagtatatccccataaccagagagaccttttttaccgcattccaggatggcattcttcttgcccatataatcaatgagattaaggctaaatcagtcaacatccaaaagctgaacacgcacgtcaacccggagcacctcgctcccccagcaaaggcagacaatgttccccaagaacacaccaaagacctttttgaagcgacaaataacctcaacatttgtcttgatgccgcacgtaatgtagcggtcgtggtgaacgttgctgctgaagacttccttcgaaagaagcctgatctggtccttggggttgtttggcagttaattcgtgcccatctgctttcagatgtgaatctcccgtctcaccctgagctgattcgcctattggaaccaggggagagcttgactacgttaatcggactgacaaatgatcaggtcctgttgagatggttcaattatcacctcgcccggtcgggtgcatccaagcgcattcagaactttggcaaagatgtgacagactcggaggcataccttttgttactcaggcaagttgcccctgggcatcgaaaggatgcgacggatgagttggaggcggcatt

SEQ ID NO: 836 - protein, 217 aa, Spizellomyces punctatus
  source 1..217: note = 2162..2815, XP_016612640.1, uncharacterized protein CDS
MKEEAGVDLIESRIPSHKTMNLMDFTRYLLVRRADWDRRKEFYSHPAHTRWKWHSFINRQKSESDLISNMRNKYGENFTVVMGDWSDAGRTAKFQTSSKTKGWRTLFKRNRINCFLLDEYKTSSVCPRCSSSEFVEKGFKERPHSRPWQRGKVEKVHGLLGCTNPNCLQQDWTLRMRYWNRDTLATCNMLTIVQSMLDGHGRPEVFSRSSRSVPAVA

SEQ ID NO: 837 - protein, 378 aa, unidentified
  REGION 1..378: note = Table 20
MAINKKRKKKTKKLMICLSLRISTTDINFQKIDSLRMEFRRVYNEFIGVWYRTGKVSKSVFELHKFPHSLLANVRQSARDVAVEAVKSYFELKKENPYANPPAIKDEPMSPRLNYKEGYRIRSEVDNGEKFYKARITISPGDRVKVNLIGSEKQFTMLEKVLSGEYEIGSCNISKRKKKYYMNISLRNGEIPKPNNNKTFIGIDTNEKNIALSAINEHGEVLKSLILDYPVINSERQKYFVIRKWLQKINKDSVKKKIQNKEKLVVRDFYHKMSRIAVEWITQFSSPLIIMEDLTNIRNSINFGKRWNRRLHGWGFRTLQSMIEYKVNHCSIPVYYCHPALTSQTCAKCGLRKKSHKRKREFTCSWCGHVDHRDRNEA

SEQ ID NO: 838 - protein, 433 aa, unidentified
  REGION 1..433: note = Table 20
MREFGSVYNQYLEHWSKSGRYSKTFLEKHQIKANILANNRQCSRDVANESIKSYLARRKIDPRARPPSPVKGLMTARLNYKEGYKILACNRVRISVRKGVRLVLEFIGSKRHMTLVELGLAEALKFGSANLKKIGKKYYLFVNVDLGKKPIFNDSKGYTFIGIDNNTTNLALSAVNLNGEVLGSFIIDFSPLVHQRYKFFKIRKRLQKVNKTSMIKKIGRKQQKITTHVLHLASKLAVRWISKFQNPVVIFEDLKNILDNINWGKKNNLKYHNWGFKKLQDFITYKAFIRGHPIYSVNPHYTSQNCVLCQTKKESHKRKRLFKCSHCGHVDHRDRNASLNIALKGFIDLYSGSHKMNNGLKTIIGYVNLLSKFKKVPSVKNFPMIRKVRLLAADNVDLSASAMLNGAIHTAQSGVKSLDNSRTLTQCLTSRGL

SEQ ID NO: 839 - protein, 418 aa, unidentified
  REGION 1..418: note = Table 20
MTDKLVRTVCLKLHPDKPHLLDELRKNFRETWNQYINHIKELGTTNRQRLEEKKVEHNLLENTRQCARDKARESVKSFFEIKKFDDEATFPSPKDEPMTAKLNYRDGYVFRGDLSVRISVRAGDRVYSEVSGSQKDMRYIEKALNGEYSFGTAEVVKKSGEYYLHVHIESEDTPTVQDQEESTYIGIDINEGNIVATAINTGGEVLRTLMLDYSPLKKIKHKHFIIRKRLRDNDKNLKGFDKERHRTNNFVHKISRIIVEFAKEFNDPILCLEDLAHIRKEIRYSKKMNRRLHSWNFAKLGKYIKYKARWDGIFVQEIDPEHTSQMCPVCGDIEKKNKNGRRFECHRCGHQDHRDRNASLNIGLKGMKNFLGNVPSLKNFPSFRKVRWMASGLVNRPTEDIIQMSCLSSGSPSALPSG

SEQ ID NO: 840 - protein, 469 aa, unidentified
  REGION 1..469: note = Table 20
MELAAIKTVIGKLVIEEGNSAKIDEALLESRRIFNEVLVKLLSGEGVRDKDIQSFLASNTKQRIIAKAKEAFNSFKELKANGRAEKLRIYDNRPLPLRMNFGEGYNLWIEDDKVMFRVTLIPRKEYIKGYLKLSKEHDEIVRKALEEKTGEKKDHRKEYNITIAELVKRKSEYYLHITITKNISVPSIRYAAGIDLNEDNVAITVYDLTTKEVVESFIVDYAIIKFIRHYWFTIRKRLQKHGARSKKKLGFTRKESRLITYLLHLLSRRIIDYLSKYSGLIVFVEDLNGIRGENKGKRMNKRLHAWPFYKLQQLLKYKFEWIGVPVMFVDPENTSHRCPLCGALGIRHKKMFRCPNGHVGHADRNASANILIRGCAMYLHVPCSAFRTTRLPNFRMWKLRRNESGVWGIVNMPLPAGVEPLTAAQKAEGCEAPAQAGGSPKLQLGVVHDESSPCTGDVVVLDVSECSEK

SEQ ID NO: 841 - protein, 327 aa, unidentified
  REGION 1..327: note = Table 20
MAHTEGYRLTYNDEDDRVAFRVSPKPYKKVKGHLRGRPEDLALIESALTEDEWSLRQAELLYRDGVYYLHVTVKTEVEVPEPEDADTLVGVDINERNIALTALNRETMDTLGTLVLDYGSVKAERQRYHTITKRCQEHGQHSIHNQLGEKEERYTEWVLHRMSRVVVEFAQQFSNPVIVFEDLSGIRDAIKYGTYMNRRLHKLPFHKFEQQIRYKATWNQIPCETVESPYNSKSCSCCGHRGYRQGRRFCCTNDSCEVQQDHADRNASVNVAWRAWAKHADGDVESVNYRTRKTQPFVRKVSLSGSGRSVNRPSSSREIASRGVLTT

SEQ ID NO: 842 - protein, 454 aa, unidentified
  VARIANT 247: note = misc_feature - Xaa can be any naturally occurring amino acid
  REGION 1..454: note = Table 20
MTDSQALVKTLDFQLDIQSDNESLLYDATLEARSVYNETIRLAKQGVDWDALPDRVADDANLVKNTTQRVVAKALGAMENYYEYDDFGKPSHTKDGAYPLRTNYEEGYNLSLTDDGDVAFRISAKPYKHVTGVLKGSDANLDILQTALESDEWKIGTAEALFHNDNAELHVNVTNTEQTVRDKQDSRTVVGVDVNEDNVALTALSEDGIEDSLVIDFPEIKFERHRYFTMRKRVQNAGKDSIHDTLXPEIKFERHRYFTMRKRVQNAGKDSIHDTLEGREERFVRDRLHKVSRHIVEWSQQFEKPCIVFEDLKEMRDSIDYGTRMNRRLHHLPFRALQFYTSYKAAFEGFPTEWINPEYTSQRCPMCEHTERANRNKKRFKCRSCSHQDHSDRGASVNIAVKGMKKLDWNVPALNSLPQVRKVRRQASGAVDAPTVTQPTARGYQADGRMGVSD

SEQ ID NO: 843 - protein, 407 aa, unidentified
  REGION 1..407: note = Table 20
MEKKLVRTLCFKLIPDNPELLDELMLEIRNVFNQYLEACKKLNTTNRNKLETYPVKSKLIQKMAREKAREAVKSYFELRKQGKDTSFPKPKEKPMPVRMNYKEGYVVKEDFTVRISVYPRVHVYGRLKGSDLDFAYLYNALKGKYDIGTAELLKRDGEFYLHVTISKDFNKSYEPKTFIGIDVNENSVAITALDESGRVLKSAILEFNELKFLRHKFDLIRKRVQSKKLSMLKVLGRIEKNTVRDWCYKVSRIVVEFVKQFPKPIIVLENLNGMRESIDYGKRMNRRLHKIPYAMIQSFIEYKALWDDVLVERVDPRNTSHRCPLCGGRGVRRKRLFKCSCGLQDHADRIASLNIALRGYTYLKENVPSVKRLPALRKVRWVAAGRVNRPTPAVRVYLGEATVFRRW

SEQ ID NO: 844 - protein, 370 aa, unidentified
  REGION 1..370: note = Table 20
MSIEELYDKYQTTLKLFYNYAKDNQLHRHGKRSLIEKELQKLYYTVKENLNLHSQLVQSARRDVVNDIMSWLKTGGEYPKLSKKPVTLVYNRSYRLFEQGREFKLWAKICGVAYPLELGDRQLELIRRAKKIGEAKLFKRDGKWYLNVSIEIQESKPIKPKGILGVDLGLKNSAVITGSKPIFIKHRHLLYKVTRYWKQIDKLKSKLPKGQRTSRRIKRLWRKIARINNFIAHDTSAKIVRLAVQSRKAIALEKLEVPNNGYNRVWSRRLSNWVRGKIIRYVQYKARLNGIPVILVNPAYSSRKCHVCGRDGERLSSIFKCKVCGRTYNADFNASVNIARRAMSLLAGACNPPSVGLRDDGRKLPTFSGE

SEQ ID NO: 845 - protein, 415 aa, unidentified
  REGION 1..415: note = Table 20
MQVAKSITVKVSKRINRDKFLSLRNFFNTYQTIARFYYSYILENSLEEKLVSGEITSKDLKNILHQKLYRQIRETFDIGSQTVQEIRDTVVGVINSYAQLVKNGKKASLPKVEEFTVRLNHPRVVSVFEHGKEFDFFFKVKVNGDKRVAVPIECGEMQKQLLKDALNGKYKIGAFQLVKRDGWFYFVIPIKKEVEIKQKYDGVVGVDLGLRYNAVITLLYKNGKITKVEFLKYRKLMHKIRELWYRIDELKSMLPEGQNTSKRIQRLWKRIRRINDWIAHNVSKKVVEVAKENNSMIAMENLKRLYPVKGKNSRKNNRRISNWIRGKVVRYTIYKARWEGIRVKLVNPKNTSRICHLCGAEGFRKDAIFVCKHCEHTYNADFNASVNIGIRATLPNAKGCVNHPVGLIALQSHPF

SEQ ID NO: 846 - protein, 388 aa, unidentified
  REGION 1..388: note = Table 20
MNQSKKRLGCSLKAEVKVAVQGKILNPNKEKRHKLNVVLEKYLKAVKFFASFKIKDKNLLQQKAYEEARRRFGLSSTLTQTARDKAVELVKANEGREFHVHEVSMRVNYRAFKLVRRDTKLTPYWLYLKLDGDGVWYPVQFGEKQRQMIDDALSDDGEWSLQQVELVKRDGEWYAHFTLERPFKDFEPQTPIGIDLGERNFATVIALVGKPTKGTFFKGSRIKEVRHKYFNIRKKLQEKRRLDVIKRLRGKERRIVNHELHVISKEIVEYAKQFPSPVIVMEKLTGIRENFKKGKELNRRFHSLPFRKLQKMVEYKAKIQGIKVVYIDPKNTSKTCHRCGYVTHVEGREYRCPKCGLKYNRDLNASINVARALTRGTGRGYVNTPKGR

SEQ ID NO: 847 - protein, 421 aa, unidentified
  REGION 1..421: note = Table 20
MPPAVIKLASRREVRVTVVGKVFEANRGKILALNKALDEYLRLVRWYLGFDSTSKVFLHKNCYERARELFNLNAALIQTARDKAVEILRSFKRLKRRGKVEADRPRIKSVSMRFDRRCYRFSKTGNVLTPYWLTLSLNKEERINLPIVFGEKQRQRIEEALRGEWRFTAVEMVKRDGEWYAHFVLEKAVEVVDKPETIVAVDVGERNLAVAVAISVNNPGKPMRGQFWRGAEVKRIRGLYGHVRRSLQKKRLLGKVKRLRGRERRKVEQELHKIANQIIAYARQFPRPVIVMEDLTGIRDNFDRGRRLNRRFHSLPFRRLQTYIECKALLDGINVVYLPRRLVKNTSRTCHRCGHVARNIKGGGVFRCERCGMEYDRDLNAAINIARRAICSAGWGSCGSPEPADEAEGVKLQPNAGSPNF

SEQ ID NO: 848 - protein, 361 aa, unidentified
  REGION 1..361: note = Table 20
MHITLHHIKLYKPSRNKQEQLNLLLRNWNKGLRSALKIIKHWGFTSYTKSHKHTYRVLRNNYSLPSQIAVECNRKAIEIFKVNQISRFKSNVPVRLVNGKSFAIIVKNGRYFAKILTPNGKIFCPLAFGKYQLNYLADERYIIKTADLYFSKGEWYLNLVLEYQQKQIEPKTVMGIDLGIVNLASVAVIDQDKNILHTEMFSGRELRFKRLRYRQKRKLKSKKAGSQKISTIKENRICREVNFHIANRIIELAAKNNSLIVFENLKNIRSNITKEKDRLSNYEKNSWAYYQLKEFVKHKACLHGIPVIEISPFKTSQICSTCQAEGQRITQSLFLCPNGHRHNADKNASINIAVRGLQHVG

SEQ ID NO: 849 - protein, 368 aa, unidentified
  REGION 1..368: note = Table 20
MQKLKARKALKFKAMPLSDEDRELLDYLITEYNKLVRKYLLYAKYSRTYVNPSKSRLHKLTYNRLRSEFNLHSNHITSARDIVIEMIKASNYHKVFPNPKRLLPVRLFRGKTYHLDSSGLVRIAVKPRVYAYIRLLGAEEWFKLLDLARGALLIKSDDEYYLHMIVEKELQLSKPIEYVIGIDTNLDNLTLSCINVRTGEVIVHHSISLRHIVGKRIYYRNRRAYLQSIGRNIHKESLVCKAVLEQVVEEVFKFVRPYTPRCLVAVEELKDIRNKLIRRSKRKDKRYLYSTALYKRLLRRIREKLEWKGVGVVEVSPRYTSTTCSRCGERGTRRGNLFFCSNCSYVVDADLNASVNIAKRAIQQIPLN

SEQ ID NO: 850 - protein, 362 aa, unidentified
  REGION 1..362: note = Table 20
MRTLKFKLKVVETEKLDYLYAEFNRLVRIHLNTIRQSRLYLNPNKNVLHKLTYHWVRSLTDLHSNYVTAARDLALEMVKASAKHRVFPQPGEVPVRLFRNKTYKIEGRRVQIVTRPSEYVVAELLGAEEWFSQWDKAEGALLIRRDGEWYLHVAVEDGAEPAGEPKYYVGIDFGIDRVAVAVVDRERHIVESKLFPLNVSGLRLYLRNARREMQRRGRSFRRERAVLKLLLEETTRALADYIAQFAPAEVRIEYLKGLRRRMLREYGGDWRYVASTAFYRSLYRRLAEKLSRYGIRLVEVSPKDTSTVCHICGKRGIRDGRLFHCLHCNLTTDADINAAINIARRDPALKGEVSSPNNRDWL

SEQ ID NO: 851 - protein, 558 aa, unidentified
  REGION 1..558: note = Table 20
MSRTLSASLLAESTGDTMGSCPPVLRARGRRDAMSGIVAPHVYLLLRGPVLSQESAAREERKERPPLGYMTSRGDSIAVFVAGASGEEGGAPWRGPRDPHRRPSAEGTRRDRGETCVGWLSVARTPSAHEGGEVAMPRRKPQDADETRKRTYTAVFGFADHAEMRRDCTLAFALAGKAHNIMMDFLLAKQLKAPLEDSYPYQKATREVPELQTQIINQLARVQVGAEFKRYKDDRYKAKRAASIPYVVRASALHLHGDHWKLEERDGKWFVSFNLWRTKDGGGGKRALAELNGKPYEIHPMGPRDADLLRQVVEGTKRNVPGYRFGQPRLVNQPRARNRRRRWRFEFVVELPSLPSRQGPVAAGIDLGVNHLAVVSVPALRKCWYFSRHDLRERQRAYDEKRRRRQAAYGRKGAAALQDKEARFVDTVIKTEVRAIVEKLKQFAEIAAIKVEQLGGLTEGVSGKDVGFATARMLKRFPYQRFQERLRQVAEAEGFVVWEVDPAYTSQTCSRCGKMGKRDRKYFRCECDDPERPPRCADLNAANNIAQAPPVGVDAARR

SEQ ID NO: 852 - protein, 384 aa, unidentified
  REGION 1..384: note = Table 20
MVGLTKTIRIPLHEPNKGKYDSLINTLNRYSECINFHLDGAFLYADSKEELHELCYHSSRLDGLSANLVQSARDRALEMYWKGCTHTSNVPLRLNQRIFKLVLRDDTLNLIGITTINGRIYVPLPPYLRPYQKRHLKDITSGKATCNSAELVDREGDLWIHLFVKYELDKPQYQPMTIIGVDLGVSKLATVSVLSKDAVSKVNFFDGSELRFRRKCYKRSLSEWQSNGNDAMVRRSKGKISNLSTHLNHCISKWIVSLAKQYSDPVIVIESLKGIRERIKYSKRMNAELHSWSFAQLQSFIEYKALEKGIRVEYVDAKNTSRMCCNCGHSHKSNRRDQAHFKCLECGYEANSDFNASVNIVKVFREKAPTQPTWLGGRGELNRP

SEQ ID NO: 853 - protein, 396 aa, unidentified
  REGION 1..396: note = Table 20
MYNIGAMLTIKLKLRTPNNGKSQILNEYLKDFTACASWWLRKIQKDKTTSRTKLHHRYYHEARGTFNSLPSANIQCALDKAIETQRAYWKKKGNKSLPQFKSLFGCFRNDTFKIENNAVRLTVGSRKTIWLPLIIPDRFKESLNLKFGRSEVKRVRGQWYLYLTVKPEIKSDVKSENVLGVDIGVAKLAVISTPDKKINKFFSGEETRYIKNHYHNLRKKLQAKLGEGKNVYKALKRISGKEKRWTKDANHKLSRQIVNIAKDNKAVIAIENLKGIRERIKATKRVRRMLHNWNFRQLISFIEYKARLDGLCCVSIDPRGTSRKCSACGYTEKSNRKSQSRFKCSNCGLELNADLNAARNIADRALESLPSGYMLEGAGGLALPEVGLAHNLASSA

SEQ ID NO: 854 - protein, 368 aa, unidentified
  REGION 1..368: note = Table 20
METQTRQFKLKIREPNTGKEKQLEKSIQRFKDCVNAWIQKIYEMDEYPKRGNTHEYGYHDIKDEFPKLYSNVIQEAMNRAIEIMRNRNGSLPEYEASSMSFKAVDVRYDGENIGIPVVGKERVWIPLIVPSYFGKYRELDKGRLQVVKKDGKWYAYVSVEYPVKDEIEPNGVLGVDLGIRQIAVVSDPNGKVNEFYGSELLSRRRQLDQRWKILQKQKSGSNNKYQGLKQVSGKEERFMHNINHKVSKDIVETAKHYNYSIAVENLTGLREGKPSQTLREMLHRWAYRDLMDKIEYKAEAEGIPVEYVDPRRTSKTCSKCGGESDVGAAKQYRCDGCGVELNRDLNAARNIASRGASFCSEGQAVVSK

SEQ ID NO: 855 - protein, 417 aa, unidentified
  REGION 1..417: note = Table 20
MGTSVTVEPHKGCVSHPSSEGIYPTQLKRLLTGSLIYFTVLVYDMELTQKFKLMKPNKRKKELLNATIDRFRECVNEWLRAIEELGEYPVRGNVHAFAYKRVREKFQDLHSNVVQEAMNRAIETYRSWLRNPNKGEKPVFKADIISFKAVDVKIDRHFINIPLLNNERVWLPMYVPSKLKRFLKLKHGRLQISRGKDYYALISFEVEEPEPYEPQGWIGVDIGINHIVVVSDTKHRINKFYNNAISWKKSMDCRRDGLKRLKDRKIKKGVWRVLKRKSKEIRNRMSYINHCIAKELIEMAKQRRCGIAIEGLKGLRRKKVGKRHRKRLHKWAYRDLIQKIEYKARLNGVPVKFVNPKRTSKTCSKCGYVRSRIKGRWFKCPKCGFQLDRDLNAARNIAKLAAIPLTVKAVSFLAEGV

SEQ ID NO: 856 - protein, 363 aa, unidentified
  REGION 1..363: note = Table 20
MKLSLKMKIKPLRTNKMFMLEKTLIDFKNAVNDWIDISWNDGKITDRKLHSYGYKELREKYPNLYSNSLQDAMNWAIQILRSSIKLNPNKKPIFNTLMVSYKSVDYKYENEGLIIPLCGKRVFIPLYIPKKYKKYLQNGTFGRLVIKKEGNDYYAYLSIKVEEKEPYKPTLWFGVDLGVYNLVVVADSKGREILRFDGEIVKEYKKKLEKYRARIQSRQKRNFNKYTKVGNKISNYSKYINHVISKEIVKKAKQYNAGIVLEKLKGLKKSKLNKSKPKNIRKALHIWSYADLIKKIKYKAKLEGVPVVEISPRNTSKTCSRCGYVNRRLKNERIFVCPKCGLEIDRDLNASINIAKKVASKQA

SEQ ID NO: 857 - protein, 352 aa, unidentified
  REGION 1..352: note = Table 20
MVKTIPVKIKVDGELDKKLIDLSERQTKCANYWIDIIRKTESTNIKQLGGDNYYKAKELFKIGGESVQIAGRRAIAMVRRLKKRRADSPYFKKTYLSVAKIKIKNNLLGIIFGDGAGRVWLEFSGQEVIGKIGESSIKKIKGEWFVYLFVEVETDKEKNYKRFMGVDLGIAKTAVICDWNGKNTRFFNGEPYRFKKNKYQEMRKKSQPNIDKGNVYKFLKKIRRKESNWITNENHKISREIVNTAIKNKRSIALEKLTGISERLKVNKKTRKMIKGWSFRQLADFIEYKAKLAGIRVVYVDPRGTSKTCPKCQYCSRSNRRTQAVFKCRQCNYQSNADRVGAINIALRGNTG

SEQ ID NO: 858 - protein, 416 aa, unidentified
  REGION 1..416: note = Table 20
MPSLFSKLAVSSPRSDDVQYIALTLSVPHLSKRKRKILENYQKAFTKCVTFFLDKSRELNTSSPYKLHMMCNAEAREKFDLGSAAIQSARDKAVSMQRIFWSRVRHRKHTTRPETAGLVPIVLRQDAYVWGRTHRGNRVIRFLIEAGRKKYLVVPVSPRPYALKYLDADFKSGPAELYRKPDGRWCLSVSLRILIHYDKFSSVTGVDLGVRHPAVTSGGKFFRSGVLSGIFHGLTAGKFQSRSERRKNMRRADNVNHHISRNLVNLVISQGAAIALENLNGLKERLLGRGGHDRSLPPQVVWRWSYRRLAAMIIYKARLAGIKSVTVDPGGTSITCAVCGWRAGKNRPSPEKFSCVNCGHTVSADLNAARNIASRGAAMLGIAPSPAVAEPKKSSQASPNPADKEINEPRAEEYQV

SEQ ID NO: 859 - protein, 380 aa, unidentified
  REGION 1..380: note = Table 20
MPLYYFHGAPNLKKEKPDEQILTLTMPLMKLTDSKENSLLEMRAEFTRCTAYFLNEACERKTTSAFKLHKACYRQAKNKFSLSSATIQTARDRAIAIQRIFWARVRKWKKTSQPEIKHELPIHLRQDAYTLFKKSNTWYIKFALKKGRQSYICLPLVTRPYILNYLSQEFSRGSAEIYQSKNKWLISLSIKIPCAPKDFHKTIGIDLGIRHRAVLSNNVFFSGKSLRKIRFGMFKRRFRSKKLKYQEHLQITHLNHILSKKIVKMAEAETANLAMEYLTGIRERLLHNTGLSQSVVSHWSYKQLSDFICYKAKLAGLSIKLVDAADTSITCSRCGFKSRDNRKSQSGFKCNSCGFELNADLNASRNIAEKKGLDLEQMEN

SEQ ID NO: 860 - protein, 374 aa, unidentified
  REGION 1..374: note = Table 20
MQTVTLKIKLLSPNKGKLEKMTRMLEIYRQACFWFLEKAEALNTTSRAHLNRETYRQACELFDLNRGTLQCAMLKALSVRRSYLSRKQRGKKASLPKFEKTVPVMVRQDCYSLHQLPSGTWVIKFPVSSGRSQIAVPLAASTYHAKRLQDLAGSSCRQGSVEIWRDKSGEWYAAISLVYETCPNEPCGVIGVDFGIVKLAVLSNNVFFDGRQVRWRKERWAERRKALQQAGRLSRVKKESGREQRWMRYINHCISKRIVEIAKAEGKAIALENLLGIRERAKGSKKFNRMMSGWNFRELASFIGYKAALAGVPVIYVDPKETSKTCPRCGNVSRYNRKTQGWFKCTRCGYQSDADRVGALNIAAKALDALGARL

SEQ ID NO: 861 - protein, 393 aa, unidentified
  REGION 1..393: note = Table 20
MVQKLTLLIRFGQLSKTKGNAISSLAQTCNSATQYFLAKAQELKTTSQKRLHDACYSEAKSFFQLNTGILQSCRDKAIACQRSYLARLKARKKASKPKGNFPIPVRKDCYKLFQSKRGTWHIKFATTSGYGSQLAFPLQPRENQLKWLSKDFKRGTCEIFNRKDYWILALTVTVNTPAPKASSIIGADLGIVNMAVLSTGKFFSGKWVQFKRNHFARKRSEYQSRKLRWKVKASKGKESRWMRDVNHKLSRQIVDIAKLNNSAIALENLIGIRERIKVSRKVNKMLHSWSFGELINFLKYKANLEGVAVIEVDPRLSSRTCSRCGHVEKSNRKDQATLLCKGCGYNLNADINASFNITLRASTLTPTKLGARIGGGHRLNGDRSLRPNLIASL

SEQ ID NO: 862 - protein, 415 aa, unidentified
  REGION 1..415: note = Table 20
MHSVEAVVLKLVRPTLRKAQWLESMALSFIQAVQYGLDVAQELKSSNRAKLHQVIYRPAREQFSLPSEYARMAVNAVVTLARSFYGLRNSGHRPSFPKVSRNQGIGLGIHAYSVVCDGERFVLRVSTGSRGQFTWFPLHVPARYRKTIMLTRGDAKLFQRNGNWFVMLPIRISYTPTACGGEPTFIGVDLGIVRHATVATPDRLLFFAGKEARHRREHFFDLRRRYQQHRRIDRVKDQRGKEHRWMADLNHKLSCQIVETASQYATPVIVLERLDGIRYRVHGSKRFNRMVSSWTFRDLVSKIQYKAARIGIPVVFVDPRNTSKTCSRCGHATRSNRPDQATFRCVKCGYRLNADGNAARNIAALGPGAFEQGRTDITRSQDQTEGFGSRPDGEKGCALAHSDPNLESSLTGIPA

SEQ ID NO: 863 - protein, 400 aa, unidentified
  REGION 1..400: note = Table 20
MHLDVSLRIQLLRPTASKRAALSAMQAEYTRAVSLLLESAKELDTTSLGRLHREAYHRIKGEVSLPSESLRVALNQTCHIVRSWKARLKRGCEAKPPVIKRLQPIGIGTRGYRIAQDGNRFVLRLTTVNGFLWLPLKSNAYYRPYLEALAAGKAHQGDAKLVEQDGRWYLLLPTRQEVPEATGCNIVGVDLGVANLAVVSTADGKLNRFFSGRFVQARRNRFFDRRYSLQCAKRLDLVRRERDKEHRWVKDVNHKVSRAIIREAQKLPNPVIALEELRGIRERIKASRKVNRMLHSWAFGQLIRFIEYKAARAGIPVVRVDPRKTSQTCLKCGHAEPGNRSRRAIFKCQNCGYELHADLNGARNIAVKAAQTLASGYTSGAMGLLTGPSSLPPVPASGQI

SEQ ID NO: 864 - protein, 422 aa, unidentified
  REGION 1..422: note = Table 20
MSVRVLKLKLRTVNRGKFARLTAMQREYAACAQFHLEGIERLQTTNATALHRELYVPAKERFTLPVVNLQRARDKAIETFRSYLARKAKGKRANVPQFGPGLPLGVGQRALAIVGRTLRLSTEKARDYLWLPIEVDDRHAPFVDAVAAGTLKYGASELHRRGKDWYLHLTVYEDVPNTVESGVVLGLDLGVANTAVMSGPGLVRFWSGQAVRHTRNRYSARRRSLQKAKLMGEVRRSKGKESRWMRNLNHQISCQILGEVAQQGAALAIEKLLGIRDRVKLTRKVNRMVHNWAFGELIALLHQKAPRYGVRIVEVDPRHTSQGCSKCGHTEKGNRLRQDRFKCKACGYAVHADLNAARNIANRGALMLGYTSSVTGALTVPGGVKSTSVSREFGDGQAMGVEAEGSSDQLKQSQVATSLSSW

SEQ ID NO: 865 - protein, 399 aa, unidentified
  REGION 1..399: note = Table 20
MQTGVLKIKIRTPNRGKLARLLGMQEEFTACVRFHCDRIAILGTTNATEVHRDCYYDARALFRLPASTLQQARDKAIAAVRSFLQRKKRDRRANPPTFRRPVPLRLAVENLKVLPDDGMIRISTPDGFLWLPILIPACFAAAARLPHAVSEIIHKGKDWFLMLAVKTEDVPRPQGERPHFGVDLGLANVAVLSGPGVVKFFDGKPLRYVRGRFFRYRQALQKKRKTGLVKRSKGKESRWSSWMNHDISRKIIDIVAEVGGVLHVERLTGIRERCKGTAKTSRMLHAWPFAQLLEFLRYKAARAGVEIIEEDPRHTSQRCSRCGHTERGNRPRQDLFRCKRCGYEVHADLNAARNLAARGACSPGVGGVTPPGRPDAESGERVTQHTVVIAGNHDLASSL

SEQ ID NO: 866 - protein, 372 aa, unidentified
  REGION 1..372: note = Table 20
MPAVTKTISVKLHDLTKTKLEALQDLLNISADLSRYYVTKLETLNTQSKKALHNETYTEVKSMFPGLPTGLIQTIRDKSLEAYKSYKARVNKGKKASLPVFKHSVVRFDSRTFTLHKTETCFPYFVSVSTRQKRVMLPVKYGRFQGEILAGLASGVYKFCTAELSFSYRLNCYILNISYKYDVPEQATTAVMGIDLGITNLAVLAVPGQIIKFFNGKRHNQKRDHYAELRRKLGKKKLIKKIKAIGNKEQRYMKDVNHKISRQIVNIAKQCNAVIQLEDLSNIRERAKFSHKMNRKLHNWNFHQLRSFIEYKAIAEGLKVVQVSPKYTSQGCHICGHTEKGNRPNQATFLCKACGYQANADFNASMNIAVAG

SEQ ID NO: 867 - protein, 436 aa, unidentified
  REGION 1..436: note = Table 20
MKLQKTIKIKIGKLSKNKQNILEVLLRKNTKAINFCLQKAKKGNIITHNLVYKDLRKLNLPATVIHGCRAKSVEIIKSFYKRKGKKTFPKLKNSRVRYDNQVVKLRKTDNKLYKYFVSLLYKAGVKGNSNNRIELPLILNSQYQTEILKNIGNEYKLGSTELVNKDRDYFIHISYSKDIEIPKPDETFNPIGIDVGIRNLAVVSVARQQPKFFSGKRIKWKRNFFFEQRRKLLMNFALQEVKRQRGRETKYLDAVNYNIAKQIVEMAKKTEKPAIVMEDLTGITKFKIWTKKGNRNLSNWAFRRLQNTIQQKALWEGIPVEYIEPKDTTRTCSKCGTINKRKRDNYKCRKCGYEIHSDLNATFNIRQFWLDKFQPEQATINIASNDAISEPQAKKSGSLLCTSIKKNNGQSVRNFKRKEVSIPPITKVMGILEKVL

SEQ ID NO: 868 - protein, 436 aa, unidentified
  REGION 1..436: note = Table 20
MTSSNIINYVVSKTIKFKVRELRKGKKELIDLALNNSINAIKDFMELSLKNKTTSNKKLHRLGYKEIVRRYNLSACIVHQSRNKASEIIKSWKSNKRRLNKNIPLPEPRAQRIRYDNVVFDVIKTENKEFQFWASILVAKRKRIYIPLTVNSNWQKSYLNDLIQEKYKQGSADLVKKGNDYFVHIVIKKEVEFKPQENYNPIGIDVGINNLAVVNVNGRSKFFNGKRAIAKKKHLNKVKAIYQNRNNLKMLEAIKGREQRYFNHINHNISSWVINQAKLLNNPVIVMEDLTYILDTTRVRKKQRYIHQTWSFRRLQNMIQYKALWDSIPIVYINPEYTSQVCPKCLSTNKRNKHNYKCRYCDYEANADHVGAVNIRKKFLESISFEDMASINNAIGFSFKETQTMNIGKAKKYATKQEGVSPPITEVKGIRNTYIL

SEQ ID NO: 869 - protein, 419 aa, unidentified
  REGION 1..419: note = Table 20
MKKTVHKTIKVKIFNPTQVKKQFLGLLRENSTILNHYVSRIEELGTTSKSRLHKETYHKLRKTSPLPSAILQTARDKVVEAYKSYQTRKKHRRKASIPKFKDNTPVRLDERTVKVVETDNKLKYFASVSTQEGRIHVPLLGQRYQYKYLKKVLDGEFELGIAELHHIEDNFYLYFTIKKEVEIPTPNRSFTPVAIDLGLVNLAVSVTPSAIRFFNGRRVQHKREEYAKVRRSLGKKKKLKKIREMQGKDQRYIRDINHKISSAIIEQARKVENPVIVLENLKNIREKINFGKKMNRRLHNWNFRQLQDFIQYKAEWEGIPVVYLDARYTSRTCPKCGDALKSNRKREKHIYKCHYCGYQLNDDLIGAINLSRNFYNSMSAVEGAAVNPALNQSKWTATPLHCEVNQPVQDSGSHLFNRW

SEQ ID NO: 870 - protein, 400 aa, unidentified
  REGION 1..400: note = Table 20
MWLVKTVRVKAFEPTRVKKQFMALLLENSRLMNEYLSLMQAHQTTSKQHLHLLSYERLTQALKLPAAVVQTARDKAVQIYRSHLAMKKDGPDCKLPCFRMTTPVRLDRRCFNIIETKNKLTYVAAMSVKGGRVHVPLLGQRYQYRQLRKIVAGELKLGSVELVKRGKDFYFHLAIKKETPDIDPDYSYTPVGVDLGLINLSTSVILKGGRPCNILFQRGGNALEMRKRFATFRASLSRAGKFRRIRETTGKERRCMRDINHKISKSILAQANQTEKPIIVMERLTYIRERIHRGKKLNAMLHSWAFAQLQEFIAYKAAWAGIPVMYINPKYTSQQCNKCGFTSKANRLGRSFKCGDCGYELNADLNAAINIAKAYKNFAPGYRSGALGARDSALTLQARA

SEQ ID NO: 871 - protein, 615 aa, unidentified
  REGION 1..615: note = Table 20
METLSLKLKLNPSKEQLLVLDKMFWKWASICTRLGLKKAEMSDLEPPKDAEGVWFSKTQLNQANTDVNDLRKAMQHQGKRIEYELDKVENRRNEIQEMLEKPDRRDISPNRKDLFRPKAAVEKGYLKLKYHKLGYWSKELKTANKLIERKRKTLAKIDAGKMKFKPTRISLHTNSFRIKFGEEPKIALSTTSKHEKIELPLITSLQRPLKTSCAKKSKTYLDAAILNFLAYSTNAALFGLSRSEEMLLKAKKPEKIEKRDRKLATKRESFDKKLKTLEKLLERKLSEKEKSVFKRKQTEFFDKFCITLDETYVEALHRIAEELVSKNKYLEIKKYPVLLRKPESRLRSKKLKNLKPEDWTYYIQFGFQPLLDTPKPIKTKTVLGIDRGVRHLLAVSIFDPRTKTFTFNRLYSNPIVDWKWRRRKLLRSIKRLKRRLKSEKHVHLHENQFKAKLRSLEGRIEDHFHNLSKEIVDLAKENNSVIVVENLGGMRQHGRGRGKWLKALNYALSHFDYAKVMQLIKYKAELAGVFVYDVAPAGTSINCAYCLLNDKDASNYTRGKVINGKKNTKIGECKTCKKEFDADLNAARVIALCYEKRLNDPQPFGTRKQFKPKKP

SEQ ID NO: 872 - protein, 568 aa, unidentified
  REGION 1..568: note = Table 20
KLEFSKTQLHQARTDVKDARDALQRRGQQVERSIARDTRWVEEIDEALKNPDKREYKEGSRNLFKIKKANGGLTTKPHTPGYYSRQAAKQRQLIEKKKKTLETIERGRIRFKPTRISLHKGSFKLSVKEDNPRILVSGFEGIAPFELKIITRPQQPLVGKNKGQSSTRSAKYLQRAIRNFLAYSADALLFGMNDRESMLMKAKRPEKVEKRDAAIKKKQAGFAKKAKAIEKWLGRKLAQEETEIMQSAHAEFFTTFKPVRNKKYLAFLELVAAKLEENPAFFSPEKYPVLIRTPLQKNKHRNIHNLKPRDWVYFIQIGYQPVLDFVPTRLTSTVMGIDRGLSHLLAISVYDPASRKFTHNQLVANPIKGWKVRRRKLRKSIQKLERRIRAQKNIHLHENQMLKKLRGIESAVSNYLHEVSAGIIKTAEKHNSAIVLENLEALKQHARRKSKRMEKLNYWLSLFDYGEVAQLVAYKAKRAGIPVYDVEPAGTSQNCSRCMEAGTDSTAYVRDPTNKKRGYCQICRKQTPKSEIDADLNAARVIALCYYQKRNNPQPFGERKRFYYAKTK

SEQ ID NO: 873 - protein, 544 aa, unidentified
  REGION 1..544: note = Table 20
MNMSKTTISVKLKIIDLSSEKKEFLDNYFNEYAKATTFCQLRIRRLLRNTHWLGKKEKSSKKWIFESGICDLCGENKELVNEDRNSGEPAKICKRCYNGRYGNQMIRKLFVSTKKREVQENMDIRRVAKLNNTHYHRIPEEAFDMIKAADTAEKRRKKNVEYDKKRQMEFIEMFNDEKKRAARPKKPNERETRYVHISKLESPSKGYTLNGIKRKIDGMGKKIERAEKGLSRKKIFGYQGNRIKLDSNWVRFDLAESEITIPSLFKEMKLRITGPTNVHSKSGQIYFAEWFERINKQPNNYCYLIRKTSSNGKYEYYLQYTYEAEVEANKEYAGCLGVDIGCSKLAAAVYYDSKNKKAQKPIEIFTNPIKKIKMRREKLIKLLSRVKVRHRRRKLMQLSKTEPIIDYTCHKTARKIVEMANTAKAFISMENLETGIKQKQQARETKKQKFYRNMFLFRKLSKLIEYKALLKGIKIVYVKPDYTSQTCSSCGADKEKTERPSQAIFRCLNPTCRYYQRDINADFNAAVNIAKKALNNTEVVTTLL

SEQ ID NO: 874 - protein, 419 aa, unidentified
  REGION 1..419: note = Table 20
MIRKKFVPTSKRKVENDFNVKNVGNISKTHYHLALKDAAELIDALEKQRKEKIRGLMFDKKRQKRFREILEDSSKRIELPLQKGQRIIRYVHIEDKDKNLRGWSLRKLQSYVKDLDKKIEHRRKSLINNNPESKGSKISLHNNTVFDIKENKVRITLWEKKWYKFSGSNIVNKKGKEYVIGKLSKIRPNKYGMLIRKLLKDGDYDYFLQYPIEESIQKRNLDNIMGIDIGLNKLAAFSIFQINDGSKPLIVKIYRNQIMSMKISHRKHLYFLKGVHNKNRKIRNIRPISRRIDLYLHEISSEIVKKADEFNAKISMELLKDMKIKSKASQSAKQKYSLSLFEYKKLRSLIEYKAHRLGIPTILVDPEGTSYTCSKCGSTNTTRPKQAIFRCNDCSVELNADYNASVNIARKALSNRIGN

SEQ ID NO: 875 - protein, 564 aa, unidentified
  REGION 1..564: note = Table 20
MARAKNQPYQKLTTTTGIKFKLDLSEEEGKRFDEYFSEYAKAVNFCAKVIYQLRKNLKFAGKKELAAKEWKFEISNCDFCNKQKEIYYKNIANGQKVCKGCHRTNFSDNAIRKKMIPVKGRKVESKFNIHNTTKKISGTHRHWAFEDAADIIESMDKQRKEKQKRLRREKRKLSYFFELFGDPAKRYELPKVGKQRVPRYLHKIIDKDSLTKKRGYSLSYIKNKIKISERNIERDEKSLRKASPIAFGARKIKMSKLDPKRAFDLENNVFKIPGKVIKGQYKFFGTNVANEHGKKFYKDRISKILAGKPKYFYLLRKKVAESDGNPIFEYYVQWSIDTETPAITSYDNILGIDAGITNLATTVLIPKNLSAEHCSHCGNNHVKPIFTKFFSGKELKAIKIKSRKQKYFLRGKHNKLVKIKRIRPIEQKVDGYCHVVSKQIVEMAKERNSCIALEKLEKPKKSKFRQRRREKYAVSMFVFKKLATFIKYKAAREGIEIIPVEPEGTSYTCSHCKNAQNNQRPYFKPNSKKSWTSMFKCGKCGIELNSDYNAAFNIAQKALNMTSA

SEQ ID NO: 876 - protein, 537 aa, unidentified
  REGION 1..537: note = Table 20
MEESIITGVKFKLRIDKETTKKLNEYFDEYGKAINFAVKIIQKELADDRFAGKAKLDQNKNPILDENGKKIYEFPDEFCSCGKQVNKYVNNKPFCQECYKIRFTENGIRKRMYSAKGRKAEHKINILNSTNKISKTHFNYAIREAFILDKSIKKQRKKRNERLRESKKRLQQFIDMRDGKREICPTIKGQKVDRFIHPSWITKDKKLEDFRGYTLSIINSKIKILDRNIKREEKSLKEKGQIIFKAKRLMLDKSIRFVGDRKVLFTISKTLPKEYELDLPSKEKRLNWLKEKIEIIKNQKPKYAYLLRKNIESEKKPNYEYYLQYTLEIKPELKDFYDGAIGIDRGINHIAVCTFISNDGKVTPPKFFSSGEILRLKNLQKERDRFLLRKHNKNRKKGNMRVIENKINLILHRYSKQIVDMAKKLNASIVFEELGRIGKSRTKMKKSQRYKLSLFIFKKLSDLVDYKSRREGIRVTYVPPEYTSKECSHCGEKVNTQRPFNGNYSLFKCNKCGIQLNSDYNASINIAKKGLKIPNST

SEQ ID NO: 877 - protein, 639 aa, unidentified
  REGION 1..639: note = Table 20
MGEKVQQTIFCEKCDKEIKIQKNYLGKKDAIEKTRAKHEKKEHALITGVKFKIYPKKEELSKLNDYFNDYAKAITFAARVIDELKSPFKFCGLSISWVEDLIEKYPDKEDVKKIVIKYGYSPKQLEYALEMISNKKKEKYSYIQDKCNFCDLETEIFYLKSDGGVKICKQCYLKKFSEQGLLEKIYAAKGRRVNPSFNLFNVTKNLSRTHNNYIIKEAIQLLDALKKQRRERIVRLAKDRRRLRQFEEMLDEEKRYELPMKDRQREKRFIHINQKEKASELRGYTHRAIIGKIKILTRNIQREQKSLNKKSPINFKGSRIRLPPSVKFNKEKSEVSVTISDKISKKFEFSGLGVANKHGKRFFEEKLKQIEESKPKYSYLIRKLKPKFIALTKKRLKELVNEKDDIYDYYLQYTLEVLPEFKGRDYKGVLGIDRGINTLACLVFLEKDKKIPTSVKFFSGKGLLEFKNSRRKQLYFLKGKHNKKKKQKKIRLIEPRIDQILHRVSEQIVSLAKEKNAAIFLEDLQQPKKSRFRQKRRVKYKLSQFNFKTLSDYIEYKAKREGILVDYVPPEFTSQNCSRCAMNGDIHADTQRPYKKPNSKKPFTSLFKCNKCQVELNSDYNAAFNIAQKGLKVLNSSQS

SEQ ID NO: 878 - protein, 610 aa, unidentified
  REGION 1..610: note = Table 20
MDEKHFFCSYCNKELKISKNLINKISKGSIREDEAVSKAISIHNKKEHSLILGIKFKLFIENKLDKKKLNEYFDNYSKAVTFAARISDKIRSPYKFIGLKDKNTKKWTFPKAKCVFCLEEKEVAYANEKDNSKICNECYLKEFGENGIRKKIYSTRGRKVEPKYNIFNSTKELSSTHYNYAIRDAFQLLDALKKQRQKKLKSIFNQKLRLKEFEDIFSDPQKRIELSLKPHQREKRYIHLSKSGQESINRGYTLRFVRGKIKSLTRNIEREEKSLRKKTPIHFKGNRLMIFPAGIKFDFASNKVKISISKNLPNEFNFSGTNVKNEHGKSFFKSRIELIKTQKPKYAYVLRKIKREYSKLRNYEIEKIRLENPNADLCDFYLQYTTETESRNNEEINGIIGIDRGITNLACLVLLKKGDKKPSGVKFYKGNKILGMKIAYRKHLYLLKGKRNKLRKQRQIRAIEPKINLILHQISKDIVKIAKEKNFAIALEQLEKPKKARFAQRKKEKYKLALFTFKNLSTLIEYKSKREGIPVIYVPPEKTSQMCSHCAINGDEHVDTQRPYKKPNAQKPSYSLFKCNKCGIELNADYNAAFNIAQKGLKTLMLNHSH

SEQ ID NO: 879 - protein, 500 aa, unidentified
  REGION 1..500: note = Table 20
MNKAIELIYRISNEQQDQKAKYKRIPKDEIKKAVCSDCKEKKELVFSKGKKKICSKCYYTIFGSNAIRKQIYPTKNRKVNDNTKCLKNYARLTKTEFSAALYTANSQIKSLAQQRRKLRRNIWIKKKQLEDWKELLEDKSKRIEKPLEEGERVRRFCHIKNKDSKWERYYTIREIEKRISRLEKSIEKLGKRNLSIPQFKGNSVMLWKNCCDLSKVKDGTFKVKLYKDWFDFNILGEYQNEVLSDCLVLDKYSSIYYKDGEYYLNFPVYKKVELPEPTAKFSVLSIDRGINKMVVYLELRGTKSKPSNVHFESGGKINFEKFKYQKLRTKMFGKKHGYKKSRKFGNIVLKFSDYIAHNLSRQIVDQAKGKKDFAIVLEDLEGIKSEKKAATGKAALTRKIRYKLSLGSYRKLQTYLAYKALEEEIPVVLVEAKGTSMKCNKCGAQGKRPTQGQFVCPKCGYQVNADFNGAMNIGKKFYDEIKDKPLNFDEKQKVFKFQST

SEQ ID NO: 880 - protein, 542 aa, unidentified
  REGION 1..542: note = Table 20
MAELKKTIKLKLDLEPGESEKVNEIMCRYAEAVNFLLKRCSALLLQNRRLGKDSFEGVCSNCGQKSKIVSSGSLGQLCNECWKGKLSYPALRKEFIPTKKRRVLASKNVYLAARGISASSVDVAFSHTKQILASWFGADRKRQRQLKNLKKRLQLWKEVLENKKIEMEGKHVDARVVIPPGPKQRMPRFKHVLHPAEYKGRTLTGIKAAIEKIEKRIRRLEKEPTPPKFRGETMWLKNTSVKFLDEKTVKLALNGHKFITKFFTVDVKREKSRAFLLDRVRRILEMQEKGIRAYPQLSVENGSYYLNFPIRISTQVPEPDGSFGVIGVDRGINNIIAAAAINHPHGKPHHLWFEGGKDLRSLQIRKKWLRHKMQKIAAEQRDLGKRFRLGRKLRSMRGEGAYSKNLFHNIAKRVVSRAKELYPDGRVVIAMEDLKELRPVRGKKYERALNYMLSSFAYRRLQQLIKYKAEEAGIPVVLLPPEWTSTTCSKCGHNDPANRPGSGGFFRCTRCGYTMNSDLNAAINIANRFYEKLNLKNGRQQR

SEQ ID NO: 881 - protein, 593 aa, unidentified
  REGION 1..593: note = Table 20
MKTRNKTMPSETYITKTLSLKLIPSDEEKQALENYFITFQRAVNFAIDRIVDIRSSFRYLNKNEQFPAVCDCCGKKEKIMYVNISNKTFKFKPSRNQKDRYTKDIYTIKPNAHICKTCYSGVAGNMFIRKQMYPNDKEGWKVSRSYNIKVNAPGLTGTEYAMAIRKAISILRSFEKRRRNAERRIIEYEKSKKEYLELIDDVEKGKTNKIVVLEKEGHQRVKRYKHKNWPEKWQGISLNKAKSKVKDIEKRIKKLKEWKHPTLNRPYVELHKNNVRIVGYETVELKLGNKMYTIHFASISNLRKPFRKQKKKSIEYLKHLLTLALKRNLETYPSIIKRGKNFFLQYPVRVTVKVPKLTKNFKAFGIDRGVNRLAVGCIISKDGKLTNKNIFFFHGKEAWAKENRYKKIRDRLYAMAKKLRGDKTKKIRLYHEIRKKFRHKVKYFRRNYLHNISKQIVEIAKENTPTVIVLEDLRYLRERTYRGKGRSKKAKKTNYKLNTFTYRMLIDMIKYKAEEAGVPVMIIDPRNTSRKCSKCGYVDENNRKQASFKCLKCGYSLNADLNAAVNIAKAFYECPTFRWEEKLHAYVCSEPDK

SEQ ID NO: 882 - protein, 545 aa, unidentified
  REGION 1..545: note = Table 20
MRLTKSYKLKILPTNEQVKFLEDYFSRFAKAVNFYISKIGLLRKDYEWLSKDKQKKGKCANCGQNTDLSHKFLPANSLVCPRCYNYEVGDLFIRKKLYATRIGPNKRKRGRFDVRDATKLPGTDYALAFKRAADTIKGQKKQLGKVKKQLVFTERRLNEWIEVLENKETLLQDGKKALTRFTLPKKPGQKVERFKHILYKDNPSQGKTESQIKGIIKALDRTVQRLTKRLKTADIKFNGDIVDLHYSAVKNIIEKFTEISLDLKKQQFPIAAENVVSKKSRGWIIEKINEMKKGKPLYPLLLKKKNDFYLSYPVRLELEEPKEEKVTKAMGIDRGVNQIAVTAVIDRPTDKPHHIEFYSGKDLIKSKLKYQLIRKKFTGTKSVNKRRAKFGEKVARGSMYVLHDISRQIVNQAKEQKPIVIVMEDLKMIQGEKRVKKGSAVRERKVNFLLSNFNYGRLQSLISYKALQEGIPIRFIKPEYTSQTCSKCREIGKRTKGFFQCVNPKCNHKMNADLNAAINIANSYCKEDSFTKKPKSAILQATTSS

SEQ ID NO: 883 - protein, 560 aa, unidentified
  REGION 1..560: note = Table 20
MQKTLTKTISFKLKTDKEIEKNLDTYFIEFGKATNFFLKRMHEIRNEFFITLPKNNQKECICVCCKNRIKMIKKNISDRTFYFSVDEKTLKKMNDPEIKFDTKIYKIKPKASVCSYCFGFVQNDKFIRKQLYPSGDRKVENSLNVKNSARLSGTEFAMAFEQSKAILKSRKQQQAFWKSLIKKNEYFIQKNVEILENKKIKRDNKSVDARVTLPKSGKQRDQRYKHYDDKPQYKGKTIYQINKEIEKLKIQNNKLITRVSSFPYFNSNVIQLHNNQLTFLEDNKIRLSFGRNKSVLKFYGTDVENPKSAERYKEALKLIAKKPITYSHLIKKDGDFYLEYPMKFDVDVPEPNKNFRALGIDRGVKRLAVISIIDEPNGKPHDINFFKGDEVWKSRIKYSTMMKRLRGVRRKNRKMRLFGGKVKNVSRDIIQNISRDIVDVARQKMPVVIVMEGLKGLKEPKGGIKRKREAKLRFMISNFLYGQMQKAIEYKAYEAGVPVVYIDPRHTSQKCYKCGNTDSQNRKTQGFFQCTSCGHKMNADLNASINIANAFYDSLKNNTN

SEQ ID NO: 884 - protein, 353 aa, unidentified
  REGION 1..353: note = Table 20
MQTGLIQTARDIAKEQYDSYKNNLNNKVFPHFKGLTTVRFDKRSISFKHTPEKHFEWWANMSTTHGKVHVPITSCEKYFKLLRAHSFKCVQLKYRKNGYYLNVIFEEEKPIPSQKDFKHFVGVDRGSHNNSATLVVQDRQGNILESNFFNVQQMLEKRRRFFVLRKQLGKKKLLKEIKKSKDRERNYVHDVNHKISTEIVSIARKYKDCVIVLENLKGISKQMNFGKKGNRKGHSWPFLLLEDMIVYKAHRNSIAVRRVHPRDTSSVCKDCGGDIRRSPSIHSVCKTCKKEYNGDWLGAVNIVRRFFFYMSKDLGISGSCPKQGKDDSKGSTIAPTLVEALAHRGLMVRPMRI

SEQ ID NO: 885 - protein, 361 aa, unidentified
  REGION 1..361: note = Table 20
MELRKTIKLTPNGLTKTKEAMLGQEYDAWLACLRYGDSADVPLYSATKQQATILRHRLKKRFSMTRNYPMVLRNDVIKLEKARNAEWSRWWFRVPVKAIRGGLWCPVTMAPAHEELLADASIKIREAKLIRKRNHWSVHVVLQKDVQAPDIDAYPNILAIDMGEMNPATAVLMAPGSSVRPVFYGRKVRGIRRHHAWLRTAPQEKRAFRTVKKVKDREARRVAALLHNAAKDIVAVAKETSATIVIGDFTGGHRDTGRGRRFNRMVNSMPFHSLMSMIEYKAMWQDEPVVYVGEAYISQECHVCHAMGRRRTRSSFECSACGWRGNADMNGALNIGQRWERFQLLVGWNGADSTQPMNPAV

SEQ ID NO: 886 - protein, 359 aa, unidentified
  REGION 1..359: note = Table 20
MVLNLGLLVSKCMTARLWGLTQRKMSLLEGLAKTWKGMVSEEKSYRELRQAFPNISALYARNASFKRKSANDPIYLETQDFRLIDTKKKFARWFVRIPIRKGVAVFAPLRMRKRDSLELPSVKIHDSKLVKKNGMFELHLSVSKEVEMNYAYRSVFGVDLGERVMATAVLSSDASNPAPKFYGKNVRSIRRHNAWLRKRLGERKILRVIRRIRNTEQRTVNVILHQISRAIVDEALANNAVIVLGDLEGIRSRARGKRMNRIIANMPFHKLTEYISYKANWEGIPVITTSEAYTSKTCHNCNSEGRRVNQGLFRCSACGHEYNADYNGAANIGKKVERLLEHVSLRRASGSTPIRGAIF

SEQ ID NO: 887 - protein, 330 aa, unidentified
  REGION 1..330: note = Table 20
MDEVCSAWQDMIKVKKPYSGNRKMHPEVYSKYASHASIAEPNDPVYLDTQRMFKVIKTDNKMPYFVAITVKPRLRIWCPIKTKQYIEGNIHDSKLLKRDGHYELYLTISKEVSFDNAHPSSILAVDMGERNIATAVLFANSFTSNQSKPIFMGRNVRGLRRKYAYLRKKLGKKKLLRMVRKVSNREQRKVNDILHKISRQIDDVAKENNAVILLGDLSGIRNRTRSRRFNRIIASMPFYRLTKYIAYKANWEGTPVLTTREWYSSKLCHRCGSDNTLRPHQGLFVCHACGYQCNVDYNGAFNLAKRLGKLSSLTALSGSSAKIERLFVIR

SEQ ID NO: 888 - protein, 245 aa, unidentified
  REGION 1..245: note = Table 20
AVDIGDKNIATKVELDSAKITGVKFYGKEVRGIRRHYDWLRGRLGEKKLLGEIKKVGSKEKRKVNDVLHKISREVVNRAKEIGATIVIGDLKGIRNNRGKNGVRTLNRIVNRMPYSKLAKFIEYKAMFDGVPVVKVKEYYTSKVCHRCNNLGERKNQGLFVCNNCNLQYNADLNGAINIGRVVLSYMLRGGASLTKPLTPSEASLPMPCRLSGGEAEIGESPDFSRGECQIRIERLALYSSITVL

SEQ ID NO: 889 - protein, 363 aa, unidentified
  REGION 1..363: note = Table 20
MFLTKSKEDRIRKEFINFQKALRGDEAELYSVNEQQAERFIGRLKKKFKRKKEYPLVIRNDSIKIKETNNKLCKYWAKIPIHKKSIYVAIAFPYKDKGLLLSGKLREAKLKRHKNHWYLLIRVEKEVKVDYDISSVLSCDLGEKHLLSTVLVKNGSMTPSFHGDEARGIRRHYSWLRKRLQEKKLLKKLKEIGRKERVAINQICHEISKEAVRIAKENKSAILLGDLKGIRNSAKGKRFNRIVSNMPFDKLSKFIEYKAEAEGVPVVKMEEWYASKTCHVCNNEGKRISQGLFKCPTCGLEYNADLNGAINLFKRFDGYMLSNRVVFDTAQNLVMKQADAVQNQESPNINGGECHIVSILGAR

SEQ ID NO: 890 - protein, 359 aa, unidentified
  REGION 1..359: note = Table 20
MNSMMVAKTVRCRVINLTKSKLNALNEEWSNFQDFIELEKRDLDWIADKIPIRSVYKCQARWISKRIKHKFAMSLSNQVMQVKKTDNKLSKCWIKVPVKSKWGGIWLPVEPHCEFPDDYKIGESKIIKKTKGNKEWFEIYVVVKKEVQMKSCSNIITVDIGEKVMATVLFNGRPIFMGTKIRGIRRHYSWLRKRLGNKKLLKKVKQVGHKEQNKVNQILQDISNEIAVLATKTDSVIVIGDLKDIRKSAKKKGKRFNRIVNNMPHLKLTQLIEHKASWSGIPVIRMNEHGTSKTCSRCSEIGIRKNQGLFICKNCGYQVNADYNATKNMYNRSMKHVFVDGVVLQPKSCLEQQAQEVLI

SEQ ID NO: 891 - protein, 366 aa, unidentified
  REGION 1..366: note = Table 20
MKVEKTIKCKITDLTERKRKALEREYEGLQKYLHENEDIELYSANKQQAKRYYRKIKDGKEYPISVRKDLIDLKIMDNVVSKYWLKVRVASVYGGINVPLKPHTQIPVKGGGVEYCESKILKKDDEFYFHLTIEKTVQAKSSYSGLLAIDIGQKYLAVSVASHRNNPKFQGREIRGIRRHYNWLRKKLGNKKLKDEITRLSDKESRKVDQKIHEIAKELVEEADEHDELIVVGDLKGLRENSKNKGKTMNRIISNFPYYKFVKYLEYKANEKGIQVLKMNEHYTSQKCSRCGAAGKRANQGLFKCPRCEYEINADYNGAKNIFQRAKVALGNIPNVGVVSEPAHNSSEMVFTSGLQVERPRREASS

SEQ ID NO: 892 - protein, 425 aa, unidentified
  REGION 1..425: note = Table 20
MATLPSPSNRPARYFKSIVIVIYHIVYIVFVEVKKTIKCGIVFLTKHKQDLLNQEYNNFQHFLQTGEDLGVYSAHKQQAKRFYKVIKEGKEYPISIRNDLLKIEKRDTKITKYWARIPVKGKYGGIWVAIKPHEDFPDEYKICESKLYRRNGRFYLNVTIEKEVNVELPKENIAVIAIDIGEANPVAYTVYADGKILGMGLEGRQIRSIRWHYLQRRKEIGRKKVKHALRVIKKIGHKERDKVRDILHKATTKIIKIAKKLREQGYNPVIAIGDVKNVRKPREKGKPRNRKLNRMIHSMPSYQVKYMLQYKALWDGIPVMLVNEAYTSQLCWRCGAYGKVDGRRFLCPECGLDYNRDLNASRNILNRSLGYMLRDWAVVNQPISPPVSNAPKGLVSDAVCEGRSHRFQSVVVHHVVEVFGIHARV

SEQ ID NO: 893 - protein, 352 aa, unidentified
  REGION 1..352: note = Table 20
MKKVRKTVQCGIVNLTDVKESLLGREFENLQRFLHGEEGVELYSANKQQAERYYKKIKDGKKYPISIRKDLIDIRECDSDVGDYFVRIPVAGRRGGVNVPVNTHMGIEEDWEICESKLFRKDGSFYLNVTVEIEVGEVEEYEGVLGIDLGLRNPVVSVALPSRESEFRGLGVKQVQSKYFYLRRQSETGKGWHRRERDKVRDQLHKTTTKIANYAEENKVVVAVGDLSGVQNQDKGREMNRKLHRFPHYSFRQMLEYKCRERGIEYIEVNEAYTSQRCSRCGEEGNRNGGEFKCPNCGLEIDADVNGARNIVSRALDKSEIRPLVNAGAPVAAPGTLSVEATSGASPEAISC

SEQ ID NO: 894 - protein, 363 aa, unidentified
  REGION 1..363: note = Table 20
MPLAKKCYHCRVIEDLTNTKLVALEQEYNNLQHYLQTKEDLGLYSANKQQADRFYKIVKKTSRYPISIRNDLIRIEHNPNTIAEYWVRIPVKLVRGGLWIGLIKPYEPIPKDAKICECKLYKRDNRWFLDVVVEKEIPEKLQYQNVIGVDMGIRHIATSVELANDLTKFYGKNLNHVRGHYFWLRRKLGIKKAIDTVKKIGSHEKRIANDIIHNISRDIVNRAIETNALIVLGDIKHLRRRRQNTKGRKFNRKLSGFQYYKLTQYIKYKAALAGIKVIQVSERWTSQYCRKCNRKGIRKIQGLFQCKKCNVRSENADRNAAFNIAYRALGYISKVGVTVKIPRTFPSVDRNAMMRKEATDFNQ

SEQ ID NO: 895 - protein, 366 aa, unidentified
  REGION 1..366: note = Table 20
MEKTIRASVIGLTKRKQTWLDADYNNYQWWMIFGIDHGLLSAFKAAKGFKQKVIKYKSYPLLLQSRFIKDWFRVRETKLTKHWIKIPNSKRKGQGIWLPLHFHQPLPKRYSLKDSYLIRKNEKYYVHFCMDIPEQHVYAPKTILGIDLGLKNPVTMVDLRTKTTRFLGKKLKHIKGKYYYLRKQLGQQKKFQIIKKIKNKERRKVHAQLHAVSKYIIHEAQKKKAAIVLGALHNLQKNKGRTFNRKLSGFSHYKLTQLVMYKAKERGVPLITVSEAFTSKTCSVCGTPGTRTKNWFVCSCGYRDNADRNAAFNIGKRGLSYMLGLGVVASAQKSSTLRVNPYQPTLERVNSDEQMRGQAQKPLLVT

SEQ ID NO: 896 - protein, 350 aa, unidentified
  REGION 1..350: note = Table 20
MRSVVQCGIVALTNIKQDALDTEYDNLQKVLKGEDAPLYSANKQQAFRFYKRKKLREYPLSIRNDLLKIEIRDTKIAEFWVRLPVKKIRGGMWVAVKPHKPIDLGARVCESKIIRRKGKYQLHLVLEKEVVFKKSYSNILAIDLGSRNVATSVAFSDGHTTFYGRDVRKIRGHFFHLRRKLGEKKALKTIKKIGRTEQRKVNDCLHKISRNIVDYAKKTDSLIVLGILQNVRKRKGQWRKKSTRKVNSMPSFKLSNMIRYKAEQEGLLVVETYEGFTSRICNRCIREGNRRTQGLFECSCGYSDNADRNGAINIGKRLLGNLSSIGAYVDMPEPKLWQSMTLEATYFNRC

SEQ ID NO: 897 - protein, 489 aa, unidentified
  REGION 1..489: note = Table 20
MYAASKVVPRSSREATFGRIPDSIPSRKRSARKQSTLINKTFRIAPIDVPSKTRYVRMSFRRYVAGETTTRLPGDPSNLPPVPQSVSGALATFCVQGCEVTTTVRVKLHSLTERKARLIEREYGAFQDAVHGDDDANLYSATTQQAGKVRSNKNPREDTEQPVVLRNDCITIEHDGDTVLSSWWFKLPVYNPERERGDSIWVPVYVPEKDTHLLEDEYIRDSELVHQDGEWYVHLVCKRSVAVTDEYDDVLAVDMGATWIAVSTFISDRDTQFHGADVRRVREHYKQLRKSIGKAKVRSGAQVIERIGNKESRTVEHELHQVANELVDRASERNAVIVFGDMTGLRFDSDKGRYVNDKIHKMPYAKMANILTYKAHLDGRECLPVNEADTSVTCWRCGSQNTSRDVQGKLDCHDCELEDNADKNGASNIGKRAVGKDIQSPLSTVGAVVAQPETQVRLKGTNGEIEPANSPENVGLTLSEGSPRLQSWE

SEQ ID NO: 898 - protein, 383 aa, unidentified
  REGION 1..383: note = Table 20
MMLDAEKTIVAKIRTDELTQTKQEALDYEFSEFQAYIRGDDDADLYSATKQAADAYIDTENLRDDHEYPWFIRNDVFDVEQHDTKLADWWMKIPVSQVYGGVNVPINPHESIPDDAKVKDSKIVKEDGEYYAHLSIKQNVELKDEYDGVLAVDLGSRWVAVSVALPSRDTTFYGEEIRQLRRHHQELRTRLQEKGAYETLVSAKDSEWRAIDDRLHKISRQIVEDAKGRNALIVIGNLEGIQNQDMGSEMNRRLHSMPHYTLTQYIKYKARFAGIGVKIVDEYNTSQTCWRCGEKENTERVGQGRHLCDECGLDDNADKNGATNIGKKGLGKDIQSPLSSLGGVYEPSLELGDDDETAAQVRVRLRVDSETPSSTSESAGRAK

SEQ ID NO: 899 - protein, 163 aa, unidentified
  REGION 1..163: note = Table 20
MRRLNKKHVKLAFLIKRKHRFIKKMTIDPPITIRFSKPLSIKLFKHWIKEIFENRPNSFNLWGHPIWLGPTKVHVYNIDCYYWKTFFLDITHNGIIAIMPNDRYMDIAYVGDKFVCRHCGYVSDADRVGAYNLKKRVKDPEISLWTPRDRVKAILSLRFSFRN

SEQ ID NO: 900 - protein, 345 aa, unidentified
  REGION 1..345: note = Table 20
MKLQRTIHAKLVLDRKGKREVIAREYWAWQRQLQGFSGEALYSATKQQADRFRQRIRNQNGHGIKQQEYPMVLRRDCVKVQHQKDSVFKWWIRIPLHPESIYIPIELPHEQEPLLGHDIRECKLIRDGERWFVNITAQKEARLKRRYTTILPIDMGIRKLATTIENDKPRFYGKDVRQTRGNYFRLRRSAGKARIIKRWRHKERETVKHQVHAITRRIVEKAKATNAIIAIGDLEGIRDQDKGRRFNRRLASQPFYLFKQYLTYKANWEGIRVITVPEAYTSQTCHRCGMRGQRVAGRFSCQNCGLVCDADVNGAWNIAKRAHGLLAHETGVVLTPPGTLGEWEL

SEQ ID NO: 901 - protein, 365 aa, unidentified
  REGION 1..365: note = Table 20
MTKLTVKAKITDDSKSKPSLIELEYSNYQTYLQSGCRITTNLYSATKQQAERVLKRIKEPKPKKKYPLILRRDLIDIQKDSKFPCVYWMKIPVYPKSINVRIHTSCKYDLSSNEYSIRESKIVNIQNCWYTYITIERQKDTNIANTADNVLAIDIGCKNIAVTINTANTRPNFYGSKLRDRRGFHFWLRRKLGQKKAFYKINVLKNREFLQVDHELHQISKTIVQEAKRTNAIIVLGKLKGIRKRIKAGRRIRRLINNFPYYRLVRYIENKAGWMDIKVLEISESYTSQTCFNCHVIDKTARKTQGLFKCNNCNVVSTNADYNGAMNILQRGLGILSSLRGFLTYPEPSVIVDRNKMITRELPHV

SEQ ID NO: 902 - protein, 377 aa, unidentified
  REGION 1..377: note = Table 20
MVINFSSESLMKARKTIKAKVLELRKGKEELLKREYENFQRYLRGDKSAPLYSATRQQADRLLRRLGERFNPNKEYPVILRKDVYRADTKLTPYWLKIPIYGVKGGINVPIKTHELITDEIVCREAKIIRKGDEWLVYITVEKEVSERNPKSVLAIDLGIRWVATTVNSNNPKPKFYGKELRRVKGHYFWLRRTLALKKAYKAIKKIGHKERRVVNYILHKISKAIVKEALANDSLIIIGDLKGIRRNGRGRAFNRKLNNGFPYHRLSQFIEYKARWHGMKVVRVSERNTSKTCHKCGHKGLRVGSLFKCLDYGHSCNADYNGAMNILKRAMGYMPMVGAALTQPRTRYGEGLSPEEPRIPWLQPWECQSRTIPEPI

SEQ ID NO: 903 - protein, 390 aa, unidentified
  REGION 1..390: note = Table 20
MQLLKTLKIKIGKLSTSKSALLLKEYSEFQKAVNFSDEFIDKNKIYSLKQLTKLLYSEGKLKKIANLYSATYQTAYTQVLNVKRRNKNSKIKKIPLTLRHDTFKFYRTRNKLFKYFIRIPVFGLRGGILLPLYMRDFQEKDLENCIISDSKISYSNGNFFLHLTIKKEVEDKKIPIQKEKIALISIDLGERNPAVSVARVGSSMTPRFYRENIRAVRAHYRVLRQELGKKKLLKKIKQMKDKESRITKNINHRISKAIVEEAKQLKAKGFQPVISMGDLQNIRKASANKGRNMKRRINQWSYYQLQQFVTYKANWDGIPVCFISERGTSKTCHTCGNEGIRKRGLFTCSNCSMEYNADLNGAINISTRSLDYMFKDRASMTMPHVQNYKF

SEQ ID NO: 904 - protein, 439 aa, unidentified
  REGION 1..439: note = Table 20
MLLFIKDVLVSVASPEKWLIIGSLDGFISMEVTFEVPVSSPTVKKESFLESISKKFPKMVQWFLTVFEKEGLDFREMNMNRARKVVKELCYPTRKRSSKYNCKGAVRFPHSHYYDTAITEAIQKWNSFLTWKEKTGTDKRFPCIKNYAPSLDSQMFDLDLENGWITINTGRGEKNVHIPITVPNKSHYKKLDEEKISSIRLKRKKTCFVFLLIQKSSSPVASSPSDLGERPVLGIDLGERNLASLVAIRPSSQQTEIIEADFFDGARAKEIEHKENGIRTKLQEEGKSSEIPKRGEKSSNWKKDLCEKIACEIKEIAERLEAIAVFIGDLKAPRPRNYGTLSRRLNNYPFSRLKNAIKRHLEKADIFVELIYEGKTREEDLGTSQKCHKCGSRGERHKGGFSCPDCGLGDYNDDLNASINIAERGTKLLGKSEELGAVP

SEQ ID NO: 905 - protein, 442 aa, unidentified
  REGION 1..442: note = Table 20
MVQKRRMVYIIPVSTRITKHKLAELEHIYQNYPKLVQWFLTVFAKEQLDFTGMNIRHAMDIVEKLCYPTKNRETRYNCKGAVHLPQSHYYYTAITEAIQKWNSFQSWKQKRKRAGKPIKKKFPTISKYAPIFDSTMFNLDLENGWITINSKSINAGLNIPVTIPNKKRYQDLDAEKIPSIKLTRNRRGRFVFHLIQSMSKQANLPSSNYSDSKVTAFAIDLGERHLVAMTSVELTADDHFFNKVKQRVRFHDGSRAKQSAYIEHHIRRALQNKGKGHRIPNRTWHTKDIRRQEVLDIVNDILSTVSDARNRGKVFVFIGDLKAPVMRNKGSLSRRLCSYPRGELKDLLIDRLQKAGIDVQLVHEYRTSVTCHQCGSTNTKRIRQGLFICHDCKLRYNADANGAWNILGRGVRRRKSSKNSVLALSVPQILDKWVECALGALP

SEQ ID NO: 906 - protein, 435 aa, unidentified
  REGION 1..435: note = Table 20
MTKQKQKEKKEIKIAYQVPVSSRITRRKKTILEDIINRFPKMVQWLLTIYYKEDMSFSEKSITHSRKLVKELAYPTKSHGTPYNCKRAVYGHHSHFYDTAITESIQKWSSFSTWKEKRKKAGKETGKQFPDIESYAPLFDSTMFSLDLENEWVILHTERGKENIYIPITVPNKKRYKNLEQEKIKSLRLKRNKNDELVFIFNQTVMCSSFSPSSSSSPEGDNPSPLALVGMDLGERFLASSVTITPRNQLSKIEIQRVRFHDSSELRETNRKEMEIRKNLQNKGLGSEIPKMSWSYQNKKQERVREIVDEETKWIQKLIENNREVYVFVGDLSTPTPPNRGSLSRRLNSFPYRELKNQLKHRLKREGAHVHLVNEYNTSKTCPSCGSTDTDRVNQARFKCLSCGYRANADYVGAWNIVGRGISQLSIPELEGAVP

SEQ ID NO: 907 - protein, 456 aa, unidentified
  REGION 1..456: note = Table 20
MGYQKYKRTIKVPVHYGVTTLKTAKLNKLTAKLTYCTKLFSDIIKQMGYVSRTKLAPYEKEIAKKTKLSTGYIQQCKDKAIWMWKSYKKEHSRWEFKLKRAKKGTKWHSKLLKRAPSEPFSKSINKIPVRLDSRTVSLKTNLELKGKMVKALKEDLDISSLWLHVSTLKKRDKMMIPLNPAEYHLQVLKDAIKISDCELIKRNHKWYVHFSCEYQVPVQTMKKLRAIDLGITRTATTVLLIPERNLSKDSFLIIKEGYKKHKLEQYDKLIGKLQRLQKWIALKHIRQKRANFIEDSERKLAEQIANVSSNCLIGIGYPKRLKYGAYKGNNKRKLRQKLQKWAYSRIINYITQSSEEKGIDAIKVNEFGTSKTCSKCGSTNTIRPYQNNWSLFKCMDCNIILNADINGAVNIANSLFEKQVLFNRGALDDQARNVDDFRYHGMSTQPLKTSVGSFTL

SEQ ID NO: 908 - protein, 411 aa, unidentified
  REGION 1..411: note = Table 20
MNKITARLTYGVHLWLQLIKASDISTRSGLRKAELERKVREQTGLNAAFVQCCGDTALWMWKSYHKLYREWERRVKRARRGGDERWLRKLMKRKPSEPFSNGARRKIPIWFDYRIGSLEYSKKIKISPRLIRISTLKRSERIIILLNPAKYHIDLLERGEIKSFQLVKREKKFHVHVKVEYEVQDQPVRAIRGVDLGIRRSAATVLLHPNKPLRRGNFSVIRDGEKVRRVNELNLHVAKLQRLKKWEALKRIRNKRHRVAEYHDHLTAKLIAKISDGYIVAIGYPKGLRYENYQGNGKRKLRRLMTRWAYQRVIRYVQVKCAERGIKAIQVNKRWSSMTCHHCGSRNTERVKQSILACLNCGLIYNADFNGAINIGSSILATPRSRGAVVDPALTSDELAEETSEAGSPRF

SEQ ID NO: 909 - protein, 408 aa, unidentified
  REGION 1..408: note = Table 20
MQVVKTVKIPVHYATTKEKLNKLNRLTARLTYCIHLLSELIERYDIRSRKALRAKVKEHGIRRRTDLNAAFIQQCEDKDLWMWKSYRRRHHIWARKVKRAQHKNDEKWLKKLMKREPSPPFHGKQSVRKISPRFDVRTGCVEFAEKSKLAPLWLKLSTLELRETICIPLNPARYHLKQLRAGKISDFEIVKRDGKFYAHISIVREVQARPVKSVRGIDLGINRAVATVLLPKGGEPLEELWADEERKKQIKKFNEVVAELQQGKKWAKLRRLRYKRTNIARYHDWLLANRVASNSDGCIVAIGRTDYKRRMFKGDGDKQLRKRVHRWAYARATRFITLKCAERGIHAVTIEEAWTSRICHRCGSTNTERPTQELFHCKDCNLKYDADLNSAHNIASRCRVDGLKAGMI

SEQ ID NO: 910 - protein, 446 aa, unidentified
  REGION 1..446: note = Table 20
MRIQKTIKVPVHYDTTNTKLGILDRLTARITYCIMLISELITEETEIDRHTIRKLVKDNNIALRTGLSAGFIDQCVDKVIWAWRSYKKHHKKWEAKVKRAEERVASSRDEKERAKREKFLEKLFKREPSKPSFNEKTPCRFDYRTGNVEMGKGKFSPLWIHISTLEKRKTIDIPLNPSQYHLNQLKNAEINDFEIIKHGKKYYIHISITKMVEDKPISSIGGIDQGLNRTVAVVLLRGPFPREEHLLDAAKRDLLDKYDAIIASLQEAEKWDKLRELRNKRANVSTYYDWCLANQVAEFTEGSMIAIGDTNFRQTQFRGNGMPSLRKRIGKWSYSRQREFIALKRAENGYPTLMTDEYNTSRRCHICGSMLTTRKWVYGYSYILCHSCKAKIDADFNAAYNISHKIDATAIWMYNSSIERYNALQCRDDWLKVQMNMEGEKPHASA

SEQ ID NO: 911 - protein, 196 aa, unidentified
  REGION 1..196: note = Table 20
MDDVDTSSYGGIDQGLNRTLAIVLLDGVPRGELLYEEKRKLLDKYDEIMASLQRTGKTRKLKQLRDKRSNVSIYHDWLLANKVAEYTNGYDIAIGNTRFKQTQYRGNGMPTLRKRIGKWSYGRQRNFIAHKRAERGLSTKLLDEKNTSNTCHCCGSRLVARKYYEGASWLQCHSCGSKLDADLNAAYNIAAGGMTG

SEQ ID NO: 912 - protein, 450 aa, unidentified
  REGION 1..450: note = Table 20
MKVQKTIKVPVHHRTTDKKLSYLDNLTARLTYAVQLFCRRLNENDRVPEYRSDVREFSDHVKKETGLSAGFIQQAEDKVLWMYRQYEKEHDKWEWLMEKARDGTRWHRKLKSREPSVPNPDKSNKKIPTPFDYRTGKVQRTEDLDLTRLVVHISTLKKRETIDVLLNPSDWHKEQLEEAEEIKTFEIVHHPERGCEYMVHISCKFETETARTRAVCGVDLGINRDLSAVLIDDYGVKQFNIIRNEKSERLEELDDRISHLRREEKYEVLKKLRNKREKVAEDYDRKLAKQFSKSMPDGTAVFFGNPKEIRYHKYRGNGDKVGRKLLQHWSFSRIIDKCILKLNETGNVGLRAKEWNTSRLHYKCGKQVERPYEDSFQRIKCSTCDDELDAEFNASINIAVKGISQYSDKSIESDNFWQNMAGVTDELARTMDDSELEPRMSMEAPGLSRE

SEQ ID NO: 913 - protein, 423 aa, unidentified
  REGION 1..423: note = Table 20
MSRHVRTLKIPVHYLTTKRKLCILDRLTARLTYAVRLFCEEAEKAGCVPKTRREIRQFSNHVAEKTGLSAGFIQQAEDTALWMWRSYRELHKKWEFMLKRAEKGTRWHKKLLKREPSPSCTSKRSKLRKIPTLFDNRTGEIQRASVKLTEWVAHISTLKKGETTDILLNPSEWHRKMLREAEKIKSFQIVKKNGKYYVHVLCVYRVSSPEPKGIAGVDLGLNRPLSAVLVDEGFRFSIFRNGKQERLKELSNRVSHLRRLEKWNVLKKLRHRRLNIAKEHDRKLAKEYAEASKGYYTFIGYPRYIIYQKFRGNGEKLGRKMLHGWSFLRQAYYIVHEKAKAGDEAEIVNEWWTSSRCWKCGAKVERPKQSRIICENGHQYDADFNGCMNILQRGYASLRSKTLASIPTLNRAGATVDIAQNRR

SEQ ID NO: 914 - protein, 463 aa, unidentified
  REGION 1..463: note = Table 20
MVTTTIQKTVKLPVSPEITKRKLGRIEKLSARLTFAVSLYLNIIVENDITTRKEANRYQRVIAEQTGLSSAFVQCARDRALEMYRGYKKLHEKWKKKVKKLEKSLERARASKNKNRVKKLEKKLKRLIDREPSPPSVNKKPPIFFDRRIGEIVFSTCKKFKVWAKISTLRKYETIYIPLITYPYADDHLKWKIKGFRLLYNYRLKRWEVHVTVEREIEVHAKGYAGIDLGMKRLAYIKQVNKEGENRVLSFPKEDHRHFFRRVHELNNRIAKLQRKGKIKALKKLKNKRRNVALDFRRKLAKDVASNISNTVVFIGYPRNIREEHYKGNGNKLSRKRLNRWAFKEFGDILILKLRENENHAIFVGETYSTRTCSICGSRNTVVEDRNFYCKNCGVKFDRDENGATNILLIGMKKTGLDEVMLRAGAVVTRPLSVDDGSEELPEHTTSLQGVSSPVVGEGCSPF

SEQ ID NO: 915 - protein, 540 aa, unidentified
  REGION 1..540: note = Table 20
MNYLSDKSKSTYKTIKFTILTDKKEESILEKMTRKHTYAVRRFLEIIKKEKLTSRIKSNLLKLTLTSRNRPAVSYDLRKETKLSYRFLAQCMSYAIWLYRAYIAKYKKWEQLILKQSQYKIEKLIHEVEVDSTGKLLSIKDDTTEILDNILNDRLIEKILKSRHSFPCESINHKPKKIPVYFDNQILELEKTSDVFKLVLSTLKLRERIILNLKTSPYHFREINGHQVVGGSIYKNLNKRRWEFHACVKINAPKYFGNKKAILGVDLGIVTNATVVVLLEDKPLKQKQIHFLKVPELKQKKFFLMQRKNYLQKKLANAHPIQRKPLIKELKNVYSKITKNTKTLCHKISKIIADIAQDYLTSGYDVHLAIGQLSGIRTRAMKGNYKGGKFRGKVHSLPYYQITENIKYKCRLVGVDDKNISVLSESWTSKTCHKCDSVNTTRLSQASFKCLDCNCEFHADVNGAINIALRYIKKYFIKDLIRIKMIYLFPNKKSEGLSNPSVTLLNPQGTRSSPPCNESTGADFSAHVKVEDARKVQTLK

SEQ ID NO: 916 - protein, 537 aa, unidentified
  REGION 1..537: note = Table 20
MKEKEKEKQEDLKSDNKKHEKREDVKSTPHAPLVKGFETIPIRIKTELMSAQECERLKRITARDTRIIRDYLRIIYHNEERKVLYKGKLKPLIQSNGKVNKSLLDCLALTTSKKSKEHKIRSSVPHDLKKRYSHCSHDEFQECRNKATWTYESYRKLRSISTKEINRPQIRTRIPRQINKGSEGRGTLQVHYDPENTETKLCLKLRDKLDPKPKGEKAYPKLLLPLAYSPYHEKKLNPSDIKIVELVYHSKTKQWWAHFNKTYAVPSYQSSNPPAVVGVDLGIKKTAVAVVLNHTGKVTMDEILFLVNKERQAKILHLEKRISSIQNALDTKLQASQSHHQLNVKLSQLRNRRQSVTEQELGHAVNQLVDFILHLKQRYNLFVSIGYPKDIRNGNKHGRANKTLRRQLQRWCFRYFITKLKFKLHKQGFESHHVVAVCEKDTSQTCSRCFTTLTTRSSQGRFVCCQCNYELNADLNGARNMAKRLIKYVLKPSGKFKEKHVLRDYLSGDFHDLNNKYGGFHPLGQWLEYSPGDTSFL

SEQ ID NO: 917 - protein, 500 aa, unidentified
  REGION 1..500: note = Table 20
MRTLRVRVKTEKLTKFKKDRMRKITGRDTRIIEEYVKIIRKEEEKVIRKISKQGEIRLKVHKGKLDELTLTTTKKTNKKKRTVVPYDLKKKFPNCSHDEFQECRDVAVQLYEQGYNKKKNKKRKKGYILPPVKRARKQLINKNRFIIKHLPKGKNTLSRWWVGIRDSLDTQKRKKRTHRRLWIPLEMSEYHQKEIRKGQVKSLELKYNSQKNSWWVNFQITIIPQADLYKKKKVDSSLLPPAVLGIDLGEKIPGAGVLLTSTGKISPNHIFFWKMKEWKKRKYIYQQKIRRLQRKLAKKKNTCKDKRSNKGYQTLKKLRKRYQTLSHAYLYAFINELWKDIVELTQDYNLVVVVGYPKGVHSKLRKKVMNQDYRPQNSSTRFTRKKVHPWNYYQIVTLLRRMCLLNGLEPERILTLQEYLTSSLCSKCGRKTIRPVRGLVYCSHCHYTLHSDLTGAINIGKLFLRFLFRPRASTLVDYLTGQHFSLTFYTSFRGLNQWLK

SEQ ID NO: 918 - protein, 491 aa, unidentified
  REGION 1..491: note = Table 20
MRRNDVRTTVRLRIKTEVLTSRKRKRMEQISGRDTRIIKEYLRIIYHNEDKLSLVNEKRRVDKGMLDHLTLSTFKKTMSPQRPTVRHDFKKRFSRCSQNEFQECKEKAATIYHCQQTTMKHPAQKYSQNKIPRTQHAHNNRFILSCCPNNTIARWWVGVRDSFDSQKNNRRYHQKLWLPLSCSPYHEKKLNSGKIKSLELLYFSKKKEWWIHFTLTHNPKLYTSSGPPAVLGIDLGINKRAVSALLTPKGIINRHEIRFWSDKTRNKIIRKNENKIANLQNKLVNPNTTQYQRKDLQKQLINLRKKVKEIQVLTDHTYVNMLVKYILSLGKRYDLFVVVGLPLHIRKSHFRGNQKPNSRKTIHQWNFRRVIQLLKYKLSFQGWEDHKVMAIGESWTSSKCSSCGSYNSIRPRQSTFMCKNCGYEINADLNGAKNIAKRLISYVLQPKYNTIKDLLTDKYFPLSCFRVFPVLGQWLKTMQKFPHKSGAGVSI

SEQ ID NO: 919 - protein, 517 aa, unidentified
  REGION 1..517: note = Table 20
MARSKGVTISVKVPINWDVMTERTKQRLRQTVGRDTRVIRAFLGIIEQNEDKLLTGNNRNRIDDGKLDQLTMTALKVKSGAIQRTSVPHDFKVRFPRISQNEMTECRQTAVALYKSYLKLRKKKGRRASRPTSINSSRRIPRWIFSRRFILVEKDVSASQWWLNIIDALDSNRDERSHHDRLSIPIKISPFHLNQIQRGKVKAIQLFTDRRRKWWVTIAVRILIDESSEEKFPVAILGIDLGIEKAACSTLLTPEKTRETCYYVQKDKVKIIKKYDRLVADLQREMYTRRNNKLPSDRVAEKLRRMRSKRENVAREYDRFLVRQLLDYISELSKKHTLYVAIGRLKNIRMRAKRGNYQGRRFRGMIHSWAFARITDSLKHGLAQLGWKIDGKDARFRAVPEGWTSIMCWKCGSKGQRPKQNYFHCPSCGYGINADLNGSANIAARMLTLTKSLHSVRGLGLWTRALDKARCARLKAQKKMPSSQGKSLLSEKEPASGSGESAAVHFVQSDLASFSDG

SEQ ID NO: 920 - protein, 556 aa, unidentified
  REGION 1..556: note = Table 20
MGRSNGVMTTVKVPVRWDAMTDRQKTRLSRITSRDTRVIKAYLGVIERHERDLLFRKSKRRLDAGKLDELTLRTDTRAVPHDFKDRFPNISTNELQECRETAIAMWKVYLALGRKRPLQARGYSSKKLPRHMFTRMFKFTYTPESTIKHWLILRDSLDSVREGRKTHDRLAVPLSPSSYHLNHLRSGEVKSIQIVKDRNRKWWVLFKVKVRLEAVDGRDRPPAVIGIDLGIKKAVCSAVLTQKGLRHIRYWTDREKARHIERYDKMVASLQQKRDTSPSDDVTRRLRTIRSRRANISFDHDRVLVKRLAEHILELSQEYDLYVAIGRLKGIRNRARKGDGKGRRFRGMISRWSFARITNSLQHKLSANGFDPKRVRAVSEAWTSIKCHKCGSKGYRPKQSYFLCHTCGYQDNADKNAAINIALRLIRLIPSLKGENGLGTWLPPVRRASPKTRRTRSKGVSSAPEKPPASTAGSSVADCTDQTSLEGPASSTDRAMPKTMEKPSAIVGSGDHDSTVQRTEATSVGRSHAPVSHGKTRAHPAGEVLPVAGDGSHEEG

SEQ ID NO: 921 - protein, 611 aa, unidentified
  REGION 1..611: note = Table 20
MARSNGTIVSVKVPINWDCMTKRQRTRLERITARDTRVIKAYLGVIEHHKKALVVGGKYKNIDFRLLDRLTLTALRARDPSKRRLSVPHDFKARFHYISVNELQECRDVAIGMWNSYLRRGGSRPLKSTSGKLKKIPRNIFPNLFKLVHTPDLKIKYWLEIRDSLDSKRIGRTIHAKLTFPLKISPYHTNQIDRGEVKSCRIVKDGSRKWWVVFAVKVKSKSFLVPAKKPLAVMGVDLGISRAACAVVITQNGVHHTRYFHQEGKEKSLAKSERRIASLQREMRTRQNMSVPCDKVTKKLRDMNHKRTAVREEWDRVLVREIIDYALELSAKYDLYVAVGNPKGIRNIATRAYSRGRKYRGMIHSWAFARIISKIEHAFSQIGWTTGRFTSRFLAVYEGRTSITCSKCGHRGVRPKQSLFICHTCGCRVNADKNGAINIARRFIRLNPKLRIGHSGLGRWLFPKWKKPSSKAARRGKHASKRKSRLSQRSPASPEGESAVVRFVQQDLLSFGDEAGLSDEDPTVGNAAEMPSVMESLDSPRSGGFHVSKQRKEVTFRERNQVPMTSDKARANLEYSDTTEVSDDSHGSDGTQELQDECELYSPSSERNHTP

SEQ ID NO: 922 - protein, 521 aa, unidentified
  REGION 1..521: note = Table 20
MQKRDSKIIKKYLGIIKKENDNLVTLSKRDKYQIDTGLLDRLTLTTKSRSKVTYDLKAKYPRISTDELQECRESAVSTYKSYLELLKIQNAKLPIDKPVKEQGSFSRTILYNGGARGRFSLNNVVFSVRDSMDTNWSIVNGVKKRVTHDRLKIPLKLSKYHEEQISKGDIASLKFSARDGIHYANFSINSQVETQDLKGKPKAVIGIDLGIKKTAYSLVMTDTGIQHRKTWHSDNKFKELSRLEDLIASLQREYYHRINNSIPRSNIPKKLKELKNSRKIISLEYDRLLVKELVEHIQEVTQRFNLQIGIGKLKGIRRNGGKGNGKGKKFRKRLNSWAFFRFTKMLEHKLSEIGLKNKLFAIDEYWTSIFCYKCNTKGKRPTQSFFKCLNSKCRVRNNADFNGAMNIAKRTVKYRKLTPKSTWSKVGLGRFLRPYQAKGTKNTPKAHSRKRRRSPNTAKKKVVISVPVSVVTSHQLSSDDINFDMHDGIENDVAMVRKYEKPILVEPASLNKPSGRKRLSP

SEQ ID NO: 923 - protein, 485 aa, unidentified
  REGION 1..485: note = Table 20
MKRKNQLITSVKIGIDNEKLSKSTRQRLRQIMGRDTRIIKKYLHIIECHKYDLVSKIELKRTKKSKKGSNVNNEKKFRFTIDKGKLDLLTATTEHRPIVPHDFKAYFPRISLNEMKECRDTACGIYLGHLESKSKQENSGKPNINKPLPRSIGYRRFKLNIDSYIVSLMDSMDSNLGINSNNHKKIRHQYLDLPLKISSYHRTQLQKGDIKSLRIKRVKQKYLAIFSIKQTRFSGEHLANKKNLPIAVLGIDLGIKQDVAISVLTKYGIVQQQFITSNLIRNTKKSLTKLERRYSNIKNSIAKDKSNSNNDVDGKLKLIRDIGNKRSRLKFEINHQLTAELIYFIKYVAVYFDLYIGLGKLKGIRKSAIKGKATKNHRKRIHRWAYSQFTDLLEYKLHKIRPIIRFAKVSEAYTSQTCWKCAQRGNRPKQDYFVCRNSSCGWRGHADFNGATNIAKRAASYFDLTPNLKPFFMTNGESGLSPVST

SEQ ID NO: 924 - protein, 560 aa, unidentified
  REGION 1..560: note = Table 20
MARNNKITTSVKVLIDTSKLSYKDKKKLRQILGRDSRIISRYIGVIENNRKELVEYKEKKNGKISIKIDKGKLDQLTCTTSERKIVNHDFKIQFPRISLNELKECRDTAVGMYLSYLELEVKGNASIPTAKSSVPRSIGYRRFKLCYHERTLTIMDSMDTNPSMINNGKRKVQHNKLTLNFDLKNYHICKIMEGSLQAVRIVRSRKKYYAIFAIRHEVKQLTSKFYPKKSNKELAIAGIDLGINRDAVISIITVHGVSHHKFIKLERIENTKLSILKLDKRIAEIQHKAAKRSTDNEQTDGLYSLLRELRSERAELKYEISHQLSAEINKYLLSLTDQYDLWIGIGKLKGIRRGQRRGNGNKRHRKRIHRWAYGQLTWMLEYKLSKSGYKRRFLTIPEGWTSIKCWKCNTKGKRPKQEFFKCKNRTCKWMGDADFNGATNIAKRAAKYFKLTTHLKSSLFEVRELGSAEPKTMKVFNKINTRGSSNLSDNISDRNAVFSDLTVDKNHGNTSSLISFFETSSEGEDDRSTDLLNQAVDKNKSRTLLASQEVVATPDSVCGT

SEQ ID NO: 925 - protein, 635 aa, unidentified
  REGION 1..635: note = Table 20
MTYISCKVNIDTEKMDKDTIKRLHQILYRDSRIIRDYINIIKENEELLVINKKVSDVELDKLTATTENRKVVKHDLKSKYPRISLNELKECRNDAKGMYNSYLALKRKGGKYPNVHRLVPRTIGYRRFKLDTDMMVLTIMDSMDTNPKMIRKGWFKAYHNTINIPIIMSNYHLERIDEGELKAVKIFYDNNQMKVALSIKVDVEQLPKKTTTKPIGVLGIDLGINIAASTVLINHKGRITEKKAFNVPEIAKNYDILENTLSNLMRSKEVRMLEKLINNLKGKIIQYRNITQFNPQNHLTSLNTILIELENISFNNLDTIVNESETLINDLQAVKGNLWKVINRFLSENSLSKHDRKKVTHSRKDLKLIVNIFKTLNLIKLIKSNYDRKTDGLYKKLRDLKNKRAKLKLEIDRQLINQMIIYIESLTQNYDLYVALGKLKNIRYLAMRGNGNKAHRKKIHRWTFSRVTSMLEHKLSLLGLKKRFLPVNEGWTSIMCHKCNNKGERPRQSYFICKNKSCGWKGNADTNGAINIAKKLILIFRLTQSVMNGKNGLGKYLPVKAKSTPKARKRSPRRKTTGKKPLTQWFQDDLSESAETQLPGAGHTNREVNSQQSKQVLGTKGSKMMATSGWDGKNA

SEQ ID NO: 926 - protein, 711 aa, unidentified
  REGION 1..711: note = Table 20
MAKKGVITSVTVPINYSILGKYELRRLTQIVKRDTHVINKYLGIIQFNQKYLLEFKKGQYSGKLDELTLSTHYGRKPQYDLKSKFPRISHNELLECRDGALGLFKSYIELSKDEGNVNTGFPRINNLTGRQINSRRWKLDVTNCTIRIIDSMDSNPKMIKDGKNKTYHDWINIPIKLSSYHLEQMNLGKLRTIQIVASINQNRENQFSIKFSILHDVNQLPRNTKGDVKSKPVGVIGIDLGIKIDITTAMITGKGVIDYKTFKVDEDIKNSIRKTENTLKELQRSSQIRKFDNFVDTYVDRRNKIIQDLSSNSFNLYLNKISLHQMFVINDKLIQIRNAFKYDNLSSFDLKSRAEIIHNNRIPLLAYLESILNAIKSIFDVNYDNMSKDEKSELRKIRKSIYKTKDSLETMKLLLTPQQLYNTDSIFKKLRDMRNKRKKLSIDADRKLVVEFNKYVEEISKDYDIYISIGKLKGIRNRSRRGNGNKYLRRLVNRWTFYRITNMIELKMAKLGLKKRVLVISEAWTSKTCWKCNTRGDRIRQNLFQCTNKKCIWRGNADVNGAINIAKRLIATFKLTSFRNRGVRGLGMYLPVISSKKKKYGKARSVPKNHNGSPNSLLNNKNNGNAGTQSTHSSLNEFFENDQPVVKNHGKTDFVETSKKRSRRTHRSNGTEPNSTEAILAKTKKVKVMATSDIGLQNVKNLYLKKKINNG

SEQ ID NO: 927 - protein, 1296 aa, unidentified
  REGION 1..1296: note = Table 20
MQDKSFKNVIFGKAHQVFKAKVAMASSSKLESQIKTFKVRLDADIKPIAEALQDVYTTISGTEESSLYRYILSLKALGFSFRPSGDLVKTESALAGEKNRQFLQAFTDAINDDSLPSTFSLIGVYKTLITPRRKQGGIYPEYDLNALTSHFMPRFGGNMRNGLENHFGQFVVHFCDKLLNAHPGWEALNSAIEKHEVLPVFDAVATEQSIAIPFKLSLQQVDDFPVKNSTIFYNPDYGLPDNSFNLKKGEKDYLLHTATALAMFDGMETVLTKSSEAAKAAKDNLTTTNANALSWLLSKGLAYFKSSDAKQIATDYGCPETVAEAIKSLVQNIPLNHALGQGYSGFRTSLQGQIDSWVSNYYNRLYAIHEVLSEDGIESIELPEFLGDARAEYFFNFMPLGFDDLKTQLESAVAKSASIKQSLSVLAGIEMAPKGFDVVNAIKDLDNYQEELEALMGMLNQLHNRIKQEIEIAEKTNRKDDLTFAKQCHFHLKSFDFDKILQRKVERIDFVSDIDQKSRDMLELIHHSHQALSQILAQTEAFTTPVTMRIKRELAHIERLKAEGLTPEVMAKRHVWSYVLKNVRNLSDETKKRAAEWLKELKLFTPPKHREDKKKPHSTLNKFMFNNEGDIYQSLFSRRRNKPYDINLKLDPYEDSLKLLSYLEKEALKSIGDAMRNQAKEVYLRDWVMIQRIRFNLEMDRLPESVPSKLIFDTGITNTEGFPVQYRLALEAAEVVGGDLARKCLNHYISLISRAMSFVFRESFAIKMGFTIDSDIGMLWKAKDKPWTLPKTASSNPVLMALSKDGQTIDTKALKAGLPDFVYRNFPHELYIPTPFATGQRMDEDNIYLFAEKQGSLVKKKKKDNVARVVAKSSFKKYFLDAMLRDDAELSRPSFLFEGRVKQVVSIETDVGGKVTAIKAHLSEPEWVAYLAQPIKFHPSCLSDGESLPIFDRLVAIDLGEVGIGYAVMDVKTGDVLAQGNKRLPSLAKLPSMVRKGRKSRQPRQGYKQVFSTKLIEAREHAVGELKFYIDNLMNEYLAFPIFESSVPNLQSGSREIETVYKNLMQYYTFSSVSAHKVERKSNWLSADKWEHPYLLVQEKVEKKGKFVVKMDKAGNPVYKPLNLFPGATVNPAGTSQTCSCCGVNAIDEIRNHFANSEEKTVFVNGNGEFTLSSGVTLKVEKRFAFDDLPEEEVKDLHRRNRRSPWGKKYRAGNYNEAELLKMTREHLRRPHDNLRSKDTSQSQFHCVNIDCGKHLHADMNAAINIGKKWLATTNVNAGFSGLFAKSLSTFGSSSR

SEQ ID NO: 928 - protein, 601 aa, unidentified
  REGION 1..601: note = Table 20
MIRTIQVKLHNLSNYKQNLLDNLFQNYTKAYYEMLNYAKENLDVIEKDYKLKNGSYKGETIAKFFKGTEIHKKYNLEPLGDSLKKDVGCSIASYLELKQANADVSFPETNKDRINVLYEKINELLNEISFNTSLSKEQCHNLEQEIKNLYRKINNINKYRPISFARYDFNRDACLLYNPKKNSYYAKLYVFNKITSKEHVKLYKQKSIKHKDDIKLYYLPTLEIYKENRSIAYIIVPLAFGKWHERFLKQARKRKMKFCAMKLIKRGEDFYLDIPLNEDIETRAEKKKRYEEQNKNGEVLRKIKKKKKEFKNKLGIDLGITNIATIAVLDKDNNLLFSKQFNGNEYKEKFEIFVKKLAIMQMHGSSKYPRDKKYISGILHRVANEIIDLSKKYEAQIYLEDLNIDKSHERIKSTKKFENLPNKLVKRVVKNINRWAYGQMYRILVEKCEREGLPKLIRLNPRYTSENCSRCGHNEKVVSKGERVNRESQERFVCKNCGLQINADVNAAINIATKYSKVVSFKSKEVNGYKVINHELFDFKGIGKDNIEALNDFINKLREYKKEYDKIPFEIRKSDKKLRGQYKILKDVDREDYENYYNVED

SEQ ID NO: 929 - protein, 399 aa, unidentified
  REGION 1..399: note = Table 20
MRRTVKIKLEVEEQEKLQETIRQFKYACNQVVEKGWNEEGLKTYNKNKLHEETYYQIREETDLPANLVTQARDRASQAIKGCVEKLKDGDTVSKPEFTSDSIKYDKRTFSIWLEDKRATFSTVDRRIEAELLYDEEKEYYQKYLSESWNITSSTLEKHSYEDGEPYYLHLGVEKKVERKEEFEEPRVMGVDLGVDNLAVTSTGKFWSGNKLNHQRRRFEEIRGKLQEKGTRSAHQTIQHMEGRENRYSCDTLHRISKEIVEHAERKDVDVIVFEDLKGIREDISNRKKFQEWCFRKLFKYVEYKAKEKGIRIEKVKSSYTSQKCSECGHTTKGNRKGSKFKCVNCGKEIHSDYNAAKNIGNKFLRNGQKSSMRKSHSQLALKSGTVNLNGDYTAYPVTG

SEQ ID NO: 930 - protein, 400 aa, unidentified
  REGION 1..400: note = Table 20
MASDTEYYRRTAITRLDGLSHQDHDLLNATVEEWLDGCNIASNLAWKNEHTQSGVRSVAKDAVRSDTGLNSQHSILACHEVSSSIQSCIERRKNGEKATQPHFTLKSITYDRRTLTVCPEKEQVSLTVLDDHSRVRAYLTLPSNEDGYQYQYLDDEDWEYTESTLHYRDGEWYLHLGYRKEKPELDQRVGSTTQNGTVLGVDLGVNQIAVTSTARFFSAGKLNHARREFERTRGNLQECGTQSAHRTLQEVSSREDEFVKHILHSVANGIVQEAIEYDCDGIIFEKLDGIRKELPEADWHSMWAFRKLKKFVEYKAEERGLFVDTVNPKNTSKRCNECECVRDGNRHGDEFECRRCGKQNHADYNAAKNVAELYLLRGHQPSRGRSLSQYALKSGSRTPS

SEQ ID NO: 931 - protein, 414 aa, unidentified
  REGION 1..414: note = Table 20
MAATYVRRTAITRLSVTREQRITLEETIAEWKRGCQLATEMAWNRCHTKQDVQPLAYDAVREKTRLGSQHAVLATHQAADAITGCVERQRTGKKTSKPRFTAPTVTYDARTMTLFDDGTVSLATVEDRVRCPLVLPDDGDGYQWQFLDTDEWELTESTLKARDGAYFLHLGFRRPNTGQTTAEDGTVLGVDLGIENLAVTSTACFVNGRELTHRLCEFERTRAGLQQAGTRSAHRTLDRASGRQLRYVRDVLHNAANEIVGEARRYDCDVIALEDLTEIRTQTRAAWGHRWAFRTLSEYVAYKAEAVGIAVERVEPANTSRRCVECGFTAAENRRSRDEFRCQECGAAANADYNAAKNIGMRYVRRGHQSSRRTGDGRLALKSGTVTPNGGFTAYPDGFEAEFTDESAPSEAKL

SEQ ID NO: 932 - protein, 542 aa, unidentified
  VARIANT 163: note = misc_feature - Xaa can be any naturally occurring amino acid
  REGION 1..542: note = Table 20
  VARIANT 86: note = misc_feature - Xaa can be any naturally occurring amino acid
  VARIANT 265: note = misc_feature - Xaa can be any naturally occurring amino acid
  VARIANT 514: note = misc_feature - Xaa can be any naturally occurring amino acid
  VARIANT 350: note = misc_feature - Xaa can be any naturally occurring amino acid
MAWEVTRTVRIRLDVPDDRKIDLHATNDKFQYCANRTSDWAWRYPDEDCVTSKSEAEDAIYDDLREETDYLHANLVQKAIKRATDXEDAIYDDLREETDYLHANLVQKAIKRATDDIDNCVDRLADSKNTSKPEYDTFSIVYDKRAATYYRDKVSLATVNGRXEYDTFSIVYDKRAATYYRDKVSLATVNGRVECEYDLPEYTKGTPHGEYLLNDDYSFSTSTVHYDSEADEFYLHAVMERELDVERPEKAEHSKVLGVDCNVDXHIAVTSTGAFVGNADYLNHQRREFEKRRASLQQTGTRNAHLTVQRIGDRFSRWSKDYLHQCSKAIVEAARRHECTHIAFENLEQXHQCSKAIVEAARRHECTHIAFENLEQIRERISDEKKFQQWAFNALQTMVEYKAKACGIVVETVNPQYTSQQCSKCGCTLEENRNDQHFECLDCEYTANADYNAAKNVARKLTLKLQRGQKSPVGGAFCQYALKSGMMTVNATEVASDTPVSVERESTGKPTPEXNATEVASDTPVSVERESTGKPTPEGVGS

SEQ ID NO: 933 - protein, 423 aa, unidentified
  REGION 1..423: note = Table 20
MENPPRRTVIIKLDVSSDDADALHQTKDQFLACANRTSDWAWRRDEYCITSKNKAEKALYGELKEETDLTANLVQKGIRRAIGAVTHGVNRLKNGKKTSQPHFQSWSVVYDKRSATFSDDHATLSTVDGRIDAEYVIPPKSEREDTPFGRYYDPDEWDASHATLQYDEIADEFYLHVTAKYVGGEDDCEIQEVEHDDDGPENGVVLGVDLNVNGAFAVTSTGAFIGSADHLTHRRNEFEKRRGRLQQVGTRSAHLTIQSIGDRFSEWSLDWLHNRANELIAEAERNGVNGIIFENLKHIRKRISNGAKFQQWAVAKFIELVTYKVEDTDLFVDTVNPAYTSQRCSHCGFVHEDNRSDKEFECLKCEYEVNADYNAAKNVANRYCAYIHRGQKSRDGWASSQLALKSGTLNVNGDFNASPHIEG

SEQ ID NO: 934 - protein, 519 aa, unidentified
  REGION 1..519: note = Table 20
MVVDAYRTAPLPTQVSGDTVQALHDTAEQYYYCQNQTTDYCWPDHPKKPSDLITTKREVRDEIYARLKSETDLNANLVQAAIKQTVENIAGLKTDWKKGRRISKPEYDSSEEGWSVLFDKRSSTFRKWKATLSLVDGNRHETQFILPESLDNPYGGYVLSDVFEYQTLRIVYRPDSPSDHEFYAHVQTRTEVEPAPLPHPESIPNTTAFGELVGSAWQESIRSRGNGSDTQKHQRVLGVDRNVTGYSVVTSAGGFHGSADHLNHRRTNWENTRAGLQQTGTRSAHRTLQSMKGREWRWFDQLAHSIANAICVDVIRVRATHVVFERLLDIRQRISNKKEYQQWFFKRVEDYVEYKLEPYDMVVDDVSGAYTSQACSRMDCSHVARSNRSGKEFECGECGYALDADLNAAKNVAYRYVREEFYGDSVAEGENWFDVVEQAEEADTGVSESHKSSSGRAASEATEDTDSQPAPMTTIVLKSGLLELDGRFAGEEWPQPATVDVTAESRTSPTLNEATSVAE

SEQ ID NO: 935 - protein, 442 aa, unidentified
  REGION 1..442: note = Table 20
MVVEARRTVRIPLEVPAERIDDLHATSHWYRYCQNRTATYCWPTRPTRPSDLTTNTREVERTLYDRLREETAGLHSNLVQKAIKDAVAAVSSCQTHWKNGDRISKPSFDARTDGSYAMTYDKRAATFQKYTVSLATVNGRVQCRYRLPTELAGTPYERYVLDRRWSFSTSKLVYDGEQFWLHAVLKRTYTDASTSSTPRSDTPEDLTRVLGVDVNVDGYTAVTSVGGFHGNADALTHRRQAYETLRAELQQTGTQSAHRRLQARRGVERRYYTQYCHDVANEIVADAVRVGATHVVFEDLTRIRDHISNRPKSQQWLFRQIQTYTAYKLAEHRIDVERVDPRETSIACSRTDCECSDDESRAGKEFRCVDCGYAVNADYNAAKNIGLRFLEASESIPTGHTCSSGRATSQLALMSGTLTPAGEFVSREWVSTDKPTASAVGR

SEQ ID NO: 936 - protein, 518 aa, unidentified
  REGION 1..518: note = Table 20
MSQQHRSTDSSIDAIPVDVANTQSGEVDPAEVPEKITSLTRKLASEQPPTNPLVVLKAARWWYIHGKGGTDPAFRWAIEWVRHLATDRPSDVERFDEFLESLVTVGFADENAVSDEQRDALCRTVEQYLYCANRTADYCWSDASYTECKTNKRQVRDALYSELREETGLQAQLAQAAIRRAVEAIKGVVERWKKGQRVSCPTFTAETMDYDMRSATFYRRKVSLATVEGRVEPSFVLPADSPTPYERYVLFEDYEFRESTLRYDATTDEFYLNISTRRCEVDGDDAEVPADTGHPDQTVLGIDLGVNSLAVASSGTFWQGDEYDHWCREFEKRRGEMQQRSTQAAHNALLRLGKREEAWRKQYIHTVTNEIVAEAAERGCDVIVFEDLTDIRERLSRAKWHHVWAFRRLYEYVSYKAPEQGISVEQVEPNHTSQRCSRTDCGFTHEANRHGERFCCQKCGYEVNADYNGAKNIGLRYARKRTHRLRSSPTSGSGDAPVDVRVNGGTLNGESHRPIAGD

SEQ ID NO: 937 - protein, 393 aa, unidentified
  REGION 1..393: note = Table 20
MEDRRTTAIELDVSADADRLLQETVAQFEYCANATAEWCWADDGGHTVTRIADAERRLFRRFRRETALPPNLVQQAVRRGVEAVKSSVARLNDGERVGRPGFASGLAVYDERDADLDREGASLATTDGRASCDFVHSTNVEETLDRLADERCEFRGGHLECRDGDWYLHASTVRVDASALESDGEHGTALGVEVGEENVAVASDGTFWSTDGLANGCVAPAGDSQSPTGSGVKSMDSAVENETNGAVEEANSAVEKGTNEYGRAELYLHRVGNELVTAAVEHGCSHIVFEDVTHDSEAGTGASATTSKLLRQYVEYRAAEHGVEVARVTSESAAHRCSTCGFEHEDNHDGERFECLECGFQNHAAYNASRNIGASYRRRQQNATETNANAAKQ

SEQ ID NO: 938 - protein, 423 aa, unidentified
  REGION 1..423: note = Table 20
MEYRRTAVIKLDTPEGADLLLRETVEQFKHCANTASEWCWHGRRQIPEESGCQPETSRVSGDDDGYHVTSKAKAERALYDQLRDETDLTANLVQKGIRRAVEAVKSGVERLKRGENTSRPHFSADSAVYDKRSATFHRDHVSLSTVDGRIECDYILPDNSENPPTKYVSDEDFEFRMAHLQHRDGDWYLHASMRKVEADDEPESDSKHRTVLGVDLGVNNIAVASTGRFWSADEFNHWRREYERRRGSLQQCGSRHAHEDIESVGRKETGRFEIFLHSVANELIEEAVEHDCSHIVFEDLTHIRENILKATWQHVWAFRRLYEYVEYKAEEYGVEVVQVDPRNTSKRCSTCGFTHSDNRSGEAFCCQKCGYENHADYNASKNIGLQYLRRRQNANDGGAPVDVRLNRGTLNVNGEYSPTALSS

SEQ ID NO: 939 - protein, 416 aa, unidentified
  REGION 1..416: note = Table 20
MAIRRTVPVKLDVSDSAAESLFATILDFRFAANCAVDRARKENGYVETTKQGLHERTYREVRERVPDLQANLVQTARNRAADALKGVVARWKDGEYAELPTFTADFIDYNKRAATFHDDHVSLSTVDGRIDAEYVLPHEDDLNDTPHGKYLFSGDFNIGGATLHHRDGVFYLHVRTKADVDDTETSEHPTVLGVDLGIDNLAVTSTGGFWSGGLLNHRRNAYEKLRGDLQRTGTESAHRTIQSIGDRESRWAKDLLHNVSKELVAEAIEYKCSAIVFERLNGIRNRMLGAKKFHVWAFNQLYEYVEYKAEAVGIDVTKVPPQYTSQRCSACGHTAKGNRSNGDDEFGCQKCGYELHADYNAAKNIGWKYVRTGQKSRSGRAARQLALKSGTVNANGDFTPAENIGQSGSPPTSTGL

SEQ ID NO: 940 - protein, 411 aa, unidentified
  REGION 1..411: note = Table 20
MGVRRTVRIALEVAPQSQAALHETATQFLWAANSVVDAGWGDDDIETDRQTLHERTYEAVREATELHSHLVQAARNRAAEALTSAVARREQGQQAGKPTFTSPTIRYTTKSATIDTDHATLATVEGRVRVDFRRPTTPAGTPFAYLDDPDATVTGADLVYDEVVDRFELHVRVETTAAAGQESEATSQRRAQTDSEHRTVLGVDMGIEALVVTSTGAFWSGRELTHWRREFERRRRSLQERGSRWAHEAMQRVGRREAGYYDDVLHTISKGVVEEAVAHGCAAIAIENLDGIRERFPQAARFQQWAFRQVQSFIQYKARAVGVEVISVNPAYTSQRCSRCGHTASTNRRTRSAFHCGDCGYSVNADYNAAKNVAMRSLRSAQMSSVGGAPVGVRLHSGQLMRDGTYVPDPS

SEQ ID NO: 941 - protein, 424 aa, unidentified
  REGION 1..424: note = Table 20
MEVKRTVPVKLDVPEERRDDLQQTIQQFNTAANYTIDHGKGDDGDLILNKSTIHDEVYHDLRDETDLPANLVVRAYSKAVEAMKSTVTEWEKGNSRPLPSFDEPSAVYDKRTLTIKDEYATLSTVNGRVEAAFVLGEYQRSYLEDDDYEKRMGTLHYRPDEDTFYLHIVIQKEVDQRDGDRVLGVDLNLKNVAVTSTGRFFDGGELLWGQNHYFRVRRSLQDKGTRSARQALRRLSGRENRFVLNRLHNISRGIVEEALRHDCSYIAVEDLTHIRERMDAHNERLKRQMHNWAFRELQEQIAYKAAEYGIRVESVNPAFSSQTCSKCGHQSSTNRDGATGWFACNECGYEVDGDYNAAKNVGLRLLALPSGKRPGGLGNGQLALKSGTLNVSDVSNVHSSLEFERESTDKPTASALSLTHNSIL

SEQ ID NO: 942 - protein, 281 aa, unidentified
  VARIANT 202: note = misc_feature - Xaa can be any naturally occurring amino acid
  VARIANT 112: note = misc_feature - Xaa can be any naturally occurring amino acid
  REGION 1..281: note = Table 20
MDSPSAVESTEAWNSPFRFSVPIAFESLTDIRKRMAGAKRFHAWAFRRLSQYVEYKAEMFGIEVEQVSPAYTSQRCSSCGFTHENNRRSKHQFVCQKCEYELNADYNASKNXIAFESLTDIRKRMAGAKRFHAWAFRRLSQYVEYKAEMFGIEVEQVSPAYTSQRCSSCGFTHENNRRSKHQFVCQKCEYELNADYNASKNXPREQSTVETPVRVPEVRVRTERGLQREQEHRSQTSQETPLGAEVFGWRRTLSVCATVRDAEPERRVPRLRRFDGRRGVH

SEQ ID NO: 943 - protein, 360 aa, unidentified
  REGION 1..360: note = Table 20
MKLVKSYTAKITGNAEKESKLLFNLSILQQVSEYVFPLGFDYWFDFKTMYHDCRERFPELNSKILQNFLQLYRPIKGKKSPKKVISSIITLDNQNFNMLFDPDTKYTNYWLRFGRRNYPLRGKRILSRIKDVSGVQECRIFSRNNNLYCKLTYVEEIPEITADPAKSVGIDFNTKRLASSNNKIYKMDRWFHRKSEYKKNKGKKNINNYTKNFVHSLANSIIEDLIFTGQEVLVLENLTDLRKSSSKKNGTSKGKAVNYMINNCFPFSMLKQILEYKCLESNILVETVSPAFTSKTCSRCGSQETIRESQPRFKCQDCGFQLDADLNASRNIKSRYTSLNGLQVNPARLCSQRQAAHLNA

SEQ ID NO: 944 - protein, 197 aa, unidentified
  REGION 1..197: note = Table 20
MSKEIVLGVDLGIKRSISTSAFLNYGDYTMYDAVTKHWGEANSWIEEWIVSLSTQLIEYIRTHNVNIMAMEDLNIESMTISENMKEYLKALKNGIELVAKENDVTIKYVDPRNTSKLCSNCGKIGRRKRRDFKCSKCGFTENADVNAAKNIGLRYIINEARETKFLGINPSGRYYLAMSYGPKSYEDFEWVRKTIET

SEQ ID NO: 945 - protein, 161 aa, unidentified
  REGION 1..161: note = Table 20
MAEVPYNMLDEAIRDSSTKSCSEELRGISSKRKITSPMLTPKVDINSNGQVIYEKKKVTPHENQIQIFVFVLPEPPHANLTTGVGLNPERHRKINSRELMEDLKRVKVVGEAYTSKESSCCGWIHQKLGDARLKVWKRRTNKGQANFFGESHEGYVGGVTS

SEQ ID NO: 946 - protein, 155 aa, unidentified
  REGION 1..155: note = Table 20
MTTCGDKPALDRSINSLIVINKSDVIRQNSNNSSARQNPSKKTNQLNHNFWNFGYILRRFQLTAENFGLAVELVDEAWTSKTCALCGVRHRGGRVQRGLYYCKRYNKSFQADINAAVNIRKVALGLPVSSADKGSWLMGQPVRVRLPKRLAPKVF

SEQ ID NO: 947 - protein, 382 aa, unidentified
  REGION 1..382: note = Table 20
MIGKKSKDIPSKGGSLFGSTTIAWETQFKEGNAMWKVPRLIRLNDNIVVREDETAIFMRDGKILSTFDQPNRYALTDINAPVVGPLVKALSGVQQQAEVYYLQRRFIDGKFGSAEPFQFTDPTFGVVSLRVYGEYRWKISSPEIFISQFVGSLNLETSDEVEDRLKEQIVILLYSVLGKMKDQGMKVTDIPSNLTTIEQAVLALSPDNFQQYGVEINKIQQLNISLPDEVQKAVNTRSEMSVLGVNYMQYQAGQAMVDAAKNSSGTAGIGAGLGVGIGAGAGMGYSFSGQMSNMMQQPPARNCPKCGSAVPAGNNFCPNCGASMQVQTVTCPKCGTSVSSGTKFCPNCGNNLENVGGKKKCPNCGSEMDANAKFCPSCGKGV

SEQ ID NO: 948 - protein, 411 aa, unidentified
  REGION 1..411: note = Table 20
MIKSYIYIPHKLTKIKEETLDEMCLEFMKVCNDFTKLLPSIQKKRVLKNDRVKWSLPSTTSKDNAYNKWVKNGTIKSNLNSLAIHSAKVEAVGKFKMWLEDKTAEKPLFKTPFIDFNNQSYFIIRKNENTFILDVPSFKNEKGYPRLLIPFNVDSNRSLSKYLKKSIIIGERKRADELKLSESKYANSHIIIPFDDGINEPDEYTPHTFIGIDRGINNIIALSVCDNSGKVLRTKLFGGNELRHYRTKHQHRREKLQAIYGKDKGMIRRTLGKHESKFAKTLNHQISHEVVEISKKYPSPVIVIEDLHRFAKNLRWSFYQLEEFITYKAKINGIVTKKVKAQYTSQTCSRCGHVDKANRYGVKFACDKCGHRDNADINAAINISRSYINEVAGKQVLPVTGGVSLPLSPAR

SEQ ID NO: 949 - protein, 543 aa, unidentified
  REGION 1..543: note = Table 20
MVNKNLKITSGRDNVEFYLIVDGEEIPLKKQDIRNLITEFLKDVRLAYIKFLPNIELIQTGKYFTVNINSKRLTNENLSNSLTKLIPKNYIELEINGSKVKLDYKKDYVATSILYSVAKDITGNLKEGKTVVIKNLQYLARIKPDKNTPYDKAFSQVIKEFEIVENGKTVECVITFSAFKNASIKVKFKMNLRKKNFAVNNSYYQILNRIKNQEYKVAYIGIGYREKKGAFLLISYKFEKQPETSQEQEKVMGVDLGQVYLIYYSITNSHSRGDISLSYSWKDKIIGIWNRKKHLQKSLMEIRNLKKQGINDESIEKRYEKIVKELNSVREYEKNFMETLNKQIATKLIDIAVKEKVKTIVLEDLSLSNEEKNSLAFPKWNYYQLQSFIENKAQENGIQVKKINPAYTSQRCPSCGFIAFYKEMVRPKREKFTCPVCGFSSNADYVASLNIAEENIEEKIKARLISDIEKIEKVDKNNKVFTLFAIRNRIVKDLLKEFFNTNNGSSKKLLKRLEISNKEAYNTLIRDLKQFKVEYLDKRISNV

SEQ ID NO: 950 - protein, 486 aa, unidentified
  REGION 1..486: note = Table 20
MNKVLKLTAKREKVKFKLLLLETGREEEVKFYELREALERFVRGVRVAYLKTLPDSLEGLEEKGRPNTRAVNSNELSKRFPPECAKVKLGSLELELGKDNIASSIRYTIEKDIRENLKREFKTIAIKSVPIIARVHTTKSHPYEKAFGEVFRIFEISEPDEKNRVSVRVGVKFFKQVEVEGKKATPVLVVEAVMRLKGRDYATANSYYNILKRIKEGEYKVAYAGLSYREGSGISLLLSYNLPDISEDDKRENILGIDLGQACPVYWSLITPELEKKKLTNGRHPRGQIEYPVNLEGAIRKLWRAKRNLLSSLRRIEEQTSLLSEGNRDLKGRLLRRKREVERSLKGMRRKEKNLMKKMDEFLANEVIRVALRERCRKIRMERLDGVDKTELYFPKWNYGQLQNLIEQRASLYGIEVERVNPRKTSQRCPSCGYVGQRREEVRPTRDLFRCPECGEESFADFVGAFNVGIGGWEAFKPKEALSSSS

SEQ ID NO: 951 - protein, 466 aa, unidentified
  REGION 1..466: note = Table 20
MESEAPLPENSKSLTKTLTFGLGQPLGFDVRTKTLLLLQEDQRKKVYNSLREGAETIAMICNVETAKEYAKRVLGVPKEDSERFKPSYKSIKERLDRATSLSGSILSQTYQLGSKPHFQGDHLKDLLLTGKRQLPTHRTDGTHPIMMRAAETVLHEQDGRFYLASQVFSMEWSKESGIPNWIAFPIKVKPRDKTMLGQLLRVSSGEWKLKNSRLRKNPRSQGPRWLGQIVVSYEPEPYKSIDPEIVMGIDLGVTVPAALHIRDYRGGEEQGKPSKWAMCIGRGRDMLITRATIRGEIVRLLRALRSKDSPLDKKSREAAKEKLRELRKREKRVMKTASQRIAARIAEVAKRNGAGKWRMEKLGADIKEDKPWLARNWAPGSVVDAVRWWAAKIDATLEFVDPRYTSQRCNKCGHIDRANRPKGEKRQSHFECVKCGHKDNADKNAARNLSILDIEEVIRQAKPTDA

SEQ ID NO: 952 - protein, 466 aa, unidentified
  REGION 1..466: note = Table 20
MAGMTTKVVKVPVKIVEADDEVRLLKYKALDEVMRESRYLGNMAIRYGIAYKLEGIPREMDSKKGVPVPLDTRIYRILSQKRKHLDAATVATLGRNFALKNLKKSDRDAWEGKNSLPTYGSLFVPFRHQGTVLVAAKGYDPPQFLIEPPFGRQWLSDDLIKALKRDLQVKEEQRKLTLVSCFSRKDDGAREIVNRIAAGEYPMGDSQIKVNGNNLTVHLTYKIKHVQPEMDPEKVCGVALGSVIPAVCVVNDGPQRLYIGNSADIWAVQSKFRAEKRRRDRRLGSDDKATHWKKSAKEERWMHTYCHTLTRQVILFCLRQGCGKIRVAVPEKPRRGQRPKNARQLISAPSKFHTLLEYKAKELGIAIVKIDTGNSLYRCNECGHVAMENRKTDLLFTCVRCGRRANADYNAARNICMAPSETVDPGTRQKAGDDAVHSGGTMHSGMVLRPVPRPGAIRGAVATANE

SEQ ID NO: 953 - protein, 364 aa, unidentified
  REGION 1..364: note = Table 20
MATLERNFAVKTYRNTNKDAWAGRKSLPTYRSLFVPFRHTGTKIAVVERNGTKQFCIDPQGFGASWLSDELIAEVHDGPIAIEKQRRKLTLVSCFSWRDQGAVEIVQRIVNGEYKLSDGQIQMGKKGLVALLPYSFDAIQPELDPARVCGIDLGAVIPAVCAVNFGPQRAYLGEGKDVWAARSRFRAERRRLQSRAGLYSKTKNWRRSEKEDNWIQTYYHALTRKVIKFCVQHGCGTIHMEDLSSLRQRDVESEFRRLLWVPSKFFELLSYKAKEMGIGIVKINPRNTSKRCSECGHISKGNRKSQEKFVCEKCGEGKRPVNADYNAARNIALATGDVLLHGYIESEPDALGEMDQLWEGAQEA

SEQ ID NO: 954 - protein, 417 aa, unidentified
  REGION 1..417: note = Table 20
MPKQEEEGMIITRKIEIACRNKDQYPLLQDYLKQCRLMANKAMTNYYILWQEMLETKPKNQTQKDYFLKKHGCSFQNTGYRYLRRCFGGMPSYLRRDVANRVYQDFRADLKNGLLKGERSLRNYRTGHLPLHNKDIQLCKEETSSDYLLRWRMGIEFVLLFGRDRSGNRIIADRLIEGTYRVSGSQIYKDWRKKKWFVLLCVKIPQQDNNLDETAVVGVDLGLSTPAVCALSNGMARAYIGSSNLLKRFEMQKKQRSRQREFIPATNKHGRQKVVKAIYAMKDKERRFVHSFNHAISKKIIQFALKYKAAVIRMEDLSGYNGDETVLRNWSYYELQSMIEYKAEKEKIRVEKIPACYTSRACSQCGFIDKENRKTQAQFECVKCGFKENADYNAALNIARGGVKIPEENQEDFGENE

SEQ ID NO: 955 - protein, 409 aa, unidentified
  REGION 1..409: note = Table 20
MIVTRKIQIRPINKEHYKILEDYLRTCRLIANKSQTLFYVYWQEIMANNLKGKNIDAYFKERYQHSFKQTIYHILRPKHLEIPSRITDDTLNIAYKDFCNDLKNGLLKGERSLRTYNNGWIPVRSQTTKITKQNNKYILEWLKGIKLEVYFGRDKSGNQVVVDRILNGQSKFCDSKFIKKEKKWFLLLCVNEPEKENNLFDDISIGVDCGINIPAVCAVNKGYGRAYIGSSVLLTRFRMQKDQRQRQKNYISSSGMHGRQKVDRAIFKAQDFEHRYMHTFHHKISKEVIKFALKNRASKIIMEDLKRFGQNQEESEEKKKIRRFWGYQQLQSMIEYKAKLENIAVKYIPPAYTSQTCSQCGYTDANNRKQSKFVCLNPKKKCGFEANADYNAALNIAKGGIKKVNNKDV

SEQ ID NO: 956 - protein, 438 aa, unidentified
  REGION 1..438: note = Table 20
MGKVHTRTIKLKLIVSTEDKNVAWKRIRQISNDAWRAANWIASGQLFNDQLVRRIYARRKINPREDSEAVEQIEKEFEAFFGTKRQATTEWDIKEAFPDLPPYVTNPLNHVVVASYKKEKPDMLSGNRSLRTYKRGMPIQTAKAAINFSKNETGQHFVKWTLGRKEFIDFEIYYGQDRANNRLTIDRIINGQIDYSAPMIQLKDKNLFLLLPVKEPEIAADLDPDIALGVDLGVATPAYMALSKGPARRAVGDKEDFLKVRLQMQSRKRRLQRSIKSAHGGKGRQKKLKALNQIGEKERQFARTYNHYISREIVNFAIRHNAGTIKLEMLEGFGQEEQQAFVLRNWSYFELQTFIEYKAKKVGIKILKIDPYRTSQTCSSCGHFEEGQRKDQSTFECKNCGEKLHADYNAALNIARSKKIVTKKEQCEYYLNRNQNTI

SEQ ID NO: 957 - protein, 449 aa, unidentified
  REGION 1..449: note = Table 20
MVREIRKLNVIDKVEKKKVVQRTLRLKLELVDKGSKDRIDKIVRDCPYAANGIINGQWFNDYEADALRYRVIGNVNFKELTDCEKEEYKNKLSSCEDILIQKYGTKRQATTERDIKNLFPEIPPCVTNPLNNKIVSTYNKVKGDIKKGNRVLSTFKKDMPIPTTLSSVVFGEDKGKFFIVWSLSRSEKIKFKIKLGKDKSGYKQDLVAIINKTKNICAPEFQYKKRNFYLLLPVKDEVNPHSHLFNDRVVGIDLGLNIPAYASCISNGSEFVDSEHFGSKESFLKVRLQFRNRKRQLQKDLQYVNGGKGRRKKTKALDEYEFKERNYCRTYNHNLTSKIIDFAIKCGAKHINLESLKGFREKKILGFWSYFEMQTLLEYKAKRNNIEVHFVSANYTSQTCSQCGNCDKTQRKGVNFTCNKCGYVEDADFNASINIAKSIQFVANKKASK

SEQ ID NO: 958 - protein, 456 aa, unidentified
  REGION 1..456: note = Table 20
MLITRKIELHISEADPELRKEHWKYLSFLNSEIYKAANLIVTNQLFNNFLENRVVDADGNVMDIGKRIRSLYRNKDKNADEIEKLKAAKLELRTEVKKFYLKSKQNTTYSITSHNFPEIDASIITTLNAQITGVLKKEWNEVERGSRSLRTYKKGMPIPFNLTSKSKKWFEKVDDEIFLTWFKGIKFKLFFGRDRSNNRAIVDRCLSGEYKYSDSSIQYKDRKIFLLLVVDIPESTKVLDENVSVGVDLGITVPAYCALSDGLKRLAIGSSEDLLRVRLQFQSRKRRLQRALKSSKGGQGRDKKLKALDNVADKEKRYVSTYNHMISSNIVKFAKDNNAGVIKLEMLEGFGEDEKNKFILRNWSYYQLQTMIQYKAKRENIKLVFIDPYHTSQTCSICNHYEAGQREKQSEFICKNPDCKNFDTPINADFNAALNIAVSKKVVTSKEDCEYFKKEN

SEQ ID NO: 959 - protein, 497 aa, unidentified
  REGION 1..497: note = Table 20
MPTITRKIELKIVKDRLTDEKERLTDEEYDQQWKYLYQINNTIYQAANRISTHCLFNDEYEMRLRLSYKSRYDKINKGLENIKTELEKLNTKKKTSDKEKRDRLINEQRQLVDERNELDEDVKNKKKDFFQCSKQNSTYQLASKEFLKYIPAEILTDLNRYVQNNHNNNKKKVKSGERALSTYKKGMGIPFSIKPQSGLRLFVKEEGIYLKWFKGILFRLEFGKDTSNNRCIVERLIESDKQQKKNKGEDYVANNSSIKLIKKGNDKSTRIFLLLSIDIPAKKQVLDKEVVLGVDLGIKCPLYLAINKNDNFKMQIGDIEHFHNQRTMFQKRFKSLQKLMCTQGGHGRKKKLEPLEKLKEKERNWVHTQNHVYSREVIKQALKHNAGTIHMESLKDFGKGKEGYVKDEYKYLLRYWSYYELQSMIEYKAKLEGIEVKYIDPAYTSQTCSYCGERGERKKQEEFVCTNPQCKRRGEKINADFNAARNIAMSKKIVKDN

SEQ ID NO: 960 - protein, 455 aa, unidentified
  REGION 1..455: note = Table 20
MPTIRRKIELLLDRTGLSKEEVDARWHTLHQINNNLYRTANNLINKLYLTDEIDDILRLNNQEYIDLKKQLGKKGLDETTKAELEERMHKIYATMNQHRSEILQRPRQSFAYSAVTGGDDTEIFNAKILDTLKQNVLAHYNADMKEVRRGEKSISNYKKGMPIPFSFDKSVRLYERNGQFFLKWYRDIQFILFFGHDASNNQLIVERCLGISEDGIAYKMCSSSLQMKGKKIFLLLVVDVPKEPFEQQKGMVVGIDLGLNVPIYATTNLTPERRAIGNRESFLNQRIAFQKRYKALQRLQLTKGGRGRSHKLEPLERLRETERNWVRTQNHLFSKEVIEFAKQVGASTINMERLASFGKNMSGEVYEDKKFVLRNWSYYELQNLIEYKAKRANIKVRYVNPAFTSQTCSECGQTGERDSIHFKCTNPECKNFGKSIHADYNGAKNIAKSTNIIKE

SEQ ID NO: 961 - protein, 457 aa, unidentified
  REGION 1..457: note = Table 20
MAKASSIITRKIELIPDIEGMTQKESNDRCYGLIRGYDSNLYKVANLLVSQLYGVESLFPMLCLQNNEYMDCKRKLCNKSLSDDERRKVEERFEAVKEAITKRKNELAPQPAQTFAYRAATNSEYSKFFPSDILNSLKQDIYKHYNASKRDQQMGERSLATYKKGMPIPFMLEKHNVIKEIDEDYYLFWFEDTRFRLNFGRDRSNNRAIVYNCINTQKYKLNKMADIQIKNKKLFLIISVEIPKEQREAIKGKVMGVDLGVVHPAYAAVNEGPERSLVGNGEAFQKQRDVFRRRFRELQRCQLTQGGHGRKHKTKATERLRGKERNWVQTENHRISREVVNLAIKWKVETIQMEHLKGFGKNSDGDPSKEHKRILGRWSYFELQKDIEYKAAKVGINVKYVNPAYTSQTCHHCGERGDRSERDFFVCTNENCICYNNRIDADWNAAVNIAKSKDFIK

SEQ ID NO: 962 - protein, 490 aa, unidentified
  REGION 1..490: note = Table 20
MATEYTCITRKIEVHLHKHGDGEEAEKRRAEEFRMWNEINDNLYKAANRIVSHCFFNDAYEYRLKIQSPRYKEIQRKLRYSKSNKLTDDEIKSLKAERKELDNEFRKQYRAFMLGGSSEGFKSTTEQNSTERIVNNEFGDIIPSNVLSCLNQNVFQTYKQYRTDVEFGKRTISNFKKGMPVPFSIKAHKSLMLKKREDGSIFVYFPKGLEWDLSFGRDRSNNREIVERILSGQYDAGTSSLQEGKNGKIFLLLVVKIPKQSNALDPNRVVGVDLGINIPLYAALNDNEYGGMSIGSREQFLKMRMRMVAQKRELQRNLRHSTNGGRGRSHKLQALERLEGKERNWVHLQNHIFSKNIIEFAVKNNAGVIQMERLTGFGHDRNDEVDDGFKFILRYWSFFELQSMIEYKAEAAGIEVRYIDPYHTSQTCSFCGHYEKGQRIDQATFVCKNPECEKGKGKKRSDGTYTGINADWNAARNIALSDKFVDKKKK

SEQ ID NO: 963 - protein, 242 aa, unidentified
  REGION 1..242: note = Table 20
MFLLLVVKIPKVQNNLNPERVVGVDLGINVPLYAALNDNEYGGMSIGSREQFLNMRMRMQAQKRELQRNLLHTTNGGHGRNQKLQAFKRLQDKEKNWVHLQNHIFSKSIIEFALKNKAGVIQMERLTGFGRNKNDEVDEGYKFILRYWSYFELQTMIEYKANATGIEVRYIDPYHTSQTCSFCGHREKGQRISQSIFICKNPDCTKGKGKQEKDGTYKGINADWNAARNIALSKKVVDRKKK

SEQ ID NO: 964 - protein, 498 aa, unidentified
  REGION 1..498: note = Table 20
MQLNTITLTVKLQIRPLGDKEAQNEVWRNLRNINRDVFKAANLLMSHLHFVEAFEHQFMQTDRILEKEMLDRENKKKNKKLNAQQIETIAQEIAEIKQKRKELKIEVAEKVKIFYNGKNESFAYNFIRHEYPQIPSYSVSILVKTVQNKFKEEWKEVKKGEKSISNFKKTIPIPIDDKQIANTDKGKKLCYIKKEGEKFVWELNSLEAKFEIVTGKYKQSKYMGEDKNKRTTLERVMNFEYKVADSSLKIEENKIFLLLVCKIPQQQATSLPNVSIGVDLGIRTPACIACNDGLRVISLGSKQDFLAIRQRFYEHRKRLQKSLAMTKGGKGREKKLKALEKLRKAERNWVRTYNHTLSKKIIHFAIQCRASRIQIELLEGFGRNENKVDEKGNYLLGKWSYYELQNMIKQKAEQYKLVVTTIDPYHTSKTCHVCGELGYRKGADFFCQNERCKEYQKRQNADHNAAFNIAKSTTFVAKKEDCTYFKLEQEKKSKKEEE

SEQ ID NO: 965 - protein, 497 aa, unidentified
  REGION 1..497: note = Table 20
MITVRKIKLTIMGDKDTRNSQYKWIRDEQYNQYRALNMGMTYLAVNDILYMNESGLEIRTIKDLKDCEKDIDKNKKEIEKLTARLEKEQNKKNSSSEKLDEIKYKISLVENKIEDYKLKIVELNKILEETQKERMDIQKEFKEKYVDDLYQVLDKIPFKHLDNKSLVTQRIKADIKSDKSNGLLKGERSIRNYKRNFPLMTRGRDLKFKYDDNDDIEIKWMEGIKFKVILGNRIKNSLELRHTLHKVIEGKYKICDSSLQFDKNNNLILNLTLDIPIDIVNKKVSGRVVGVDLGLKIPAYCALNDVEYIKKSIGRIDDFLKVRTQMQSRRRRLQIAIQSAKGGKGRVNKLQALERFAEKEKNFAKTYNHFLSSNIVKFAVSNQAEQINMELLSLKETQNKSILRNWSYYQLQTMIEYKAQREGIKVKYIDPYHTSQTCSKCGNYEEGQRESQADFICKKCGYKVNADYNAARNIAMSNKYITKKEESKYYKIKESMV

SEQ ID NO: 966 - protein, 454 aa, unidentified
  REGION 1..454: note = Table 20
MISKVQLNLTCKDTSFYSFIRKENFKQNKALNTGLALMHSYSILENVSGGEEVKIEKEIKRTLSKIENLKKRIDTNGEKINLEQKKINTNLVKLSKLKENRLKLKDDFRDNYFESDSLQHVLKTMNIIQEDTADLVIEKLNKDYSLNRILKGEESLKTYNENTPLMINSKKIIFKYIDNNFYIKNMFGYKVKVKNNISFLNKYNKFVSNKYILSRIDENFNHDIDNTYILDFIINNIVNKKYNIFNSCLRFTKDNLLIMEFLIDMPEVNDKYIPIKKRTLGVDLGMRNIAYLCLNDNISIHKKIGTSDKFIKARKIINFHELKNSDKLNTVKLYKKVELETYSNRIINHIIDFAKYNFCEYINLEKLQVNEFGKNLFDGWTYANFQKNIEHEAAKEGIIVRYINPSFTSQKCSKCGYIHKSNHILSDFKCSKCGLKLDSDYNAAINIARSNDFM

SEQ ID NO: 967 - protein, 485 aa, unidentified
  REGION 1..485: note = Table 20
MTTKIQSVQKLKVTIVAETEEERNAKYQMIRDEMYNQWRGLNLCMSLLATHHTLNQYNSGAEYRLKSQLKKIDTQIGKQQKVIDDPKSKESKVEEAHQKIETLKEQAEQLKQDFEDKKEYRTDIDVKFNEMYLKDIHQILVNQINFISTETASCVVNRANKDFKNSLSDYMKGNASLISYKRSFPLMLKGRSDAKYEKEDYRGGLHIYYEGDEVHIRWVKGIVFKVITGNNPTRNIDLKYTLNNLVNGQYRISQSQLKFDKNNHLILMLNYRYNKEVEPSYVENRTLGVDLGIAIPAYACLSDDTYIRRGFGSYTDFKRVRDQFAKRRSQLQKSLVMVKGGKGRTKKLKAMQQFRDKERNFARTYNHQLSHKIVKFAKDNKCQFINLEHLTKEGFDNRLLASWSYYELQTMIKYKADREGIEVRFVDPAYTSQTCSHCGHVDKENRKSQAKFECTECKLTLNADHNAAINIARSTNFVKEDKNDD

SEQ ID NO: 968 - protein, 418 aa, unidentified
  REGION 1..418: note = Table 20
MKEFRTVKKLKLTIVADTKEEREEKYKFIRDSQYAQYQGLNLAMGILVSGFLKGNRKLDSEAFKQAQKEMMAIREQTFEDINFGKGITSSSLITQKVKADFKTALKNGLAKGERNVTNYKRTFPLMIKGNADSCYDQGKRKPLDFYYDNDDIYIRWCNGIIFKVVLGTRINENTTELKHTLHKIIKGEYRVSQSSLQFDKNNNLIMNVNIRFKKELNTDFIEGRTLGVDLGLKYPAYVCLSDNTYIRKGLGSAEEFLKTRQQMKKRRTTLQHQLKLVKGGKGRNKKLKALEQFQNKERNFAKTYNHQLSCNIVKFAKENKCEFINLEKLTKEGFDNNILSSWSYYELQNMIEYKAERENIKVRYINPAYTSQKCSKCGYIDKENRKTQSEFNCLECGLKLNADHNAAINIANSTEYIK

SEQ ID NO: 969 - protein, 481 aa, unidentified
  REGION 1..481: note = Table 20
MIITRKIAITIVSEEAQESYNYLRQQIYYYYKALNFGMNHIYFNYVAKEKIKLADSAYKEREEKYINAIHIAKEKLQKDLSVSQRAQAEKSLEVNTNNLDKLRKAISKDAKETFQKVMGAVERTNVTDAIKKEFPMLQRDSIDFAASKVASDFNNDLKLGLMTGSRTLRIYKRNQAYPFRSRRLKFYKENGDFFINSSKSLLFKCLLGVKRQNSKELIQILEKILDNQYKICDSSLEFNKKKLILNLCIEVDENTHSENMKVPGVVKGRIVGVDLGIKIPAYCTLNDSPFKKKAIGSVDDLLRIRTQMQARRRRLSKNLISARGGKGRGKKLKALDRFEEYERNYVRTYNHFISKQIIQFTLQNQAEQINLELLQMEHTKSKSILRNWSYYQLQQMIEYKAKREGIVIKYVDPYHTSQVCSKCGHFEENQRMDQNTFRCKKCKYRTNADYNAAKNIANSTRYISSIQESEYYNIKNRNIAK

SEQ ID NO: 970 - protein, 493 aa, unidentified
  REGION 1..493: note = Table 20
MITVRKLKLAIVSGNENETYQFLRNEMRNQYKALNISYSHLYFEYIAQEKIKHSNEEYQQHLTKYTEKAQEKYQNYLKCKGKAEVFKDDQQLQKRVEKARDDYNKAQEKVYKIEKQYSKKASEIYQKAVGLVKQTRIGKLINSKFDLHYDTVDRITSTVISHFTCDMKAGLLNGKRNLRNYKETNPLMIRARSMVLYEESGDYFIKWIKGITFKVILLESSKQRANINELKSLLVNIIEGNYKICDSSIAINKKLILNLSLNIPVSRKNSFMKGRVVGLDLGLRIPAYVSINDKPYIRKSIGSIEDFLKVRTQIQSQRKRLQKALQSTRGGKGKNKKLQGLNRIKEKEKNFVNTYNHFISSKIVQFALKNQAGIIHMEYLEFDRMKNKSLLRNWSYYQLQQMIEYKAKREGIEVKYIDAHYTSQTCSKCNHYELGQREIQEKFSCKSCGFNANADYNASQNIANSIKFITTNKKIIEELEVEEKQLSLDFNGS

SEQ ID NO: 971 - protein, 478 aa, unidentified
  REGION 1..478: note = Table 20
MIITRKIKLIIVDEERDNQYKFIREERYKQNKALNVAINHLYFLHVAKEKIRLLDHKFIQDEKKLQETIDKLYDEKRKQKDEKKKVTIEQKIEKKRNKLKELRGKGNREATKTLQDAIKINFTTTTREIINKQFDLMSDTKDRITQKVTQDFSIDLKNGLLSGERSLRTYKKNNPLLIRGRTLYFYQEGKSILIKWCKGIVFKCILGRHQNNSHELWTILKKVLEQSYKVCDSSISVGKDLILNLSLDIGESDNRTAFVEGRVLGVDLGMKVPAYMSINDKPYIRKALGSLEDFFKIRVQMQKRRKNLHKTLVSVKGGKGRERKVKALDRFKEKEQNFATTYNHFLSHNIIKFAKKHGAGQINMEFLALAGEDKNKILRNWSYYQLQEFIEYKAKQVGIEVKYVDPYRTSQTCSKCGHYEPGQRESQEKFICKACKHEINADYNASQNIACSTKYITSKQQSEYFRRLQQTTKLEKYS

SEQ ID NO: 972 - protein, 478 aa, unidentified
  REGION 1..478: note = Table 20
MPILTRTIELIPIGDKEERDRCYKWIRDFMEEQSKMMNQYMSALYIAAVEEVSKDDRKELNNLYNRIATSKKGSAFSKEECNLPKGLGANYGQRVRSDFDTACENGLLHGRVSLPTYKKNFPIILAPIYVNLQKNNIEEKGKSAGFYHNYASYNELYDALKEENKPEIIWNFVQKMQYQIKFGNPYKSAFLRDEILHFLEGEYKAVGSQLSINSRGKIILNLSLDVPQKKVKLDENIVVGIDIGLAVPVMCAINNDYYKRLAVGDFEAFTRMREKLYSQKCKLQRQLKYTSGGHGRKKKLASLNAIRDREHRFVHTMNHKYSSEVINFALKNNAKYINMEDLTGFGKDNKGNAIDDYQFVLRNWSYFELQKMIQDKAQKYGIVVRKVESAYTSQLCSCCGEMGERVSQSVFRCLNPNCISHNKYEKQRKSGVGNYHFNADFNAARNISMSTNYTKKKRKTKAEKVEERKKNAIEKTAG

SEQ ID NO: 973 - protein, 493 aa, unidentified
  REGION 1..493: note = Table 20
MTNTDDFVSGKDIENNKETTTLTRRIRLVPVLMDKNSEVEPDGADEELKKKIADYKYSVYNHLKKTLKNQITVQNLIMTNLYLEELYKTPKEDREELRRLYSRMPGSKKESAYSEIPQEFLYVEHVTGVEYCDIYHKVYLDFCKACRDGLLYGKVSLPSYSFSSPINYSSKKCGLRRNNPRTNNGIYHMDSCDEEFFEHLVKEKNPKLFLSLPAGMNFKLSLGSLKKSNSLRKEFIKIFNGVYKICGSSIEIDKSNKVFLNLTIKIPREKYELNSDNVVGVDLGVANPAVCVMNNSEHSLFLGDKEDMFNLSKKYQEEKRRVQKGLAFTNGGHGRTKKLQKLERLKEHEKNFRGTMNHKLSKKIVDFAVDNKAKYINLEKIDSRGFREREDFVLLRNWGYYDLTQKIVYKTKQKGIQVRFVEPAYTSQTCSCCGQRAADNEASWRVNQSDFICRNSDCEKYLKVVNADYNAAKNIATCTKFCDDQDDEINKSI

SEQ ID NO: 974 - protein, 437 aa, unidentified
  REGION 1..437: note = Table 20
MAKDTFTITRKIQLVPVGDKTEVNRVYNYIREGMKAQNLAMNQYISALYLGMQNDVSKDDRKELNNLFSRISTSKKGSAYDESIQFAKGLPIGSMTRKVKSDFDTAMKKGLKYGKLSLPTYKDSNPLLVHVDYVRLRSTNPHQDSGLYHNYTNHTEFLEHLYKSDFELFIKFANYITFKIILGNPHKSAEIRDVFKNIFEECYAIQGSSIGIYNNKIICNLSISIPKKQLCLDENIVVGVDLGLAVPAVCALNTVPYIHKSLGNYDDFVRERTKMQSQRKRLQKSLNYANGGHGRKKKLQSLERLKKRERNWVQTYNHKISKQIVDFAIKNKAQYINIEDLSGFDSSQFVLRNWSYFELQQFIEYKANKYGIIVRKINPYHTSQTCSFCGHWEEGQRISQSEFICKNPECVNHNKSINADYNAARNIAMSTDFVKNN

SEQ ID NO: 975 - protein, 522 aa, unidentified
  REGION 1..522: note = Table 20
MENNITITRKYALIPEFSDRKEWKKRVYDFMINDLEQKIDYRNKKKQDTSELESQLEYIKNGGDFTRSMVNNYTYSLVRKAMEEETRRKNYILSWIFSEMRANRIDQMESLKDKFKFVSDTINYAYRKAGSNKGSLFDETEIHCILKSYGIAFSQELTKEIKELVKNGVLEGKVVIPTYKLDSPFTIAKSHFSFEHDYDSFEELCEHINDSDCKMYMNYGGDNRKDGINPASIARFRISLGHGKNKDELKSTLLKVYSGEYQYCGSSIQITKNKIILNLTMKIPKIETKLDENTVVGVDLGIAVPAMCALNNNMYERLAIGSADDFLRTRTKLQSQRRRLQKSLKNSNGGHGRNKKLKVLERLGKSETHFAETYCHMVSKRIVDFALKNNAKYINIENLNGYNTSSFILRNWSFYKLQQYITYKAERYGIVVRKINPCYTSQVCSVCGNWEDGQRKTQASFECANPKCESHKKYKYGFNADFNAARNIAMSTLFMEDGEVTEKKKEEAREYYGIKKENSEAV

SEQ ID NO: 976 - protein, 576 aa, unidentified
  REGION 1..576: note = Table 20
MNTINNTYIRTLKFNLNLTPKFETEEDNKKYINDVYSYLRDAMWAQNRAMNIVLDRTKEAYTLGRGMNRVKEIYYSYSHQKPISNDKKESFLESLLQYAPIDDQFVKNEVKKLRKFYESKKKPPKEETVSKNCEALKNKYIKYVGKSKDDIKRELDLLENYCAYPEDIYEKFANGLSTPAYIKQKVESYWKQDGIKTKVIYSMDENLRRIKDAPLFIPPNIFYNKKDELIGLVYDYTDYISFLEDLENKRNVNIYLSIPYKKGEDKLKFKLVLGNPHKSRDSRLSIKRIFEEEYRIKGSSIGFTKNKETGKNTNLTLYLTVEVPQNKDNTLDENVVVGVDVGIAIPCVCALNNDKYTRENIGSYDTLFAKRTQFKMQRSRLNSQLKLSKGGHGRKRKLKKLELLSGKEKNYADTECRKYASDVIKFCLKNHAKYINLEHLKGYRENPKVLAGWSFYKIQTYIEQAAEKHGIIVRKINPCYTSQICSVCGNWHPENRPKGKLGQAYFNCHNIDCKTHNTDLYKYGINADFNAARNIAMSTLFITDSDEITKKHWKEAREYYGIDESDDKEEKLNKVA

SEQ ID NO: 977 - protein, 384 aa, unidentified
  REGION 1..384: note = Table 20
MSFYEALMNDTNVELFMKFCNNITFKFCLGNVKDSLYLRRTLESLFNGEIKACDSSIQVEGKKIMLNMCVDYPKRTYELNKNIVMGIDIGFIVPIMCALSNHEYKRLALGSREFINHHRIMYQKQRSSVSKSMRDNSTNGHGRNKKVRPVDEIKANESNFAKTYSKTLARKAVDYAIKNHVGVIQMENLKHISRDERQQFVLRNWGYYELQKSIEYAAEQAGIEVRYVEPAYTSQVCSICGHRGERTAQATFVCTNPDCKIHGKYKEAEKTDFDVNADFNGARNIAMSDHFVTDGTKSVELVFNEEFTNEQREIFANCVSENQTYTHCYVAGNTVSIMCDDGYWHDFDLKIVEKAVNDDSVDKLNGEKKEKKAKTTKTKKEKAA

SEQ ID NO: 978 - protein, 475 aa, unidentified
  REGION 1..475: note = Table 20
MSIPLTRKIKLSVYVPNTITEEKERHEYKTFVWQLLRKVNQQNYEFHNLLVKKLIELDSVLEGRLTEDDNFIEIRNRYYSDRKDKKNQREFFDYIRMKKDELIKEFGGKNLHGYIYTYLKNYIKSLPEEQQFMASYTYGSISKNVVDKYTNDQFDVFRGVKTIATYKNTQPIPINIIGHVKKNEKGELYKNTGKEWFNKYDDIYTFKFKSIKKHEIELQLNFGKDRSNNRIIVDRIYNNDPNYKICDSKIQVVGTEIFLLLVFKQFVTKRELGLDVRKVIGVDLGVKNVATIATNFSDHIEIIGEGEFVLMRTKLQIEKQKRSIQRNSKYSRGGHGRNRKLQKLNEYRNYERNFRSTFNHKISKDVIEIAIKHGAGQINIEDLSSIPLKEKNNRILRFWSYYDLIQKIIYKAKREGIIVNLINPSYTSQKCHQCGQIGNRPKQDTFLCTNPTCKAFNEPINADVNAAKNIAKISL

SEQ ID NO: 979 - protein, 270 aa, unidentified
  REGION 1..270: note = Table 20
KWLQEKEREVAPLKVTKIVRVQWREDKPEHLKVQIVLRVERKEPVMPDPKSALLVYVDANSDYGIACVYAVSDGSETRVLETPKLRPPNRGGRLMEAARRMRAAMQGRKPNINYALARLSERFDARGWVKAAAARIFEKAFQRASGRSVLMNFDIPDPESVKNSYLQKTLLSVRKVARNLANWFGVYATFECYPSTVCPYCGSKLKIAYTRRTRVAYCTRCGFYDDRDFVPFYHWCKALNLPLPKWPLQRIELPEELRRKLSSVRPGSPG

SEQ ID NO: 980 - protein, 466 aa, unidentified
  REGION 1..466: note = Table 20
MKTKKEKAPTETRALRVEIVKPLNNGGWETVGAQLRALRMVSHRVLQSVFLACVAQERVNRTLTKADATHPQTAGYRVVDGEIDDIKAWAKKALKKKAAGERVELLKAIAELNPSSRMKLGWSSAGYAAFGKWSKDKQKNAMPEWRRGAPIAINRDGVKMRDDGTGLVLSVQLDPAGTEWTDFAIKCGKGSHYGRVREMTSGVVRPGEVKLVLDERQKKWFAFVSYTRPSPSAPSECDVKKALVVHRGIHNALYLVCSDGRSYPIPGAKLLATKRRLVARRHEMQRIARCERGSGTHGHGKARRYAAPDSITDKEARVVRTWCQQMGAEVTKRVKAWGCGTIVIEDYGGIEQTGDARQRYLDKFPFYQLKQAIEWSVSKVGLATTEVPCEYISSVCPVCGNADLRQHNHRTGTFHCAKAACGFERAADYVAAFNMMKRAGFGDGLRKKLKREIDIVAVTREITAAE

SEQ ID NO: 981 - protein, 459 aa, unidentified
  REGION 1..459: note = Table 20
MRIKIIAKKKGINMNKIMKYQILKPTNISWEDFGNILYNLRSEVRKIKNRTIALYHEWTNYTLECHDRTGEWPKPKEVYNYGTMGGYIYDRLKGEVKYSNSVNFNSSVRDAMSKYDTHKKDILAGKASVPSMGDGQPIDIYNKNIVLHHLDNEKKDYAATLSLLNNGAKAELGLPSGRVDVILTIKNETQTAILDRCLSGEYRICGSQLIYEAAGKEKKGKKDKPKVWLYLCYGFEPEAPELDDSRIMGIDLGMKLPAVMAFNFNDKKYEVIDDNRILDRKIRLDKMLSMSKHQCQWRCDGNSGHGRKKKVGVYENYANKSHNMSMTINHQWSKYIVDTAVKNKCGVIQMEDLSGIKASRQNFLGNWTYYDLQQKITYKAEEKGIKVIKVDPQYTSQMCPICGYINKRNRATQADFECLECGHIANADYNAARNIATPDIANIIKNRLTQQKKEGKSID

SEQ ID NO: 982 - protein, 469 aa, unidentified
  REGION 1..469: note = Table 20
MFVLKRKAGIAMNKVIKIYASLDKAQQCALPIYGKDSLSVQLLKVQSEVRSLKNRAMRMSYDYDQAQYEYFKYMERCKQEYGLNSYPSAQPSDFSKYKTFDGYLYDALAKDYPLMNKRISATVTRKVWGEYKKDKGEILSGKKSLRTYREGQPIPIRAKDTKLLYEDNFDYTMTVSVFSKDAAKTLGMKPGGCRFILHEQTDSEKAILDRLLSGEYKLCETLLAYDDRKNHDTKMARGWYFCIGYSFEKDTSNPSLDKDKILGVDIGVANVIYLGWSKDDHFKKYIPGSEIRKFQATEERRKKDILRCSVARGDGNVGHGRKCATRKAEKHEHHIHNFKETKNWHYAHFVVDTAVENGFGTIQMEDLSGINKSETFDRTWTFYSLQQKIEQLAAENGIVVKKVKPQYTSQMCSKCGYISSRSRRSQSEFRCVSCDYRRNADHNAAMNISKSKIEALVEEQLLRQGGEAD

SEQ ID NO: 983 - protein, 469 aa, unidentified
  REGION 1..469: note = Table 20
MRLYSIKCNKEKKLNEVKRMESEKEKYVVQSYGIKLIKPVGVDEGDWDFAGKVLRDLDYACFRVKNKAATRTYMNVIEKLEYENIHGKGTYDKYFKTRYGKTFSAYNSECAREDKELNKGDLYREYFNLMAREGEKVVKYNMKKILNGNASNITFKRNQPVPITSRMIFITKESGKYYAELTLLSPEKAKELGRKGKNGTRIKFLLSSKGQEKVILDRLTSGEYDLRDSHIHVKKKGNKLTNYLIIAYRHKVKDDNDLIPNKVLGVDLGVSKAAYMAVSESPVSEYINGGEIEQFRNGVEARRNGMRNQLKYHSSNRSGHGRATKLKPLEKLREKVSNFRKLTNHRYAKFIVDTALKNNCSIIQMEELKGISKNDTFLKRWSYFDLQEKIENKAIAVGIEVKKVSPKFTSQRCNKCGYIDKESRKSQEKFECVNCGHKTNADLNAARNLSMLNVEKEIKAQCKAQKIKY

SEQ ID NO: 984 - protein, 436 aa, unidentified
  REGION 1..436: note = Table 20
MAKVVKLKVVRPVNIEWETLNDIINDLDYNAFKVKNRATTMLHTLKIAELDYNHNNEEKMNASIRKEMYGYSTYESLIYNNIKNDYSSLGFHSEIIPGLIREAGQMYNKVLKDMLKGNGTIPTYKRNQPIPVRSRQIKIINADTIQLNILNLIGGEKHHVKNIGKSVPIQLKVTSKKGHAKIAIERIMSGRYSLNDSKIHKYKKDLYILLTFTDNEVKQVAISKDKVLGVHLGIINAVTMHVSGTPIVNQIAGGEIDAFRKRIEKQRISKRNQLKVASQNRKGHGRETLLAPLETLSKKVDNFKNLTNHRYSKYIVGFAIKNGCGTIQLEDLKGIRKDEAFLATWSYFDLQQKIKYKAEECGIEVKIVKPRYTSQRCYKCGYIDNENRIEKNQFFCKKCGHHSDGDINASKNISNQNIEVIIDKEIKKQKRKQEDL

SEQ ID NO: 985 - protein, 433 aa, unidentified
  REGION 1..433: note = Table 20
MKITKTMKYEIDKSIDVPWKTFLSVLRDVQYAVWKTGNIAVKMTWDFQQEAWSYRQRFGEQLKFSDLGTGNKSQSTDIYQRACSEYPNVASSVLDATIRMAQDRYKTDAPDIYDGLKTIPYFKRELPIPIRAQQTKLTRKGTKRYVSFALLSKEGAKKSELPTRYNVQIRTGKGAREIFDRLVDGEYKLCDSKILRKKGKWYLALSYSFEAENPQELDPKRVMGVDLGIVKTAYMAFNFDEYLRYEIEGGEISAFRGRIESRRKSLLKQARYCGEGRRGHGRKTRMKPLEKLRDKVANFRRTKNHHYSKYIVEMAAKHGCGTIQMEDLSGINKRDKFLANWSYYELQSFVKYKAKERGIKVVLVDPNYTSQRCSCCGYIAEGNRKTQETFKCVICGYKTNADFNAARNIAEPRIKALIDAELKRQEKERKEAM

SEQ ID NO: 986 - protein, 480 aa, unidentified
  REGION 1..480: note = Table 20
MTTKVMRYQLIEMVDNEKRFMYKMLDDLRYEVFKISNRAIQMFWDIDNTSYAFKQKFQENLDLKELTGVKSLAYISRALKEEYQKLNNTSVEQVSRKVEKEWKKNKSNMITADTSMIRYKRKNANIKLKNTQFKIEPLDNNFYRISARLLSKSYAKDLHENGFEFAQKFKEKGKKKEKTIKEFIKKNDDNMWVHFKIKAHDGSQKSIIERVVNKEYKVGGSDIIYCDRKRKYYLNLSYTFEAEQAKVDENKILGIDVGVNTPATLAISDDKWYKEFIGDKQEIENYRNQVESRRRRLQKNAALYSGEGSTGHGRKTRLKSVDKIRDKIARFKDYKNHIWSRAIVNEAIKHGCGTIQMEDLTGIAANTNEKFLKTWSYFDLQTKIQYKAEEVGIKVVKVKPAHTSARCNNCGHIHSKENKDKWRPKEFHHEKFICQNCNHTAHADLNAAKNIAMKDIEKIIKDQLESQEKYYKNQMKYILD

SEQ ID NO: 987 - protein, 463 aa, unidentified
  REGION 1..463: note = Table 20
MTCTKTMRYQIVRPLDDDWEVFRYILNQISYETWNCLNRCAQYLWEADNFKKIYYSKFGIKFNVKDVEGVADDAYINRNLKKEFQKMNGDSVETITREVKVKMKKNKEDFMLGKASFLSFKKGHPILFRGSQVKINKSNDNNYIVTVRLLRKEYAEELYNGITVKTKNKKEEKVHKRNINDMNIRFYIKANDKYNKVILERVLNKEYKIGGSRIFMKGNKIFFDLVYSFEQKKDEKLDKNRIMGIDIGYNIPAAVAINDMPYKKWFIGDRKEIEDFRTKIEVRKKQLQKWSVWAGDGRVGHGIKTRIKPVLNIGEKINNFKNLKNHVWSREIINIALKNKCGTIQMEKLEGIIPEEYSFLKNWSFYDLQQKIEYKAREHGIDVVYIDPAYTSARCSKCGHIHKSYEKKDWRPEQGQFICQVCGYKENADINAARNIATPNIEKIIKEQLEKQEREQRNQKYIS

SEQ ID NO: 988 - protein, 444 aa, unidentified
  REGION 1..444: note = Table 20
MDVGTVVKMTRCRIEQDDELYKVLDDLRYMIYRIKNKATSMAWDWEQFSFGYHERFGEYPVAKEVVGKNVSRDAYQHVKGLGEEFSSSFVDTAVEEASKHFKNHRSAILRGKEGIPVYRSDTSFTIRHTQIKGLKKEQRDKYSGLFTLLSPKGSKVREQASTRYLFKIRSGGSSSAILDRILEGTYSLCDSKIVYEKKKRHYFLLVTYKFEAQKIEMNPERVMGVDVGFAVPATIAITDNPYACHFVGDAREVLAFEQRVLGTRRALYRSRSRAGDGSRGHGRKTLMKPTEVINSKVANFKATKNHEWSKFIVDYAVRHGVSTIQLENLEKIAEESPFLKRWTYYDLQQKIAYKAKEYGIKVIRVSPDYTSARCNKCGAIHRKQERTLWRPKQSQFNCLHCHHRDHADRNAARNLAIPNIDQIIKAEKVEWTSYWTNVYKNPPA

SEQ ID NO: 989 - protein, 439 aa, unidentified
  REGION 1..439: note = Table 20
MIKVVKTMKYEIMYDKELYDLLSEIQYAIWLIKNRATPAVYDWQQFSFSYNERFGEYPKEKDVLGKTLAPDIYGFLKELGSFVSSQIIDTAVQEAIKKFKNDKMKILKGEQSIQIYRRNGSFPIRASQLKDLTKINNKTYEAKLSLLSNAGAKERDCKGQFLVKLVTGNGAYEILDRIINGEYKMSDSRIYKKKNKFYLLLTYKFEKETEKVLDENRIMGVDIGVAVPAVLAINEDKYYRQYVGDAKEVSDFVAQINDRKKRLQRSRKWAGEGSRGNGRKKLMKPVDAISNKIHNYRETKNHTWSRFIVNEALKNECGTIQIEDLSGITTDNAFLKDWTFFSLQQKITDKAKEHGIKVVKVKPNYTSQRCNKCGFIHKNVGKEIWRPTQSSFKCLNCNHVTNADLNAARNIAMKDIEKIIEVQLKAQEQNAKHEEKYLV

SEQ ID NO: 990 - protein, 447 aa, unidentified
  REGION 1..447: note = Table 20
MIVKTMPYEIIKPLSCDWAVFGEMLRRLRDESFRIKNSAIQYFYEDDIKRREFKKNNGRFPKKGEFYGSSVSVYNYVRPDVKYSAMGNVTLINQLVKSVWIKYKDDVVKRNMSIPSYRPNNPIEINVQSFNSFDFGQACVNLLSRKGVEELKKKLSEVKKKKNKTGGDDNLKFTQEQLNGISTSVTFAFNPGKNNAKQVLNRIISGEYKLSSSKIIYNERKNKWMLAVAYKFEPKTIELDKNRVLGIDMGVVYPAYMAVNYDKYWRDSIDGGQIEQYRKTVEARRRRLQRQAAVCGNGRIGHGRKKRMQPLEKISDKVANFRNTVNHTYAKKIVQNAVKLGCGTIQMEELSGINEKETFLKRWTYFDLQKKIEYRAKEYGIDVIKINPKYTSQRCSECGYIDERNRPKVPDQSKFKCLSCGYETNADFNAARNIATPYIDKIISLNS

SEQ ID NO: 991 - protein, 453 aa, unidentified
  REGION 1..453: note = Table 20
MTYLSIAVKVMKYQIVCPVNIEWKTFEIYLRTLSYHFRTIGNRTIQKLWEYDNQSLKHFKDTGQYPSAQQLYGCTQKTISGYIYDQLKEEYQDINKANMSTTLQKTIKTWNSRKKEIWSGEMSIPSFRNNLPIDIHGNSIQIIKEKSGDYIASVSLFSSKFIKENDLPNGKILVKLSTRKQNSMKVILDRIIDSTYAKGACMLHKHKKKWYLSITYKSNIKEELKFDEDLIMGIDMGKINVLYFAFNKGLVRGAISGEEIEAFRKKIEHRRISLLRQGKYCSGNRIGKGRKKRIKPIEVLNDKIAKFRTATNHKYANYIVQQCLKYNCGTIQLEDLQGISKEQTFLKNWTYFDLQEKIKNQANQYGIKVVKIDPSYTSQRCSECGYIHKNNRQNQSTFECQQCSFKVHADYNAAKNISVYNIEKVIQRQLKLQEKLNLTKYKEQYIEQMENIN

SEQ ID NO: 992 - protein, 437 aa, unidentified
  REGION 1..437: note = Table 20
MQQVVRFEILKPVDNDWKILGRVFRELQYESRLVLNKTIQYNWEFSNCVIGFKEKFGIAPKISDISKYKDGKRGLEGYIYDKLKDIYTKNYSKNLGCLISKATSQWYAIKNDVYKGEKIPPEYKKSNTPIIVDKQAMTLFKENNLYYAKVALVSTNHIKEYGLNSCKFTILLNTKNNGNKVILDKVINGEFDYSQSQIIEKNKKWFLYLSYKIKEKTLPDDYNRVMGIDLGKNKAVVIAVHGTEIRDYILGGEIIDYKKKMYNMVWHRQKQSRYCGEGRIGHGRKTRLKDVYNIKEKIANFSDLTNHKYSKYIVELAKRHKCGIIQMEDLSGLSTDNKFLKQYPIYDLQQKIIYKAEREGIKVVKIKPHFTSQMCSNCHYISTQNRPKDDRGWEYFKCVNCGLEIDADLNAARNIANPQIELIIEEQLKIQEIDDKI

SEQ ID NO: 993 - protein, 428 aa, unidentified
  REGION 1..428: note = Table 20
MKLVKTMRYQIIKPLSCDWDTLGTVLRELQRDTHSVLNKTIQLCWEWQGYSSEYKAANGTYPTPKDTLGRSLEGYVYDRLKVQFPKMYTPNLSQTIQRAMLKWSADSKAIFKGEVSIPSYKKDVPLDLRKDSIHIERRGHDYILSLGLVSRAYKKELGLPECQIEVLIGTPDKTQRVILARLLTGEYTVSGSQIVWDKRNRKWFVNLAYHFEARPEQLDKTKILGVDLGVVFPVYMAVADGHFRAGIPGGEIEEFRRRVEARRRQLLRQGKYCGDGRIGHGRATRTRPLDKIADKIARFRDTINHKYSRYVVETARKLGCGVIQMEDLTGIREENLFLANWPYHDLQRKIEYKAREYGIEVRYVRPQYTSQRCSDCGYIHPDNRPEQAKFRCLACGFETNADYNAARNIATEGIEELIAAALNKASVV

SEQ ID NO: 994 - protein, 424 aa, unidentified
  REGION 1..424: note = Table 20
MPTRVMKYQIVKPMNCDWKLLNRHLLDLQQEAHQILNKTIQLCWEWQGFCSEYKAKYDIYPVDKDIFHLTLAGYVNRMLRLQFPKSNSNNLGTSRIKAINRWHTDLKDVKSGQKSIASFKADVPIDLHYLSIKLHKEKDCYYADLSLISNIYKKELGRESGKLLVLLKSGDEVSRDILRNCLDGIYKIRASDISHKKNKWFLNLHYNYEETNKSLDKDRILGIDMGIAYPVYMSVYNTQITSYIEGGEIERFHKQVEKRSAEFQRQGKYCGNGRIGHGVKTRLKPLSFATDKIANFRETTNHKYSKYIVDFAVKNNCGNIQMEDLTGIKNERIFLRNWTYFDLQKKIRYKAEENGINVLLIKPHYTSQRCSQCGDIDKKSRITQENFTCISCGYQTNADHNASINISTPNIENIINDFMSLKID

SEQ ID NO: 995 - protein, 431 aa, unidentified
  REGION 1..431: note = Table 20
MSVKIASFSLIYKEDYNELNYDDLYNVLIQLQNESAKIANRAVQIYWENSNYCRQVKSMTGRFPTKDELLKHYGCSEQNYVYRLLTKEFYKNSTGNISTIIQFVGKRYKRYYPDYLSGKRSIESYKSSFPIYLCKNNIRVFKEDGKYYIKLGLISALYKSELSIHSGSVIFELGFGKSSSYKTLLDNIINQLFSLTSSKIIFLKKKIIIQLGYNTNSNIILDNSSCRVMGIDIGVAKPFVYAFNDITDFNFVDGNEIKNFQKQMLSRRQSLGRQTKNCADSKIGHGIHKRIEGIEKLGQKESNFRNRINHQYSRMIVDAAIKYKCTTIQIEDLSGISSENKFLKSWPYYDLQSKIEYKAKECGIDVVKINPKFTSQRCSKCGYISKENRKTQAGFKCKNCGFEENADLNAARNIAIPKIDSIIQESLRATT

SEQ ID NO: 996 - protein, 446 aa, unidentified
  REGION 1..446: note = Table 20
MSSKYNFKEKGIKQLMKNTTGSSGVGNLAYKILVEEGKENNCLYSSNASQSIKLAGDKWEEFAPYIEKGEKSIPSYRNNIPLEVASNTIELRYDDKFKKYYFNIKLLKPEYKEELSLESTSILFKIRKIDRARENILYNLNNRIYKLCGSKLQKQKGKYMLLLTYNLEVQQRNLKAENILGIDMGVVNAAVVAVNNSYNRYFIGGSEIAEYKARIESRKKDIQRQSKFCGDGRRGHGYKAKMKPLEHIRNRESNFNATTNHKYAKAIVNWALKHECATIQVEDLSGIKGDKTEKFLKAWTYYDLQNKIEQKVKKYGIVVRKINPKFTSQRCSRCGYIHKDNRKIQAEFHCLNCDLKINADYNAALNIATDNIEDIIRIQDKIQSLYKENYLTKFPMKQCDNLPLITEVKNYFKLHYDKKVAKNKGKSVEKIIEKIEKCEEKMKSLL

SEQ ID NO: 997 - protein, 433 aa, unidentified
  REGION 1..433: note = Table 20
MVCNKVVKIALICDQIDKDGKDVNYNDIYKLLWDLQKQTREAKNKVIRLCWEWSGYSSEYFKTHEEYPKDKEIFGISLRGYLYDRIKGDYNLYSGNLSQSAEIAYKEYKNSLKDVLRGDKSIINYRENQPLDIKNKAIQLLYENDNFFVRVALINKDKQKELNFKDCSVRFKLLVKDDSTRTILERCFDEVYTITASKIMYNKKKKQWYINLGYKFTKEIDKTLDKDRILGVDLGVINPLVASVYGSYDRLIIGGGEIDKFRKRVEANKVQMLKQGKYCGDGRIGHGVNTRNKPAYNIEDKISRFRDTVNHKYSKAVVDYAVKNNCGTIQMEDLKGITQNKNERYLKNWTYFDLQTKIEYKAKALGIEVKYKNPKYTSQRCSKCGHIAEENRPEQKTFKCVKCGFKVNADYNASQNLAIKDIDKIIEQYYNKG

SEQ ID NO: 998 - protein, 411 aa, unidentified
  REGION 1..411: note = Table 20
MITNTCKLEVSFIDTKFSDLFAMINATTQVKRYATDRITEWKSFSSRYHEENGEYPKLEDIYGFKSIEGLIYHELSKKKTGLSSRSLIATIHSCFLSYKQASKKHSHPNWSDSQPIIMQGKYLNLHHESGNYIVDYPLFSKQYRVEHEITHILRMRLNTKENHHKNILDRILSGEYHLCQSQLKYVKKQNKSHWYFLLAYSHKSEGNPNIDPTRVLGVFMSENVALYASSKRLPMVFKIDGGEIPTFASRQEAIIRSKQRQAACCGDGRIGHGYKTRTKSIYPNKQTLAHFRETINSRYAKALIDFAKTNGFGEVRLEDLKGIKADREFPRFLIHWTYFDLQEKIKNAARKCGIKVTLVSSETIGITCSSCGHIDPNNRDRGVKNRFVCTKCNIVKQTDWNASQVLSSLEI

SEQ ID NO: 999 - protein, 428 aa, unidentified
  REGION 1..428: note = Table 20
MAKGTVTKVMKYELRYLSGFSDFHAMQQAVWGLQRQSREILNKTIQMAFHWDYISRENFNANGVYLDVKAETGYKTYDGYIYNSLKSAYADMAAANLNAAIQKAWKKYKDAKMEVLRGTMSTPSYRSDQPVLINKNCVKLFDGGVRLTLFSDRFKRENNLNGNLEFAVQLHDGTQRSIFANLLNGTYALGQCQLVYDKRKWFLLVTYIFTPEKHELDPEKILGVDLGQTYALYASSVCARGTFRIEGGEAAECAHRLEQRKRSLQQQARFCGEGRVGHGTKTRVAAVYSAGDKIASYRDSINHRYSKALVEYAVKNGYGTIQMEDLTGIQNDLDHPKRLQHWTYYDLQTKIENKAKEHGVGVVKVNPRYTSQRCSRCGHIERENRPTQKVFCCKACGFEGNADYNASQNLSMRNIDKIIEKELSAKGE

SEQ ID NO: 1000 - protein, 455 aa, unidentified
  REGION 1..455: note = Table 20
MAKKGNSQKKQIVKVMKYELKYEKGCADFNEMQNELWKLQRQTREVMNRTIQLCYHWSYVQAEYCKQHGCARRDVKPCDVYETNATSLDGYIYQLLKVEYPDFFMKNLNATLRKAHQKYDALLFDIQEGNSSIPSFKKDQPLIFEKKAICISKCLPDKRQITLSCFSDSYIDAHPTLDKITFTVRARSASEKSIFDHIISGKYALGTSQLVYEKKKWFFLLSYKFTPESVDVNPEKVLGVDLGVVNALCAGSVENPHDSLFIKGTEAIEQIRRLEARKRDLQKQARYPGDGRIGHGTKTRVSPVYQTRDAIARMQDTLNHRWSRALIDFACKKGYGTIQMEDLSGIKAMESEKPYLKHWTYFDLQSKIIYKAEEKGIRVVKVNPKCTSRRCSACGYISKENRKNQAEFLCVNCGYHHNADYNAAQNLSIPQIDRLIEKQLKEQESEESEAGTNPK

SEQ ID NO: 1001 - protein, 444 aa, unidentified
  REGION 1..444: note = Table 20
MFCEVYPLSGSTIAKVMKFELFYREGGGEFHEMQKLLWELQRQTREVLNKSVQIYYQWKWKKQQHFEETGQSLDIYTELHYHRISSYAYNVLKEKYSSFYKANLSSTIKTACDKCESSEKDILCGTMSVPSYKRDQPLLLHDTSLSIRRNGTQWFADCKLFSAELVKNLGLKRGQSLVFSIKALDKTQINILERIEDGNYAIRQSQLTYEKKKWFLYLTYRFDKPKSELDPNRILGVDLGVSNAFCASVYGELDKLMIPGDEAIETIRRLEQIKYSKLRQARYCGEGRIGHGTSTRIAPAYSTRDKISNLQKTLNHRWSHAIVRYALRQGCGVIQMEDLSGIKEANDFPLRLQHWTYYDLQTKIKNKANEYGIEVRQVDPQFTSQRCSKCGCIQKENRPAQAKFCCIKCGYRTNADYNASQNLALPDIDRIIQEELKQIGANRK

SEQ ID NO: 1002 - protein, 430 aa, unidentified
  REGION 1..430: note = Table 20
MKEIAKVVKLELGWVFTDDGERAFPYSDLFEIQRQVALVKNKTIQLCWEWNNFGADFHAMSGAYPKTGDVTGYKTLDGYVYQRLKDDFSRMFKKNLNASVRSAQKAFETAKKSLHKGERSILSYRKDAPIELHNSAVSFSQEGRKYKAAVKVFSLSYAKEKGYAGTGVEFELSHLQGSPKEIVQRCMSGEYKIGESKLIWNEKKKKWFLYLTYKFTPAAVALDPEKIMGVDLGIACVAYMGFRFCEDRHVIPGHEVEHFRRRVEARKVELQRQGKFCGEGRIGHGRATRTKPVDQIGHAIARFRDTANHKYSRFIVDMAVKHGCGVIQMEDLHVHAEDKLLKDWTYFDLRTKLEYKAKEKGIEVRFVNPRYTSQRCSCCGYIEKENRKTQKEFICLECGFAANADYNAALNLATAGIEQIIDEYVSANHK

SEQ ID NO: 1003 - protein, 469 aa, unidentified
  REGION 1..469: note = Table 20
MGAKIVKLQLIYKSDEVMPYKDYCKELFALMREMSIIKNKIATYLYLDKRFSVALPIEKDTKVKSASGLASAFASELLVNYKTGEVEVLKNHSSNRSAAGQDVQAKFKKFLKESMGAYAVNPPSFKDNGTLCLHDRCIQIYYDEDNKDYGAKLFLLSHSYAKELGIKSSNGFDYKLLVGDDSSRAIIERIIAGEYKISASNLKWDKRKKKWYLLLCYSFTEKRTTSYDPKEYENNVMGINFGVICPMYMSFNHCKNRYNIEANEIEAFRKQVEARRIALRRQRKYCGDGSIGHGKNKRNSPAMKIDDKIARFRDTCNHKYARYAVDMAIKHQCGIIVIEDLTSIAEKEERLFLKTWSYYDLQNKIEYKAKEAGIKVIKINPQYVSRRCSKCGYISFEKEENIKAPDYRKFHCVECGFQSHVDYNASQNNATIGIEAIIAEQIKEHNSENVKNQPAAKAAKSKSKIKETA

SEQ ID NO: 1004 - protein, 421 aa, unidentified
  REGION 1..421: note = Table 20
MDKTLRDIQYVTCKASNKAMQMYYMWEYEKLEYKNKYGEYPNEKEMYGKTYRNVVEAEVKAIMNTINTSNTGQTNAFVMKKWNTDKKDIMNYRKSVASYKLNMPIYLKNSSYKILQGESGYEIDCAIFNKSQGLKHLTFTIDKLDGTKKATLNKLIESKNLSELINGAYKQGAMQIVKKKNKWCMLISFGFEAVKRELDTNRIVGVDVGIVNALTFQVWDNTTQKWDRLSWRDCLLDGKELIHYRQKIMARRIALLKNSKLSDENKGKAGHGRVKRIGPINTISDKVKAFRDTLNHKYSKYVIDFAIKNNCGCIQMEDLSGYSESVSETFLKNWSYFDLQSKIKYKAEENGLAINFIKPYHTSLRCSLCGNIQKENRDCRNNQSRFKCTVCGYEENADINAAKNISLPNIEQLIKEQLKIK

SEQ ID NO: 1005 - protein, 444 aa, unidentified
  REGION 1..444: note = Table 20
MALVKSVRIQISRCEELDYKRMSSIFRDIRYKTCRASNEAMRLFLLNAFQSIRYKELHDIYPDIKSLTGKSLNTYIYNSMKEIMDICQTGNVAQTQQFVKNRFNTDIKDLLVNEVSYTNFKKDMPLFLHNKSYTICKDEDSGKYKVECSLFNRQYQKENNIKRVTFVLGKMDGNQKATLDKIIAGEYKQGAGHIKQDKKKKWYFTISYSFEPQIRKINTNRILGVDLGMVNTAVLQIWDIDKQKWDWLEWKECMLDGGKVYNFNQRVEGMKRSLQRSRKVSSVTSPYSKGKKGRGVQARIKALNRLNHKISNFKDTINHQYSKYIIDFALKHNCGIIQMEDLSKIKDKAEEKFLAHWTYYDLQSKIGYKAKAHGIKVVKIKPAYTSLRCSKCGHIDKENRKEQAKFKCVKCKYKLHADVNAARNIAIPEIERLIEIEKEEVNAI

SEQ ID NO: 1006 - protein, 450 aa, unidentified
  REGION 1..450: note = Table 20
MKINKCIKVTLIKCLNYDYKEIKQIIRDFNYTACKASNKAMRMWLFHTQDMIDKRNEDKLFNQIQYEKDTYGKSYRNVIEGEMKKLMPLANTSNVGTLHQQLVQNDWGRLKKDILSCKANIPNYKINTPYFIKNDNFKLRNHNGYFVGIAFFNKEGLQQYGYKIGHKFEFQIDKLDGNKKATINKIINGEYKQGSAQISISKKGKIELIISYGFEKEEIPVLDNNRILGIDLGITNVATMSAYDSIKDEYDYFSWKTNVISGKELIAFRQKYYNLRRDLSIASKTAGKGRCGHGYKTKMKPVDKIRNRIANFADTYNHKISKYIVEFAVKNRCGVIQMEDLSGATSEVHNKMLKDWSYYDLQQKIEYKAREQGIEVKKVNPKYTSKRCNKCGCIHEDNRDCKNNQAKFECKVCGHSENADINASRNIAIPEIDKIIDKTEILHSENRQAS

SEQ ID NO: 1007 - protein, 493 aa, unidentified
  REGION 1..493: note = Table 20
MKTTEKNVLMTKCIKVTLNRCVNYNMKEIMNIIREMQYLSSKAYNLATNYLYIWDTNSMNFKNLYEEKIVDKDLLGKSKSAWIENRMNEIMKGFLTNNVAQARQDVINKYNKSKKDGLFIGKVTLPSYKMNGKVVIHNKAYRFSKNEGYFVEIGLFNKEKKEELNCDWIKFKLDKIDSNKKATIYKILNGDYKQGSAQLHINKKGKIEFIISYSFERENSIKLDKNRTLGIDIGIVNIAAMAIWDNNKQEWELTRYSHNLISGNEAIALRQKYYKLGLRNKELEKNINRELHELEEKEYRGLSTNIISGHNLTYKRIMLNSKRIRLSQSCKWCGNSKVGHGRRVRCKQVDKIGNKIERFKDTFNHKYSRYIVDFAVKNNCGIIQMENLKNFNPSEKFLKDWPYFDLQTKIEYKAKEYGIEVIKVNPKYTSKRCSRCGCINELNRDCKKNQSKFKCVNDECNNYENADINAAKNIALPYIDKIIEQCLETNKVV

SEQ ID NO: 1008 - protein, 447 aa, unidentified
  REGION 1..447: note = Table 20
MNKCIKVELKSCLEKNLSNKQSQKFLKDIQYLSWKGCNRAITYLYNHDMKNSELKYKNLPKIDPNKEYGKSLGSWIEDKLKEIMVGCLTTNVAQTRAFVMNRYKQDKKQGLLKGNVSLSNFKRNMPIIIHNKAYKIIKDDKGYIAEIGLFNLIKQKELGIKRLTFRINKLDGNKKSTLNKIINEDYKLGSGQIKQDSKGKWYLLISYSFKNEIVEGLDKDKILGIDLGIVNTVAMSIYNIKKDTWEQTRYKDTVIDGEELIHFRKKIEARKKSLSIGSKYCGDGRIGHGYKTRMKPFLNIKDKISKFRDTYNHKISRYIIDFAIKNKCGAIQMEDLSGFPEYQTEKFLKDWTYYDLQNKLKYKAEEIGIDIIFINPKYTSQRCSKCGNINNKNRDCKKDQAKFQCIICGYKENADINASKNISIPYIDDIIKEYLKENNSIKVDFPT

SEQ ID NO: 1009 - protein, 422 aa, unidentified
  REGION 1..422: note = Table 20
MMTKSVKIKLGTPIDSNWNTVRKILADLRYNSSKMLNFSIQQCYQWMIYRNEYREKYGKYPRAKDIYGYSHRNHIYRQAAEIFPIFNRGNISQTVGMATSRWSSDQKDVMSLRKSIPSYRLQAPIYIANQSYTISRTENGLVVDCSLVSKKYAKEETNDKTRYRISLVVKDNSTETILDRIVSGEYSQGYGQIVKDRRKEKWYLLVAYRFEPKKTKETGRILGIDLGIVYPLYMALNDSHHRYRIDGGEIEHFRRNIEKRKNQLLDQGKYCGDGRRGHGIRTRIAPIEFAREKIKNFRNTTNHKYSKFVVDIAQKHDVETIQLEKLDGISEDSTFLKNWSYYDLQQKIQYKAQEKGIKVAYIDPRYTSQRCSRCGNISRENRQDQQRFRCTKCGFSANADYNAAKNISTQNIEKIIEEELKK

SEQ ID NO: 1010 - protein, 426 aa, unidentified
  REGION 1..426: note = Table 20
MLQVTKAVRFQIIKPLNFSWDEFGRILNDLSYHTTLMCNAAVQMYWEHNVMRNRYKAEHGRYPQDKEIYGQSFRNVVYHRLREMYPLMASSNVSQTNQFALKRWQTDLREVMRLQKSVPSFRLGTPVQVANQNYSLYIAKGEPPEYCAEITLLGKDAACRRFTVLLDAGDAPKKAVFRRIVEGKYKQGVMQIIKHPRKKKWFCIVSYTITKDPAPGLDQERVMGVNLATGEAVYWAFSFSPKRGSIPAGEIEAAEKKIRAITARRREMQRTAGVTGHGRKRRLKATRVLAGKTANIRDAINHKYSRRIVRIAAANRCGKIRLADMSALGMSGALKAWPWSDLVQKIGYKAAEQGIDVEIVEKPGDRAKAWHTCSECGYSAPENVGDNTEFLACKECGARISLEYNAALNIAVLARDSIPEQQTSAS

SEQ ID NO: 1011 - protein, 464 aa, unidentified
  REGION 1..464: note = Table 20
MSIKAIRLEILKPYNEPDTATPVTWNELGQVLRDVRYACSKTENYAITKCYLWEQFKIEYKNNNGIFPNAKDFKEMTDLYSQLTAMFPDVAAAIVNQADQVATRKWNNEKKDVLSLRRSLTSFKLDVPIPIHNKSYKLRKISEDNKIIYVINVNLLSKKSERQTTYSMVLKVKDNSSKTILDRLINKELSPKGIQIIGSNKNRQKWFCLIPYDFTEKDTELNPDRIMGIDLGIAKAVYYAFSDSYKRGYIEGGEIEHFRKSVRARRIAIQNQGKYCGDGRIGHGVKRRLQPVEALREKEKNFRNLTNHRYARRLVEVAVKNHCGVIQMEDLTSITKDNTFLKDWPYYDLQTKIAEKASEYGIVFKKINPYKTSQRCSRCGYIDSENRPEQSVFVCRECGYGNMYLCEDCNKEQNHAGKCDSCGGVTNLITVNADYNAAKNIATKDIEQIIKKTMGKDYNPPKKK

SEQ ID NO: 1012 - protein, 497 aa, unidentified
  REGION 1..497: note = Table 20
MGESVKAIKLKILDMFLDPECTKQDDNWRKDLSTMSRFCAEAGNMCLRDLYNYFSMPKEDRISSKDLYNAMYHKTKLLHPELPGKVANQIVNHAKDVWKRNAKLIYRNQISMPTYKITTAPIRLQNNIYKLIKNKNKYIIDVQLYSKEYSKDSGKGTHRYFLVAVRDSSTRMIFDRIMSKDHIDSSKSYTQGQLQIKKDHQGKWYCIIPYTFPTHETVLDPDKVMGVDLGVAKAVYWAFNSSYKRGCIDGGEIEHFRKMIRARRVSIQNQIKHSGDARKGHGRKRALKPIETLSEKEKNFRDTINHRYANRIVEAAIKQGCGTIQIENLEGIADTTGSKFLKNWPYYDLQTKIVNKAKEHGITVVAINPQYTSQRCSMCGYIEKTNRSSQAVFECKQCGYGSRTICINCRHVQVSGDVCEECGGIVKKENVNADYNAAKNISTPYIDQIIMEKCLELGIPYRSITCKECGHIQASGNTCEVCGSTNILKPKKIRKAK

SEQ ID NO: 1013 - protein, 483 aa, unidentified
  REGION 1..483: note = Table 20
MVTKVVKCKVVGFDSLPFEKKDAAGNAKINNKKAKEAWNRNIEMIDQAVKDFVAAKNRGITYLFTESIKIQDAMDASGESSFYDAWKKMHGGTQLRTTMDHFLVKELPGYLAENVCESSGRLVTRFNQAKKDGLFKGCVSLPSFRDNAALDFRGSSVKIKQETINGEEKLYVELRFKRGIKLHCNIDFSGNNGAKAIAKRVCNGEYKSGTASIVKRKGKYFIYICYSFEPETYMRLNGMDGLAEKLDTKRILGVDLGLAKPVAMQPYDSISQKYLSGGKNDEFVNTEEYTNRFTISGDQITAFRKQVEKRKRALQRDLRDVSPGHTGKGRIKRIKPVETFKDRIANFRNTTNFIYAKRIVDTAIKYHCGIIRIEALTIDVSSRKSERFLKTDWTYYDLQQKIESRAANFGIVVQKVKPNYTSQKCSKCGHVSADNRKDQSHFKCVSCGFEMNADLNAARNIATLSPTDKINKKKKREVKDDQV

SEQ ID NO: 1014 - protein, 399 aa, unidentified
  REGION 1..399: note = Table 20
MGLNHAITEWHLYERERARHYRETKENLPAEERKKTWNRIYSEVRGLMKTASSGMASMVTRTAITRYQNSLKDIRSLKQSVPSYRLGHPILLREGGGETKLWRDNGNYMFRATLRNRSNEPTRLTFLLDTFKLEKSKKAVLDRVISGEYKLGACQVAQDRRKRWFTRIAYSFPRPELKKDTSICVGVDLGLACPFYCAVNNGHDRLSCNEALIVERFRWQIRRRRRAFQNSLKFSNRGGHGRNKALAPLEKLAEKEINFRDTKYHQYTSRIIEFALKQNAGVIQIEGLEGFRASQQGILRDWAIADFHSKLKYKAEHAGIEVREIDARYTSQRCSECGNINEANRQSQSDFLCTVCGYKTHADYNAARNISIVGIEKIIAEEIARKGLAEQEAQDVPQG

SEQ ID NO: 1015 - protein, 497 aa, unidentified
  REGION 1..497: note = Table 20
MNTQEVSASVPAEPTRLNKVLKLRILKPADDRTWGNLGALLREVRYRVYRLANLYLSEMYLGFHRHRTGDAPGWQKPNVSELNKRLLEMLGQETQKPASIRRLGASGGALFSCVTDALSQNKLRALTARTKWIDVLKGKSSLPTFRLNMAVPVRADKSQHRRLVRQPDGSVTLDLMLCPKPHPRVLLATQKIGDGAAAVLDRLLNNPSQCLDGYRQRSFEIKEDARTRKWWLYVSYDFPKAPSANLCTDIVVGVDLGFSTPIYAAISNGHARLGHRAFAALAARIRSLQRQTLVRRRSIQSGGRASVSAETARSGHGVTRKLLPTQRLQGRIDDAYTTLNHQLSRAVVDFARNHGAGVIQMENLDGLKERLSGTFLGQRWRYHQLQQFLKYKAEEVGIEVRQVSPRMTSRRCSACGHIHESFDRAARDRGADGGFKARFVCSNPKCGHTADPDYNAARNLATLDIERIIREQCVTQGISCRSLETDDDSTDPPHTVG

SEQ ID NO: 1016 - protein, 441 aa, unidentified
  REGION 1..441: note = Table 20
MKLTKVIRLEILKPANDDWKTVGSRLREMQRATAQALNHCIRKYYLEAAPKVEELKRRNEKITAKAVKGKQSNTAELGSMFGSVFNSYVYGTIDNIARQRWNTDWFDVMVRGEKSLPSYRRDCPIFVRARGVNLREKVADEFINRSIDIKLQPKTNNIIPTDNFILSNRSFDESRTAIWNRLRSGEYKLGTIQLLYHKRKKKWFVNLSYSFEAESVKELDPNVRVGADLGLAVPVCLAVNNGYGRAYLKEEGESIQSFRRQIERRRNALRRNERGILERRSGHGRKHKIETIEKLRELENNFRRTANHRLSRAVVNFALKHRAGVIVMENLEGFKEEHAEDKFLSSWTYFELQTMIKQKADEVGIYVETVEPKYTSQRCSKCGHIEKANRNGRQFKCCSCGQTFDADYNAARNIATIDIAKIIKETKISEDDNAAANQPQS

SEQ ID NO: 1017 - protein, 411 aa, unidentified
  REGION 1..411: note = Table 20
MTKAKDRELSKVFRVEVLKPLNLTWDEFGGLLRRTQYHAAHLANEVITTQYLLAKGKLERNGSFCALVAHACHDCSLHADVKCTVCKWARDKFKADARRILRADISLPSYKNNLCMIKNRSVKLRETPDGWAARLAILPKADGKNQVQPEVLLRTEEMKRRSPGAYQVLERIASKEYKQGTTQVKRDTRTGKIYLLISYSFRPERESGLEASRVMGVDLGVSTPAYCAFNDSLKRKSLLIEGRKLLKTKWQIEGRRRDIRRHNDQRDLRRGHGKEAKFRPMEAVEQHWVDFRQSWNHVLARRIIEYALSNHAGAIHLEDLSPGTNSKFLGRNWPVAELLDYIEYKAKERGIAVKRVNPFKTSQTCSDCGAIKESFTFGDRKKAGFPDFVCDACGFRTHADYNAARNIAKAP

SEQ ID NO: 1018 - protein, 470 aa, unidentified
  REGION 1..470: note = Table 20
MRIIRPYYGDEIEKFITAGKEKSKADGADGALTKIFWDRLKASHPEIVSAGEFYGLLCAMRMEAVVYYNRAISKLYQSLIVDVDGAQVSTAKALSAGPYHEFRERFTSYISLGLRQKLQSNFRRKELLRCQLALPTAKSDRFPIPISKQVDKQGKGGFKVSELQNGDFIIELPLMAYHKAKGKTEREYVELDAGPAILNIPVILSTQRRRANKTWFKDEGTDAEIRRVMSGEYKVSWLEILQRNRFGKAHGDWYVNFTIKYQPKDCGLDPKVKGGIDIGLSSPLVCAVTNSLDRLTIRDNDLVAFNKRALARRRTLLRRNRYKRAGHGSANKLEPITALTAKNELYRKAIMRRWAREAADFFRHNKAAAVNMEDLTGIKDREDYFSQMLRSYWNYSQMQTVLENKLKEYGIAVNYINPKDTSKTCHSCGHVNQHFDFSYRSANKFPMFKCVKCGVECGADYNAARNIAVA

SEQ ID NO: 1019 - protein, 391 aa, unidentified
  REGION 1..391: note = Table 20
MRDKLKASFAGEKLKKIKNAQISSPSATSDRFPIPMWQQTGFRVETNNEDLVIDIPFPLYKYREEVDKFKPWEKLEFIDTSKKKHIQLILSTNSRKRNVGWVKDWSTEAEIKRVMSKKLVINKIEITRGKRINERNYWFVNFVIAYEKPVRKLDSKITGGIDVGVSNPVVCAINSGLNRLTIRDNDVVDFTRAELARLRSQRRGDRFRRGGHGIKHKFKPSETIQKKYEQRRKKKMEEWASRITRFFLNNGVGLVYMENIDKKSISDGEDYFKVQLRVTWPVKEMQKLFERKLKENGIEVKSIDPKYSSQLCSKCGKWNTHFNFRYRQLNGYPPFECKYCDYGKDKEKEIIYADYNAARNLANPNFDKRRKVAIPSEVLKGNIKEEVVAEN

SEQ ID NO: 1020 - protein, 557 aa, unidentified
  REGION 1..557: note = Table 20
MGEKSSRRRRNGKSGAWTAAITSCVGGKMAKNTITKTLKLRIVRPYNSAEVEKIVADEKNNREKIALEKNKDKVKEACSKHLKVAAYCTTQVERNACLFCKARKLDDKFYQKLRGQFPDAVFWQEISEIFRQLQKQAAEIYNQSLIELYYEIFIKGKGIANASSVEHYLSDVCYTRAAELFKNAAIASGLRSKIKSNFRLKELKNMKSGLPTTKSDNFPIPLVKQKGGQYTGFEISNHNSDFIIKIPFGRWQVKKEIDKYRPWEKFDFEQVQKSPKPISLLLSTQRRKRNKGWSKDEGTEAEIKKVMNGDYQTSYIEVKRGSKIGEKSAWMLNLSIDVPKIDKGVDPSIIGGIDVGVKSPLVCAINNAFSRYSISDNDLFHFNKKMFARRRILLKKNRHKRAGHGAKNKLKPITILTEKSERFRKKLIERWACEIADFFIKNKVGTVQMENLESMKRKEDSYFNIRLRGFWPYAEMQNKIEFKLKQYGIEIRKVAPNNTSKTCSKCGHLNNYFNFEYRKKNKFPHFKCEKCNFKENADYNAALNISNPKLKSTKEEP

SEQ ID NO: 1021 - protein, 507 aa, unidentified
  REGION 1..507: note = Table 20
MEEAKTVSKTLSLRILRPLYSAEIEKEIKEEKERRKQGGKSGELDSGFYKKLEKKHTQMFGWDKLNLMLSQLQRQIARVFNQSISELYIETVIQGKKSNKHYTSKIVYNRAYSVFYNAYLALGITSKVEANFRSTELLMQKSSLPTAKSDNFPILLHKQKGVEGEEGGFKISADGNDLIFEIPIPFYEYDSANKKEPFKWIKKGGQKPTIKLILSTFRRQRNKGWAKDEGTDAEIRKVIEGKYQVSHIEINRGKKLGDHQKWFVNFTIEQPIYERKLDKNIIGGIDVGIKSPLVCAVNNSFARYSVDSNDVLKFSKQAFAFRRRLLSKNSLKRSGHGSKNKLDPITRMTEKNDRFRKKIIERWAKEVTNFFIKNQVGTVQIEDLSTMKDRQDNFFNQYLRGFWPYYQMQNLIENKLKEYGIETKRIKARYTSQLCSNPSCRHWNSYFSFDHRKTNNFPKFKCEKCALEISADYNAARNISTPDIEKFVAKATKGINLPDKNENVILE

SEQ ID NO: 1022 - protein, 172 aa, unidentified
  REGION 1..172: note = Table 20
MKTKTIMGVDFGVANIMYIAFNNNYYHYSFVSAPVIKKGRKLIKTGENPYEILDRYNYNIALKVLYIAIKHQVRTIHMEDLTGTSFTNNMFYYELQRGIQTLAQDKNIKVRYVNRHMTSQKCSLCGYIDKRNRINRKTFICLKCGNTMNADYNAAKNIANPNIQSIKTSSPL

SEQ ID NO: 1023 - protein, 383 aa, unidentified
  REGION 1..383: note = Table 20
MPESTINLQMQIKDLSEKKKKRIKETIKKQKEIAQEISNLMPSIKPNRWSKAKSDGVFYRWVNKYFPENNGLRSHDANQCAYKVADSYDSWKQNGYSGEKPKFKDQNWCRFCNCNKIISYEQNNGKWGVKLPLEPYRPEWFRLGVGEYQEHYLTKEDKRLGDAEIIKKDNGFFLNQALSFEVEKERETLNKLGVDLGLNKVAVYVLLDEEGSYIDSRFFDGARVRHYRKKMSDIRKRLQEADQVKKVEELKDKEKNYIEQRNHFISKKIVDVANESNAEIKLENLSDIREKVNRDASKKHRRELNSWAFGELQSMIQYKAEMVDIPVTKVPARYTSQKCPNCSHTSEDNRKGTKFKCKQCGIEYHADFVGATNIANKKQQKPK

SEQ ID NO: 1024 - protein, 467 aa, unidentified
  REGION 1..467: note = Table 20
MPQDPPDATLSAVFEDGYQSLLDEFVEAEGVWNPQVELLDEAPTNAGPRQFHHTWETDSLKERLTYILPLSVGTRTASHLDNYISEAQTIRRLAANLLWSYEPAQWGGNSDVNSLIKTHPYWKRNNLKAGNKQANVNKVGEAFGAWAANDRSADTSALPQFGSGNYLCIRGDYIEVWDDAAGVTIAVGGVQHQPPDPGRDEEFQLVCGGGDYQQKVLDAVAEGVVNTGRSEVHHRDGEWFLHLTVWYNQPKYDHRELERWVGIDLGTVALYTAAVVERAPDSPKGNGVDVLEVAHGPGSELMDTRRTQQQRLSYLQEEYGYEVASEKLGQQLAEHSKQLEHEYANEIVALADAYAPCGIVFETLKGIKGLGWSHLWAYFRFKQVITYKAHQRGIPTVTLGKSQTQHTSQDCSACGRRTSEADDDGRITRAQFRCDDCGYGPVDADSNAAINIATRRLSTLFSECGRY

SEQ ID NO: 1025 - protein, 391 aa, unidentified
  REGION 1..391: note = Table 20
MSKGQQSCSGEYTAGTTTETVTRTIKCPLETSDRKREYLRSVIEEWQDIARFTAERLKSFQRYDISRNNPQVYSIVKEWDDLGISAAIARDATYKAVEAYESWYELGQQGRPPMGQFGDGNYLRLSNQQLTIAENDRGYGVKLNLVPRDAEWFHIGGGEYQADWLERVVDEDDSTRVGSSEVRLDSEQAYLHLVVVTEVEVYKPDDVSTRIGVDLGENALYAAAVTGPDGIQEVEMESGREFRHYRDELDRRRKRLSQKGDLQGVRQCRGERERYTEHVTHTATKTIVELAQAHAPCKIRLEEMGNYRETVDDPIHDWPRGMLAEQICYKATAAGIPVEFVESPYTSKECNRCDQRGLREGPSFECRRCDYEVHADVNAAINIAHCPPKDD

SEQ ID NO: 1026 - protein, 392 aa, unidentified
  REGION 1..392: note = Table 20
MSKAAQSSLTKFAAGTTTEEVVQTAVLDLGTSNQKTELVRDGIEEFQAMASYIGDMVPSIPEPERYPYNNVFYQLVTGEFEDRAVKASVAQNAAHHAVDMFTSHAQRGDHGDRPDLGNGSFLKLTNQDFELVENDTGYGFKASFIRYNPIWFHVNTTPHSREYLERVFDGDADTGSCVLHVTDDGDVRAHLAVKWPVEVYEPHDVSTHVGVDIGENVLYAAAAVSGDGVAGVKMESGREFRHHREQLQQKRYRLSEKGDLRGVKACRGDIERYTDHVLHTASKEVVEFARDHTPCVIVLEDLTGYRETADDPIHDWPFADLQTKIAYKATAEGIPVELINPRNTSIRCRKCGQATPEFRDGADFKCRRCGYEVHADVNAAINIGQAYPDQNQ

SEQ ID NO: 1027 - protein, 390 aa, unidentified
  REGION 1..390: note = Table 20
MQTSISEFTAGTDELDITRTIRCKLATSNEKNETVRRGIEAYQQVASHMADVLPSYPAYEWNLQNTQMYHQAKRALPDDDVRYKTTLAQMAKNDVVESFTSWRERGEDGTLPRGQYGDADYLSLRHDDCEIHANDKGWGVKTSFISYNPVWFHIHAGDYQRQFLERVTDDDDPASAGSAELHLHDDGTLYLHQTITWPVEVYQPAEVSTVVGVDLNDDPLVCAAVVDDGDVVAVELESGAEYRHHRERVKRRRSEAMERNDLKAIKDARLQYKRYTDHITNVASKRVVDVAEEHAPAVIHLEDLTHYRETAEDPIHDWPFAEIQEKIAYKAHEAGIPVQVIDPRNTSVTCRKCGETNPAMRDGDDFECWECGYEVHADVNAAINIANTDP

SEQ ID NO: 1028 - protein, 433 aa, unidentified
  REGION 1..433: note = Table 20
MSNKQASIQRFGAFAQPPPEERDTYTRTIIFHIPTLTTKKTGKLNRAMKEYRYARSEACQYFQNHDPFDFTISDQSELSGQITDRGDIQIPRLQVGYAIRIVNQNYREFRKETNASPPEANRADTLAVPRKYTHIFHDDGCFYLNIRTGRGRVALPLETSEESYHTDYLPSPEAVPDKKSSRQRISGVTFRDIDSADLPGKVQRLSTSTLQKINDRQFTAHLRFQIATKYQRTFDPDEARYIVGVDRGRNQLAYAALYDCDEDHVLDWYNRSGDQVEHYMNQFSKRIREFKKAGVWNQMDDARKRRQRYKRQVDYEVANSIVEFARNAPGSVVIVLEELSEIHRLGKYRAEKRRFNEWSYSRLQEFIEEKSDVYDIPVMKIEPYYTSQECSRCGEDEETSRQSVYFKCNKCEYNQHADANAAVNVAKFFVANQ

SEQ ID NO: 1029 - protein, 398 aa, unidentified
  REGION 1..398: note = Table 20
MLNRQIKNYLLARQYAAKHFQSDGVVASDLTYSKRNELRKSIRTKPDVDLNARSIEVAITRMAKDYSKYETDPRASEPWPEGVNIIAYSAQTAYLFHDTGRYYLCVPGKNDHLILPLVVSDDQYHQEALPNPEAAKDSGRRPGTALEDFGPSDFQGTAVGLGQCSVVKRGPREFELHLSVKREQKASRNVTTPRYIVGVDRGRNQLIYAALYDRKEDHVKQWVNVSGDEVENMMDQVADRIAECQQAGVLEEMDKLRRRRRRFKRQKDYEAANEIVDLAHEGLRGQSTLESYGVVIVLEYLSGMSRLGGYSAERRRFAEWSYYRQYLAIKNKAEPYDISIESVESAYTSRKCARCGVDGDETHRSGIHFECESCGYEIHADANAAVNIAKRYAESLEA

SEQ ID NO: 1030 - protein, 436 aa, unidentified
  REGION 1..436: note = Table 20
MAKKTKTATKAVKFQLLPITKAKKDRLQVVADNFREIYAVAAYRLPSLEKTSQYGSRRALNRLRIELHPITIVAAQIAQEAIEYARANYETMQTQKSKIRKTIERLEYEIGRIDEKIEKPGKRERVRKKLARKIRRKRRGLRTPYPILTHNIIRIHNQSWSFVHKNDRIYVVLPVEKIGTRYRKIWLPLKESEHYRHLISNTNKWGVGQLDLDTDTFITSITVKREDVRYEPETFIGIDLGLNNIATLAVVQDGKVVEVRMWSGKEVEHTRRRFREYRRTVSKIGRVDLLNANRGREQRWMAYTNHVVSKQIAEIVLAYPKPLVVFEELYRFVDRVPWNFYQIRQMIEYKVVPVRTLGIHPARTSVICNRCGGDDPDNRHGVHFHCTKCGYRVHADVNAAINIAKKGEWVLQQAKKKESAKNLSTTTTQSHNGDVP

SEQ ID NO: 1031 - protein, 320 aa, unidentified
  REGION 1..320: note = Table 20
MMEHRERASSVFYPEIPCVIAKSLIAKYQRNQKCKVVKNLVLPICGDKGKQIKLEGNGIRIPAVLKKQVLPVVWLRKPLGFIRSIEFLRKGGDWFACICYNTQAEFNFTPIGTVGVDRNSVGAVATLADPQTGKVLHLGFNPAHTKEVWRRRKANLQSLGKRRLLHKIRNKQSRRTKYENHLVSKQIVDYAAKHRRAIVLEKLEKVRRGRMRHYVEKSQWSFYQLFRFIQYKAALRGVMVMEADAAYSSQECSRCHQISKPNGKSFRCGYCGHHDHRDANAAFSLSERVMPIGGLATESESRGSALLVMPSLGTEAQQCA

SEQ ID NO: 1032 - protein, 363 aa, unidentified
  REGION 1..363: note = Table 20
MEMIKTFKVKHGVNFDSSLFEKAVKVAQFALENGLVSTKVVKHIGLKSEIANQIVRKYGLNKKIKSINPKRVKLTVPGQNLKFDLETRKIRIPSLNAEFRCWFPSGWTKLNQVEIDQKWAYVSVTFPDQQADEPKSFIGIDLNSTSHSIVVANPLTGKVQKFGKQIPFLKKKYKNIRQNLQEKKQWSQLKKIKDRERRKTTDAIHKITTKIVKEAKKSGVGIKLEDLSGIRKDCTKKYRKQGNHTLNSWPFYQVRMLLTYKAKEQGVELNVVDPAWTSTSCSRCGVVDKESRNGKVFHCLHCEHIDHADVNAAFNIALRPKIDPVKKEIRRKGRRMTQSSELKSLKGKVDEGKTTLEPYGLVP

SEQ ID NO: 1033 - protein, 328 aa, unidentified
  REGION 1..328: note = Table 20
MILTYKLKHNKDFSDELRKAKQVAEFGIKNRTLSSKDVKQFGLKSAISNQILRKYVKNKKVKSVSSVQLTIPNQGIKVDKKSRKITIPCLKLVLDYQFPDFEKINQIEIGNEYACVSVTIPDMVPEKVDNYIGVDRNTTGHIAVAANPKTGKMWKLGKSGLHTHKKYSNIRRTLQKQGKYRKVKQIKNRESRIVKDLNHKISKKIVETAKENNCGIKLEDLTGIRNNKKHTRSFNYSLNSWSFYQLQMFIEYKAKLRGVEVVYIDPHYTSKKCSICGQIGNRNGKSFKCSCGHVDHADVNAAFNIGQSIKERDLMEGNTDIPKAALSI

SEQ ID NO: 1034 - protein, 512 aa, unidentified
  REGION 1..512: note = Table 20
MLLTYKIKHNRDFSEELRKARKVAEFCIEHRAQNRTLEPPPIQRTGSSGPQLSPSSLPLSSPFPLLSSALSPSSASPSSFPLSVSSAKSSNDSSISSSTHPFSDSLPGADSFSGKDSLFPADVRHIGLRSTISGQIIRKYSRNRDLKSMKNVKLIVPSKAVNVDREEKTLEIPCLKLLLDYHFSSNFKKISQIEIDNVYAYVAVVFQDEKPDSTGRYIGVDLNTKGHIAVVADPESGKVWKFGKMRYHTHKKYENIKKRLYTKGKYKRLKAVKKREKNIVKDLNHKISRKIVDLALYSGCGIKLENLKGVKKLNGKAESVGKGRNKKSVEKKKNQNVGRSRSEEMNKEVIKTENEIKAEIKTKIETKNKTKTRRENKAKKHIWSNEYSLNSWSFHQLQQFIEYKARLQGVEVVYIDPHATSKRCSRCGLTGNRRSKEFECPHCGHVDHADVNAAFNIALTPKGNGQFSAERDAGKGSPDTPQKILARTLLSKRKASEKTSPYFAWEVCQFLA

SEQ ID NO: 1035 - protein, 313 aa, unidentified
  REGION 1..313: note = Table 20
MIFAYKIRHHTDFSEYLQKAKRIAQFTVNQRNRDITYNNVKHIGLNAVLAQQLIKVYKRNRTLKKVKKVNLVVPGRAVLLNRARKEICIPSLDFSFSYSFPNTFEKVSLVEINNKYAYVSVTLPEDERDVRSWIGIDLNTTGHVAVAASPETGKVAKFGKEIPHRYKKYENIKAHMRAHRNREGSMALERRKRRALLNLTNDIANKIVDIASEANNGICLERVGGRSKHRTCVSDASGQDSLNSWIFYQLATTIELKAKLRGVPVAFIDPYNTSKLCSVCGHAGKRYQKKFECPVCGHVEHADVNAAFNIGLR

SEQ ID NO: 1036 - protein, 231 aa, unidentified
  REGION 1..231: note = Table 20
MYSGFPDPSIQGGGGQRPLFWVGVDLNTAGHIAVAAEPATGEVRCFGRSLESLRRGVERAGSKRGLHRKKQKKMILRVIREQNHAISTGIVEFARDTGAGIRMERLFGRRHCNEISADNPETWLFYTLQKAVVKRAEMKGITVEFVNPTGTSKRCSRCGEMGIRQRKYFFCPSCGYEAHADVNAALNIAGIAPAVQRKEQAGKKAARRAIAPAGNEWFYYVPAGPFPGACD

SEQ ID NO: 1037 - protein, 369 aa, unidentified
  REGION 1..369: note = Table 20
MSARLIFPRFIIIQTNVTTVIVVTTTVTTTFHNPSRERCREWQRATHLYRDTKQFCIDGWETGEFGMSVTTASIDNDLYSAIQNQAIREAKSDYKNDGIVEYHASQPLAVNNQNWEIDRTENGSVVVGFPCISGWWYTPIDVYDDIADDVARLVAGEADKSRLQVYRRDDDWFCTFTVEYDAETGEETAIGVDIGHNHLLAADAETGESMLVSGREAKYVRRKYRSLRESLQQAGALRARNRVGNKEQRRIRDLNHNASRRLIDWAEQFENPVLKIEDLEGIREGSDWRGVHSWHFHQLQEFIVYKAEQAGIRVEEVDPFETSQRCSACGAEGTRNSDHFSCPECDRSRHADLNAAENIRQREGEPCTA

SEQ ID NO: 1038 - protein, 357 aa, unidentified
  REGION 1..357: note = Table 20
MSTVTYTVQLKKLTRRKHIAFLKDQKEYSKAINWSVGELQKGNKLSSKDVPGPLKSAIKNESIRRAKKALSDVKQGLAKRVPRFKSSLPISINNQNWNTVEKKGRWYLGFTSGLGKLQLPVIENETVRTYFPFLTKEYKDIRKTLQLFRKGKKWYVAIPIEMASPIDGMSRDQQTPIGVDVGLRHLAVVSEPTSGKRQFFSGKEVGFKRRHFRSLRRSLSKKKALRAVKRVGQKEKRWMTNYNRQLARDIVLFSLQFENPIIKLEKLDDIRKTCKSTKRSDRTIHSWAFYQLKQFIRECASKYGITVTDIDPYKTSQTCSVCGHAEKKNRSRDRFCCRSCGYTSHADLNASHNIARA

SEQ ID NO: 1039 - protein, 390 aa, unidentified
  REGION 1..390: note = Table 20
MKEVTMTIKLPLFEPTKLKQEMYQTMRNEFSRLLNRALDIKRTNPKIAVTDIDKLLKQDSILPTTTQQEARKLALSRYDDWKKNQKTKSFPRFKEKQTILFNNQNWHFRYDNGYLKLGIPTIEGRLTLEKYGPVRTNEYTSFWVHFLLNGEMDKTNKYYDSSFEQIIGIKKGNGQLYEKKKRWYFAFSITLTVKEKENTDEIEKSVGVDRGLRMIAVAGCGQTGEYKIFNGRYLGHIRRKYHRLRKQLQKAKNMKALKRLENKEQRIIDYWNHVISKKIIRFAEQIGSKTIKLEDLSGIRKMKKHWKQSNRNIHSWAFYDLEIKIQYKAKLKGLKVEYVDPYKTSQECFQCGKVKKTNRRGPLYTCSCGYKKQADVNASFVISTRPSIAG

SEQ ID NO: 1040 - protein, 612 aa, unidentified
  REGION 1..612: note = Table 20
MARTITLELHAPTLAKQQAFRQMQVEFNRIANELAVAMVRGSLDAVETVAPTPAMARSAFELFERGAFEAMERLFPSGLDHPLTRMIRGQLKAAKSRTERSPLPKFKPYAPVVFGDQDWQLTSIEGRWKLTIPVLGRPVTVPVLVPMAQTEALQRLMLAGIPLEGRLYQRRGRWFFAATYLNDVPAPSASYAAVGVDLGRRHRAVAVAPGSNRRLFLSGKAHEHHLRRYDKVVARLAESGNRRALKRVVAKRERYMVHADRTLANALVAFAAHDKGSCIKFESFTSQTTPGAAREVESYRRIQRLVSRKAELRGIPVMAVNGFESSQRCYACGVVQPGNRRGRAYRCACGYHAHADLNAARNIAQTAIWSETIRIAGVGYNPGAQADGTAAAQVAGLIKGQADRMRSALTSLGEAVSHATLPTSPTLGVNASTNTYQMEGIEMASLVKDLTESGTKFVTGSLDNLKTYVDRTSDEMSRVDLVGVTRRVLDTAIDNTKKVVKLSAEPNGLDFFGKAKAVADGSLEAAKEVVNTISEEGKKADFIGVSTRMTMEGIASLRNQVDLTLETTKTVTNRLMPLATSTKPVATRAPQVTRVEIETEKPAATTSSKATK

SEQ ID NO: 1041 - protein, 602 aa, unidentified
  REGION 1..602: note = Table 20
MSTLRTFDLELRPLDRAQREGLRRVRNQIEAFSSLWREALAPLGWMNLAESVRDEGVARARTMLDNARAGVEALPEPFRSSLRGVVQAQYRALTAGMSAAGGEGWTWAIFAPGTWNLSPGPDETLRLHLPLLGKELPVRARLPRDMDMETFQRLTEGARWLEARIGRRQGRWLLRLRCRLATRTPVGVDLGLRHRAVVADAEGRLLLDASGRRERGKAARMDRVVASMRQRGAHRAARHLEARRNRYQANCDMAVAGAVVRAAAKAPQPVLHLEDEATFATLPEATRRRLVRTSRAIRRRAGKAGIPVRLVDGRHSTHRCAACGTHVPASRQKLVSCRCGTHRRDLRASRNLARLAPVRVRPAGEAPRPDSGRQAVGTAASRPHARYKGEHERVGREAQAPHAWMKTIPSLGAPARRQKENTLMTTIVKDLGETTQKLVVHTLDNLKTYVDKTSQELGGVNLVGATRNVLDTAIDGAKNVVKAAETLSDDPFTAIKVVADRSVEATREVLNRIAEEGRKADLVGVSTRIAMEGLNTLRSEVDYSLETGKALVNRLQVSATPTQPVVTRPPQVTRVEIEHEKPARSSAKSTEKATAAEKPANA

SEQ ID NO: 1042 - protein, 612 aa, unidentified
  REGION 1..612: note = Table 20
MNARTVLVELLSPSRAKQETFLRLQDEVSRLGQGWAEATAGIAQAVGGSLEAGNVGPIADQASGYALRTLAAAQQSCATLPEPWRSTLRNFLRQQMVEVRQIRRRARSGPGNVGGTPAPWALPARQAREAPVVFGQDTWSLQVTDGKWKLVIPLLGRTVGVPIAVPPAQSEALRRLMAEGIPLEGRLFRRRGRWFFAARYLNQAPAPRPDAPAIGVDLGESVRAVAAADAGGKRLILSGRRDRAIEARYLRLARELRAAGAVRKARRLEAKLERFRLQRDRETAGAIVAFAKDFDRPVLKFEADQDNRRFQRTIRMTARRAEPLGIAVVAVDGRLSSVRCARCGAEDRSARRGSRFACKCGYKAHSDLNAARNLSRTATWGQTLQFAAAEQSLGGQAVGTAERATRRRYKGGAAVAASPSGHVVSKTQKSLAAPFRKEEYPMPSIVKDLSESSTKFVVGTLDNVKTYVDKTSEELSKVDLVNVTRHILDTALDGAKNVVKTASEPASMDAFGRIKALADGSLEATREVVNVIAEEGKKADVFGMSTRIALEGINTLRAEVDLGLDTTKNLFNRLAPLATTAKPVVTRPPQVTRVEIEHEKPASKSSKSSSAS

SEQ ID NO: 1043 - protein, 405 aa, unidentified
  REGION 1..405: note = Table 20
MIIKTILLKIKQPNVLEFKTIRKTYSKVCNSGIDYLSMQWPNKISHSQLYAYLKDKLVIPSSVLNEAVRLIRSRWITFCKQRKRHIEISIPHFRNTMAISFNNQNWSIKKDGHKYFVGFPVNGSKPYFELALSQRQKDVLDKLLQKQVLSGNGQLLERKGKWYFIISIKFPEPKQVSNTNVLGIDLGLNNIAVCYDKEQGKTTFFSGKEIRYRRTKYASRRKSLGKIKKLYAIRRSKDKERKWMKDFNHKLSRKIINLALKIKAGIINLENLKHIRTTAKTSSKQRKRLGNTLHNWSFDQFKQFIIYKAREQGILVNSIDSAYTSQECPICHHIDYSNRNGIYFHCRACDYKSHADRIPILSGQPGDVVTASLPEIVDPSRDGLLDIAPNLRVARNGNGQKALTT

SEQ ID NO: 1044 - protein, 356 aa, unidentified
  REGION 1..356: note = Table 20
MTQTITIKLKLYRPTHEKEKMYQLMTDRVTAFANKYISLEKKDRPKTSKQAKQYSEPLPSAVLTQAIRDINGKKDPKYFKRLWCNFNNQNFKVEKEDGNWKVSFPTLEKRIGVPIETSERQNDCLEKLINGEVKQGTAMLVKRRGRWYIHLSFEVYIEEKKKEKEKIMGIDLGLIDILVAETEGQTLFFSGGKLAYMRRHFKSLRSRLMKARAYKKLKELGDKEHRIATDINHKISRAVIEFAKEQGVAKIRMEDLTGARWEMKQRKKQKQDSGRSLQSWSFYQLQEFIEYKATLTGIEVEYVNKDNTSMICSVCGHKFTSRPKGRMFECPSCGSIRHIDANAARNIAEAISGIAS

SEQ ID NO: 1045 - protein, 350 aa, unidentified
  REGION 1..350: note = Table 20
MQTITLRLKLHQPTKAKQAVYRELAGRVTGFANNLVAAGRPTKLTSKTAKPYCPDRIPSAVINQALRDVAAHPKVEKFRVLWPGFNNQNCRLERVGGFWTVGFPTHVGRVRVPLQATDRQAQLLATLGATVKQGAAKLYEKRGRWYLALSISVQVTPCVGTKAAGVDLGLRNLAVVNCEGETLFFSGDHAAFVRRRFNALRRRMGKAKALGAIRRMKDKEARWMKNQDHEISRKVVDWCIARGVGTIRMEDLTGIRMRGKRNRKDRGRSLHSWSFYRLKQFIAYKANLAGIRVELVVPENTSRTCPACGVVDQASRRGIRFKCTVCGHTEHADSVGAANIARAISGLAAA

SEQ ID NO: 1046 - protein, 397 aa, unidentified
  REGION 1..397: note = Table 20
MLKTRRGNVSSETIQHYIETKGDNMQLTYVLELLKPTKRKQNIFLNNIAEVVKNRQFVADKLKAGETKLSSADFKEINLPSAVKNQNIREVKALYKLFLKSDSNKDNLEFKDNQPICYNNQNYKIDGSIISIPLYTTKCQRFAFPIKQTKRFEELQQYIESGCKLGKASLFYKRGKWYFAVTIKISDKETTNSNVMGIDIGLRQLAVASIKTPKGKEINRQFHNGKQAGFIRKKYRSLRRKLAQSKKVKAIKTIDDKEQRWMVDLNHKISRQLVNLAVQEQVGTIIMENLENIRNTAKSLNRAGSTTKSSYRTRRDRNLHSWTFYQLQQFIEYKAELAGIKVEYINPKYTSQSCSKCAKVKKSNRKANLYSCECGNHIHSDLNASRNIANKYSASVS

SEQ ID NO: 1047 - protein, 495 aa, unidentified
  REGION 1..495: note = Table 20
MMNDYRRTKTTISLINYHFVFYPRYIRKIFLNTKVEERFKELVQEICNELDIVIVAMECDTDHVHLFLNTLPTLSPADTMAKIKGVTSKKLREEFPHLQHLPSLWTRSYFVSTAGNVSSETIKHYVESQKTRGVKFVTQTITVKAKLLPTKEQIRLLKQSSSDYIKLINTLVFEMVESKQSTKKSTKDIEANLPSAVKNQAIKDAKSVFSTKVKKNKYKIVPILKRSVCVWNNQNYSFDYTHISIPFMVNGKPTRLKVRTLLIDKHNRNFDLLKHKLGTLRITKKSGKWIAQISVTVPTIEKTGTKILGVDLGLKVPAVAITDDDKVRFFGNGRKNKYMKRKFRSVRKKLGKAKKLNALRQLDDKEQRWMQDQDHKVSREIVDFVTNNTISVIRLKQLTNIRQTARTSRKNEKNLHTWSFFRLAQFIEYKAKLVGIKVEYVTPSYTSQTCPKCTKKNKAQDRKYKCQCGFEKHRDIVGAMNIRYATVVDGNSQSA

SEQ ID NO: 1048 - protein, 201 aa, unidentified
  REGION 1..201: note = Table 20
MAQITVDIPEKASTSGENTMGVDLGIKVPAVCVTSNGKVKFIGNGRENKTIRREFSGRRKELGKAKKVKAIKKINDKENRIMQDKDHQYSREVVDFALQNNVSVIKLECLNNIRNTTRTSRKNNKNLHNWSFYRLSQFIEYKAKLAGIQVEYVNPAYTSQTCPMCGLRNKAKDRHYACSCGYTGHRDLVGAINICCSLDIC

SEQ ID NO: 1049 - protein, 406 aa, unidentified
  REGION 1..406: note = Table 20
MKQKVTQEKPNPGTNKVTKTLKLPLLSLNSVKAKEFSRFEALNTRLANRILALSDEQKRSLSSKDFSDLELGSSWVNQTIRNVQSSKKTKSFKSLPLETNNQNWSLHKVGETWSVSFNLIRGTRNRVPVNVHASSHVQTLEKILNGEAKAGSLKLWRSRKGTWHVCISVTWDVPVTDNANNRWVGCDRGQNIPLVAATPDGPIIFYQARKIRHIRRVYAARRAMLQKLGKTRAVKKLENKEARIVKHINHCLSKDLVALAVRCNAGIRLEDLTGIRNAPQRRSAKSDAGLNRDTWPFYQLESFIKYKAAISGVLIQKVPAAYTTQACNHCGALNKRKKHLYVCTRCGHKAHADGNASQNVRDAETGRFCLLVLEASEGGCYDGALNEVRHEVKDGLMPRTRTAKSA

SEQ ID NO: 1050 - protein, 458 aa, unidentified
  REGION 1..458: note = Table 20
MKQVTTTLKIKFLNLNHAKAQLFEQMTAECTALANELLKLKIEERQKLTTAKVVTPLRSALANQVIRQVKGLAGSKTKNYKVLPPEVNNQNWKLHKCGETYSVSFPTIQGTKRVPLEVVGNHWQPILEKLLAGGIQRGTLKLIKHRDKWYACLSVIQCVTEVQSTNRVGVDRGQNQIAVAATPQGKSLFFRGREVKHRRRKFQRLRHQLQKAGKYRAVKKLRRSETRWMSEVNHTISRRIVEFAIKHDADVVLEDLSGCRQTMRQTKKSRSDAGDSRHAWAYYDLELKIAYKLAQVGREVHIRPAAYTSKTSSYDGRLGRRDGHWFYAPTGVRCNSDWNAARNIAMWDGRTCSLEPQVLENGAFDNPRSIRFGEAKSGGTLFEGSVPSCELSAGSEGSATFSSLPCINIASQPETGNCNSMNTAEGRVEYVQLSLFDCTSSRARQENPTTFTNEAAAQ

SEQ ID NO: 1051 - protein, 454 aa, unidentified
  REGION 1..454: note = Table 20
MNFFTKPGWDRESPLASAVGLNATQALLSAVIYQLICTQLLDIYVIIFSMIKVTRTIKLKFAKLNRCKAQMFEQMTEENTQIANKLLSLPIKERRKMTTAKIMSELKSALVNQVIRHTTSPTGRKTKQYKVLPVEVNNQNWKLTQKGSTYSISFPTLKGEKRIPIEVASPHWQPVLDGLLEGTIQGGSFKLIKHRNKWYVYLSITEDVPEVETEKRLGCDRGQNNLAVVAPKEGFGKFFNGQSVKHRKRYFQQRRKQLQEAKKFRALKKWNKKEQRWMEAINHTVSRRIVRFAEYHNADIVIEDLEGCRKTMKQSKKSRSDSGQSRHTWSYYSLEQKLNYKLALKGLKLIKRPAPYTSKSCSTCGVIGKRNRHDFNCPNGHYHNSDLNAARNLSQWDGFACDLNLKRDASVMDSSGLNYGVFGAPPNSVKNNQKEYIQLSLFDWARYENPTPLA

SEQ ID NO: 1052 - protein, 228 aa, unidentified
  REGION 1..228: note = Table 20
MDKGSAKLIKHRNNWYAYISVTLEVPEVKTTNYIGCDRGQNNLAVVAPAIGFGKFFKGKEVKHRRRYFQKRRHSLQSAKKFRALKKWNKKERRWMDAVNHTISRRIVRFAEYLNANLVVEDLEDCRSTMKQSRKNRADSGESRHSWAYYSLKQLLDYKLALLGLKLIKRPAPYTSKSCSTCGTLGQRKKHDFNCPHDRYHNADLNAARNLALRGWFLMFFRPTPEMLL

SEQ ID NO: 1053 - protein, 276 aa, unidentified
  REGION 1..276: note = Table 20
MLLDDLLEGKATKGTLKLWCSQKGIWYALISLSKEVPDSDEPQGWIGVDRGQNNIAVASLPSGMAKFWNGRQIKHLRRRAAKLRKSLQKAKKLKTVKRLESKERRLISYINHCISKQLVAFAKDFDCGLVFEDLSGIRQTSKQRKKNKSDAGENRDFWSFYQLENSCRYKSILASVPMKKRPAAYTSKSCCKCGVIGKRNKHSFVCVNPSCNSCHNADWGGSQNIGQWDGFSCAVDFQKPLAVMVKGNQPNGVYDSPLNQVSLSGQELESPTMASA

SEQ ID NO: 1054 - protein, 385 aa, unidentified
  REGION 1..385: note = Table 20
MQRTIRLRLKPDPQVANAFEQTCLKYTYSFNAVCKIGWDAGLVHNGNALHSLTYYDQKAETGLPSQLICAARVKATEALKSAKALINKGEKATCPQSKWSPIRYDANSYTVWFNRNELSVATIDGRKRLPFKLPSFYSQYIQKGWKSCSADLCRDKKNRWWLHIVMECATPELEQSSECVGVDLGIVNVATDSRGNFYGEQRWKQVEDKTFQHRRRLQRKGTKSAKRHLKKMSGRQKRFRRDCDHVLSKRLVESVNKGATLVFEDLTNIRGRAKGSKTHRRRLHSWSFFQFQSFVAYKAERLGIAIAFVDPRYTSQKCSKCKHRERGNRASQAEFKCKACGFECSADINAAINIREDYWAAVNQPIAGSRASHDSLASPRALCRG

SEQ ID NO: 1055 - protein, 396 aa, unidentified
  REGION 1..396: note = Table 20
MPLLTVTLKLKIHPTPQQAAALTVTRAIFTDCFNRVCAYGWQQGERNGTVLHRATYATLRAAYPDLPSQLMCAARVKAAEALKAVHTRRRQGRKVTCPQSAGTAIRYDARSSWVRLSQGEVSITTTAGRLRLPFRLCDYYQRYRDWQVRSSDLCQDQRGRWFLHVVVQLAAHDVPASGEVVGIDLGIRRIAVTSDGRNASFYSSGHLTNRVRRYQRLRRSLQAKGTRSAKRHLRRLGHDWQRFTAATNHVIARRIVDAASPGAVFGIEDLKGIRDRCKHRKGEQRGRFHRWSFSQLQGFLRYKAAAAGQHVEIVDPRYTSQTCLRCSHVARGNRRTQSLLVCQVCHFSLNADLSAARTLRQRAIDSLVAPLSGGVSCQDDPSVLASGDGPRRKLPA

SEQ ID NO: 1056 - protein, 408 aa, unidentified
  REGION 1..408: note = Table 20
LRLHTCRLQTSAAPVGGQEAEAILLETLRQSTACFNAVTAHGWEAGERNGTRLHHATYAGLRAEYPSLPSQLHCAARVKATEALKSVDERLRQGRKAGCPTSELCPVRYDARSYWVKLSEGRASLASVAGRVCVRLNVCAYYRRYLDWTPCSADLCFDRKTGRLSLHVVVEADAPEAACDGVCKSFLGVDLGIAEIATDSEGNQYSGEAVKGVRRRVRRIRRLLQARGSKSAKKHLKRIGQKQSRFSRDTNHVISRRLVATAAAHEKALALEELKGIRDRAETVFGREMRWLMGNWAFDQLRQFLSYKAEAAGVPLVSVAPRNTSRTCSKCGHCDKANRKSQAKFLCLRCGFELNADANAAINIGVRAAGSDGLLSQLCVPATLPLMGVNAVRATELGTSPQPLGGGI

SEQ ID NO: 1057 - protein, 383 aa, unidentified
  REGION 1..383: note = Table 20
MRATLRLKLHTDERTANALRDTLEGFTACFNAATDYGWTHDERNSLRLHRATYTGLRETHPSLPSQRVCASRIKAVEALKSVDARKAKGKKVGCPISALCPVRYDTRSYGVRLQDECASLATTQGRVCLTFSLPVYYRRYLTWHTTSADLCFDPHKRRFYLHVVMEKDTPTVSPNGDVVGCDLGVRRIAVTSKPQFFSSSALHRKARRHQHLRSALQRKGTKSAKRHLRRLGRAWYRFTREQNHLIANAILDALPEGAALTVEDLTDIRERCQHRKGQRGLFHRWSFAQLQAFLAYKAQQHGIVFVRLDPRHTSRQCPKCGHTEKANRKRQGVFHCVGCGYEANADFVAACNLRQKGRSLLARLLSESPSCPTTSGSSEPGRR

SEQ ID NO: 1058 - protein, 400 aa, unidentified
  REGION 1..400: note = Table 20
MEYAAPFLQKLSIYAILVRMDRTIRIQLKPTHEQKQLLDETTRQFTQVFNAVCAYGWQHSEKNGVRLHHATYYKLRETYPRLNANVLIQARIKATEALKSTFDRKAKGRKAGQPQSRQCPIRYNERTSVLNWQTQEVCLSTVEGRILVPFQVPLYSSKYAGYQVTTADLCIRNGRYGLHVVVSVPEPDVPQSDEVIGVDLGLNRPAVTSNRHFLGSCHWKEVERRRFRIRRKLQSKGTKSAKRHLKKLSGRSLRFHRDCDHVLSKRIVEHATPGSTLVIENLTHIRSTSKIRKKTETSRRLHSWSFAQFHTFLSYKAQERGMQVVKIDPRHTSQTCSQCGHQHRSNRKSQSLFLCKNCGYCLNADLNAAYNIRNKHLASLGISLASGSLSDGLSSQPFVG

SEQ ID NO: 1059 - protein, 387 aa, unidentified
  REGION 1..387: note = Table 20
MIVTQTVRLKLAVDGAHDSALAETVRQYATAFNAVAAAGWKTKTTNGVKLHQQTYRSLRVALDLPSQLVISARMKAVEALKSARERAKQGRKVGCPQTAKPAIRFDARSYRFDWNGIVHLTVIGGRIKVAFLLDRHSETFKGLKTHSADFVRKPKGWFLHVVVEKEVPDVQETGKTVGVDRGVKRPAVTSDGQFLGNPRWRAVEERFLALRRRLQGKGTRSARRHLARLNDRLARFHRDCDHVLSKRLVRSVSPGDTLVFEDLTNIRDNAKACGKANRRRLHSWSFARLGSFVSYKAALRSVNIAAVNPRDTSRRCPMCGWIDKKNRRTQSTFRCVRCGYERNADLVGSWNIRDRHEGLWSPVSEAPGRVNSPNVEGMHISSASPGL

SEQ ID NO: 1060 - protein, 409 aa, unidentified
  REGION 1..409: note = Table 20
MLTRTVVFPLNLDAAQTEAVEETLHVYTQVWGRAVDVAWPQARPHRFSVHKRVYGKARKIGLKSQLAVSAIARAVESVKASRVLAKRRNKNKKPENRKPATKPRVKTTIPVRLDARTLSFDKPRETASFMTQHGRVRVPLVWHKQARRYRAWNCKSGEIGRRRDGRFVLRLHFTQEALDAPCTDRVVGVDSGIRNPAVASDNRFICNDRKGKWKAHERRLLSLRSRLQSKGTKSAKRHLKKLSGRLRRFRIDCDRALAKELLAPFSPGDTIVLEDLTGLRERVGEKSQRKANKPQRTRLGRWTYARRTQAIEDRAEVTSVRVERVAPRYTSQRCPACGERAKRRKARLRCLECGLDIDADLAAARNIEFLWRSAIDAASGPPVNRPDVGGSVKFASHPAYKLSPSGDSR

SEQ ID NO: 1061 - protein, 375 aa, unidentified
  REGION 1..375: note = Table 20
MAQKTVVFPLNLNEQQKEILIQTIKLFSQAYNACLDYAWSMDHPVKKELHEKTYYFLKELLGLKSQYLCVARDTACETVLSVRARLRKGKKASKPQSGLVPIRLDKNTLSFDKTRETASITTQGKRIKVPLLWHKHAKRFEQWHCQSGRIGFDSRGRLVLWLTFVKEVEKPERTGRVIGIDRGIKHAFVTSDNKFYEEGESKNKERLYYLLISRLQSAGTKSAKRHLKWLSGRVRRFKVNCDHRLVKMLFATLNPGDTLVLEKLTGIRDSCGTKGKARKKHRKYLNRWSFKRLADIITSFAELLGVYVEYVDPQYTSQQCPQCGIVKKSNRKNQSTYRCSCGLELNADLNAARNISRRWCMANGYASGHQSIGLL

SEQ ID NO: 1062 - protein, 398 aa, unidentified
  REGION 1..398: note = Table 20
MKIKRTIKLVVKPSEKEKHILFKTFEEYKFAYNFVAEIGWKSNIHNSVKLHNLTYIVVREKTSLPSQLVISARNVASESLKSAFSRKKKGLAVSCPYSKNPAIRYDKRSYSVWFDREEISIATIEGRLKLKIKIPEYFRQYFSWDIRSASLKYNKRLKKFFFNIVVEKEIEEIPENDTVVGVDLGLSKLATLSTADGKINKFFDGGHIRAVSERYFAIRKKLQSKGTPSAKRHLRKLSQKEKRFRTAINHKIAKEIVNLIPAGGTIVLEELKGIRERIRVYKRERRWVHSWNFAQLKQFIEYKAKSKGIKVVYINPKYTSQRCSKCGYVSKSNRKDQSHFKCSYCGYTVNADLNASRNIAINYLVSQKERLGHRVASLPVWAVVNQPNVRRLAVSSHS

SEQ ID NO: 1063 - protein, 394 aa, unidentified
  REGION 1..394: note = Table 20
DEMRILCYYMSMKLVRTAKIKLSISPDEIKPSLEAYTNAFNHICQIGWQDKDSNGVSLHHKTYSTARECLPSQLAVSARMKATEAIKSAKNKLKKKQKATCPQSKLCSIRYDARSYNVWFDKNEVSLLTIDGRKKFPIIVSEYFKQYLDWRRVSADLFLRKNGVFLHIVFEKDIPDVMSVNRVVGIDRGINKIATTSDNLFFGGGQVKHTSSRYEKLRQNLQSCNSKSAKRHLRQISKKENRFRTDVNHKVSKQIAGSLPPGSTIVLEDLKSIRQNSRLRKKQRKQLHKWNFFQLQQFLAYKAEAKGIRVKYVDSRCTSQKCSVCGYIARANRQYQSVFKCKHCGFSLNADLNASRNIRQNYLDAISYPGRANVNLPNVASVEAKGFLSNCGGA

SEQ ID NO: 1064 - protein, 396 aa, unidentified
  REGION 1..396: note = Table 20
MVRVIKSQFYPSEIQSDILRETMIEYSKAMQSAFDYGYHNNTRNKNKIHEETYANFKKSSPLNSDLIISARGKAVDTLVSLNGIRKKTGINSKPVIYKKYHPMRYNNKCSTLNIENKEISLATIVKGNRIKLNLHIPKYYQQYIGNGWEFKSLELILRDKRGIEKWYIHFSVEKYQEELDFEFTTEYIGIKRGMKNLIVSSKNKFYSGKELRKLKTKNYKKKQSLQKTGTRSAKRKLKENSGREKGFQIVTNHEVAKNLINDLQPNSVLILEDLAGIRDEATYPKQSKFSRELNTWAYYQLELFIEYRAAEKNIRIEYVDPHQIQQICSKCGYNSKSNRKNAVFRCGECGFELNADLNASRNLVNRFISQLPIRQQTQEAIRFLGGAPVIVPNVTS

SEQ ID NO: 1065 - protein, 386 aa, unidentified
  REGION 1..386: note = Table 20
MSILTRTLRVQVYPEKQIKKELERTFEEYSKAAQVAYNYAYTNDTSNRIKIHHAIYKSVREKSSLNSQLVINAKNKAVDVIKSLKAKRIKRLVNFSNKIPIRYDYRSSTIFHESRYVTLSTTNKRVTLQYFLPKCYQQYVDWEFRSFELLKRGNKHFLHFVVRKYSKVKGKHSGQFIGIDRGIKHIAVTSQNKFYNGIRLRETKNRYFRLKRGLQKKGTPSAKRRLKQIAGRERRFQRDQNHCITKKVIQNMKSNSTIILEDLIKIRKTARYRKRSRQSRELNSWGFYQFQIFLEYKAKEKNIEIIYVDPAYTSQRCNKCGYISRKNRNGPHFLCTSCDFNLNSDLNASRNIEDKYFDDEYVLNKLAQKAIGFLRGAPVIIPIVAS

SEQ ID NO: 1066 - protein, 376 aa, unidentified
  REGION 1..376: note = Table 20
MLHRAIKIRLGYDKRLVDTIYTYNSACNFVLQTAFNAKTYNKTRVHHLTYKKVREMFPALKSNLVCAARNQACAMLKRQKLKCLPIVKKAGSIRYVTFTFTPQFKKGVISLSTIYGRVKVPIRVPLYFHQYIHWVITFATLSFKQGHLFLHLNAKKESPSKLPPKNLVGIDRGIINPLVTSTGQFFNSRKLRNVKARYQWLKKCLQSKGTRSAKRHLKRLSGREKRFVTDVNHCLSKRLVQSEADTFVLEKLHIKPAKSNGPLFNTLLGGWSFGQLLNFLRYKSEGVRKNVLLVPSKYTSQECSICGYVEKSNRKGALFRCKKCLHSLNADLNAARNIAQRGKTLLSRLRVDQPIVAQPITIGATSFAVKPSTYPY

SEQ ID NO: 1067 - protein, 376 aa, unidentified
  REGION 1..376: note = Table 20
MQRTITLHIEPNDRLVKTIEMTNLATNDILKAGFENRIVNKLKLHHLTYYPLRKKYPDIPASIVTTARDNASEMLKREKLKRLSTKRKWSAIRYNQRTFTPELGKGFVTLASTNKRVNVPIKIPNYFRKYLGWKVVSAKLSYTGRKLVLGIVVEERTPSVRPPNTIIGVDTGIINHAVFSNNNFYRSSNIRKVKGQNQYLRRRLQAKGTRSAKRKLKQLSGREKRFMVDVNHQIANWILSQPFDAVALEKLGIRREKRLGRSFNGKLGNWAFGQLQRFIEYKAEGQGKAIIYIDARYTSQKCSRCGDIRKSNRNGLVYKCKACAFELHADLDAARNIASLGKAEAGRLSVNQPIVASSVSEHSVSPQLQASSFRAG

SEQ ID NO: 1068 - protein, 358 aa, unidentified
  REGION 1..358: note = Table 20
FNEATNFFLRLGFHNRTHSKRKLQALGYYEARDKWPALQSSLVQGARDCAADMLKQERCRRLPFKRPGSSARFNQRTFKAFLDSGSLSLTTVEGRLKVPLRIPEHFRKYAGGKVNALRVRDVDHDLMADLMVELPDVPIKDVADPRVVGIDRGINNIAVTSDGGFFNSRHLRNVRGRYAHLRCELQSAGTRSAKRHLKRLSGRERRFQADVNHRIAKEIVGADFDVLALEDLSIRKDRRLGKEFNRKLGRWAFAQFETFLRYKSEECGKHVISVPPEYTSQMCSRCGDLGIRKGHSFLCPVCGNSLNADLNAARNIASLGNALVGRPTVNGPIVATSDAEHRTSVEVSYKPPISMGGS

SEQ ID NO: 1069 - protein, 380 aa, unidentified
  REGION 1..380: note = Table 20
MQRTISLKIPCEESLKKTMQIYNRAVQDCIDIGWEMKTFNKNELHENSYRLLRKAYPSLQSSLVQCARDQASDILKRSGFEKRKPVKRLNGSIRYNARTYTPKLKDGIISVSTIEGRKKFRVDVPNHFKKYTKGIVKGMVLVQRNGFFLVKLVVELEDKQFKYKKVRTLGIDCGINKIAVCSDNTFYASKHLKGRKGEFFYLREKLQQRGTRSAKRLLRKISGRENRFVADVNHQISKAIVNSRYNTFVFEKLSVRKNRKFGRKFNKKLGSWSFRKLQTFVEYKAKEIGKQITFVNPAYTSQTCSVCATTQKSFRHGNFFSCSKCGLNLDADLNASRNIAMLGNALLGRASVNSPDVSCDDVAGAKAQLQQSIVTSHLTC

SEQ ID NO: 1070 - protein, 395 aa, unidentified
  REGION 1..395: note = Table 20
MQRAISLQINKYPEILKTITQYNKIVNEHITKSFELKTNSKNKLHKALYRETRNKYPNFPSALIQCARDNAIEMLNGNKYKKHTQKRNDSSIRFDLRTAKVFLKSGQLQLTTIEGRKKYKLNIPNYFAKYFKWKVKAVTLGVNKKRLKLKVIVEGNLPKQAINQEVLGIDLGINNFAVLSNKTFIKPKHIRNIKRRYAYLRKGLQSLGTRSAKRKLKSLSGRERRFMRDFNHCLSKRIVSMNYGSFALEGLKGIRNGRKGKVFNRMRSNWAYFQFRQFLTYKAEDIGKSVVLIDPRYTSQRCSKCGFADKSNRNKGAFHCTTCSFHNSSDLNASINISQIGKILFEQAVVNHPIVTTNEGVSSLHSDTPEFSHKLHPLEGSSCHKRLSIAALWYS

SEQ ID NO: 1071 - protein, 369 aa, unidentified
  REGION 1..369: note = Table 20
MQRAIKLCLPRTKELLDTVATFNRVVQEHINKALVLKTTSKAKLHCACYKRLRAQYPALGSMLVQIARDQAIACLKANKLAPTTTRKPLASVLLNARVFSANFKTGKVSIRCLNNRRTFKVNIPDYFQKYVGWDIQACTLKPAKGRIECNIIVEGNLPTIVQTENNVLGIDSGIKNVVALSNGVLLKGSMLNGWRRRVHYLRNRLKSKGTRSSKRSLKRLGAYEQRRVRDFNHGITKNTSNMPYNVFALEDLEGVRKGRKGKTLNRMRAHWSFYQFRTLLSYKAESLGKRVVLVNPAFTSQTCSDCGKPGTRQASRFSCQYCGLVLHSDLNASVNISYLGNTALVGQAPVNVPIVTTRDGVSSLHTCSS

SEQ ID NO: 1072 - protein, 417 aa, unidentified
  REGION 1..417: note = Table 20
MLTEEQKGSLLRTMEAYTRAFDHAARWGFEHQKCGKLELQYAIYYEMRRAVPELGAGLIQSAKDTACEALRQCKMRTVPRRKPRSAVRFPWKEAKVYFGSGTISIYSVDGRIHAPVVLYEHLKKYAEWRCKLSVLIWDRIGRQFYISVVVENKTPIEPVKGNVLGIDRGLNNVAVCSNNMFFDSSRINATRGRYAKNKQELQAKGTRSAIRRLRKQSGRERRFMTCENHRISKIIANTEFAVFALEDLAGINKCRWLDRRTKGKLRSWAYHQLENFLRYKAEGLGKAVVHVDPTCTSQWCSRCGWIDKKSRKGSIFHCVRCGFQLNADLNASRIIARLGMSEASRLPIYQPHAAGDEGDVSGVRSKCLSLAASLRSPRVVDTPSLNREQGSLRAGQGCDSSLEDPPDQQKIFNIRPY

SEQ ID NO: 1073 - protein, 358 aa, unidentified
  REGION 1..358: note = Table 20
MERTIKLKLELSEENKETLRQTMALSNQVFNEIARYGFENHTCSKVSVHRATYYSIREKHPELPCSILQGIRDVACESLKGLELKKCPASKPFSAIRYNKRVHRINLIKQNVSLSSVKGRVTATYSIPEYYRQYLNWEFKTSTLRYNRQKDTFYLHVVIHKLSPEPVGDKVLGIDRGIVNIAVTSNNRFFNSKPIKNVRAKYAYLRAKLQSKGTKSAKKLLRKMSGKEQRFVSGVNHCISKGIVAMPFDIFAIEDLTSIRVQSRTKGTDFTRKLNNWAFYELDQFLRYKAEAMGKSVVTIDPRYTSQKCSVCGHIYKGNRKGHSFKCVKCGFQIHADLNAARNIAVLGISGNGRLPVT

SEQ ID NO: 1074 - protein, 368 aa, unidentified
  REGION 1..368: note = Table 20
MTKMIRTVRYELPYDQALVDTVLMGVNVFRFWSDLAFEHGTSGKIDLHHLGYYVARELFPSFQSMLILTVRDSVSEARKAIRTRTGDKNPILKAHKGRGLRYNNCCFGMKNDGTISISTVEGRKRYKITPAPGYENWSCEAATLKLSKGRCFLHCQYETGSPPIKEWKNSDVLGVDRGIKNIIACSDNTIMNSKRLRNVKGRYQHVKASLRSKGTRSAVRRLNAIGGRENRFVRDVNHCISKHLINTKYGVFVLEELKNIKKSSVKGKLGKTIRKLIGGWSFRQLQTFLEYKAEAAGKLVVYVDPKHTSQRCSYCGHTEKDNRKGHSFRCVNCGFSLNADLNASRNIAELGISVFGRVASQKPVCSQQ

SEQ ID NO: 1075 - protein, 412 aa, unidentified
  REGION 1..412: note = Table 20
MRRSITVFPRLSDKEVSAVVETRKQYARAFNMSAECLINNSSTSKRFLHKVQYERIKEECPTLPTGLIQCARDVAVEAVKNWNLKRTKLKQKHPKKAERMRRPSMKEKCTMRYDVRTLTLRGSQLTFSTCDKRVKTIITIPEFFTERCPASDGWKQKGANIGINRKGRVFVNLIYECHDPVIEEKKDGKIVGLDRGVYNIVTTSEGVRYGSKDARRVKRKYNHVRSELQEKGTRSAKRRLVSISGCEKRFVHDRNHCISKKLANIDEDVSVYVLEDLSSMNMLRLRGKSSKTMRKWLSNWSYSDLEFKLAYKCKRNGIRVEFVDARYTSQKCSVCKTIDKTSRKGNRYVCRKCGNTMHADVNAAINIRDNYITRVRQSGQAAVNQPYGWGATGKPETEPMGKTLTSKPPGLF

SEQ ID NO: 1076 - protein, 437 aa, unidentified
  REGION 1..437: note = Table 20
MAVRKSKTAQRRERVSSSTQQRTIVLPLPLTREQYDPIRRSAEEYNRMWSSLISWCDSNKTVNRTRMQKENYRRLRDRHPTLPAQFACIAMRDAAGAMRSWNSNHPKRRWNMKASRKALTINYDMRVMSLRGNLLTLSVAHGEKRVRLLLPDLPEWFTARYPEGKPNAAKLLLGDKPEDTRIALIYRISDPQPLADGDVLGVDLGQHSLYMDSRGGEAPYARVQGAKRRYAHNRKTLQEKGTRSAHRRLKAMKQREERFIRDVNHQASKRLANTQGVQAIAFEDLTYIRRQASKRTKTGARRRNMLNQWSFSQLQEFTAYKAARNGIRILMVDPSYTSQRCNRCGYVDARNRNGARFDCRRCGWSDNADHNAAMNIRDRALSSLAEEEHTSTDRPVDRSQSTDHDGWSAHDDLPTPTGQGRVMGTTLTSKPRCSSSR

SEQ ID NO: 1077 - protein, 365 aa, unidentified
  REGION 1..365: note = Table 20
MIKTMSIKTPLNPEDYFLWFNQCADMFNQYVDWAFKVKSYNKNKAHKELYLNFREKFPTIPSALVQCVRDMALEAVKRDKFKSKPKKKNNSSLRLNKCLINLKGNSISVIHPNKRINFNFDYADYFSNYKNAKFRSATLQYKKISHTIVLNLQFEFPDTPLKTEGEIIGIDRGIYNLVSCSNGLQIKGSQIRARQRKDLFNKRNIQSKGTKSSKRKLKKLSGRYARFSVNINHCISKQIVSIPNLKTVVFENLKNIGKKRKGKKLNKWIHSWSFHQLQTFTEYKALEKGIEVKYVDPRYTSQKCSACGFTDKNNRHKHKFVCIHCGHTCDADLNAAVNIKQNYILSLTNKEQAVVNKPIVAGSNT

SEQ ID NO: 1078 - protein, 376 aa, unidentified
  REGION 1..376: note = Table 20
MRRTIKIPVDFSEHKFLPLMKICASIFNIHVEYAYKANSYNKTKAHHALYSLIKTNYPNIPTGLLQSVRDTAMEAVKSVKLNPNKKPRKSDRSAVRFDTRCVAIRGNLLTISTLGKREKILLKIPKYFQEIFNTWKFTGLQLIYKFDKKKFFIALNYQKEGPDFQDGQILGIDRGLKNIVYCSNNHSVSGKTRNRIKRQYAFNRKKLQAKGTRSAMRHLCRSRQREARFSLNENHIISKEIANLPYQVFVLEKLTGISNKRKGKRMNRKLSNWSYYQLESLLQYKAEALGKKVEFVDARYTSQKCNMCSYTDRRNRNLENFVCKECGHAEHADLNASKNIRDLYIDQSLKGQADVNQPNVSGLRPDASSGASPLSN

SEQ ID NO: 1079 - protein, 412 aa, unidentified
  REGION 1..412: note = Table 20
MKRTVSIPVNLPSERFLPLMNQCAEIFNAHVDWAIANSTYNKNKAHKELYHLLRVEFPSVPSALLQTVRDNALEAVKATKRKVRASASGDLNFPRQFKSIPKKKPTSGLRYDKRTMTLRGKQLTLSCIGKRVTLILDVPEYFREVFETWDFCGATVTYTKNTQQFWVRLVFETEDPQQIAQSPSQGFLGSELCKREGQIQGIDRGLYHQAVTSDGQFFSSSKIRKVQRRYLYNRRQLQQKGTRSAKRRLKAMSGREKRFMRDTNHCVSKKLANQPGIAVFVLEDLSSIRTQRRGKKMNKWLGSWAFYQQEQFLTYKAEALGKRVVHQDPRYTSQKCNICKHVRRTNRHKSRFHCKNCGHRTHADLNAAKNVRDDYILSSTQGTEEQASVNMPDVSTDSLGHLQAPSPCGWGV

SEQ ID NO: 1080 - protein, 369 aa, unidentified
  REGION 1..369: note = Table 20
MKTIQTVVEELPEQRAIFDENLLLMADAQNFVVSSCYDHEETNTFRMHHFNYPILRERFGLPSQLAVVANKYACSSVKGAIRRKAPRPNFSGRAVHYDSRSSTIDLVKKSASLLTKEGRLKVKLNVPLYFQKFSDWKVKESNLVKCRDNKLRLMIMIEKPAIKSNGSGKVIGVDRGITNLIATSDGWLYEGRDVFSVKKRYVGLRARLQAKGTRSAKRHLSRMRGREKRFMADVNHCISRTLIDSAGLNGALILENLKGIRTARHRHQQNWLFSNWAFYQLETFLKYKGEERGVAVEFVPARNTSKACSACGSIKKGQRQGSVFRCKTCNVVLHADLNAAKNILHKYQSSRAAVNQPIALQADGASHRL

SEQ ID NO: 1081 - protein, 387 aa, unidentified
  REGION 1..387: note = Table 20
METITKTCKVKLDIPEERKPDILETFKQYNDALNFAIEQAWKPEKKIINKSKLHKLTYYPLREKTQLPANFICSARNKACDVIRFNIIKWHNYKKASKPLFKPFSAIQLDKRTLTIKDRSCTFSTVNGRVKADYFLGNYQKQILDDPNYDFRTATLTFKNGNFFLNITIVKPALVKKPETVMGVDLGIKNIAVTSTGKFFKSGLLNDSRRQFREKRASLQSKGTRSCKRVFKRLSGRENRFSDWVLHNVSRQIVNEAINHNVEIIAFENLTDIRERVNQWRKKERAKVNLWAFSKLQQYVQYKALEAGMKTIFVESKYTSQRCFKCGHIEASNRNGFNFVCKRCNYSINADYNASKNIAFKVLSGKSPDWAGLPRKLALKTKRFAYV

SEQ ID NO: 1082 - protein, 394 aa, unidentified
  REGION 1..394: note = Table 20
MLFLLDLFKKYSYNIYEMEKEIVKTFKVKLNISPENREKLDKTLFEYNNLLNYLSSIAWDKKITNKVKLHHLTYYPAREKFNLPAQFVCSARDVVCDRMRAIIKRKRKSKPQFKKPFLRYDVRTITFKEGYCSLSTSFGRIKTKIIPYDYLNQHKDWTLTNTPTLIKRNKDFYLCLHFKKTVVLKEPSILIGVDLGIKNISVTSDNKFFSGGYLTYKSNHFFRLRKALQAKGTPSAKRVLKRISGREKRFKLDYLHQKSKELVQYVSELQNPCIVFEKLQGIREQKSKGRKMNRKLSTWTFRKFQELVTYKANQIGVPVAFVDARYTSQKCSRCGNILKSQRTGNTFKCKACGFELNADLNGARNIRKNFTEGQAPQVGLSVNQPLSSAFVTTS

SEQ ID NO: 1083 - protein, 381 aa, unidentified
  REGION 1..381: note = Table 20
MNMQEIKRTVRIKLLPEDAQLLLETIKAYTDACNWICDIAWEKKLTNKVALHHEVYYPTRKLFNLSANLSCSARDKVAEAVKSSLKRKGSKPHFDFTPIRYDARTCTIKPDYCTLSTNGHRVRCRFILGDYQRSYLEDKSWEFGSADLVYRNKAFYLHLVLKKLIPSPNPPKCVIGVDLGVKNIAVISTNKFFNAGKLNWRRNHYFRVRKSLQSKGTRGAKRVLRRLSGRENRFHRWALHNISKWLVSHASTFDSPIIVFEKLTHIRSRAELGRKGNRQVHSWGFAILQRFVEYKALAQGIPVGFVDARYTSQKCSRCGHIAKGNRNGAIFKCKRCGFQLHSDLNASRSIALNFTEGYKSSGWAAVSQPLIAALAGESPRL

SEQ ID NO: 1084 - protein, 383 aa, unidentified
  REGION 1..383: note = Table 20
MKSTVTAKVKIRKDERLVKTMRVYSKALQFCIDRAWNNLYTRKSIHDECYYKIREKFGLQAQLAVCVISQTHEMLKNSPKNKPKVKKFATIRYNFSRSATIKGEWEKLSLASTDGRVKVELNIPGCYEEYLDRNVRESNLILKNDMLFFCFTFTKEVDINPFSFCDGGKIRGVDLGINKIAVTSDENFYGTNAKEKRIKWEELRAELQRKGTHASHKRIKSMGKRFNRYMTWMNHNISKKIIDKLDEGDVLVMEDLTNIRKTAKYNEWVHKWAFRQLQNFLEYKAVEKGIRVVYVNPENTSKKCSKCGSLDTERHGGFFECNNCGFSLDADLNASRNIAHSYTETIGRAGSRRSAYGSRVYEVETFNTGRIETETTRKLHASF

SEQ ID NO: 1085 - protein, 374 aa, unidentified
  VARIANT 168: note = misc_feature - Xaa can be any naturally occurring amino acid
  VARIANT 267: note = misc_feature - Xaa can be any naturally occurring amino acid
  REGION 1..374: note = Table 20
MECRVSVPIKLKINEVVVKTIEIYKKSLQHCVDVAWEMKIKNNVELQPFVYKEIRNFGLPSQLAIACIKQSCGIIKKAKSNPNIYKTSIRYNSPRSFSFKNNVLSISTIKGRIKIPIKIPNYALKYFKDWNIKESLLTKNFKGDYYFTFTFLKKALKNSTLQNRVLGXDLGIHNLAVTSDKQFFKSFKVKQIKRKFKFLRDKLQAKGTRSSRRLLKKLSGKEKRFMTWVNHNISKEIISVFDGNKIVMENLKGIRKIWRGKRMNYCXNNWSFLQLQNFIQYKAEIKGIEVVRVKPHYTSQLCSKCEKLGSRSGSSFVCHCGYSLNADLNASFNLASPMLEKRQALVTKPCIQTNEHEGVLNPIECEVMDKIPLL

SEQ ID NO: 1086 - protein, 377 aa, unidentified
  REGION 1..377: note = Table 20
MLGRVTVNVRVPSDDAVLKTIKIYNRGLQHCIDVAWKKRIRNNIKLHPFVYKEIRGFGLQSQLAVACIKQACGMVKRAKSKPAINSFSMRYNSPRSFSFKHGILGLSTIEGRKKFNITLPEYAKKYIAWEIDESVLWSDRKNRIFFGLCLSKDIDIPIRSAQHRQVLGVDVGIKHLAVTSDGKFYGTVIPKMRRHQEHIASLQSKGTKSARRHLKKVSGRWKRFMRWKNHNISREIVNSLGEGSIVALEGITNIRSNKGRKFNRQLHSWAFRQLQSYIEYKAIQRGCLVAYINPRYTSQTCRICNEIGTRNKGFFLCNSCGYSCNADLNASFNIKNRVKPLAMAFGLNVNQPIVASGGFLNVKHFESPDLSYNAHRF

SEQ ID NO: 1087 - protein, 381 aa, unidentified
  REGION 1..381: note = Table 20
MKSVVTIKLKIPCKKELLETMRQYSKSAQYVVDTGWENGIYSKRELHNLTYYPIREILELPAQLVCSSRDKACETLKSLWKIKKPTKPNFKEMLTIRYDARSFSFNFDCVSLATTNGRLKIPVDIPEYYWQYLDWDARNADLILDRKNKLLLHITFSRDIQLPTNSDGFLGVDIGINQVAVTSNRQFFNARQIKLKRIKFKRIRAKLQSKGTRSAKRLLKKVSGREQRFMRYWNHVISKQIVNNCKAGTIVLENLKGIRNVRKGRKFNFWLNRWSFYQLQQFITYKALRSGIKTIKVSPYLTSQTCSRCGQIGSRSKGFFVCSHCGYSLNADLNASFNLAKHHSNADGVSVPVTVPDIRVDEHKGSLRTIVCETMDKSPHL

SEQ ID NO: 1088 - protein, 367 aa, unidentified
  REGION 1..367: note = Table 20
MKCRATIKLKIQNRKEISRMFSAYLKACQYSADSALKNKCKTKFDLHHVIYNKIRKKFGLKSQFTINAIAKGFETYKSCKKKVVFKSVPLRFDRRTFSFFENYIRITTDKERINIPIFIPEYHRKYLSWNYQTADLVMNRSEKIFLNITFSRNVESIRGNSIVGVDLGINNLAVCSNGKVFKGEKTKIKQFHYLRRKLQAKGTKSARRILKRISGRQKRYMAWINHNVSRQIVDSADIIVLENLKGIRKCRNKYRGKRLNRWLNGWSFYQLQNFIQYKASFVGKKTAFINPHMTSKTCSNCGNIGSRCLSRFVCSDCGFSCDADFNASCTLRRLYVNQPNVSDCDAKAPLGELKRNSGTMTYNVNNG

SEQ ID NO: 1089 - protein, 386 aa, unidentified
  REGION 1..386: note = Table 20
MKSVATIKLKIPYNELLVKSMKEYSKAISYISDMGFKTNTHKRYDLHHLGYHKTRKKFKLPSQYIINAIRVASQNLKSINTTRGSKPEYRRYMPLDFDKRTFAFTPDKVRVTTVNGRVDIPIKIPEYYVKYLDWSWQTAQVLLDKKQRMFIHIAFSKDVNINTCSNRKVGVDVGMNHMAVTSDKKFFRGSTIKTKMLKFKRLRKKLQAKGTRSSRKLLMKWSGRERRFKAWINHNVSKQIVDSIAEGTIVMENLKGIRRSKRGKRFNYWINNWSFYQLQRFITYKANRKGIYVIKVNPFRTSQICSRCGNIGSRIRHLFTCLHCNYNLNSDLNASFNLAKYPAICKGISASVTEPYIPSDDVKAIFGIATEFRDNQHKSVKPHTSV

SEQ ID NO: 1090 - protein, 373 aa, unidentified
  REGION 1..373: note = Table 20
MLVQATIRLNVPPSRELIDTMVEFSKATQFAYNYAVKNKIRSWKILHQKTYRKIRAFSKLPSQLSCKAIKYALETKKGCRNRKVNFSKELSIRYDHRSYSFDFSGICSLSTIYGRIRQTLYVPEYYLRTYRNWEIRSATLSKSGKHLSLNITVTRNVDVAAHTSNNKVIGIDLGINNLATTSEKQFFKGVKDKLANFQRLKSRLQSKGTASARRHLKKLSGRQTRFMRSINHEISKLIVSRANAGDIIVLEDLYGIRDKSKGRALNRLISNWAFYQLKNFIEYKTLRKGAIFISIPSHHSSKTCSRCNETYTKRPKNAGFFKCLNCGYSCNADLNASLNLRGRTNVLRNVLGLLVNQPIVAEDYISLAASPCF

SEQ ID NO: 1091 - protein, 396 aa, unidentified
  REGION 1..396: note = Table 20
MAQQVMSLLKLSKGISKNAKMRRTLKCKIRLSPEDKQKALDCMRVYSSCCNELMNIAIKNRLFTRYKLHYLAYHNIRKKYNLSSQLVVTAMWKVIETLRSRYKNHSKTVPEFGIYSSVRLNYPRNFSIKWSEISFSIINGRVKTIVVGAYDKLRDEFLNGLWQITESHISYDKHKDIFYFNLGLKRETPQLRIIKNPIGIDLGIKRIAVTSTNNFFSNKRALYLKHKYDYLRSKLQQCGTKSAKRHLKKLAKRIRNFQKTVNHQISKQIVEHVKSIPESGIVFENLKNIRTNGSQFRKKQRKDQFRWSFRELQTFVAYKAEGTGVSVKYINPRGTSHQCSQCGSTNVTREGFEFTCHDCSYQLDADLNAARNIASRYISDAKAVCQPANRIGSYTS

SEQ ID NO: 1092 - protein, 392 aa, unidentified
  REGION 1..392: note = Table 20
MGVHLSIKAKLVLAASAAKELKSTMEEFNRACNTLSELAFQRDLHRRYDIHHQGYRLIRQETNLPSQHVINAIAKVTAVYTRDPDKWHQFKSHSSLRYDAKSMTLRPDSQTVSLAVCPKGRITGQLQMPARMRKQLQQGELGSAELVYRKGNFYLHISITIPAPEITQSQGSLGVDLGFNRVAVTSDGKFHTAKNIRHIKSCYKRTRRSLQANGGKSAKRALKRVSGRERRFVADTNHCVSKQIVADARVNNQRIVLEDLKGIRETGKAKCVHEWSFAQLQWMIRYKAARAGVEVVYIDPRYTSQTCSRCLHLGVRPNQSSFHCRDCGYQINADLNGAKSVAARHDLVARGRYFCEYPRKEVNRPEAVRSSEKERQVRNLKPQAPSTARPRA

SEQ ID NO: 1093 - protein, 382 aa, unidentified
  REGION 1..382: note = Table 20
MQTLTLRTRLDPTPEQAAALEETLERFAQACNLTLEVARACRTFSKFKLQRLVYGQLRALGLSANLAIRAIARVSHRKGHCAKHYRPTSCDYDQRTLSLRGQTVSLSTTRGRLRIPMRLSPYHRYWLARARSVQGGRLLRDRRGRWYVHLTVRVAVPEALPTGRVVGVDLGQRLLAALSTGECLSGGALKTKRLHYRAKRAEIRSKLDRPSERTRSLRRLWARLSGRERRFVRQVLHEASRRIVDGLAAGDVLAIEDLRGLRGRTIRRGRTDRHLHHLWPYALFRRLLEYKARLKGVRVVVVDPAHTSQTCPRCGHVDRRNRRSGRLFRCRACGFQHNADVVAALNLARRAGSEGMGRCQPAPGAIPAGGREGKPTTSVVGS

SEQ ID NO: 1094 - protein, 400 aa, unidentified
  REGION 1..400: note = Table 20
MCYNNYEVIYIKKLVQSVRCKLQVEYNSDVYNALKDTVHKFADACNYTLDIAYIKGIHNQFKIHHESYKEIRDRFGLTANLAVRAIARVAQAMKSTRKKKSCPRHFKATSVDYDQRIFSLDVNSWTVSLSTINGRLHIPLAIGNYQRHLLLDQKPTFATLYFNKRNKTFYLDISIKNDVPDPDDLANSDSKIVGVDRGIYNIVATTNNIKISGKEIQHTRRRFKHLRARLQAKGTKSAKRALQRLSGKEQRWMKYVNHCISKLLVNSLNPGDTLVFEDLANIRERIKSYRKQTNFQISNWAFYQLEQFVEYKALAKGVKVVYIDPKYTSQRCSICGHISKTNRDKHSFRCEQCGHVANADTNAAYNIRSAHLAITNGLSSTSPKVASSLSYKLPALAGGS

SEQ ID NO: 1095 - protein, 380 aa, unidentified
  REGION 1..380: note = Table 20
MPKLTKTVRCKLDPGAKERQAMLETIRQFSAACNYISQIAHEHRGMSNKVALHHLTYYGVRAKFGLPAQLACTARDKVAEAYKKGSRRTPRHFGPNTSVRLDARTFSIAKAGQASISTVKGRIKVPMILGDFQRSLLDAWEINGAAELVYDKRAKTFYLHIVVKRETDPPTKSGRTVGIDIGMVNLAVTSNGLRFSGKKAMHLRRHYRNLRANLQAKGTSGSHCLMKRLRGKETRIMREVNHIISRRIVNSLQAGDTIRIETLTHIRERAKQRRARRADFHSWPFAQLQFFLEYKALERGIAVEYINPAYTSQTCSRCETRGHRVQHRFSCPSCNSRNAADFNAAYNIAKASLALGDGPQSIGPKATRCSQLQALQLAVG

SEQ ID NO: 1096 - protein, 345 aa, unidentified
  REGION 1..345: note = Table 20
MEVTKTVVCKLNPTDENFKRLMDTVKAFRDACNYISEVAWTNKVYNPVALHHFVYYETRERFELPANLAIRARDRVAKSYKTDRKKQHKFRQLSMDLDRRLFTLLRNGEYKVSISTIYGRVKPKLVIGDYQRELLKNPVRDAKLVYRRDSKEFYLHITVLVKTPKPEGNNPVGVDIGINNLLVASNGFSVNGKPIEHRRQHFRKLRSSLQQKGTSSAKRKLKQLSGREHRWVNAVLHQISRAFINSLVAGRDYVVMEKLNGIRSRCEHHKSQRATFHSWAFNRLQQMIEYKCLEKGIPVVYVEPEYTSQRCPRCGTIDKRNRRSQALFRCVSCGYQHNADVVASF

SEQ ID NO: 1097 - protein, 437 aa, unidentified
  REGION 1..437: note = Table 20
MSDEQKNILLTSMEMFNDTCNSISERYPDVTSKEVLHKLCYKKTRSLSPDVPAQFVCQAQRRVAAANKTRKSQLKSKKVRRRKKASLHKPASFRKHAAIQYDGCTLDVSGMFTAPTFEPSSRYGTEKLHEISLATHRIRKREKVGVLLDDNAVRSLARGKLCSSALLEYRERSGEFYMIFSVDIVEPEPDKNGGVLGIDLGVVNIAVLSDGTTYTSERLETMRRKRLRVRRELQARSTPSSRKRLKKIGSREARFRRDENHCISKQIVQHAKDTGCAIALEDLSGINASTTVAKSYRARRFGWSFAQLGQFIEYKARLAGVGVIYVNPAYTSQTCPRCGHTSKKNRPTRDEFKCCKCGCHGEADHIAAMNISACGMLLIREPEKATERGHYWVPVNVPAVQRRRLDKKTVPSREGTEIVRSVPGSCNHKPATSVVGN

SEQ ID NO: 1098 - protein, 433 aa, unidentified
  REGION 1..433: note = Table 20
MQISVRLKLDTTKKQREALVDTMRAFNALCTDIALNHPDDTNRFVLQRLIYRETIKFTSLSSQFVIKAITRVAGANKTRKAQLKSKKLPRKKRPATHCSFARFSAVPYDARLLNMSSLLSAGTVSIASLTGRQKVRVCLDSRNLGVLLSGKIAGGALLVRSRRGGLSLVLVVDVPEPESIPAADVLGVDMGVVNIAVCSDGTAFLSDRVESARQRYARARKSLQEKGTRSAKRRLKKIGARERRFRRDVNHCISKQIVAHAEGTKSAIALEDLSGINARVTVRKNMRARRLGWSFSQLRFFIEYKAKLHGVNVLAVPPAYTSQTCPVCGHVDRKNRPSQDAFVCRSCGFEGNADYVASLNIRTLGIKILESMMPQPAQSAGLLLGACQCARNVAPSIEATVDNIEGAPLKGTDVNLNTSVPGSYKPAISIVGN

SEQ ID NO: 1099 - protein, 377 aa, unidentified
  REGION 1..377: note = Table 20
MQLTTVVQLQTTPAIHAALVQTLRACNLACDRISRDAFDSQTFRKYDLPHLTYHPVRAETQLAAGHVVCAIAKVAHAYKRDTATLRTFQPLGGIELNKDTLAWKVEEQAVSINAVGGRLKISFLCSAAQKERLRGKRGQADLLLRDGQFYLSVAVTVAEAEPFAPQGVIGVDLGIVNVATDSEGNTHTGEAVQRVRRKYRRLRQLLQPKKTRSARKHLQKARRKESRFVKNENHRISKELVCLATDRQKALALEALTGIRQRGNGLNRAARTELNAWAFYQLGQFLAYKARRAGVLLMEVDPRYSSQTCSRCGHCDRANRKTQEKFECRCCGFQTNADFNAALNLKARATLSAGLMFREEAHASNQGQAVSFSPDYS

SEQ ID NO: 1100 - protein, 411 aa, unidentified
  REGION 1..411: note = Table 20
MVSGEDGGCGVKRIVAIKLAPTAQEYAALYATLVACNAVATMVAEVAQTTRDRRAFAMQRLVYIACKDRGLSAQPAVRTIKKVADAYATRDSNLAKGRHGCPDSSRYRRVVSTPIAFRPDAAQPFDDRCLSWQIELSTVSIWTTVGRLKNVRFVCAQWQREHLASRRGESDLVYRDGQFYLYATIDTPDPDPITPADSRSGWLGVDLGIVNLAVTTDDDPTHLDVRWSGGAVTARRKKNLALRRALQRVGTKSAKRKLKARRRKESRYATDINHQVSKAIVAQAQRTERGIAIENLSGIRERVRLARTQRQQLHSWSYAQLRDQICYKARLAGVPVQVVDPRNTSRTCHHCGHCAKSNRPSQAKFRCHGCGWIGHADHNAAHKIAQLGHTHYRAAQSTGLKQPPVSHPVRT

SEQ ID NO: 1101 - protein, 403 aa, unidentified
  REGION 1..403: note = Table 20
MQHTTIRLRLMPDTASGQLLRKTLEVCNAEASRISQVAHERNIRNQFDLQKVVYGEAKAAIGAAQPVCLTVSKVHGAIAAHKANIRNGNRGKKGSARRAKAEATVIQFRPDASQPYDQRTLSLRIDDKIASIWVTDTGAGKPGRLKIPFTCWDRHADQLREAAKILETDLVRHHHGWYLHVTIATPKPQTSLPVTTTPSDWLGIDMGLENLAYDSDNHSFTGKTVDATRTRRLHNRTWAQQLLSQPNNRTAHRLLKSWSGRERRFATDTNHRISKSIVQLAYRTNRGIALETLDGIRDRARHRKPQRTRFHSWAFRQLGEFIVYKAAQLGVPVVFVNPAYTSQTCHQCGNRDKKARTTQALYKCSNASCAYAGHADHNAAINIQHLAPEAWQHQQTQAVSHAA

SEQ ID NO: 1102 - protein, 312 aa, unidentified
  REGION 1..312: note = Table 20
MKLVVQVRLLPTPEQVAALKATLRACNDAANFASVTAFTAGDRREYALRKHTYREVKARGLGAQAAQQVIKKVADAYTTLKANARAGNLGPQGCARRIRAESKPIAFRADAAQPFDDRCLSWDHTAHTVSIWTTTGRLKKVAFTGSLDQLKMLALYRKGESDLVCRDGMWFLYATCEIPDVPVTEPDGFIGVDLGIANIATTSDGTRHCGKGLNAVRHRNRELRSWSFHQLGSFIAYKAARHGVAVIHVDSAYTSQACSACGHVDKRNRPDQNTFSCTSCGFAEHADVNAARNIASRGVAGWAVSHAADDAA

SEQ ID NO: 1103 - protein, 309 aa, unidentified
  REGION 1..309: note = Table 20
MVYENTRKMFGLKADQVCCSIAKVSDSYKKSKKNLRKFKPLGAMEFNKNIFRINVDKQVVSIATIGKRLKLTYQCGERQHQLLEFAKNAGKLKISNKHAFFYVYCEIPCDTTETDGFLGIDRGIKNIAVDSEGNFYSGEHVWNRKQRYQKLRSELQSKQTKSAKRKLRKISGKEKRFMHDVNHCISKQIVQTAKHSCKTIVLEKLDNIRHRVKVSRKQRSTIHQWSYYDLAWKIEYKSKIERIDVVFVDPRNTSRTCPSCGFVDKKNRRTQSNFSCVQCGFAGHADHIAAINIAARGAVNHPIVSTASR

SEQ ID NO: 1104 - protein, 396 aa, unidentified
  REGION 1..396: note = Table 20
MKLTAKLKLELDLEQQQLLLNTIRETNILCNRISQLAFKERKFGKSSLQKEFYHKLRKKYPQLSSQIFIRSFAKVAAAYKNNKRTLVKFRFNGSIAYDARLLSWMEDDDKISVWTLNGRQPIRFVCGEHQQNMLGGKIGESKLLLRKNKFYLHVSVEVKESEGFESQGYLGVDLGLAQIAYDSDATAFSGEQIRAVRKKNVHRRRQLQKKGTKSCKRKLKERSGREARFRNDVNHVLSKAIVKKAQRTKRTIVLEDLSGIRNRVRASRELRRELHSWAFYDLRKKIEYKAKRDGVEVLFVDAAYTSQTCSQCGYCDKRNRKSQSVFVCRECGTQSHADLNAARNIAEKGRQLVIKRERALFECEDDGRVAVNQPNGGVVVSEANDEASSVVQLKLF

SEQ ID NO: 1105 - protein, 386 aa, unidentified
  REGION 1..386: note = Table 20
MKLMAQLQLLPSQEHAHALEETLQVANRACNFLSQVAWDHQVFNKRDLQTQVYSDLRTQFGISAQVAIRCIAKVCDAYRTAFELHRQRVQETHWANEQRAGQGQDLLPLPEMKVCQFRSTGSIAYDDRILTYQEDQVSIWTVEGRIKVALVLGEHQKQLFQSRQGESDLVFHKDKWFLLATCHQDTPLPEEPQGIIGVDMGLENLATTSDGKNYCGDKIKALRKKLKEHRRRLQKRGTKSAKRRLKQLSKRQERFTLNTNHCIAKEIVRDAKASHKALSLEDLTGIRKRTGLNREMRWLLGNWAFAQLRAYIEYKSRLAGVWVFHVDPKNTSRACSRCGHCAKANRKKTHFKCLECGFEDDADANASRNIALRAAVNRPIVSTFAG

SEQ ID NO: 1106 - protein, 380 aa, unidentified
  REGION 1..380: note = Table 20
MKTVLKIKLEPTKEQKEMLRQTMFQYNAACNYIAEVAYEKKISSKFKLQKLVYNTVKKDFNLSAQMTVRAIAKVCEAYSRDKNILPKFRLDGAIVYDDCIMSFLADEKLSLWTVNGRQKIQMIFGDYQRQQFQYRKGQVDLVLVSNTFYLFVTLDIKELPKTSPKEFIGVDLGIVKLLVDSLGYEASGEIIERIRLKYLKLRRDLQKCRSKNAKRKLKKIAHKEKEFRRQINHIISKALVKRAKDTNSAIALEELKHIRSRTTVRAKDRARISGWAFAQLQSFILYKARIAGVVVIFVDARNSSRECNVCHFVAKRNRPNQSIFCCAKCGHSDNADHNAAKNIADRGKILWASVNMPIAVHADPTIVASLELQARLFKAE

SEQ ID NO: 1107 - protein, 377 aa, unidentified
  REGION 1..377: note = Table 20
MSIFVKDMVVVAQIKLVPDREQFGLLMETLTAMNLACNQISAVAFDNQCFNRIRLHKLTYYAIREDFGLKSQMTIRAIGKVADAYKVKAKKATGPIDTQRTFRLKGAVAFDCRMISFDLSSDSLSILTLEGRQVMKFEVGDNARNLLAFQKGESDLFFRNGHFFLNVSCDIPEPELIDHENMIGVDLGINQLATLSTGESFDGQQTEKVHKKNQAKRTGLQKKKTRSAKRKLKKNSGKEKRFKRNENHIISKRIVDEAKRTGSAIALEDLTGIRRRQRVRKSQRSRFSGWAFHQLRQFIIYKAKLAGVPVFLVPPAYTSQRCHKCGHIEKANRKTQSEFVCCSCGHGDHADKNAALNIAELGCSQSAHGRVVGFIRQ

SEQ ID NO: 1108 - protein, 375 aa, unidentified
  REGION 1..375: note = Table 20
MKLIVNLKLKPLESQHADLLRTLERAGEACNWISEQAFENKVFKQFAIHKIVYLSAKDKFSLSSQMVIRAISKVADSYQIQKAKQTFFKKHGSIAYDSRILTFKSSNKVSLWTLNGRQTIPFVCGEYQRKLLPFLKGEVDLIYRKGQFFLNAVCDVPEEHPMIPDNVIGVDFGIVQLATDSTGESFTGAFVERVRQKFSNQRQLLQHKASKQTQSGKRPRHIHKLIKRLSGREKNFRKHQNHVISKKLVEKAKALNSGIALENLEGIRKRIEKRLRVSQRAKISGWSFFQLREFVTYKSKLNGVPIILVNPKYTSQECSECGHTEKANRKSQSEFECKNCHVSINADINASRNIRSRAFVNTLQSSENIVLKNAV

SEQ ID NO: 1109 - protein, 368 aa, unidentified
  REGION 1..368: note = Table 20
MKLVANLKLTPTPAQERELRLTLARCNEACNWLSERAWETKTFRQYDLHKLCYQAVRAKFALSAQVAVRCIAKVAHAYKLDQKTQRAFRKHAAHPYDDRILRFVCDEKVSLWLLSGREKIGYVGSDHQRQLLEHRKGEVDLMFVRGQWYLAAVCDFDDPKLLTPEGMLGVDFGIVNIATDSLGERYCGAKVQAYRERYAKRRATLQRLGTRAAKRCLRHISGRQKRFQKYENHCISKRIVSTAERSRLGIGLENLKHIRARVKANKAQRKRLHNWGFAQLRAFIEYKAKRAGVPVVIVDPRNTSRECPACGRIDKANRPTQSEFRCVECGHSNHADHNAAGNIARRAAVTQPMFAHKCAPCAVESRQL

SEQ ID NO: 1110 - protein, 367 aa, unidentified
  REGION 1..367: note = Table 20
MKLTLQIKLLPDDKQSNSLLQTIKECNRACNEISEIAWSKQAFNQYKLHRLAYHSIKKSFKLSAQTVVRCISKVVDAYKKDKKIKRQFRPLGAITYDTRILSYKGMTASVWSVDGRLKIPFICHNPKYLPYIKGEADLVYKKGKFYLFQTVEIPEEDIKDVEEFIGVDFGIVNLATTSNGDNFSGKQVDNVRKRMTKLKKALQKCGSKSAKRHLKKLSGKERRFKKNTNHTISKQIVQIAKDTNKGIALENLKGFKVSVRKEQRKQFGKWAFDELGNFIAYKARLNGISVIFVNPRNTSRTCSKCGYISKSNRKSQSVFVCQHCGFSINADINGAINIASRASVNKPIAAHISIAISSLLGTASSRL

SEQ ID NO: 1111 - protein, 371 aa, unidentified
  REGION 1..371: note = Table 20
MRLTLKIKLLPTDEQADLLLSTMKKANAVCNAISEIAGENKVFNQFKIHALCYHGFKSSFNLSAQMLVRCKSKVAGAYKLDRETKRSFRPLGAVTYDSCILSYKDMSVSIWAIGGRLKIPFVYHNPKYLPYIKISKVEADLVYKKGTFYLFQTIDILDEEMEDIEEFIGVDFGLTDIVVASNGGKQSADWINSYREQRQKVRKSIQSKGTKGKMHSYKRGYAKLLKRLKGKERTTATIINHTIAKNIVLAAKAEHKRIAIEDLTDIRFTSKRRNKTFATKLGRSSFGQLRSFLKYKSKLHGVNLIVVEPRYTSQTCSCCHHVGIRKNKSFKRPNCGNDMDADINAAINIATLRSAINQTEKSGMYCSLHTA

SEQ ID NO: 1112 - protein, 377 aa, unidentified
  REGION 1..377: note = Table 20
MKLTLQIKLLPTYEQVEILKDTFGVFNEACNVISQIAWERCVFKQFDLHKEVYCLIKETYHLSSQLVVHAISKVANAYKSYRNKKRYFRKLGSITYDRRVLSYKISKSICSISLIKGREKIAYICYRPHLMQFAKGEADLVFIRGKFYIYQTIEIPDERENDVDDFIGVDMGITDIVSISDGTNISSNEVKNIRDKYNKVRASIQSKGTRNCHKLLKRLRGREGGFATIVNHSISKWLVAKAKKENKGIAIEDLKNIRFGMNSKKRNKTFRRRSNSWSFYQLRSFLEYKCKMNGVKIIAVPPAYTSQTCHECKHIGIRNGKRFHCKYCGNIADADINAAMNIATWGYVNTHERWELLSCSIHDDVSTSKTHKSLVYG

SEQ ID NO: 1113 - protein, 378 aa, unidentified
  REGION 1..378: note = Table 20
MKAYEKMKLATKVKLVVGQKEKEQLTQTMIAFNRAANYVSKVAFENKTFGQVNLHKLVYYEIKQKYNLSSQLAIRVIGKVVDVYKNKKQRAGIVNFKEMGSIDYDTRNLSIKKDNTISLATLGKRISIKYKYHKPLKDYDLCTQSELNFDKPTNRFYVSFFYDKTELAPYDTEKFMGVDLGVVNLATTSDGEVFSGEQVENYRKKITKLKAELQSKKSVSAKYKLKKISKREANYKKDVNHCISKKLVQKANALKVGIKLEDLNFKKKVNSKGYTKKWKDNNAKLGKWAFFQLRQYIDYKAKLLGVPVVYINPAYTSQTCSKCGHCHEDNRLSQGEFKCLSCNYENNADLNAAVNISRASINKPIVDNRKVKSQTQSL

SEQ ID NO: 1114 - protein, 374 aa, unidentified
  REGION 1..374: note = Table 20
MQLSIKIKLIPSQEQKSILLKTIETYNKACDFVSQIAFENKTASVVKIHHLCYYEIREKFNLSSQMAVRVVGKVADAYKIARSKKLRLEKPHHFNKWGAVIYDQRILSWKGLEKVSILTLQGRQIIPLVLGEYQQTKLVYPRKGQVDLLYKNKEFYLIPIVNVPEPPQKISKGSLGVDLGIKNLAVDSEGEIYSGKEVDDKRVKIDKLKSALQKKGTKSSKKHLKKLSGKESRFRRNINHIISKKIVAKAKRHSLVIGLEKLTNIREKTVFRKAQRRQHSSWAFDQLQKFIGYKAALAGIRVVFVNPKNTSRTCPNCGFVSKGNRHNQSSFKCLSCNFAELADKVGAINISRLAVVNPPIIAPAKGVTSHLVFS

SEQ ID NO: 1115 - protein, 356 aa, unidentified
  REGION 1..356: note = Table 20
MKKALKVKLTPTKEEAKSLLETIETFNDACNWISKKSFEAGTPYQMKLHHLVYFEAREQFPALTSQMIVRAIAKVSGSYRTEKKTLHFFKKQSAMEYDKRLLSFKSLSHASLATIHGRITVPLIFGHYAPLDRNKMLGQADLTPSGGKFFLNLVIDVPDGTPYDPEEFLGVDMGIVNLSTDSDGESFSGEGVDHVREKIHTLKKALQEKGTKNAKRHLKKVSGKEARFKKDTNHCLSKKIVSKAKGTGRGIALEDLKGFNGRTMVGKSQKERFGKWAFDQLRRFITYKAVLEGVPVVVVDPRNTSRTCSVCGHCEKDNRKSQEHFSCLICKHTEHADINAARNIRFKAAINRPIAV

SEQ ID NO: 1116 - protein, 373 aa, unidentified
  REGION 1..373: note = Table 20
MKSAKTVRLDPADPAQLLAWLERFNKAANWLSGVAFRERLWHWLPLQRRAYREVRERFQLPAAATVVVIRKVASAYRNKQRRQHQATFRRRGAIPVYKHQYKRDGTVSLYGFRIPFTARPQLQLSSRHQAVLCYRRGKFILHQVVEVDVPAPASVREYLGCDLGTVNLLTDSAGEAYSGQAVEEKQRIYVHRRQRLQKRGTRAARRKLRVLSGRQRRYQRDVNHGIAKRVVAKAQRLCCGIALEDLQGIRDRIKARRRQRARLHNWAFGQLRQFIVYKAALAGVPVVFVDPANTSRTCPVCGHVRWAGRRHRGTEHSCLGAWRCADGRVRKGSDKSPSYVEGIIALRIHQDRKSYVFRAASGESDDAVSHPAM

SEQ ID NO: 1117 - protein, 364 aa, unidentified
  REGION 1..364: note = Table 20
MKLTLQTQLLPTPEQIEALEATLRAFNAAADWLAGEAFARRTANKIALQKLYYADLRSRFGLSAQMAVRCIAQVCEAYKRDKSIRPQFQPFAAMPFDQRLMSFKGPDRVSLLTLSGRIILPFIMGQYQQTRFKAAKGQSDLVRRQDGRWFLLVTVDLPDGTPLPSTDFIGVDLGVTNLATDSDGERHSGAEVEACRRHYHDQRRSLQQAAARRQRRGRRPKNIRRKLKSFAGREARFRKDVNHHLSKTLVAKAKDTERGIALENLKGIRDRTRFRKPQRAKMGGWAFFQLRQFITYKAKLAGVDVVIVDPRHTSRTCPVCGSVEKANRPSQSEFRCVACGHTDHADVNAARNIRSRAKALVNAA

SEQ ID NO: 1118 - protein, 194 aa, unidentified
  REGION 1..194: note = Table 20
MWFLIATCDVEEKPEFEPVDWIGVDRGIVNLATTSDLDNFQGRRLRRYRRWHARKRAELQAKRTKSATRRLKRRAKREARHAHHVNHRIAKQIVAVAERTGRGIALEDLAVSVTGSRFPGTSEPHSTPGRSTGSNSTSATKRNAPVCRCCSSTRGTPARGARGAGTPTAPTVPAGTIFTVAGAVSLDPPTSSPP

SEQ ID NO: 1119 - protein, 369 aa, unidentified
  REGION 1..369: note = Table 20
MRIRLLPKDDQKALLLAVMERFNEAASLAARVGFAAGVFSQPSIHKLAYRAIRERFGLGSQLAVRAIGKAVEVFQRDKTGCPVFKPHGAITYDERILSFKGLSEVSLSTLEGRERVAIVFGEYQGKRFDRQKGQVDLTYVDGRFHLYATIKVPEDPTIEVKDFLGVDLGIANIATDSDPESEPHSGKAVEDVRRKHNLQRKRLQRRGTKGAKKKLRRVSKKEARFRRHENHRISKEIVSAAKRTGRGIAVEDLKGIRGRVTARGGDARNRLSGWSFHQLYAFLSYKAQAAGVPVVRVDPRYTSRTCAECGHVAKSNRKSQSEFECGACGHRDHADKNAARNIRNAALVQAGAQAAPKPASGLDTPPTAG

SEQ ID NO: 1120 - protein, 371 aa, unidentified
  REGION 1..371: note = Table 20
MKLTVPIQLLPTHEQAAHLLATLRQMNAAATHAAQIGFAHRVFGQVSIHNLCYRELRQRFGLGAQHAVRAISKAVDAFARDRTICPEFRPDGAVPLDDRLYRLIGLQAASINTVAGRIKLPFVIGDYFTGMLSRKMGQADLVHRDGQFFLYITVEFEEPPPVQPQDWIGVDLGIVNIAVDSTGETFSGEKVQRNRRRRATARKQHQRKGTRNAKRKLKRMGGRQRRFQTAENHRISKQLVAKAKAQSAGIVLEDLSGLRGRVEDTVSRRFRRRFGNWGFFQLRRFVEYKARLAGVSVVTVDPRNTSRTCSACGHCEKANRPDQATFRCKHCGFSTNADFNAALNLRAKALGQTCKPASKVSALSQGQSPRL

SEQ ID NO: 1121 - protein, 213 aa, unidentified
  REGION 1..213: note = Table 20
MKPVDFREAAAQPFDDVQFTGSADQLSTLRTHRRGESDLLFRDGAWFLIAACEVPETPQFEPTDWIGVDRGIALEEFQGIRDRVRLHRHQRATQSSWPFYQLERQITYKARRAGVPVLLVDARYTSQMCPMCKHTSRSNRPARDSFSCRWCGLAGPADFVAAVNIRDRARRAWVLVNVPYRPLPEQLPVDAARTPQPVADEERDWLEGASARS

SEQ ID NO: 1122 - protein, 283 aa, unidentified
  REGION 1..283: note = Table 20
MLITTKIKLILEQKHHEKLLETMKRYNAACNYISGFAFEQSQYNRIRLQKLVYFVVRDQFQLSSQMTILAVRKVAAAYIADKAKKNEYKKSKGKNVRGQADLVWHDGVFYLLPGVELPENEPYIPNDALGVDLDIKNIAADSMGESLSGDAVQAVRHHCISKHLVEKAKRHRSRLALEDLTGIRERITVRRAQRRNQHAWAFAQLRSYIKYKALLAGVPVVLADPRNTSRECPQCEHTAKENRKTRDWFRCQACEYAAPADNVAALNIRSRAIVSVPNVGVAI

SEQ ID NO: 1123 - protein, 585 aa, unidentified
  REGION 1..585: note = Table 20
MNNFIFLDTCVFYDCIEHSRCKQIVDRAHNVDFIICTSITVLGETLITMLRQDGSGQKISEFVELIKEWEMHFYVPNDSVRIICYEMGEDHTDSRMAGQITDRTHLAYAIAYGFKYFISTDTLIKSYQLPHALTKYGFRIMGRGAPLLFVGGGIGPPHITIHFHPAEIFFMPGECQPRRCMQSVTKLRLFASPDERRMLFATMERYNAACNAVSPVAFSERQFSNIGLQKRLYSHVRETFGLSAQMAQLAIRKVAGSYRSTKEAIKEQNKVLAALGKPLKTLTELSFREHGAICYDARVLSLGQNRVSIWTLEGRIKLRYSKPAYFPAVTTVKQTDLVYRDGAFWLYATVETPDTEPAEPTEYLGVDLGVVNIATTSDGEAFSSAATEKVRQRYGRLRGALQKTGTRSAKRKLRKIAGREHRFKTDTNHVISKQIVCAAEGTKRGIALEDLNGILLRTTVRHDQRERHHKWAFRQLRSFIEYKAQRAGVTVQVIDGAYTSQQCSVCGFVHPDNRLTQTAFRCLACGHTENADLNASLETSLPGPPSTGLLRSAPPTPGERWNRKPTKSMVPPTASCPRLKSGVVD

SEQ ID NO: 1124 - protein, 358 aa, unidentified
  REGION 1..358: note = Table 20
MSWEQGITNKNKLHHIVYGPTRAIYGLGAQLACCATDKAAEAVRAVRAAPERRDKQTDQLIPKTCPAFDADSSIRYDARTYRLMSLDRVSLNTLTGRVIGQLALGDFQRRYLYDTSWKIGGAELLRRDNVWYLCITQSKAAPDPDEPTGYLGVDLGLVNVAADSDGEVYSGAQIQTVRERRFKHRRRLQLANTRRARWRLRRNARREHRFQKAVNHRISKALVQKAHATRKAIALEDLSRIRERVTVQREQRRVRHSWAFRQLRTFINYKARLASVYVVHIDARNTSSTCAMCGYCDKRNRPDQARFRCLQCGHTAAADTNAAVNIARVAAVNQPIVSLLSQSIERADTSPGAKALGC

SEQ ID NO: 1125 - protein, 386 aa, unidentified
  REGION 1..386: note = Table 20
MQRTVTCTLRVSEADAAKLAETQAAFNAACDYGSAVAFQERIFNQVRLHHAVYYDVRERFGLLAQFAVRAVAVVADAYKLDKKTQRHFRPDAAIVYDERLYRLEPKGGFQRVGLSTLDGRIVCDLAIGGHQRRLLSAAMKIGQAGVLRDTKGRWRIAFSLTLPDPTPPLSPTDVLGVDLGIVHIAATSDGEVFSGAVLNGTRARRRRQRRRLQQKGTQSAKRVLQRLAGRERRMQRDLNHVITKRLVQTAAATNRAVALEDLNGITKRLLGKVSRSQRQRLGGWAFHQFGVFLGYKAQAAGVPVLSVDPAYSSQTCPVCGHVSRGNRPTRDRFCCQSCGFAGPADGVAALNLAARGRVVVNLPDVGGSCPSVHGATYKLPASAGGR

SEQ ID NO: 1126 - protein, 411 aa, unidentified
  REGION 1..411: note = Table 20
MALRKSAVKQAGCASVVQVRLLPTPADAERLATAVTICNTAATYASRIAWERRVFGQLALHRLIYRHLRDHFVGLGAQAAVRAIARVADAYTNRRATKKRAHIFRAHAAVPYDARMITFNRDARIASLWTPTGRVRAAYTGRDQDLKAIAELPIGECDLIERKGTWLLQIAVALPRPETADPFNGFLGVDQGTANLAVTCDGEVLPGKALPGTIENNGHIRALRDRRHRQRKRLQAKGTSSARRRLRVLSGRESRMMADINHQISKRVVREAERTGRGVAMEKLSGILGRVRAHRSQRRTLHGWAFAQQIAFTRYKAERVGIAFILVDAAYTSQTCPNSDCGHVSRRNRHARGMFRCQACGLAGHADHIAAINVAYRGADGWGAVNRPHATGLPSSRRAPESKPRASARGR

SEQ ID NO: 1127 - protein, 163 aa, unidentified
  REGION 1..163: note = Table 20
MSLWTPTGRVTIPYTGRPEDLKAVDALPRGEADLICRRGVWLLQVALTLPRPEVREPVGGFVGVDQGVANLAVTCDGVVLPGPAFTSQACPECGYISRANRPARGRFVCERCGLAGHADHIAARNIATRGAAGWAAINQPHATGLPSPRRDRESKPPASNGGS

SEQ ID NO: 1128 - protein, 370 aa, unidentified
  REGION 1..370: note = Table 20
MKITLKCKLNPSEEQGQILDHTLGECLKAANYVSHIAWERKCFNRVALHHLVYREIREKFGLTAQIAVAVKDRVAFSYKANREHIHIFRKPFLPLNPPRSFRLIGEEVASISTLKGRQKIPLLLGRYQKRWLEDRAKKICESLVVKRGQDYFLHLTIEVEEPPPKDPQGFLGVDLGINNLAYTSEGESFSGREVEGARLRYERLRAELQQKGTWSAKRKLKRLSGKERRFKRNINHLISRRIVDKALATGRALVLEALKGIGERAKHRKSQNGRFHKWAFGELRRFIVYKAQLAGVQVFFAPPAYTSQRCPVCGYTAKHNRPSQGKFLCRVCGFSDHADHVGALNLVWVAVSRPDVLRPARGSGRTSCRL

SEQ ID NO: 1129 - protein, 357 aa, unidentified
  REGION 1..357: note = Table 20
MAILNGTLSRYAECCNWMNETVDRNVTARFAIHHQTYHPARVQFGLSANLTCTAIARVAGARKTAHAKKRTVKAFKPTSVTFDERIFTYREASQSVTLTLLGSRQTLTVQLGKYQEEMLAGQKPTSATLVKRRNGAFWIQMQVKVDAPEPQPPTGFLGVDLGIRRIAVTSDGQKFDGKDVQNRRTQFAQTRTSVQRRKAQKRTRSTARLLKRLAGRERRFQAWVNHNLSKQLVAVAKATGRTLRMEDLKGIRERTKVRKAQRRTQHSWAFYQLRSFVTYKAAVAGVGVEFVNPASTSKACFVCQQIGHRDALVFKCENPDCSNRGVEIDADYNGALNIAAGGVVNRPEVQAKSAVPF

SEQ ID NO: 1130 - protein, 382 aa, unidentified
  REGION 1..382: note = Table 20
MQILTVCCKLVPDPADRAALAVTVRAFAASCRTVVRETTDDLVNETRLRAQTYRLVRERYGLSANLAQQAIGRVAANRKAARANHGRVASYRDASVQYDERTFRMFDGEASLTLVGGRRRVSMSLGAHQRAQLARHAGARRIRSAQLVERRGRRTTSFYLNVQVEAACADPITPTDWIGGDMGRTDVLHTSTGQFWAGGHRKAVRERYQRVRRSLQRKASKGTRSTRRRCRAVLQRLSGRERRFHAAENHAISRRVVQDAAELRAGICIEDLAGIRLRTMVSRALRREHAGWGFHQLRGFLTYKAALVGVPLLAVDPAWTSQSCSICGCIGYRERKVFRCDACGHQADADRNAADNLRLMGMSVTHPRGPCCPLPKVIVQGS

SEQ ID NO: 1131 - protein, 383 aa, unidentified
  REGION 1..383: note = Table 20
MTQLLSVKCRLIVSKELRTEIDATLQGFADACNQILKIGQGFKQWNTTKLHHLAYKTVRASTGLGSNHVCMAIRRVVGNVKAVKQIHKFRPTSISLNERTFRYWEETQEVGITLTKRHRFKLAIGGYQIALLRGQKITSATLNKTRQGDYYINFVVEIDTPPTGKTPKVIGVDLGRRDIATTSTNKSWSGEQIQTVRDRFSRVRAGVQSKRTRNSRRLLRRLSGREQRYQKWLNHNISKELVQVAKQSGAALVFEDLTNIRQSLNEKPRNKTERRRTNNWAFHQLRIFVQYKAAIAGVSVVFVPPGYTSQTCNRCGHIHPIKGKSYRSVKKFKCGYCGFEHDADVNAAMNIAALGLSFVSQPERPGMNCQLEGQIPLLTIFQI

SEQ ID NO: 1132 - protein, 412 aa, unidentified
  REGION 1..412: note = Table 20
MTAICKLEVDAVSATDIDNLMLMFAATCNYVNASVNPKYKSATRIQKLIYKDAKEKSGMQANHVIQACIRVAGNRKVNRVKEYKPGSVPFDVRTMSFNWHDNTVSLTLLGKRVKGIPLAINKYTNYLLSDRENKEITSAVLVRTGKTYCLHIQVEHSVLQPAKSDQYLGVDLGRRDIAYTSDDESWSGKQIETVRAKYSKIRAELQQKASKGTRSSRRRCRELQRRLAGKERRYQKWLNHNISNAVLLNAKRTNRHVVLEDLEGIRERLNEKPNKREQRFLSNSWSFYQLKQFICYKAKIYGVSVILVDPRYTSQTCHNCLHIHPEKGKSYRSGKNFHCKHCDWKGDADANGARVIALLGENVNRPCGSEFISCQIPVVSDSRASESLHITAREVLVVYHIASLKTHPSGLH

SEQ ID NO: 1133 - protein, 417 aa, unidentified
  REGION 1..417: note = Table 20
MIVCHYGEFLKSVKQFLTLVVKLQPTSKQTQLLGDTAQAFADACNYINKTVKHNLTNRNSIQAVCYQDVKEQFGLTANHVVRACARVAANRLTAKQKGRKVKHFKPTSFDCDARTFRFVETGYLASISTTGKRAKIPMRVSNYHIGKLSGQNPTSAQVCQHKDGDWYVHIQLKSDAPKPIKSDNVIGVDFGRRDIAVTSTNKSWSGKEILRKRDKFNRVRASLQKKADATPRRRTAQGNAHQAATQGTRSTRRRCRQILKRLSGKERRYQAWLNHNISKAIIDEAKQSQSFVSIEDLTGIRERTNQKPRNKTERRRSNSWAFYQLRTFLEYKGIKEGIEVIAINPRYTSQTCHCCLHIGLRNNKSFKCSNKACGWIGDADLNGSLMIALVGQSVRLPGGSSLLACSIDSGLQKARAV

SEQ ID NO: 1134 - protein, 384 aa, unidentified
  REGION 1..384: note = Table 20
MQTLTIKCKPILSDEERGAIDATMEAFAAACNDAIRVGREMGTTSNVRIHHACYKDLRANHGLTANLAVRAIARAAGILKVRKRRRSTVRPTSIDYDARIFSFREADWTVSLSTISGRIRVPIRVGDYQKQLLSGRKPKSAVVWKTRQNEYYIGIHVDVEAPPPGFEEKHGTHDASRWIGVDLGIVNIATLDDGTAFSSDTLEETRTRYHRTRRSLQRKGTRGARCVLRRLSGKERRFQQAVNHEISRRIVDKAAAEGKGVRLEDLSGIRDRMRVRKSQRRRHHGWAFYDLRSKIEYKCALAGVPFEMVDPRYTSRRCPVCGHTEKANRKSQSEFRCRSCGLEAHADMIGAINISLGGAVNRPEVALRTFGRLDDWTRHASRRV

SEQ ID NO: 1135 - protein, 392 aa, unidentified
  REGION 1..392: note = Table 20
METIRTIVCKLDPTAKQVAEIEATLQAFAHACNHIVEVSHREQTTNKVILQHACYREVRATFGLSANLTVRAIGRVCAARKAQDKKHSTFAPTSIDYDQRIFSFRESDWTFSLTLLHARQRLAARLGERQRQALKGQCPTSATLVKRRDGRYFLHVQVSEEAPETVPASAFLGIDLGIVQIATDSDGNAYSGQPVEKIRRKHNRQRQRLQRKNSKGARKKLKRLAGKEARFRRHENHVISRRIVETAKRTGRGIALEDLKGIRERIRARGGEARNRLSGWAFHQLRGFIDYKALAAGIPVRTVNPRNTSRTCAECGHCERANRRSQESFVCQHCGYSTNADGNAARNIAFLAQADGNAALELAGLVPSRKAAGPRPQRIVTGIAPRPAPGSS

SEQ ID NO: 1136 - protein, 370 aa, unidentified
  REGION 1..370: note = Table 20
MLVRKTIKVKLETTPSDRLILFRTLEAYSQALNRIAQIAFFARAFSRNKLHRFAYQEIRAESELPARLVCEAIRQVSWAYRHWKRHSQLLKFNGNSFHLHRTAFKVKQDRCSILTIDGRLNLSIYLCSYHQQYMQWRQREAKVVLDMKKAEVYLCLTVEKEVEPIKPVSVIGVDIGRNNLATCSTGLNFNGKKAEHIRRHYAKVRKSFQLKGTRSARRRLKAIGRRENGILSWMLHNISKRIVEEARQRSAVIALEKLSYIRQRTKTRKKERYLHHSWAFAKLQNFIGYKAGEAGIPIIRVEPAYSSQLCSRCGKFGIRNNSHFHCPHCHYQTFADFNASHNLRLRGQDLLGVAHVGEPYSRVEAAADVH

SEQ ID NO: 1137 - protein, 383 aa, unidentified
  REGION 1..383: note = Table 20
MKATATVKVKLSIRDEDIPTLESTQAAYTKALNETSKVAFDTGVINAVALHHFTYKAMREATGLPANLVCSARAVVAEAYKREPEPKQAHHWKDTAGVRFDARTLTFDLTREFATLSTTGGRVRVGLRFGDYQRQYLDASWTFAKTGTLIKRRGKWYLCLVAEKEVPDSDGTEVLAYDAGINRIATTSTGKVFAGSSIKQLRKRRFKQRRSLKVGHNRSRNKRRLLQRLTKKEHRAVEWLLWNVANEIVREALRIGASTIAAEDLTHIRLRIRVAKKQRVIQHGWPFASLLAKIKHVASRHGIRVVEVDARGTSRTCNRCGYEDKRNRKSQSDFKCLSCGHNLMADFHASFNIRDRCVDHVCGVRKPSPKVRRLRHQVATLQG

SEQ ID NO: 1138 - protein, 250 aa, unidentified
  REGION 1..250: note = Table 20
MISLTTTQGRLRIALLLGEHQKKALQRQDPSSATVINKSGVWYIHMVIDFEPTMCSGDGVMGIDLGINTLAATSTGLLIEGKTRRQFKEKRAKIRASLQSKKKPSTKKVLKKISEYEVRRIKHENHILSKQLVEEAKRHNCRTIRMEQLKGIQSRTKTWNKHRNQMTAGWSFHQLQSFVTYKAVACGICVELIDPAYTSQTCHRCLKLGSRYGERFTCATCGDQHADANASRVIALGGAVCKPARISSAS

SEQ ID NO: 1139 - protein, 355 aa, unidentified
  REGION 1..355: note = Table 20
MCNYVVPTVAADRTKRLWQRFTLHHAVYDKIKAKFPDLGSQYACNVIRSVSAAYKTELAKHPAQLKSEDKKLKTLVFRHPSVHVDKNTLTFFPDGTVSISTISGRIRARLCPGPFQKELLASGKRKECNLVLHPRRGRKEAFWELHIAVESQGCSGEEHLKNLKADEIMGIDVGENNIAAVSTGRIWKAGALKDKRDRYMSQRKRLQRNGSQSARQHLKKASGRERRHVTHVNNVVSKEIVQEAAKRGIKLIALEDLTHIRDHIKAGKRIRSRLHRWSFRELQEMIVYKAAAAGIRCVFLDPRYTSQTCSQCGAPGKRHKHGFRCSQCGHLAHSDLNASRNLQGLCRQLSAQGLM

SEQ ID NO: 1140 - protein, 369 aa, unidentified
  REGION 1..369: note = Table 20
MKRTIAIKLNISDQQSEALCELQEIFTKGCNQVAAVALLEKERNRIRLHHLCYRNLRQTLPRLGSQMSCNVIAKTAACLKALKRPNQILFKRGCSVHFDKRTYSLKGNVLSIFTLRGRIRVPLKISQYHQGFLDVGVLKEAELVRKGKRWFFHVVLDLPDVLPMQAGRAMGLDLGENVLAATSTGKLFGGGLLRAHRDRFLGMRGRLQSNGSQSAKQRLRKISGREERHVKCVNHCISKQIILEAQRNGCTTIVMEDLKNIREKIRAGKKLRSRLHRWSFDQLRQFVEYKAHAIGMHVQYVSPEYTSQTCSHCFSLGIRSKHRFSCNNCGSLQHSDLNASRNILGLGLSVDRPTGDVNRRHVAALSGGR

SEQ ID NO: 1141 - protein, 377 aa, unidentified
  REGION 1..377: note = Table 20
MKRTVSLKLVATPAQAAKLAELSSVFAQACAVVVPFSVEHRCWNRVALHHLAYRSIRDQFPALGSQMACNAIHRVASAYKTLQANKRIAKDKAVPVIRFDRTAVHYDHRTYSLREGAVSLFTMSGREVIAFSCGKHQANLMKSGDPKEAELVCRKGQWFFNLVLDIPDVAPVESGGILGVDVGENNLAATSSGKVLGGGKLCFERDKYLAHRRRLQSNGSRAAKRKLRAISGRERRHVEHVNHEVSKAIVQEAIRLHAGEIRMEDLTHIRDRIRAGKRVRTRLHRWAFRQLQDFVAYKAQGVGISVEYVNPAYTSQTCSVCGAIGKRVKHRFTCSCGNRRHSDVNASVNIAGFAEPIGPARAAVNQPVFAHLGHSCM

SEQ ID NO: 1142 - protein, 378 aa, unidentified
  REGION 1..378: note = Table 20
MKRTISLKLILSQNDCEALLQTQGYFAQGCNTIALFAQENRCWNHVALHNLCYSKVREQLPELGSQMVCNALRKVCSSYKVLKIRKTKPVPTIRFKETSSIHYCARTFTLKKEVLSLYTVNKRIKCSFTIGTRQQEYLKQGKVKEGELVRKGRRWFFNLVLELPEPSLEREGTFMGIDLGENNIAVTSNGTIYGGGKLKGARDKFLNRRKKLQSNGSKAAKRCLKRISGKERRRVKETNHRISKALIEEAVLNETKMIALEDLQNIRKRIKGNKRMRTRLHRWPWRELQQFIEYKAQSQGIEVVYVRPEYSSLTCSHCQSLGIRQKHLFKRLSCGSYQHSDRNAAINHCKLAESVVSARAPVNVPMVAASELATSSFL

SEQ ID NO: 1143 - protein, 402 aa, unidentified
  REGION 1..402: note = Table 20
MEITRTTKLKITLPLDVAQRTVQAWTDACNAISQVAFASGCKGNSVKLHRLVYHDIRHRFGLSAQVTANVIRYVAGKYLALHTAKKKPKHPVIFRNNAVVLQGGIRGRDFAFRGKGLSISTLDGRIKGLAFKGEPKTTEYLANWRLGDARLFIRNRTVYLAVSFKQDVPQADHPNDAVIGVDRGIKYLATVTDGQRQRFFGGGYVHHLRIRYTLVRANLQRKKAEHSTRSLRRVLQRLSGREARFARNTNHIISKQIVHFAAQTGNPTIALEHLKGIRNRRRLRKTQRTDLNRWSFCQLEAFIRYKAETLGFEVVTVDPQNTSKGCSRCGYTADHNRHRLDFCCHACTLQLNAELNASRNIRLRGILLRQALLQDEVLSTTSEARPDDSGSTPDEGTGKLAT

SEQ ID NO: 1144 - protein, 457 aa, unidentified
  REGION 1..457: note = Table 20
MLRFTLEAAGGPFPQVGQESRRWKANKLVIPIAYNYSYDDNTGIQDNFAQTRRPPEEFSRTLERWLEALNFISRWAWKKKEFNYGKLQKALYRKVREKFGLKSQMTVNSFRQVSAGYRSTFANRRKKGRKPVRIPVEFKNDSLLLNYPRDWKFKDGETLSLNTLEGRKPVRFSCGGHQRKYLDNGWVIGSGRLVRRKRGRGKGLYFNISVTREFEVGDIGDRVTVVGVDLGINNIAVAKSSNGEHRFFEGGETKNRKRMFERTRGNLQAKGTRSAKRTLKRLSGRERRFMADVNHRVSKELVEWVSTMEKPVMALENLEGIRERVNRESGKKTRKAVNRWAYHQLRTFIAYKANALGIPVVLVSPRNTSRECPRCGHTEKDNRKGRSFKCLSCGYGNNSDLVAAGNTLSKATSSRQVLEEAGRSQPAPKGRPSMPKPLLGGIEAEGRPKLRPSGQGS

SEQ ID NO: 1145 - protein, 385 aa, unidentified
  REGION 1..385: note = Table 20
MKVLRTYKLKITSEHSKFSQYAESYKDAANWLSKIIYSRKKVNTPGQLSKEFYGMVREKFNLPSQLTCSLFRHVVGTYRSMKSNKNWSLATYNKTSLPLCWKRDFNIRKKGMSIWGELVSYKSRPLPKGKWSDSKLKFSKGQWWLCLTVEIDQVEPRVEGGIIGVDRGQKNILVAIDPNSNKTLYIKGGELNHKRLCIRQTRAKVASVGTRSARRLLKRLSGREKAVTQNILHIASKQLVNFASLNDARTITLEKLTGFKQKFTKENKKQHHKQRSRNNRWPYFMLEFFVTYKANSVGITVDNVPAKNTSRGCPCCGCVDKSNRNGLVFRCVACKFSDNADRVGAKNVALRSLLQRQAVEERAMCQLAYSRHCGEGSGDLQAHSL

SEQ ID NO: 1146 - protein, 418 aa, unidentified
  REGION 1..418: note = Table 20
MPTFPIVYFSLFYFINFIKKQTFKYFSSLMMYVLQSMKICKTVQVQLTEQKDKLVETVEHYIDAMNYTSRYAKQHKLYSKNRLQKHIYYDLRERFGLKSQMTINAIGDVASAYKGKHKKNRIRNKSVHFKARSMRLNYPRDYSFKDGDIVSINSLYGRLKIPYKIGKHQQAYFDSNEWDIKSAVLTIRYDGIVFLNVAIEREIEETSFLNKDGVVGVDLGINFVAVATDTGDNSDFYGGGKIKYFRWLYAKHRKNAQSKGTKSARKFLKRIRRKERRLMTEYNHIISKQIVVNALKRFESPIIAMEDLKGIRKNSNKNKKYNRMLNSWSYYQLQQFIEYKALERGIPVVYVDPKYTSQICPKCGHKEKSNRNKKIHRFKCNKCWYETNDDRTASMNIRDRAVVPRYIRRTRAMCQLAP

SEQ ID NO: 1147 - protein, 395 aa, unidentified
  REGION 1..395: note = Table 20
MKLKLEPTEEQRQKIMDLAKKYKDAFNEVSEYAFSNRVFDHIGLHKALYRKLKEKYAFQAQIAISVIREVAQHYASVFDQLAEKFHVSKRDRKRLVELFYKEVKRPIKRRKLIVKLVKGRSYDLKIDPRVCSISVIGERLKRIPYYGWSKHYKYIELGYGDATLYYERSNKLWYLIVSVEVPESELKPKKVVGVDINEPSDSFVALCDSLGRSKLIEFSQQVLRLKSHYQKLRSQLQSKGTRSAKRRLSSLSGVEKRLVRNFLHVVAKEIVENSPCVFGLEDLNGIRERRERHAKFSGEKRRLFSQWCFRELQTLIEYKAKLCGSKVIYVDSQYTSISCPVCGYTAKENRDKKRFCCRNCGFEEHADIVGAKNIMLRVLKDLQNGALVSRPDAPP

SEQ ID NO: 1148 - protein, 400 aa, unidentified
  REGION 1..400: note = Table 20
MIEKVKQVLSVKVKLILDEEKKRELLRLCKAYKDAMNFVFANSFEKGKKDFRTLHKAYYRILRERFSLPSQYAVNISRKTATIYASKNKWEKPPKRKSLSVDLTFNRTFSIKPDKRVVSITTMNGRLKNIPYLGWEKHYEYLQRGRIGDAVLVYDKANKEFFLHIPVEIEVEKQTPQEVIGIDVGEVNTVALVSSKGNKEIVPRTEEYKRLKEKYQRLRQALQSKGTRSAKRKLKKVVGREKRFVESFMHYVSKYLVSKYPQALFVMEDLTGIRERRKVKRKNTEEIRQSNQWAFRSFQTKLYYKSILYNGISPIFVDPSYTSQMCPVCGYTSKENRKSQSDFECKNCGYKEHADIVGATNIMVRGLVEVQNFYQGLFVNQPNALPYGMEQAPTSLSGSS

SEQ ID NO: 1149 - protein, 448 aa, unidentified
  REGION 1..448: note = Table 20
MYSDPRGSVKGRFANLLFQGNLVKDSLTLSIKLNLSANYEQKALLLRTMDSYRDAMNYVSRYAFTQLDKRANKRKLNDLLYRELRIRYNLPSQLAQSAIRRVASTYQGEWTKIKQNAEHRKLGYTKKYYHGLEKAPEFKSRTTEIVYGRDYSFGKNQTASVNTLEGRVRVAYEGWTPHVERLRSGEWKIGTAKLWYDKGRKALYLIVPITREQSVDLNDMTQVQGVDVGMRYLAVVDTGEKPIFVKGSPIHHKKRHLQRLRKRLQEKGTRSAKRRLAALSRRERRLTPDVNHRLSRKIAQPQVLVGIEDLTHIRVKINTKRKDTEERRQAEQWAFADLHSKILYKSSLYGGYATRQDAHYTSQGCPRCEHKSKNNRPGKGLLFTCEACGYTLHADLVGGRNVRLRTLVARQGRTITGRVSTVPDVDSNDTGPDPVEESRNPLTLVRGS

SEQ ID NO: 1150 - protein, 454 aa, unidentified
  REGION 1..454: note = Table 20
MKIVRSAKLKLRCSPEQHSRLLAVTTAYRDAQNHASQWAFTHGKTSSGIAIHKGCYADIRARYGLASQLACSVRDSVSAAYKTLWTMTKQSVARLKAAQGQVGRKGRLPRLYRGLDHAPVFKALTLDYHYGRDYSFKTGRQVSVMTLEGRMTLGYAGWSTHLEDLQRPDTEIGAAKLWYDRPKKQWYLLVAYTVEKPVVVGELKQVVGVDVGQRYHAVTKVIDPVGHGKITMFEGSSHRKKADHVQHLRTKLQAKGTRSAKRRLVSISARERRFTAQRNHVLARQIVDANPLALIGMEELTHIRERTERRSRPKASMKQKKVNRVRSTWSYAALRAMVTYKAPLVGSLVTAVDARYTSQTCPRCAHVSRENRPQGRERFACVNCGWSGHADVVGATNVGMKAWQWKLEQEFSGCLSAIPSREAEDVTLYDAEGGAHPAVEAEGSHKPATSVAGR

SEQ ID NO: 1151 - protein, 373 aa, unidentified
  REGION 1..373: note = Table 20
MIKIILILTAKTKLLPTNEQALLLQDTLHANRRALNHASKMAYNSDLPPHFKPLQKLVYADLREQFGLKSQMACNVCRIVAGSYAALEKQGKSTLIEYKRPNQQYSYGHDYAFSKKGLVSVGTLQGRVKVPFITKGLEHYFDGSWKFGSAKLVYKKGKFFLHFAVKKRFDSDSTIKNIVGVDFGMRFLATAIDSNDKHLFKSGKLIKETTAKYVRLRKGLQACGTKSAKRKLQKVSGKENRFMTNTNHVLSKALIQFAGEHSLIAIEDLTGINLKTSIWKRNKYYRLSWSFYQLRQMLEYKGVMNNIKVIAFNPAYTSQKCPKCGNINKNNRNKKAHIFCCTICQYQSNDDRIGAINLRQMGIEYHHKMTQEA

SEQ ID NO: 1152 - protein, 444 aa, unidentified
  REGION 1..444: note = Table 20
FAMATWYAGFRGWERTFPPKEASMQNAQVLKMQIKFAPDDTAGPAAMQETMNHYRDACDLISQYVFARNFKFSTFYLHAVFYKKLTDKTSKLYLKAQMAQSTTRTVAAQYKALNTKQHQKAWGWTNPDTGEWVKERAKDLTDLWYPIHFKRPQVDLVFNRDWSVLDNWAQLSLNTIRGRVIVTPITTHWEKYLTGAWKFGTAKVIKSGQKWFAHISVTQEVPDIPLASMQRVVGMDRGLINILTAYNDETGETEFVSGQKLLTRRRCGKQQRKHLQQKQTPAARQRLKKIGHRENGWVTNMNHQLTKALLDCYGPGTLFSIEKLTDIRETLEKSPKDKKYERVSWPFYQLEQLLTYKAQQYGCIVIKVDAHYTSQRCPQCGTIDKRARNHQRHEYHCQQCDCRTNDDRVAAMNLTELGRRYLAGDKEPSFDSKKQKKTKRSGMA

SEQ ID NO: 1153 - protein, 412 aa, unidentified
  REGION 1..412: note = Table 20
MDVTLTEQIKLTFPSDGQRKEAERAFSAVTKRYAEACTYVSCYYFEHNCTGSVIDLHKVLYTDVRASYGLKSQMAISVFKTVLARYKTVGELMKQETVTYTVDGRHDTFRKSLDWLQKPVVFRRPQADLVRGRDWGFTAGMEMVSVNTLGKRIKCTYQCRPDSRLFDPAWKHGGAKLVFHDADRNWYLHISVTKAFPDTGRSRITEIYGHDRGLVNLVTSCGDNGETVFQDGQDVRRIKERYARTRASLQAKGTKGARRVLKRISGRENRMMSDVNHRISKTLVSGCRAGVLHVFEDLSGVSFQNLEDRNTSGRYELRSWTFYSLEMKTAYKAAMRRGAILKVDPRYTSQKCPGCGTIDKTARNHSQHRYTCKHCGRVYNDDEVAAKNLHQLGIWYISGVDNPHFSKKVSGY

SEQ ID NO: 1154 - protein, 455 aa, unidentified
  REGION 1..455: note = Table 20
MAAKEQNVTISIKVKLYPDQKTIEEFKKLTTAYSEAATWLSDLMFNDFSSPEMITDRKTLHDRYYYDIRQKKDMKSQLAESLIKSVSAKYKAIGTTFKKQYYTYTDADGNTAKYRKDLNWLQHPVVYKRPQADLVRGRDWSFVNDDNGGLILSIATLTGRTKVRFVVKGFDDVINDSDMPGLNIEDPKWKFGEAKLLSSGGKWFVHISATAKLPVTGNEDISNIVGLDRGLVNIVTAADQSGFTARYSGDDARKIRARYNKTRASLQKKGTRGAKRVLKRLSGRENGYMNDVNHCLTKALCENYPEGTLFVLEDLAGVSFEKRNFRSKEQTNELRSWTFYDFGEKLKYKAALRGQQVIEVDAYKTSQRCPHCGRYDKAARHRDTHEYICPACGHVENDDEVGALNLMFLGAEYLKDDKKPSFTKMEPKSKKGKANANAAKKNAENTIAENAFVLI

SEQ ID NO: 1155 - protein, 313 aa, unidentified
  REGION 1..313: note = Table 20
MEIPDFNRGKSFLSLKFVNDLTFLWKPIEFKRPQVDLVRNRDYSFKNDMLSMNTINGRIFVKVYGLPENHYFDGSWKLGIGKVVRSGKHWFFHISVTKEVPDFEMKDLKHVVGIDRGLRQILTTYDEKGQTRFVNGAFISKKRKHYAKLRARLQAKGTKSAKRRLRSLSGRESRWMSDVNHQLSKTLVQTYGKQTLFVLEDLTGVTFETVHSRKKENRYEHHSWSFYDLEQKLRYKAHLNESEVVLVDAHYTSQRCPKCGTIDKSNRDKDIHQYTCSNCGYSSNDDRVGAMNIYELGKWFVSGVEEPAFSINE

SEQ ID NO: 1156 - protein, 379 aa, unidentified
  REGION 1..379: note = Table 20
MKITLTSKVKIYPDEEAKKLLLETMRAYRDACNFVSAFIFSTQTLDLKLLQNSCYYEIRRCFGLRSQMAISVMRTVRACYKARDAQSIEWSFIKFNKPQLELIWNRDYSLTKGVFSVNTLKGRLKISYDINRMPSEGKFGTAKLVFRHNKFFLNIPVTQEVSDINAGDIGYIVGIDRGVRFLATTYDSSGNTKFFSGADYRNKRNHYQKLRQQLRQVGTPSSKRRLKAIAERENRWINDLNHCISKALVEAYPKGTLFVLEDLNHIQSSTYKIRTKDQYALTMWPYFDFELKLMYKAAIKGQMVIKVDPAYTSQKCPLCGRRDKSSRLRNQHLFRCISCRYKSNDDRVAALNLYELGMKYLVQSGESMPLFGGARSIVP

SEQ ID NO: 1157 - protein, 363 aa, unidentified
  REGION 1..363: note = Table 20
MEQTVTAKLRLYPEDVNLFSETARAYVAACNYASTVVYENNITSAYRLRDLIYHTLRDEYLLKSQMADSVCRSVVANYKTMFSQNLWHRAQYKSMTYDLVRGRDYTMNLESHQISVNTLKGRISNIRFSSAGFDQYLSKGRLGTGKLNVTKDGKVFFLVPVTVEIPDVPEDVTTTVGIDRGLRFSMVTYDGKAAKFYSAKKITDKRRKNRVIRSELMHRRTKSARRRLKKIGRRENRWMNDVNHCLSKTLVQSYGAGTQFVLEDLGGIRSCVKQFAKRQRDDLTSWSFGDLAFKIEYKGKMRGQTVKYVDPRFTSQACPQCGYVSSLNRDKHKHLFVCHSCSCRMNDDLAAARNIYNKGIQMS

SEQ ID NO: 1158 - protein, 388 aa, unidentified
  REGION 1..388: note = Table 20
MLLKKIDGWEWIMVVQTLTYGIRLHPSPAESDLLDRTCTAYLSCCDHVSRVAKSNRTLSQRKLNDLAYRHLRETYHVGSQMAQSAIIRVIGNYRTVKESLGDPWKTKRPLQYTSSGYDLVWNRDYSILSDGRLSVNTLKGRVKLQVDWKGMPEQYRHGRFGTARLLKKRGKWMLLIPSTVELTDPQRPQNVMGVDLGMRFLATSYDSSHKTTFHSGKEVTHKRAHYKALRTGLQKRGTRSARRRLKSIGNRENRWMRDVNHQVSKALVDECEQPTLIVLEDLKGIREATERVGKSRRYVQVSWAFFQLRQMIEYKALKAGHSIMLVDPAYTSQACPRCGLVRKANRKHRAHEYVCAGCGYRSNDDRVAAMNIRRLGYAALVESQTGTS

SEQ ID NO: 1159 - protein, 404 aa, unidentified
  REGION 1..404: note = Table 20
MQTSVVTAKIKLLPSDEQMVALAQVRTLYTKACNWLSAKVYETKELGQLALHNAYYQQMRTKLGIKAQMTQSVIKTVIARYKSAKSNNHPWSLIEFRAEECDLVYNRDYSYNRKKRTFSIGTVAGRTHIKHTTGKNEFLDNLKDKDNPSGYVMGTAKLWLDRKGQWFILVPMTKELPEFDITQDATNVIGVDLGLNFIATTYDSKGNTKFHSGRVVKHRRAECKATRKELQRKQTPSARSRLKSYGSRENRYVTNVNHQITKALVTSHPKGTVFVLEDLTGIRQVTEKVKLEHRYVQVSWAFYQFRQMLEYKAKQHGHSVLIVDAAYTSQTCPKCGNVHKSNRHKKEHRFECRACHYRSNDDRVGAMNLHRKGIEKISELSILSSTQQACPIEQGQGQLSQSLI

SEQ ID NO: 1160 - protein, 372 aa, unidentified
  REGION 1..372: note = Table 20
MKFTITAKIQIYPTSDNIILLKETMSVYRKGCNYISSIVFETKVLNQCILHDKTYRSLRNDYGLKSQMAQSVVKTVIARYKSAKSNGHNWNIVKFKKPEVDLVWNRDYSISGQVFSVNTLQGRLKIPYETKGMTQYFDGSWTFGTAKLVMKHNKYFLHIPVTKDIPEIRDDKIAQVIGVDFGMNFLAVAYGSDGKTYFDPGRKIKDKRAHFTRVRKSLQRVKTPSSRRRLKSLGSRENRWMTDVNHQVSKALVLRYGKDALFVIEDLTGIRKATECVRVKDRYYRVSWAFYQLRQMLEYKVRKAGSKVMAVDPSYTSQTCPKCAHIDKANRDKKRHHFSCKSCGYQSNDDRIGAMNLQQIGMKYIAEVTMSV

SEQ ID NO: 1161 - protein, 422 aa, unidentified
  REGION 1..422: note = Table 20
MFFSTYNSFHKLSNGSYVIVNSLSGAIDTIEPDVKKVLDQIKSKTQCDSNAELDNLLSYLFKRGYLFESREQEWEKLIKLRDEMNAQLQASSLGVVFSVCTTYMCNLRCPYCFQGHDIHKINHSLSQEEMDNMFFAIDRILETEKARGRFQNAQHTMLLYGGEPLLPTSKKTVHEVVRRGIEEYGFRSYAITNGTFLHEFLDFFEQYKSMWDFFQISIDGPKHIHDQRRVTAGGQGTFDKIVSNIDLALTRGFKIALRAKYKHLRKQLQMRQTASSRRRLKKIGQRENRWMTDVNHTVSKALVEGYGAKTLFVVEDLTGVRNATERVRVKNRYEYVSWAFYQLRQMIEYKALMHQSKVMAVDPRYTSQTCPKCGHTKKANRNKKMHVFCCKACHYTSNDDRIGAMNLQRKGIEYIVEVTTGA

SEQ ID NO: 1162 - protein, 375 aa, unidentified
  REGION 1..375: note = Table 20
MEIVRTLKLQLKLTDEQKLLVDNTLHSLKKALNYASSVAFNNGEITNKPKLQKLVYSTLRDKFGLKSQMAVNVCTVVCGSYQSQHSNNIFGSLAVYKNAKALYSYGRNYSFLNNGKTISINTIGKRIKLPFKVPDYFKKYLDRTWFFGSMEVVRNKNKYYAHITVNKEIMETPSEQINNIIGIDLGQNFIATIYDSHGYIKFYKGRFLKNIRAKYKHLRKQLQEKGTHNTHKKICSINQRESKFMRDINHQISKKIVDYAKGFKSMIAMEDLTGINLSCKVKRENRYYRVSWAFDELQRFVEYKAIQAGLKVIYIDPKHTSQTCPVCGHTHKSNRNKKLHLFQCKACGYTSNDDLIGAKNIWHKGYDKRINLATV

SEQ ID NO: 1163 - protein, 381 aa, unidentified
  REGION 1..381: note = Table 20
MNVELIRTIRLKLLVSPEQASELNASLKANRDALNFASQVAFDHGGISAYKRLQPLTYHRLREKFGLKSQMACNVCSTVAGTYASAKSNGRLLLANFTHSKLVYSYNRDYTIQPASQTLSLGTLSKRIKVPYLVGEYYQPYLHHEMWTFGSAELVPTRKGFSLHVTVKREIAEPLSRDCDAMIGVDRGMNFLAVATNQMDEVMFFKGRSIKDKKATFVRQRKELQRKGTRSAKRKLKQVAGRENRFMTDVNHQVANEIITFAKCSGSHPCIVLEDLTNINLNTVVRLNDRYWRFSWAFAQLETFIRYKAFAEGIPVLSVSAKYSSQRCPKCGHTAKANRDKKRHRFECKKCHYQLNDDLIGARNIRERGVEKRHQNEVAGA

SEQ ID NO: 1164 - protein, 403 aa, unidentified
  REGION 1..403: note = Table 20
MKLTKTIVLKLREGERGSESDLEDTINAFTKGLNYASEIVYRHNKPISSITLQKLSYRYLRDNIGLKSQMACNVCRQVSGAYRSLKEKIKVKRAKWQLLTFAPTNVTFSYGRDFTINSDMLSITTLRGRKKYRIVNYRYAEHFFDGSWKYLASKLVKHKDGHYYFHLSCEKEIEEPDITKVSNFMGVDVGMNHLVVATTTDKKNRFFRGGDIKNVRNIYKKQRERLQKKGTRSAKRVLKHLSGREKRLIRNINHVVSKEVVEFAKENGVEVIGMEDLTGIRERTKVRKKQRYRHNSWAFRQLQTFIEYKAKEAGIKVVYVTPKYTSLTCPRCKHISRNNRKGREFRCEVCGYELNADLVGARNIEERTRAFRHDLEAQGCVVNQPDENSLEESLKPANLLVGN

SEQ ID NO: 1165 - protein, 398 aa, unidentified
  REGION 1..398: note = Table 20
MDKKITRTISLKLPYAPESLAETIDSFAQACNYLSEIAFGKHLSNRLALHRLTYRDIRTRFPLTAQMTCSAIKQVAASYASMKSNGNWHLATFKPTIILLEGGTRGRDFRLITEGQTVSISTISGRIKTPYVLGAHQAKYLTDGWDIGASTLIRRRKGIFLNITVSKTIAIPDLKDVATIIGCDMGQRFIAVTSTGKFFGGGEIKNRKHHYRRVRKSLQSKGTRGAKCTLKRLSGKEQRFQADANHCISKAIVNEALKYPRPAIALEDLAGIRKSTKHRRAQRADFHSWAFYQLKQFLEYKGEAAGIVIQSVNPRNTSKTCSQCGHLEDGQRNGLQFKCKACGFQLHSDLNASRNIANLLRISRQDLEILGYKSTSPKVSLAPEGAGRDKLSALADSG

SEQ ID NO: 1166 - protein, 608 aa, unidentified
  REGION 1..608: note = Table 20
MDVRTEPLVASSSPFEGWESRDTTTSETTTNTSEWVGRKITRKTVRQMLRFRHYDFRMKLLQKAEMRGCKVHVVTEQYTSKTCGNCSVIKEDLYGSKWFHCNHCHFHIPRDGNGARNILIKNYHHLLHCQVRYGVEGFPVHAKSHHHNNIRIAASSSNAKVASDDDYKPIEVHLAFTSVPNQMVVTFHTVNYDEKKLGKPIVKYSSNDASLKRDFRVAHLGGVVTQYGEISQTGFDMSVLLSNLDYSTKYYYQCGFMMNDNVTSDIYYFHTRTDPRLSESFETTVVMYGDQGTTNSKHVIAQVGDFVKSFNDNGTNHKNLFVYHLGDISYADDFPGLIYQAIWTKYMIMMEKIMPYTSYMVLPGNHEKGPKLEPYHKFELGFMAYNHRFFMPLRNTSQYGHNMWYSFEHGPITFVSISTETNYPNAFYSEYDFKGDQLAWLENTLASIDRKKTPWVIVVGHRPIYSSKHGYSTADGQVSGQSLRIQSAFEDVIVKYHVDIMMVGHVHSYERTYPLYKTQVERKDNFHNLRYPIHIVNGAGGCIEGVTHEWDIHFGHNWSANIFYKDEGYGILRTSYSRETRVHSLHFDFHAAKTNDIVDSVTITKDAQ

SEQ ID NO: 1167 - protein, 458 aa, unidentified
  REGION 1..458: note = Table 20
KNVKNCNDIQVAENLNIVAIDPGIRTGWAWYSQSKGCGWFGNLDINRVFRLSLSLDDLISRTTHAPYKKRNLMKRAQTRLRYRIQNLIEECHKKVALWFLTNFDIIIIPPFNGSAIRLTSKEQKCLIDFDEISPERHDFALMLLCSRSLYRIQLKCFEHNVLNIQDICDIVQREVDRLPQLLSVIGASLEANGSYNINHHENLMMLDFCKKITNSNDPLDIIRGLLTAEQNSRSLKSSNDKKVKKMYRNLINLIDDLKKFMQNRNSTNSMNSTNSTDDSSTNLTTTSNNNNTRKRNNFRPVYFMGNYCVCTEGIPGSGEETFIHPPTALLWLPVLTNKERITQHTTSAFSLRKKTEFTKNNGPSFRPQLLRMNFVQTFGEKSRHNNNITNNSSSLQQSIQRQDSLSSSSSNSYVPVTSISAILNNNTSTCNTTTNVVNSSQPILVKPTPKRNFTSSSK

SEQ ID NO: 1168 - protein, 404 aa, unidentified
  REGION 1..404: note = Table 20
  REGION 186..187: note = misc_feature - Xaa can be any naturally occurring amino acid
MEIKRMVPILLPKDPDLLATVQTFQQVQQELSGSCYNKGGKPLGAIALQHKCYDSVKGKLSAQMTISAIRLVAATYKTAKSSQKPITKPFDFRRARALFLVGQRGRDADFRADGTLSIWTVGGRKRLNYQVPKALQYIFSKALEIDSLTVIEHDGKLVGRVRVTLEAPEPKGIHPVGIDLNETNIXXVAVDADDRELFISGLSTKVRNHRTHKTRSRLHKKLATRKAEKKDTRSCRRLLKRLSRRQGNRTRTFCSQVAKQLVDWVKPNSVLVFEDLKMPKVSKKLRVAKGAKRRLSQWEHHLIRLNVTNKAQERGMVIEYVNPRYTSQHCSKCGLRGKRKRHRFECPHCGHLDHADKNAAINIRNRYTVLRSQGGESQSVGSEAQEKSEGKPRHQSQVTDRKYP

SEQ ID NO: 1169 - protein, 365 aa, unidentified
  REGION 1..365: note = Table 20
MCLVRDCYNFAAKIVFEEKIALGMMPFHNRLYREERNRFPSLPAQMCIKIYKQVLANYKTVRENKVELEKPLEMKNPSIGLDKRLYSGMTRESFRISTGDRNKRTEVRFVLYPKFNEMASKYRMCDPVLQYDERNGDFYACIPFLAIETTPLAESHIGIDLGMKRIATLSDGTAITDKNYLARRRRIRHNKSQLRRHKNKSHSARRKLKEIRRRESNMCKDFCHRIANEILKHAGSVIVMEDLSKIKHNTSKTEDGHMRTRHNNALSQVPFFELRRILTYKAPLVGKRVETVPPQYTSQEDCRTQSKEGCVRKGCRFYTADGKVFDADWNAAINICNRHHPTPFGLPLDGRLNFVGRHCRGANRE

SEQ ID NO: 1170 - protein, 404 aa, unidentified
  REGION 1..404: note = Table 20
MCEITYNAKIEFETKDGEAFWYNVLSEARDMFNFASKEVFNKNPKLKQKDIADLIYYPIRRQSKYLNSQCVCKIEREILSTFRSIKSNGHKIESEPIKNKLSLRLDKRLYSKFNKDGIYLTSNVSMKRCKATIKLYPKIIEMFDSYRTSDPLIYVRNNEFYLSIPFKVPDKVKQNEYTLGIDLGCRRLITTSNGDVIKSNDFLRQKRKIRYLKRILNSKKKSSHSARTKLKSISNREKNFSKQYIEKSVNLILQNTKEDIIAIEDLTKIKKKTYKKYGSHNNRISQIPFYMFKQILTYKATLCGKEVKTVSPAYTSQIDCSTNKRDGKRQGCRYYSTNGYVFDADWNASINIKNRAENVKHLISYNKLPLDGTLNILNKQVVVNQPIVNLTTSNSQAHTLLGCE

SEQ ID NO: 1171 - protein, 408 aa, unidentified
  REGION 1..408: note = Table 20
MKNNDSCITYNVEMVFPNEDCRSHFAELLQQVRSAYNECTKIICEKGIPLDIKSVHNVVYSHLRSNFAGLTSNAVIAIYRTAMGNIRSIRSNGHKDAKIPEKKQLSHKLNRFLYSHLTANGIMLTTNTKRIRSHVTFKTYPKLVEMFKRYVSGDPTIFVRNGKFYMSIPFKVPETPLVNDNCIGVDLGERRFAVTSDGIMFNDKEYNARRRKLRYIKRCLQKKGTKSARKHKRKLSVKERNQSTDMCRRMSNAIIGSTDSSIIILEDLSNIKQKTAETKEGFKKKNHNRRIGQVPFFKFKQILSYKALLNGKRVETVSPFMTSQTDCTNGKKDGTRKNRRFYCKNGTVLDADWNAAINIAQKSKHPFSFKMPIDGALRTWKAGCVSATQSYVSLPSGSITSSRPLERV

SEQ ID NO: 1172 - protein, 381 aa, unidentified
  REGION 1..381: note = Table 20
MTYKTYNIELIMSDTTRSHWMSLLAQTRDAFNTCAQLVTSNDIRLQLVPVHQTCYDTLRKQFPIIPSQGIIRVQKNVLAMLRAIKANKRDSVPLKKSLSLQLDKRLYSNLTKEGISLSNGKRGHREKCTFRLYDKVRELFDNCTTADPTIFARDGRLFLATPFEIPSLPCNDDNSIGVDLGMKRLFVTSEGKSFIDKAYLKRRRKLRYLKRCLQSKGTRSAKRHLHKVRRKERNLSKDMVERATDALLGSTKASVLVLEDLTKIKDRTSRTSDGFKRTRHNNVMSQVPFYEFKERLTMKATLVGRRVESVSPAYTSQTDSRTGKRDGKRQGCRYYCSDGIVFDADWNAAVNIAKRGKHPFSSSELPLSGRVSSITQSSVVH

SEQ ID NO: 1173 - protein, 424 aa, unidentified
  REGION 1..424: note = Table 20
MRKTESKPTLTYNVRLVATKEVTDYWLRLLGEAARAYDACVKFVKENGVPLNTKAIHCACYDWLRSEYKMLSSQMVIKVYKDVCGALRSVRSNGKEWKAKASEKQNLSMRLDKRLYARFGKDGIDVTGATKNKRDHLAFSLYPKLAELFDNYTPCDPLIFVRSGQLWLSIPFDTPVVKQEGEEAVGIDLGMRRLFVTSDGTAFRDKDYLRKRRQVRHLKRQLQSKGTKSAKRRLKKKARKEHRMCKDMCYRAVKTLLDSTDAPVLVMEELKQIKQNTSRRKKKDGSDGAKRKQHNNAFHQVPIRMFRELLTYKAQLAGRRVETVEPAYTSQTDSRTGQRDGIRKGCRYHCADGLMLDADWNAAVNIARKSNRPVSNPLPVDGGIRFLSGRSHVNRAKRGENPNVGTIVPLHNSHLQAAQSLAAR

SEQ ID NO: 1174 - protein, 404 aa, unidentified
  REGION 1..404: note = Table 20
MLSYNVKLNFPSQETEQAMLDCLKTEADCYGYVSALLETTGFREHPMSRYDVHYKFYYDIRKQYPTLSSQMVCKVIQEVVANWKTCLQTKEKFNTPKKQNLSMTLDKRLYSKLTDKSVNITVPGFKKVQCTFDTYPLIQYMFDNYKPKNCNIFYRDSQFWLTVQFETLSLDLVNEEVLGIDRGIKRLITCSDGTAISDKEFNKRRRQIRYLKRCLTSKGTKNAKRHLKKLRGKEARMSRDYTYRVANYILSKPEGIIVLEDLTKIKKNTSRKKITTESGEKKEIKKKRNNNRFGQVALRQLQTVLEYKAPLVGKRVATVEPAYTSQLDCRGLPNGNRLGTRYYAADGLVLDADWNASINIANRYRPGTFVLPICGKLNLLGRPPSTGQSRELPGNRCFLKPTVL

SEQ ID NO: 1175 - protein, 400 aa, unidentified
  REGION 1..400: note = Table 20
MKYIDVKTYNVELNFKNDSDRRSLLETLELHNQAFQIVVDWLFDNDLKTSQAKLVHDGTYRDIRAKVIGLPSQLCIKARMEAMSTIKTLKALAKTKKKPITRPIKTKLSMRLDDRVFSMREDGVRLTTKDGRIDCSLKWYPKVKEMFKSYAMCDPLVFERNGRFFLAMTFDDPKPTWVPNSCLGVDLGLRRLATTSEGIIFQDKELLKIKRRIRFNRTNLRRKMAIVKSKSAARKIKRVSKKEQNFTKQHIHKLCNGILKSTNSNTIVLEDLSGIKSKSKGKKFNSRLAQVPFFQTKTILTYKAQTLGKRVETVNPAYTSKDDYRGVERGKRQGCRYYASDGVVLDADHNAAVNIAKRWTIQNELPVSFKVPLDGTQTLWAGCCQSAECRDAPSTLSKTA

SEQ ID NO: 1176 - protein, 396 aa, unidentified
  REGION 1..396: note = Table 20
MNLLTYNIRLEFQKQEDKTSLVDLLLEHQKVWNYMSEYVFKSKKVDKKLIHDANYHQCRKLFPNCPSQVIIRAKDSVYATYKTLKSNHQEIEDPAKQSNLSIRLDKRIYTFLDNNRIKLTTTGKRIICNYVPYDKFRELFSKYSVCDPLLFVRNNEIWLSVSFEVNAPTLVENSCIGVDLGIKRLATTSEGLTIIDKKFLKEKRRLRHLKRKLKSKSKVTFSRSAKRKLKTVRRKECNKNKNKSHLISNQILRTKSNVIVMEDLSGIKKHHRGKAFNNKQSQVPYFDLRRILTYKAPLQGKVVVTVNPAYTSKDDYRGVKRGKRRGCRYYAADGNVFDADWNAAINIAKRYATRKAVKGIELPVSFGLPLDGKLNLMGRPYQLANCEIRSCKPSDL

SEQ ID NO: 1177 - protein, 400 aa, unidentified
  REGION 1..400: note = Table 20
MIPNISIIKTAVLRIENTNNYYTVLEETSKEYNKILNLFSELNKDRLSNSVKLHHLLYYTIRNQSPLPSCFINTAKRKVASVYKSIVKRQINLKRLIKKFPDNYQLLKQYNKICLVVPKFTSSSIELGNQTYKINKNNKIIQLSTINGRLTFQYKICSHYESILNSAIKFGGLHICKHKNNKWYAHIAILLQNKQVSIKDPISPLGIDLGIRHLAVLSNKEIINENTIKQKRLKYQKLISSLQSNDSRNAKRKLRKISGKMRRYTKQINHVISKHIVQIAIDNHYSSIVMEQLTHIKNTIRYKKSQNDIYHKWSFAEIQKFIKYKCEYADKLFFLVDPKYTSQNCHVCGTKGKRNRDKFICTTCGKTFHADINAAINIADLGIQCEMSYRTFYGLPVQLA

SEQ ID NO: 1178 - protein, 456 aa, unidentified
  REGION 1..456: note = Table 20
MNRNRTTGIRITLEPQNCTKEDIKNWMVAQRKLTNYASKNLLKLMRKDASIAEVVFKNNSHYLAYEVHHHILLPFTKFREERIKLGLRTSTNERLAAAIAGRFYHGYGQRNGSKKDVWAYALPKLPAITRQNKAVHVKDSVLRKFVDGNTITVNPEVINGQQYLSNVRFELQGLFGKIYKLKGKILSKHIHLLEFLDLKENVDCNIFLTKHGNITIMIRIDEEYELMYQPIQTLGVDFNKRKNVFVTMNDGTFIPLTSEIAEKIQCVKESDESIHEVKSSKLRQAFRMRWKQCRKELRHSLRNIADEIVAKAISKESLLAIDGVTQSQGSFGHAELKEMLVKLCKQKKVPFVIVPSAHTSSDCSYCFERSGKYNQVARSKDFEKVSCEVCGQNYNADVNAARNIAQDGWFIFTNTNEDFPKDKFGRAVRSNRPSTSVANRKKKMKFIDFSDEDITF

SEQ ID NO: 1179 - protein, 417 aa, unidentified
  REGION 1..417: note = Table 20
MIKFKRNAKFWGLDLSELEEDFKKELETQRRISKHVRNMIRNGEITWITSDKDLILADGTKQTKAKFKDSISYLFDEDACSESMKRNCVITVLHSYRGYWQRNKDRILDIKCPIGFKYKSFRFNEAAIKVDKENKVLLVKTMYMPTGKFRKVPYKYSLKEDLITKKEFGGNISFTQKCFVAGINVEVNEYVSNDILAFDINKDSKSWIYFNDGTVITKPETLIKLEKEIKEINHSLDKDKKVPIKKRELRSKQRRKLRLQIQKKHQKANGIVFKICKDILSTVIKNKQLLCIDGVSIATAGTFGQDKIIPNLRTMCENQGVPFYVTPTTNTSRRCALCGHIHKNNRKTADEFHCIECGHQDNAQLNAAHNIAHTGKRFLDVGVPFGSWDHRNADKLVEEYTVGDKAENSEEMAIDFE

SEQ ID NO: 1180 - protein, 316 aa, unidentified
  REGION 1..316: note = Table 20
FYKNKINGKLKVKNLDGTKSIVRYRKSSKCKGIQNNALKYIEYADTEKKFGGTIVFGKEGQPDRIVASVDVPVEFDYYPKGFIGLDFNKSNKNWIYFSEDIFGQEKISKESYPVISALEKFIESRNKIVKVHKDISEREVRTKQRTPIRLEIKKLHKKHMDLIETSRFPGKERAIIDSILDYAISKSYGLAIDTVATGDKNGTFGQDKLKQLFIDKCIERKVPYILAPSYYTSRRCIHCGWLDLSEANSSRDKKTNIFTCEHCDKTENADRTGAKNHVVYAKHLADIDFWTFNKSKQWAKIKESENIFHSSQINDR

SEQ ID NO: 1181 - protein, 462 aa, unidentified
  REGION 1..462: note = Table 20
MNDTTKKIKSNEKSAIRLNITLSQQHQAYFKHSRDFQRKMSEKVYSMLKAKEIIEIQAHSLIIPEQVSLTNGATSGEEKKKVSGVLTFTGRHSLGDRQLKYLPEIKEIIEEFFTEDYLKSHVDALLWEVCRRYKSYIGRNNKLPKSSIKIRDKSMAYKSDIFRLNVETKEVLIKKMTKDKNEPDVLVPYDAEDFYLEKIGLLGFGKSKKLEHLTEAKGGIISFKKNELVLVADKVVTYDKVKTWVGIDINKSPDNWLYFSKKIDGKYNFPKPKDILEIEEYIRSTQKKISKDRSIKSKQRSGLRKKWNKAHARHQKMISDFIFEKLEKLKTSSKSSVGIGIDTVGTGQKNGTFGQDKVIVAAQKFCRANGMAHYFVPTPFTSQRCNKCGNVSKQALRKLIKDKYICVKCSHKCHADLNAARNIAAFAKVLQDSDFEMTGTLNLDYKVKSWEILNDKFKLKKK

SEQ ID NO: 1182 - protein, 436 aa, unidentified
  REGION 1..436: note = Table 20
MGTIVRTIHVAHRNGRLLGGLLHYVNAASNHTAKGYRRRVRGKELYRMAIHRTGIYQSRFADYIIRDVYGSHRAWRTNQRMDPHARAPHYHDAAAQTDCFELAFDCTARRWDGAPAIHVAVYGRGRPDQPWMAFRVPPYMVERLTKPGIRPKTVLLTGDEIHVRYERDVPDREPVSWAGVDMNAKNNTYAYANGMVSVVWNDYAKQYNAACGKILRVKRRGDARIMAKYTQKAWGKYKNQTRDHMGREARALASAGCGVGYEDLGIHRLYTKNGTMSPFARGRQKTILNTGQRRRAVVDALESEGLPHRGVDPAGTSANCLGCGKRLRRAVVQRRGVRNLWCQPCRSIRERDGNAGANILFRTVTAIVMEWVGRDDPGRGVTLPVALGMLRDAGADGRLTGRQRSTLSDILRLLEGRSAGAEWRLPGAHKPGRRNP

SEQ ID NO: 1183 - protein, 677 aa, unidentified
  REGION 1..677: note = Table 20
MVRTAGINANAPVDSSQPVAIAFGNDDFNTHTGSPTLHAALTRFFIKKARALGLTLCQVDEYKTSSVCPRCNSSVIKDKRSIACDNCQETMQRDSAGAHSAPKHLHRIISSFTFPSTGTGTETMQTSLLAISIALKVLLFPTYHSTDFEVHRNWLAITNSLPISQWYYEKTSEWTLDYPPFFAWFEKFLSLFAAYVDPKIVQVDNLNYDTLTTIYFQRTTVIVSELVLFWALQRMLTVMGNRPLQKIINWSLMLNPGLLMVDNMHFQYNGFLYGIMIHSLVDAKQGKLLRSGILFAALLNFKHIYLYIAPSYFAFLLRAYCFENSGNSIRARSWISAFRPLNFIKLGVSVIVVFAASLGPFIAMNQLPQLASRLFPFKRGLCHSYWAANFWALYSFADRVMIVLVSKTPIGQYFNLSLDTAALEATTRGLVGDTAFGVLPTITAQHTLILTVLLQIPSLISVFRKPTFDRFIGSVALSAFASFLAGWHVHEKAILLCTVTMSVAIANLIGASPNSGSGAGAFSEQKSSAGLLTPRDVRSFMIVSLAGYIGLWPLFFTREETPIKVLITLIWFVVVGTGLDQCIPKQPKGSSVEAGPSSVKSMLRYYTTLERLYVFGCVPVQLYVNLIHEAIFGQEKLAFLPLMITSVYAAVGVVYGWLLYSAAYFSSSKALDKKKTR

SEQ ID NO: 1184 - protein, 432 aa, unidentified
  REGION 1..432: note = Table 20
MKTKGRRKGKKRKWKEKTVKVNILPSRRKRAYMQRAQKKATEMANKIIVFKEKAKSGKEFHHLVYKRFKYVKLHSQVQEAVQRRVYAARKVKKFDNLPLEFNFPRSGGIKETERGNPVLAISPMKERIAIPIKLDGGWRRVEAYRREGWKEHSCKVFKRERKWVEHIILRKELNLFPPQQVEGTIGVDVGRKIAAAITLNHPSFTLIERYLGKDLAWKQHKFNERRRKLQSYADKGSEKARRALKRLKNKEKNYNKTRCEQIAHEIVDLAVVTRSAIVIEEISKIRKKWTKKNFRGRERIRRSLNRWSYRFFLSFLTSLAEEKHIPVLPVPPHYTSQRCSRCGHVSPSSRVTRDLFRCVSCGFEVHSDRNASRNLSLLFFGSLPLPLSSSFFSYFPVPRERKKFFFPVSVVEGLSTLSSGSMTGSPNLNSPS

SEQ ID NO: 1185 - protein, 359 aa, unidentified
  REGION 1..359: note = Table 20
MEREVFKAVELNLLPLTGAKQDELSALFSEYLATANEILSTLKFERPRSSTKLHHLTYTYIRKKSKLPAQLVCAARQDVWAKRKHKIAKFKRLSVAYNVPRSGSLRTTKRGNPILSVATLNGRLGLPIAQDGAWRRLKQLLDDGWAFTEFKLLNPQMVRVTLKREFEVAEPEPDQAIIGVDVGVGTLAAVTVFKAGKIERQLYFGRDVWQVKRDLGIRRSKLQAHASKGSRRARRVLRELRGYERNFDKTRCYQEAHKIVALAKQYDATIAIEDLRGLNNAKLNRKSNRKVKRMPYSMFKQALQSVAWQEGVEISLVSARYTSQTCPRCSAKGVRKGSSFKCECGFVANADRSASVNIA

SEQ ID NO: 1186 - protein, 421 aa, unidentified
  REGION 1..421: note = Table 20
MVEEVRTVKLNLLNLTERKSKLLSELLNVCKSAGDHLFKTAVYLEVFNKPESRFALQEVEYDHIKERFALHSQIIVDLCKDVFTACRNGGLNFFKYTIPYNVPRSSKLAETENGNPVISVATLDGRIGLPISQDGAWERFNEFLEDGYEFTSFRLKKEQDDWHILVPLRRESEVKGEFDSVLGVDVGSRTLASVTVLSKERVEEQLYFGRDVWEKQRDISIRRSELQSHADRGSSKARRKLRDLKNYESNFVKTRCYQVAHKIVKLAKQYNSVVAIEDLTGLKNARGHRKSDRRTKRMPYCTFRVALESVCKREGVPLIAVDPYHTSQSCPNCGSLGKRKQKGVIFECECGYRANADRVASLNIALRASETIHNSKRIFAQSPKGNVPVNGHDWRDWGSEIMSSHGYSPPERKPTTSIVGS

SEQ ID NO: 1187 - protein, 425 aa, unidentified
  REGION 1..425: note = Table 20
MVRVVKTIKLNILPLTNKKHSQLHELEKQYLKTAEHLSETIYWWDGFADIPLTRFNLHSFEYKHVKEFSNMQSQIIEDVIKDCFASWQNGGVVQSASIPYNIPRSADFRVTKRKNPVISIATFKGYERMGLPIAQDGAWKRLIKFLRKGWKTTAFRLKRVGDKWQILVSIYKDIALENSYDAVIGVDIGSRTLATISILGKNGKIIKQLYLGRDIWDKQRDTSVRRSKLQKIRDTANADGRYKAIKKLKKLRGYESRFVKTRVYEIAHSIVDLAKEYNAVIAIENLNGLKDSRLHRKANRRVKRLPYNLFRVALEQVAWVNKIEVAVVNATYTSQRCSKCGMIHKTSSVVFKCPHCGFTVNRDRNASVNIAHVAGVFFKTLTIAQYNMGDATVNWHVWKDDGVLNACWQHIQTSDFKPPTPIGGS

SEQ ID NO: 1188 - protein, 399 aa, unidentified
  REGION 1..399: note = Table 20
MPAIKCLRLNLLKPSREKQRLLNELGSEYARVFTELRAIYSFAHLTSAIELHEWTYRAVRRDSFLPCQLVQEATRLVKATIKHNNPTPNPRFNTRVMSFKTTKRGNPVLSLSFKPCKRVLLPVAQDGAWERFNSFVTNGWACSSVVYQRGVIWATIKKDVKPAKPITHNFIGVDVGCRCLAAVTVYDSFNHKIRKQLYFGKDIANRQERFSARRANLRSLADTGSRRAAKSLKKMRRKQRNFVRNRSYEVAWQVVRLAKEYGATIALEDLNGLKQRTVVRGAKRLNKIVQRLPYQKFRFALESICLVEGVAIAAVNPRNTSRACCACGVIDKRNRINGGKLFRCVSCGFVANADRVGSVNIAGRAAEKQVLLQSQSSAGRVSINALLRSDESCGLVSHT

SEQ ID NO: 1189 - protein, 384 aa, unidentified
  REGION 1..384: note = Table 20
MFVSEPSRTNKGQGAPPSRDLQNFLRHIKEALHHLDGVRSRAELHESTYEKFKDKYRVASQLVIEATSYARSSRKTINEKPKKCIVRFDRRLFSLKKTKRNNPVLSLRLNRSRVALPISQDGAHKRLQQHLEDGWRITSIIMKRNLSFLAVISKAMSKLTIKSNVMGIDINSSKIAVSVISPNKVLKQTYYGQDVSTRQFHFEERRAKLQEYRDTVSRGKAGLKLKRLSGRQRNYVKTNLWEIANRVVKLAKELNANIAIERLRHLRKRKGEWGRKSQRKVNRIPYGFFRHALKYVANREGVVIEEVKPNYTSQTCPKCGHVGKENWKGYSYFKCVKCSYEANRDGVASLNIVERASQVANSYTAQIPLGNAPVNGHVLKDEGC

SEQ ID NO: 1190 - protein, 410 aa, unidentified
  REGION 1..410: note = Table 20
MRLVRKTLILNRKELTFRKKDLLNTIIKEYLRVLNFTCLQLPVCYSSSELHQKTYKSIRETSFLPSDVIQEARKDIWKLKKVVNKKTLKDKSRINLNNCSIRLNKRWFKFILTNKGYPCFKLTYRPKKTFVIPIKIDNQFKRFTDYTKDEWKFDNISLLKNGNIAVVLEKEFEEPKITQTNILGVDVGSATLAAVTILNSKTGKVKKQLYFGRDVAIKQKKFDKRRSKLKSLADKGSNQAKKSLKRLKHKQRNFVKTRSGQVAKEIVNLAKEYNCSVAVEKLKNLRGIKTKKGQKGNSNKKGRKKINRIPYHQFNQFLETNCSISEIPYNLYDPYHTSKFCSNCGAINSGHLSTNYSLYKCRKCGRICNSDRNASKNVAIKSLLERNLQVATLRPSFLRDEVFVNNLLRP

SEQ ID NO: 1191 - protein, 404 aa, unidentified
  REGION 1..404: note = Table 20
MKRAILLQTLNLTKSKETALDSFLNSCLQLANSLFEQKKDCRTFMQFHRKVYLASKANTSLGSQTICDIERFVFRAKNGSKAITPKFNVPRNCGTFNAAKTFFVKFTIAPRKQIPIPILKNRNFQRFQSLFINGWQCKTFGLTFSKQIVAYLSEEEVALPQRKNILGIDCNSKSFAVSVITPEGKILKQSYFGKDIWHKRRKIFERKSKLQSLADKGSGRAIKSIKYLKRSERNFVKNRLGEVVREITNMALGYDADIAIEDLKRFNPKGKRFNKEVMRIPFYKFRILLAGRCFDKGITLNIVDSWHTSKWCSHCGALANGHSSSNYSLFKCKCGQIVNSDRKASLAIAIKSLLERSNQVFNQPDFFQISNRQVPVNELMRRNDEIVSNGAVHLEHSPSESQRL

SEQ ID NO: 1192 - protein, 632 aa, unidentified
  REGION 1..632: note = Table 20
MANKIKHIVGIDLGTNYVMTCIDEQGHSLFISGIQLRQAQVEEFRRFHRQHKLSAEQRKYDQQKRELIIRTALKTLFNHYPKETLFVVENLAGQQRIAAAAHRRPQFALRFPYLHIALELQLMKRAPSHGSQVWFINPRETSHRCPRCHYINKANRESAEHLFICKNCGFEANDDLTAAINIFQEGKSAFMAASKQTTSLQKNYANKYNDQLRLEVSEDREQLSLSITDAAKQTTVTGTLGRSNVGKLMEMLREPATDAISYFYQQHYAFFITKLGRQILLGVGPFTGAPTVDKLDKAAVYVVNTIQQRGLGKILEQANEQMNAGKKQIRQNFGVQKTAKKTTLAKLQEILDAKEAARKAAKNVTTLNGEQMRNAAKKQQTNPELKKADQQVQKLQKQPEKQNSATAKRMRQIESQTEKKAAQNRAIQKAQQKDKAAKERDHKQVTEATEAARHNQEVADLFKPESLKPEPKQPASAAAKPTETKIPTDVSSQFNDWLQQQSFAPAPSSAAPAPQSSADQQFNQILGKLVQQSATSAASGKQSAWMTQQDHSLDQLLNEAIRQYAGANQQQAQTVQPARPANDLANVLPAQVYRDYLLGGAMQNLVQYGTNQDKALLDQAIQQLQELRQNIQ

SEQ ID NO: 1193 - protein, 393 aa, unidentified
  REGION 1..393: note = Table 20
MTTTTNTYTRQDNPSSSYFHLPILLHPDQTAMDLLQHTQDTYRDACLDIVKFFEERNIDIAVFEKQYWEYRNKGEIHSEEDKSINQVKRISHQISYRLNQRFKLRIKYGQYPLATVMSAYRQAKNQHKEFNLEHSRHLSVRLIPGRSYDIHFQADNDADSFTCVLRIGKKVTVKFSLPAGIPLPPSSWKSKMAFLEYKHGTWMMRIAFRKPEITSLEQVSRVVGVDRGIINIATTYTPGNAKRYSRKEYLLDCGSSSSQDKGEQALTANIKIAREIVGQEPAGTVFVLEDLTFKDEERPNNWPYRHLEDMLTYFAALSGQWIYTCSPHDTSITCPVCGHVERANRLQNEHRFVCQNCGYGADTIVDDDENAARNIYERGKANLRKEFGNTLST

SEQ ID NO: 1194 - protein, 367 aa, unidentified
  REGION 1..367: note = Table 20
MKTNEHAQYTHLTVELVPTAEDAAMLQKTWDAHKRACNRFSQKFYNESLKGKNKYKTWKTAYASASWLAKGKKGGLHAVYGHSIVDIIKKAYKRNEQKGKLELILFGDYGEKNTKSSAIHFCWESAFQVDFTTKKCRLDLADGRRTIAFSIPSKLPEPPTSWKIIRAYLKLVYGSWYLTLTFPNPTAEMKAEQDTNVVGVDRGELNIATTFSPAKGAHSYKSIDYPRPCKGSTNDNYHKSLFARDVHVASEVVENEPPYTIFILEDLYFEKPIEGWSYRHFEDVLIYLAALRHQGVFYCAPYNTSITCPVCGHVEKANRLHDENRFICQNCGYGADEIVDDDENAARNIYNRGKEALEKELSNKVGA

SEQ ID NO: 1195 - protein, 480 aa, unidentified
  REGION 1..480: note = Table 20
MCLPDYLNLLAFLQLPDFFIILGKAAAVLQKAFLGIHLIEEDVFSEGSALKHQNYGIKQKLRAMLEKKKKIMECKSGKASLYESILPSEDAVDMYQRSKTTHLSNPLGNMTFYGVDPGVRTVATCVRMNTKNASSYLSISLSHPDLLNFFKTEEGKARLHHLLKPCETTVTAKSISAKSRTSYHRFKLQKRKNSNSDIASIENKLAQMRAWLVDTKKRSTDILQKSLSSRSTVLSTTEYRSSKLYCICDEPIVHPKKNNGKVNPDCIGHQNLYAIKSRDTNAAVNILKIGLYKMITKDNHPSFSRRMENEDASKKLFHGSTQFGKLTSDFLSVVLLHSIIVLYAFSSNLHITNINNNLTTCTISEYDNVATGVLFWLTKQNQSTQSCVVSNCPLEQKQDKVVNDDPGSSSIAFQPFLFPYPVNNAIQSSYLIHNTRGFCPLSFGVEAISKHIQVLLRLVQDKRTFTQNLCSRPHCCLVRQ

SEQ ID NO: 1196 - protein, 245 aa, unidentified
  REGION 1..245: note = Table 20
MRVINGYGYIDIDEIIDKVSHLKREDIRNINIPNSTLYGYKRDPNKLFNAKFNHIIAIAQYIQQNTIYIGMDIGGKNYIATSTIDRSKTYIDKSKEIEHILKKYDNRINHKKYDDIVAYSKLKTSLTNHISKNIKDIVKRNQTKTVYVLGEVPNYRNSIISLIFDLTYNVLQRKIKQEDEIILINERHTSILCPECGYKDKKNRTKSNGFQCKNCEFQHDNNDIVAASNIANRAYKKGYFKYGEI

SEQ ID NO: 1197 - protein, 224 aa, unidentified
  REGION 1..224: note = Table 20
MSYEDIKAINISNTTLYAFKKDYKKLFKTKLENIIEIYDYIQKYKTNIIGIDLGSNHYLAASNSTRTLTYIDNKNTVYNLFQKYKNRVNHKSYDNVLAYDKLRIGLLNHINQEINEVLTQFKGYKNIFVLGTHNYSRLSFSSLIFDLTYQSIKMRMGIHDEIELVDESFTSIECPNCMYRAKNNRTKSNHFRCKSCNYYHENDDVVAASNIAKRGWSKINERKF

SEQ ID NO: 1198 - protein, 221 aa, unidentified
  REGION 1..221: note = Table 20
MFKIHYEKVKYVIENSSDEQLRDIGIDQKTISRMRDHSNYSKDLNLSTAYKLYHKYFSEWATVIGIDIGTGNYLSASDASMERTYTDTSDELARIIKKYRARLKQKKFDNNEAEKKFARGIKKHINKVVKEIMEIYPPPRVLVVGKGSGAGVSESMFGRIFVYTHKSLLKYSDKFDDIVLVDEAYTSVKCPECSFVHKKIESITIILNVDLVATKMRMITL

SEQ ID NO: 1199 - protein, 265 aa, unidentified
  REGION 1..265: note = Table 20
MIIDTKEIEEYITKLPLDEVSDMEVPEDILKNLKHDYQNIFQYNLSTAIKLQNAVNRYKKEVEIEREEERQELIKQRKVKYIGVDVGQTRIITASDYEMDNYIILKEKNLTARIKKYNKDMDNLMKAKNHKGKKLLLESFKKYVKNIVENELLYKLEIEYKQPTVFIIGKNYLIEDKYSSQNVLTDSIYTVFKEASLKEPSKSNGIVDVDFVNERYTSVKCPECKNGSPENKSKDGFKCSNCSFYHKRPDVVACRNMLDKYFKKK

SEQ ID NO: 1200 - protein, 253 aa, unidentified
  REGION 1..253: note = Table 20
MNTNTISVNKLIDFVHNKIHNVDTEKLELSKSTIYKLKKDPLHLWKMKFENINKLNKFVESLDSGNYISKYERWESEAKAKYVEVVGIDLGTRNTLTASDIDAKRVFLLPNKKIYNAIMNIRQIKDKSKLINYYKNDFHLTVEVNVKRLVSGLLSYYKPPVTFVVGEMTEGNLANKIFYELFLSSLQSSTEETNFRVETISEEYTSITCPICEHVNRKNRTSKNSFNCQSCGFSHYIDDVVACMNIVKKYQEK

SEQ ID NO: 1201 - protein, 230 aa, unidentified
  REGION 1..230: note = Table 20
MTKEDAKALKISYSKISKIKKKQAYIWRMNFKDITKINDYRVYKKKQRKNVEYVGIDIGTTHTLTASDIDMKRTLIIENKRIYNATKIYNQSATKESVQNTKEMLVRTIESNVDKIINQLLNHYTEPVTFIVGEVYQSVENIRPHYTLYQMFLREMKKRAKHHDINIVSIDESYTSLVCPKCHYKDSKNRTNSNSFKCKQCDFVHDNDDVVASANIVARYISKKRKDEAV

SEQ ID NO: 1202 - protein, 252 aa, unidentified
  REGION 1..252: note = Table 20
MYGNLNVDDVIRFLSKEITKEDIKNINIDEDILNQYSTNPIEIIDANFRTVKIIYDYIQEVYREDIDYLGIDLGTKVFMTCSDPYLEHTYAVNNEQIFNALAKYRNKTKDVNVTKDELNQKFKKQIEAPISEVIKQLSRKYKSDITYVIGMPNHVNLSEEFDILSNMVISLFKKYRRKYGYEVYYIFEQNTSITCPNCNSIDKKYRKPNNSFCCSNCGFKHSNDDEVAASNIVNRYLKKYKEPRHGYDIKQR

SEQ ID NO: 1203 - protein, 540 aa, unidentified
  REGION 1..540: note = Table 20
MAFKKFQNSNEVRRLINRQNLIQKRAVAMINRGTDKGNLYQKLNQRVGIKRQMSQATINVMMDIFRNEHITAIPDNSFVVFARTTLNVHDGEPQELLLQLNKLDSYTLFLAPKQSSEKIFSTPKRGWLMTLRDNGWILMLPGQNPNQGIQLVLPETGENETAPVAKSVASNAARTKASPKSTASSHVAKSSNSAASAVAQHTSQASTSSQPRANAKSSANNHARGSNAPARVSQATTRPSHAATKASQAPTRTSQVAKTSQPTPRTSQAPEKTSQATSAVTSAVSNQTSAPMFSAASHVASSAVAAPLPGPREADELIKNLVESGRRYRVVGLDYGKINMITATDGDNNSLQVPGSIISKHILDYQHEIRHMQRQTQTLDDDVELTRLSYMLKRYVLKSCRKIVSQLIEHYGDDVIYVTELHPSLDVNKTPNIILSPDYFYKALFTILFELVGQNAAIIQVPNNETSIICPNCGFTSAGNRQKELHTFKCLNCGFESNDDQAAATNIRQRGLRYISNLTKNMNFAVATPEITSVVTQEEV

SEQ ID NO: 1204 - protein, 295 aa, unidentified
  REGION 1..295: note = Table 20
MKLVTNTFKGSYKARHIPKIDVNDFPIRLTYGEKHLFYFVFDGGLKARISLPNGRSFKKEEILIHNGELNDKLSELTKHKISDSLLFPDYRLLITLTKEVEIDYVPENAIGVDIGIINLITAYCNGKVLQISGEQILEAHKKGVEHRRLKQKLGSRKFTYNESKFVRDYVYHAANQVIEFAKQFEKPVIVLEDLKWLKRKLKRLPHIYTIAPYELIHSAIVEKALWEEIAVQTRKAYYSSQKCPVCKYVSSKNRKGRRFKCLKCGFEEDVDVVAGMNLSFFAIPPPIKMGGTLAR

SEQ ID NO: 1205 - protein, 417 aa, unidentified
  REGION 1..417: note = Table 20
MPTKTLEARLVNPTTNKHQKLHETQTAYRRALDEAFQQGCETQSATNDVVVQYDLSGYAKNALKKYVPQLTGDSYDADELTDQHPVKFTDDGFDIDHKPQSAYEWYLKVPHHEDYNLWFPAGVNPEQRPLVEALYAEDAEPGEFRLIERDDGWYLHITVHFEVTDTVYSESDDITPVGVDIGEAALATVCHRDDCGSPTAPRLWNDEAKKVRALRERYFTAMRRLQRRDADVLTDKYGDEIWRQIDDILHTVSREVVKYVAGVDGGIVVLENLTYIRENMDYGAYMNRRLHGWAFAKLHSQITYKAEERGIDVVTVNPRNTSKECHACKEVGSRRHQATFSCTNDDCWVSEYQADINGALNITDRYPAGESQPQSDRDPGQKVVADDSGGDGASLTGPQDSQADAEPQQETLGTYAS

SEQ ID NO: 1206 - protein, 417 aa, unidentified
  REGION 1..417: note = Table 20
MIRATWRPKRLHGRCRRRLPPTSHKETSLQHTLNTYRHALQDAFQVECDTKTAVNDVVTPYDYDLSSYAKDALKNYVPKLVDEADELDDAHPVRYTERGLTLNHDHDSAREHSFCWRVPKAQSADGSPFWIPLRINPAQQSLWKGLLDGEIEPNQFQLQRDGETWSLHVGVDIDVSEPAYESDDEDATAVGFDIGEAHLSAGCACTNGSPTDPLLITGGRARQLRKEMFTTLTRLQERDAAQWRIDERFDHCQNALTDIVEKASWQAIDYAQQFAKPVIVLEQLDSIREGLDYGKWMNRRLHNWAFRRLQDAIDRKAIEAGIPIEYVHPHHTSQTCHACNHIGYRDSDEFRCTNDACWVTEYHADINAAVNVANRLDPWGESLPVKAAGDDMTCHGMGALVTVPRLQPSRANQSNSK

SEQ ID NO: 1207 - protein, 439 aa, unidentified
  REGION 1..439: note = Table 20
MSEECKTLEAYLAPLTQHKQRKLHDEHDRYESLLRRSFNGECDTMTAVNGVVTGEDLNWHSKNAIKQYVPNLLDEDTYDASQLADTHPIRYANTAAVFDHDDDRHYEICWEVPLPGRGTNFWIPLQLNPEQEDWWHSLIDDEDDSVWAGELRVQRDGDRWVLHVTANYEVEPDHSCSCDSDGVTPVGFDVGESKLLVGCALRDDTPVDPLFVDGGRVRHLRQKQASAEDRLKPRYASKLLDDLVWGRWQDAIEDEVEKASHRAVEYASQFENPVIVLEYLDGITGEDIGKYWNRRLGKWLFSRLQSRIEDKAAEHGIAVEYVHPHHTSKTCHACQHVGYRSHQGTFKCTNEACWVSEYQADLNAAANIANRLNPWGESLPWKTVGDDSPQSGGQWQAHQDTSPSEGLPSERRASDDKGSSSSPAVGAGAEPETGDANTS

SEQ ID NO: 1208 - protein, 254 aa, unidentified
  REGION 1..254: note = Table 20
MSNDTSRGLESPDARDASLHSASIDGTRTDREETPIGVDIGEYNIYTACPIDLPDWRGAHAVCGDDLCQRLDDFRREAAAVLASTYDRPTIAAYVQQRRDALVAALDAAARTVCEYATAYDDPVLVTEDSHYSPDLWAWLTAPNAHRGSTWLLSAAHLRLRTVAAEYRLPVAAVPEAYSTQECHACGVLGTRELNTTVRCTNSNCHVDTVAADYNAAKVLARRYYPGRCCDYRPNESSHPGDRPALAADGGRPD

SEQ ID NO: 1209 - protein, 219 aa, unidentified
  REGION 1..219: note = Table 20
MSSERRSAPSLGVGPYERTYVGIDVGEKTLAAVAPAGTPGEAVEVGAEGRIRGYWNHLRKTTQLLSETPGVPANAEAAVLASEWRRMREHLEEVIDDVLDVVEQHPHPILVREEFNSSPTAAWCHRHSRELGGWLIPTLIEAIDQEAAARGVDVVGVEPDWSSQVCHRCLERGRLERETFRCQNESCGVDYLDRDVNAALVLADRGRYGHRRRFREVNR

SEQ ID NO: 1210 - protein, 220 aa, unidentified
  REGION 1..220: note = Table 20
MSTDSSTPVSVRPVGTATGADRRVGVDLGVRQLFAASPITADPTVRNAYIADGGIVRALYDELGATTRRLQALPGDTTAAEVHAFVAYRDRLAVRVADATEQLLAYLEATDAGTVVLEEITYPLRPLSECRRGETDLGSWLLPVLQHAFADAAVAEDYDVEYINPKYTTQQCHVCDQLGDVDSAGLECTTESCPVDVVDRDRSAAVSIAKRRPDARGKDD

SEQ ID NO: 1211 - protein, 200 aa, unidentified
  REGION 1..200: note = Table 20
MTTRPGSVTSVGVDLGVKRLLVAAPNSAGPDVKGGLVAGGEVERGLYNALSDTLDRLDDRPEDTHEAEQLAIEQCRAMLNQQFALAAASLVEYAEQQDADIVVLEDLTFTSGTLTECARGATEAAEWVLPAFREKAESVLRARGFQVERVTAEKTTQECHVCGQLAQVGKATIRCETEHCPVSRVCRDHSAAVSIAKRVF

SEQ ID NO: 1212 - protein, 217 aa, unidentified
  REGION 1..217: note = Table 20
MSSTHSHSQLLEGCSEGSVTRIGVDLGEKNLLAAAPADAGPDIEEALVINSGVESALYDELVAITRRLQTMEADTRLQEAAVFEHHLQLFNRRFAEATAELWEFLDQFESVVLVLEDLPAEYRPLITCRHGEVDAGTWLLPAFQRRLATASVQAGYPIAYVDPDYTTKECHICGVHGERSSAELLCVNDGCPVNSICRDRSAAATIAQRFEISSDQL

SEQ ID NO: 1213 - protein, 260 aa, unidentified
  REGION 1..260: note = Table 20
MGGTMTSTPLPTTIPPYGTVESTPIGVDVGVKNLIAAASVDATPESAFVLTGDHLRRRHDVLVEAMRALQGTKFDTTDGQAQLFAALWHQIRPQVYDAAVRVVHYARQFTAPILVLEDLPHATVTLWESRADTNLGSWLLPTLQHAIIVKSRATGIPVVYVDPSNTTRQCHVCGTLASVKQDVIKCTTDDCSVETVCRDWSAAVSIAQRAVSAETEVIEAWADEGSIAPPSVASSERDSQTAPSTQGTPDTADATTETDS

SEQ ID NO: 1214 - protein, 215 aa, unidentified
  REGION 1..215: note = Table 20
MSSTRRREATVAAETASVPVTPIGIDVGEKTLVAAATASMEPADAFAVEGHDPARLFDYLATAVGALQSAGFETDAGEAQLTAAFWYRLRAQVLDAAARTVQWVRSHSAPVLVLEDLGRRQRPLWAVRDDAEQVGAWLLPHLQSALAGRAREAGVPVAYVDPDGTSRECHRCGEHGEREKQRFWCTNPDCDVRGVDADRSAAITIASRAEVDIRD

SEQ ID NO: 1215 - protein, 236 aa, unidentified
  REGION 1..236: note = Table 20
NGGFYVPARKHRALNRTLALPGATLNESAEIFRKNGKWYVRVGVTVPVPEEQPVTEWIGCDIGARAAVTRSDGYHGLDLRPVLQRSRNRRATLQKQGREESRELSPQRQVLAREARQTVLVAQQSGRGVALEDPKRLIRWKQHAARFFGQRVLLLAAILGVAVQVISPPYTSTTCSRCGHVEPGQRHRATFRCWQCGFTHNADINASRVIAKRARRVSCASHHGSLSLCPGGGKAE

SEQ ID NO: 1216 - protein, 437 aa, unidentified
  REGION 1..437: note = Table 20
MYKGLKLSERSWICPECGTHHDRDFNAACNIKEFGLKALPTERGKVKPVDCPTVDDRPRVLKSRGRKKQEKELQAQIALIQFQYNEQVMDAKKRYLAGMYSNERDYSNDLEQLEKNMVARSIDAYVAAGQIGADKAQEMQAKLLDIMIKAKADLKNQAKEIVDELNKEFEDAEKARKDADIMNGGTGEEDETAKLERYKAFLQSKMDAYKDYAAVQEQLQKDLSDAEVKEQEEANKKKAALTEEQLKMMSDMIQTMGDGLSEFFESEDKSLHSFLKSMLTSILDAIEIAVNAYYAQILAKEIASKSWGGVASAAALMVLIKAAFAGAKALVKGFSTGGYVQGSGTGTSDSIPARLSNGESVMTAKATSMFSPILSAFNQLGGGVPIVVNNGGSNIGMDMLAAAVARGYQMAPQPVVSVEEINRTQRRVQTIENIGRI

SEQ ID NO: 1217 - protein, 767 aa, unidentified
  REGION 1..767: note = Table 20
MRNPRFKSQLLRREKIDEITNCLAVADKDTVVCMGDYGNDNRDGRLKVGSPSGPIKVITRCFGHKCTVMVTDEFRTSMLCHQCHHLLEQQEDDLYDLEGSALARHPTATRSTASSALAKGTVPPPMAVTSMPATTSGNGAWNAKLDPRRFPFKASAVGASSLNMGRLVALAALFMLGVSIAPALCYSLRGVAPEVLVRYETAGETFTCFDGQKSVSIAKVNDDYCDCADGSDEPSTSACSRGHFHCENRGFQPKTLASCFVDDGACDCCDGSDEPSGRCANTCSVLGEEALGSLLTQIKDMKAGLAVRVEYEQRAARLLASWREEIAELERKIPREKSKKNSLESALMDGRIMLTRAGDVLSRHRSLRQSAPHRLSSAEARSEVEQGVKARRKAEEEQRAAQARQEEEKGAAEVTTTDGSSPVEATLEPEKSLAGEAESEEELARRVTAQWIPGQDRESSSEQDPHEEVSEQGLDAAAGEASEEPLMSADELLEASRLHESDASFSEEHEDEEEEQGASDWGVSEYLFHDLTEDCWSLCRATHAWQRLLLRAARLCGALTRRAWRRALAALHLPKHKIGRGSKRNTGFVSLAEAEEELRAARERASASSSRLREMEAELKALKAKAEADYGGEPAWAALAGRCFSATVDKYTYEVCPFDRATQKEGTGSHVSLGRHASLDLSIDPGALVFHKGQHCWSGPDRSMRVRLVCGPAEKLRDVQEPSRCEYASALETPLACTDAALQRLEAELRLQRGRMGLGSGDARDEL

SEQ ID NO: 1218 - protein, 465 aa, unidentified
  REGION 1..465: note = Table 20
MVELLCPALSFASYMADDCEAKVRAYARRRRRDPNARRPRCTNPVLRQGAGSCVIYGRGFWCRLSEAPDRPILESPYVVLRFPVTPSRHVAEFRLSPHIIQKLACAVRVGAVTVTRTTLSIAYEPRPVASTRPRGIIGMDVNKREHTTADTDGSVRYIGNAALGYAQERRKKHRALGVTGGKPKQKRRKARATPRHVKHPGRKPKNKQRLPRKKRRDERVNRRERARINTRFRNKKTNYLYNLMHALAACGMMLALEQPTIDRLLVRRNRKMSGAERDLLKMGLSQGTITRTAREVFAKYGLPVCDVDPFGTSSRCPACDSRLWAPEYNTGAWKLWRRTKACIPCLYYADRDGVAAINILCRCCESAYEPAAGPGEPHCDDPGRRVAGDWEQRAQQKQQLVQTLLLGAAAVRFPHVGEGQRPKGSAKNPSYHTVGDARLLDDRPDASNGSNGVGPPGACLLGGIC

SEQ ID NO: 1219 - protein, 658 aa, unidentified
  REGION 1..658: note = Table 20
MIPRFYKLVNEWGAKRLSKKSMWDREMRKWWNQVDVWIQQNAKNRPTKGRCHSKVQFRSLKSKPANVNIIAAAVANTPRPHIQRTERSSTWPEDSHSQRGSSPSWSPKHARAKRGRETNEDLLNTQLAVRDRAPQIIPSIRVPHFKSPVPVLNQMLVVNILRSEKLDPATAESCSGIQNVLRHLAKTLLTCFTTSVIQKWDGLDKRLHRASRRSAGTYIKRWFCENRPSKYQIKLDPLFWYCEWVYWSSLFHRILKLRRPFKLRYSTAERAPCLRFDKKDLQVLFPNQHVLKTIGEHLGIAPTSLIYTKQGQVRVLIKRSKRKNQRRRTGLELLKKHKSKILRVLEKYRHKKAKHFTCDISSKLNVLCLDPGQKNLFEGVVLKINAGRAIIEPVKVTNGLWRLLSGTSDFVHSWNQALEKPGVVALPVALRQRKLHRYYLRKKKSRDRALDTVLYRQLKCNPKTPICVLVGNWTPSAMTIAGNPSSEISAILKRTSPHADVVLVNEHNTSKLCSCGHSEPLKSICKWAIPKWFLKQSGLLRFRRWRKNRRKRNRSINIEIPAQLRELSLKELVQKATEHVPWSQKRAAVSLLFQKITEIFKRPGQFSSWTPVKEPKDCGLKISKCLSRDVKWCGAEKRLVSRDYDAAISIGVKALKNI

SEQ ID NO: 1220 - protein, 579 aa, unidentified
  REGION 1..579: note = Table 20
MMDPACTPHMKTDRLAKAVSRFHRGNLGPASDGISGVFRHVQYVAETAALVSRQTGITDTFEMTSLMYEYVVSSRVSAAVTQAAIKTGVAAMKARPDAEPEFKTPTIKLNNQCWRLNPVAGGYVATGNIGSRERPIRVVVGVPKDVGARVSEHRPGELTITPEKYAISYTKEVEVMPDRDPERGSKHDIIEIISGVDRVAGSPQNVLGIDINATNVTITDNTTTVQIDTSGDVERVLGAKTRQVGALKRDDAKWEEKRGRSITRDREHAKEDTRRVMCGGPKKYNKLKRDSKAAERRRDEKKVDIARQEKESLTAPRKEWRDKIRESKDDPERQNKVKVERDTVTKAAKAETRRLKREADDKCKQKQARLRGEMERCVVPQNAKTGASPLQKTAANHSKMREVVRASRRLENTMHVVSLFVVSWAIATNGIIALENLRNMPRGWMRSNKRFGRGMRRKLYSACMLKMSDMIGYKARWNGAGALYMNPYHTSKLCSICRDMLEGGDYHLRYCRRCNVCVNRDVNASDNVRRTTAAALYGAMVLASPGEAMRSAVKKLCYADLRTDGMTIMADGKVVWVGR

SEQ ID NO: 1221 - protein, 522 aa, unidentified
  REGION 1..522: note = Table 20
MVDVLLDSVKYVIKPYYMMALVKNSRAITRTYTKNLGMQYVFEHVRKVAEVAYIIADNTGKNTYGVNALMYRTMRGPDPKVHSSITQTAIRDGVAAHKTYNTKTAQGMKVSEPVFRNPVVKLKNQNWRLNPIAGGYMTIANVGSSKHPHMIAIPISSDVVRRIGQNELGELWITPTTYTITYYNKVPEVDKPHPYGKSEIIELLTDVGYVGGTPKDVIGVDINEKNITVGDKDTMVRFDLSDTIQAIEDAKTDDANNTYTRTHDNAAYAARTGRRVVHKKEEERREKQQVVCGGHKLYNKLKRRYRKLKREGKHKRAAEIKKQMNKCILNIQHNHTKSKKNAKKRKVTKAVRHHEHGLNVMALCIAQWAAQSGCLVVLEDLTRISYNWQKGGKFGHNMRRRLHSAMMRKASNLIYEKSRFLGVEALHMRPHNTSKLCAVCRTPLTGTYHKKDYTHCRTVGVDRDVNAVENIRRTSAVSRYGRKVSASLGEVRRGVDVILDPTPLIQGCWSNWADRLSRIAGV

SEQ ID NO: 1222 - protein, 431 aa, unidentified
  REGION 1..431: note = Table 20
MTTLSLKFRFSPVPEVDRLLEKCGAMVRAAVAWALENGKTATHTIVQALYPSFRARFPDLHSTWAQKSARTAAAVVHAFRRRRRRGREGKDKPEVRRTWVYVDKSVFRWAWDGTELTVRIAVRPHDGDPIVLRFRPHGKYRRLVEAWARGECVAGEPTLSRTTLIIPLKFPTLPVYEPGEVYGIDSNERSLDGYGLDGTAWTVDTSWAAEKNAEHDRRVRRGTRGKQNPRAKKKIAEKHGRRRHNRTREFWHIVACAFVWMALSASGALVLERLRGLKERVAASLPKRLRRRLLNHWSIRTFHAILRHKARVYGVPLLEVNLRGTSSTCPVCGAGLRGREELVCPRCGLEGNRHILAAWNIALRGRARLPLGGTGRSEEGRDLFGRLQSPRWGQGVMGAPGRPLPVRVGLDGRRPGRRPAARTQGEAQATA

SEQ ID NO: 1223 - protein, 393 aa, unidentified
  REGION 1..393: note = Table 20
MPTVCLRFRFEEHPKIRALMEACADIQRQAVDYALENGKTATFTLIQALYPSLRAQHPDLHSNLIYGAIRSGARIVHGFRNQQRKGKTRADRPEIRRPSIYLVRQTVKIEWDGETLTVTIPVSPRDPEPIVLTFRPHHQYRRLLDEWKAGRARMGEPTLTAHSLSIPLKFPDPIPYKPEGVIGIDSNEGNLTAFVTSTGEIREIDTRYVGKVNRDHLRREIKGTRGKHNPKAKKKIASKHRRIRREKTENFWHHLALALIAWALGMRAALVLEDLKGMKERIGKGKSRRMRQRLLNFWSIMTFHRILVHKARFYGVPVIWVDPQNTSRSCPVCGKVGERLRGHALACPCGARMGRHEAAAVNIARRGVEFLEGLGLRGRGRWATPVAGPLASG

SEQ ID NO: 1224 - protein, 414 aa, unidentified
  REGION 1..414: note = Table 20
MDNTPVIVKDEMLVKGVVFYLESDLPSEAKFLLEDFRLAVNNAVRAGLQARVTSRNALNKLAYKDFRREHTRMYSQHLVSAFEVAGSVLKSHRRRVRKGVACRIPYVKSLMMKAENQAYKLDRKSGVIDLPIRAGCHVELKLVVSQYHRKYLDDMALSLGSLTVLPDRVIVAFRKAAPKPFVPESALSLDTNERSLDGVFVEGGVAKAIKAEFPDVAIIQQRHHDRRRRLQKKKAHDRRTSRALCRREGAREHRRIDYRLHQVADSVVKFAEERKSAIVLEDLKGFKSKGGKELNRRLSLWPRRKLHQIIEYKAQWKGIPVVKVDPRNSSRTCPICGRMQHSRMGVEFECECGWHLNRHINASVNLLQTAISKGMAGGLWFNPGAFQHDVMMILYEPAMAARSEPNGTSGIVGV

SEQ ID NO: 1225 - protein, 425 aa, unidentified
  REGION 1..425: note = Table 20
MSASYLAESVLTHRALVFPVPWDDPHLRWLLAEFRLLVNESIRIALKEDIRSRARLTRAAYKDLGARHAVYKQYIPSAFEVALAVLKAHRRRVRKGKRSSIPFLRRLMLKAENQSYWLDRETGRIRIPIRGTEGVQLHLPLAEWHRSILGDPSWGLGSLTVVSGKIIVVLRKEAPKPYEPRGTIALDTNEDSLDGVQSSGDSAGLLRVPFEGVRRIQEIHYRRRRKIARKKAAHDRRVARRLLNREGRRERHRVRHRLHRVSKGLVRLATEAQAAIVLEDLTLHGAGGRSRRMNRRLSSWPRREIHRQIEYKAALEGVPIIKVNPAWTSKTCPVCGARRRDRVGKVFVCLMCDWEMDRQINAGMNILKTALASNEALARAVRFQPGALRDDVVSPLYDLLREGGGAREEPSGVESQIGVIPSPDS

SEQ ID NO: 1226 - protein, 440 aa, unidentified
  REGION 1..440: note = Table 20
MPSVLRALVLPLVGELPPPVLALLRDYRLLVNEILREALTSGKTARGSLSRFARDRAFVHQLTGGHAVAAAAIGLGLAKAHRRRLRKHLDSRVPFVRLPFLRTGTDTFHLDRDSGKVRLSLRYGEWSHFFLHLAPFHRDRLAAPDTRVKQLHVTPDRVVLYLERPAPTPYIPTRLLALDTNESTLDGVALSRKSTHAVRVPFPEVRTIQATHVARRRKLARKKATDRRVGRRLLDREGRRERNRVRSRLHVLTRHLIHEAVRNRAALALEDFSKLARRRRGPFSRRFGTIRPGPPGSPRRVLRRRLSSWPRGELHRQLTYKAAEHGVPIYWVNPFRTSTICPKCGVYAGPRSRVGPKFVCANPSCGWSLDRQLNAGANLGRIVLRDHGRAELGGLRLDLDALSEEAMRPRYPFEQIERARAERREREGSNRPPGATRGVG

SEQ ID NO: 1227 - protein, 372 aa, unidentified
  REGION 1..372: note = Table 20
MKFKRTIKFKLPNDNRLISLLKYLREIKNYIAFVCIEGNFKSLKKLHKAVYYKIREKYPFIPARFIIDIEREVLAIIKAVRKSKSSFYSFKSYSAWLTKGQSFNFDWDSISIIYEAYGSGKKAKWILFRIRKDKRYSKYKDWNFKEARLKFDGNLWFYLIVEKEVELKNTKKLIGVDINFDNVTLSNKVKIPYDLKRGLAIQESIERIMKKYNKQWRCNKGILRAIRRRWRNLRNYLNDLSWKVALKVVSFGANIVLENLKGLKNVDLGRKFNKRLNLFVYRKIQRKIEIKAEEFGLRVIYVNAKGTSSYCPKCGNKTIKKSYKLLYCKNCNMEWDRDYLASLNILKRGMKMWVVRQPELLQLDATPRRMKR

SEQ ID NO: 1228 - protein, 407 aa, unidentified
  REGION 1..407: note = Table 20
MKGEELVETLKMRALPKGSDDHDALVEFLRLYRDAVQLAVNRLWSLSEIPSITTLHKMFYSELKRYGFRAHHVKQIYIYAKTVVRASKQNGGRKPVLRRLTARIDRYDYKLDLENKTLVLKIHGGREVKLRLLTSIDRIEKFRGWGNYELAVKVVEDKVYVSIYFRKTVKSRRTKTITTIDVNFDNVTLAVFASSGKLLKLKRYKTPLRKILTHRIWIERIQRRYSKSWKFIRGVRRAIKRHGERIRSIAWDYAHKLGDRVAEIADEHSLTIVLENLNKLRSNVNRGSSFNKKLSLWFYRKIQFTILYEALERGLMVSYVNPMKTSSTCLRCRSRLKDNGGRALQCTKCGFIGDRDVVACINLFYRYTRCGVPGVTLNAPKPDENPSGMRGNRDEAMKSTNINLYQS

SEQ ID NO: 1229 - protein, 414 aa, unidentified
  REGION 1..414: note = Table 20
MNLFMRVLATARVEAAAPEGGEALLIQFIKMYRDAVQCVVNRIWSLDDVPSEEKLHKMFYSELRRLGFRAHHVSEIYKRAREVVEGAKKNKGSKPVLKKLTARIHPLDYKIDFNAKTLRIAVLNDEWVELKLKWYNYLDKYLDGSWRPGEILVSYRNGKILVYITFHKDVKPIDSRAVMGVDINFSNITYTVIDLNSNLITIGVIPFKGLERALHLKKLAEDLQKRFSRSWWFLKWVRGVRGRWLNKARNILIDSAHRASKRLAEIAKEYNALIVFEDFEKLKENSNNNHKLSWEKSLWCYKRIQMFVEYKAAFHGIKTVYVNPAKTSRKSPNGKKLRFINYRYVELGGVVTSRDVIASWNIALRGLKKLKRMRGSRVKLSPDSPANEGMRTRPNAGNPEAKTKYSQLITAIRR

SEQ ID NO: 1230 - protein, 277 aa, unidentified
  REGION 1..277: note = Table 20
LDKYFNGEWKLKEILVSYKNGEVWVCFTFEKEVVLKKPRTVMGVDINFSSIAYTVVGIDGKLITMATIPFNGLKRALTHKVIAEKIQRKHSRKWRYVKRVRNAIRRHGGRARNILVDSCHYISRRLVKVAEEYNALLVLENLNKLRNKANGSRRFNKKLSLWTYWRIQSYTHYKALIEGLPVAYVDPKNTSKTPPMGGELESINYRWAKLPNGVITTRDIIASWNLALRGLKFLTRDVGHRGSMDAPKAPNQMQTQEGMKGKPVPKTILSSPSTRSI

SEQ ID NO: 1231 - protein, 405 aa, unidentified
  REGION 1..405: note = Table 20
MAVPRGREIVRTLKCRTVIERGRAEDLLEFLVLWRDRVQWIVDLIWNLPKVPSESQLHQLFYNILRQQGFRAHHVKQIYKYARAVVAGAKANKGSKPILRKLTARLDKYDYKLDLERGIVVLKLHKDRVVILRLLHRKEYLERYKRGWQNYELIVKCENGTFWVCIYFKRRVEFYIPLSTLVIDVNLWSISMLLVDEVGDRTSIRFVKSPFEKYLRFKWRAHLLQMQYSKTWRFSKSIFARVRYWFRRARNVLTDHCWKLAKQIALYARKNYALVIIEKLEYVTRKKSGWKLAGFCYRKFLHALKCKCEDLDVPYIEVDPKNTSKTCPICGSELVFVNYRLARCIKCGFTGHRDIIAVLNLYKKVIGKIAPLPYILLYLRPTAGVGQDEPSRRRCKPKPDVGGKE

SEQ ID NO: 1232 - protein, 421 aa, unidentified
  REGION 1..421: note = Table 20
MGFNFVVLKLGWCSMRGFIRRSSRRIPEGTYHKALRAGAEVVEGNPNDLLWDLMLYRHAMQRVVDALWDLDEIPSRSQVHQLFYQVLRNYGFRAHVARNIYDYALALVKATKKNNGGNPILRKLSARLDYQDAKVELDKGVVRVILRSQWYTLRLRHRRDYVERFRGLRWKEVHIKYENGKLFVSIIFEFKYEPFMPRGIIALDVNLKMIVAYDGYEVRRRKTRFTDALSKKKRAEELQKKYPRRWRYSKRILNRVKELHRKARNIVTDWSWKFAKQLVMKALKHRYAIALEDLNGLKERASNVNDIVAWEFTMFAYRKLQHAIIAKAIEYGVPVIIMNPKNTSRTCPICGHKLTYIHRLATCEKCGFIADRDTVGAMNIWLRVLQAYAGTRGLSLSAPPMKDENRRRGRKTNEGMKIQQT

SEQ ID NO: 1233 - protein, 542 aa, unidentified
  REGION 1..542: note = Table 20
MKWARWAFIIASEVFLGGSRMRVQATLTLPMKVAPEGATILLRALRAFRAGAQYALDTILVKRLYRRVKDSYKVASLARLHKLLYGELKTRFGLPSRLAIDAIRYARSVAMTWLNNPNRGKRPRLKKLCMTLTKKQGYTLWLDNRKASILTPEGRVRCGVIYVERWHGKYADWEMGEAKLTYRRCRFRLHIVVKKDVDELQPKAILGVDRNIKNVVITVVSLDGRVLHQEMIPLRGIEKAIEHKKRQERLQKRYPRAWRFLEGVKGSIRKHGARQHNRPRQEMFLVAKRLEHIALQYHAWLAQEDLTGLSANTGVEKVRLWAYRQLGTILSYKLAFKGVRTILVKPEGTSSCCPCCGSRVKRITYHRLVCPRCGREYDRDLMASWNIALRALKAIGCGASQAALSAPDADENPSAMRGKLKNGGQAMAPVFQQPVSARDSPPGLPRRFDAKTAFSWGVSAPYPGALLSTLEPQRVSSRREFPPGEDGAAGRFSPATLPGSSGRGCRRDHRSGPASPSSTSPPICGRNALPHSGRFRHPRPRH

SEQ ID NO: 1234 - protein, 342 aa, unidentified
  REGION 1..342: note = Table 20
MRGLVVRREWRCLVCKGTQSPDYGLPARLTLDAIRQGIWIAKGWLKNPKRGRKPVIRRLWMILTPGQSYTFKWTEASILTIKGRVKVPLVYVERWHGKYKDWKVKEARLICRNGRLYLHVTVEKDIKPYRPRSVLGADINYENVTLSDGTRFENHAFRRAYGLKLHIEHLQRRHPRGWRFIPQVRLRMRMLGRRARNIVVDACRKLANEVVRRALATQSAVAVEDLRYLNAHIDPKPRSWRLRLALFAYRKLLHWIEWKARLHGVPVVKVDPRGTSSECPFCGERLRGNGYRLVGCPRCGFSGDRDLVAALNIGMRGAQAALIAPNPDEAPREDEGENFSIA

SEQ ID NO: 1235 - protein, 422 aa, unidentified
  REGION 1..422: note = Table 20
MINNFNEIVIECNYLIINEIYKLTENFINYVCKQTHMGDEVSLTGVVEMTVRAEPLVQLIRNYTNALRFVVHEILRDPSKYGRWRYVKRSKRIKWEHDLRRIHHSFYEVLKYRFSLPPKFAIACQKEAVAIVKSVLNNENNGGKCVIKNYRARVDYQAYKIEVRNGKCYLKLRNFDEIEVTGFSRKWFTKFKDWRLGDLIMKLENGLVKLFVTFKKTVKVAEPSENAVAVDLNFEEVVLGNHEFEVRFKTPLRKIIHLKKNHIEKTQKKYNRKWRYVKGIRNAISRWWSRINGITNDFVKQVSRRIVVFVKERGYDTIVLEDLNGLKDEQAKLRKSWRERFTFFAYRKLQNWIEWQAKKEGLAVVYVNPANTSKTCPKCKSLNTEFRERILICKDCGFTMNRDSVAVINLVDRWLSIMGCAV

SEQ ID NO: 1236 - protein, 371 aa, unidentified
  REGION 1..371: note = Table 20
MSPDEGALTRTIVLKVSPEGDINFSKWKTAVNLVLKWLLKNKDKWNKSKKGEYTISLNAVHQTWYKELREKFNFTSYQAIACIRQALAIAKSYMNNLNKGREPRLRKNVIWLKIDDIKDVNKEYVETSSYGKLVVEGYPATLDEVAGWKRGEARLVKRGEEYYLHIPFEKKIELSRPSNNAIAVDINIKEVVYGDRSLERRDKTAVEKLMKKKGYVSTLQKKYPWRSLKRVLFRIRAINKNIHNALVDWARKEALQIVNYAKKLGKDTIILEDLDGLNKKQLELNKSWRERFQYMAYKTLQHWISWEALKQGIAAVKVPAYYTSTHCPYDGEGMVEIGHRLYKCPKCGFQADRDSIARLNLLGGALAPPTA

SEQ ID NO: 1237 - protein, 163 aa, unidentified
  REGION 1..163: note = Table 20
IVAVYQNIHDDLVDWARKEAIRVINYAKRLGKDTIILEDLNGLNERQPDLKKSWRERFQYMAYRTLQFWISWEGFKHGIAVVTVPPHYTSTHCPYDGEEMVEVGHRLFKCKKCGFQADRDSIAVLNLLRRGISGDPNSHHNEGSVRPQSGGTDEPHLKRTIAL

SEQ ID NO: 1238 - protein, 382 aa, unidentified
  REGION 1..382: note = Table 20
MGELTATLKFRVSPEPSLLSLVDRYVDALRYSVNWIIDHRELRLSRVHRALYNVLRERYGLPSRIAVDCYREAIAVAKSWFRNPRRGRRLVIRRKRMWLTPNLSYRLDLANMTVYVTGAGNVKIVGYPSNMGEYLNWSIREARLVVRENGVFLHVVVKNHVEDPTPSMRAIAVDVNEHEVVYGYHNVIARDRTRVEDCIRIKKHTERLQRKYSFGKYRAWMARKGILRRIKRLGVKIRSITNDFARREAKKIVDFAIAHGKDTILVEDLRNLNHNSRKLRKPWRERLVYTTYRKFLWWIEWEARKHGLALVKVDPRGTSTTCPYCHAKMVSTGYRRLRCPRCRFEADRDTIAVLNLISKHVSRMGGSLTTPTAPQMKDVAPN

SEQ ID NO: 1239 - protein, 300 aa, unidentified
  REGION 1..300: note = Table 20
GWDRRYDSYPNREARLVYRNDEFFLMITKQIPKPSKYTPKGVLAVDVNEKEIVFGNGVVRERRETAVDRALRYRRLAERLQEKYSFSKYNAWLRRKGILRRIGHFHRKARNIIEDWAKKVSLEIAELAKRHQYAIAREDLTGLIEKLRELPGDHKVALLILSYRKLSFWIDWQCEKLGVPVVPIEPEHTSSICPNCSSRLKENGYRQLKCPRCGLEEDRDRIAVLNIEKRALEQLESISGGSLTAPTAPQMTDVAPNRCGEPSRPSGRGGGQPYLFHDSGLLVGFASTKMLQPFWNRHGN

SEQ ID NO: 1240 - protein, 379 aa, unidentified
  REGION 1..379: note = Table 20
MACKTDKLIATVKAKVEPTPELIELLKRYRDGLNMAIRWAVEAARAKGRPPTLSKIYRAVYEQLRTMGLPSYIASACYREALAIVRSYLASGARGRMPVVNTLHMWLHKNAYRVRDGYLYVTGGYKARVVGIEEKYKEGEWKEAKLVYRGGDMYLYIAVEVPKPMLVKPKGVIAVDINERYVYYGNSQWVKKVETPVEKAMRLRELAEKLQRRYSAPRYTPWNRRGGIRERIRRLHKKARDIVEDWAKKTAKRIVEEARERQYAVAVEDLTGLKEAIRELTKEHRVGLMLLAYRRLLWWMKWQAAKRGVVVVEVEPRGTSTTCPKCGGKMEEVGHRRVKCVKCGFEAGRDIVAIYNIEKRAREKLGNPSFSPLAVLTPS

SEQ ID NO: 1241 - protein, 336 aa, unidentified
  REGION 1..336: note = Table 20
MHRGVYEALKERYGLPSKMAQDCYRHAIAVYKGWLRNPHKGEFPTVRRRAVWLAHKYSYWLKGGVVHIAAIGDIPVIGRPGHEMQYADWEPGDAVLTVREDGVFLHVPKAKAVPPIGAKDAVGVDVNYREVAAATSMEDSIRLETRIEDAVRVRRHAEALQRRHGRSWRRRHKVLARIRKLYKRSRNILLDAARKIGKKVAEYALERKAKIRMEDLNGLKRRAQGAPKEWRLRLAFLAYREIQHWIAHQARKRGVPVEYVPPGGTSSRCPVDGHKLAEASYRTLRCPKCGLAADRDLIAALNIRMGGLLTAPTALPLTDEAPTEGGNLPARGTPAL

SEQ ID NO: 1242 - protein, 268 aa, unidentified
  REGION 1..268: note = Table 20
KKGRFPRVYKPTVWLTPKASYNVDLDNMIVRVAGVGELQILGYPRNLKDYMSWKMKEARLVVKDGKAFLKVVFERPLEKVEAKSGVAVDINMSEVVVGKDDKDYVRIPTRIEEVHHWKSLAENLQVKYSRRWRENRRIVNRIHSLHQKARRIMEDFARKVGKWVVEEAERMGAKVIKLEGLKNLIKNVNKLPKEFRDKLYLMQYRRVQYWIEWQAKKHGVLVEFVNPKYSSVSCPRCGKRMKEVSHRYFSCPSCGYENDRESVRNVII

SEQ ID NO: 1243 - protein, 446 aa, unidentified
  REGION 1..446: note = Table 20
MSSKAIKTVAFYSPPLTKRKVKALNVLIDDYLSLVNFFVERGLEANISSKIKLHELFYEESKKIVPEEAIHSKYRYTALEVASAILKNHAKRGGKRPEVKRRFIKLYHENHNEKSSVFSIVKRGNKYFLVVKVRKRKEIAIPLIVSDYQRQFLEAYFKGRLKIGEAVLKLEGSIAIVYIPFVREVEERVTENIMAIDVNERNVTLSVFSPDGKLLFSKYIDISRLSEIDSTYVNAARKLASRLYKGLNPKYLPRWVREKIKKRLKRWKRRKEDTVHKLSKYIVDITLSYNAEIVMEDLKHIKERILSDDNKSSLNRRLSLANFRRIQNFVEYKARWHGIRTSYVDPAHTSSVCPFCGSKLSSPDDGENKDLMGRRALYCPKCRKYYHRDFIATLNLFRKYKEKKREMCGVCVPHEGPMKAIRMGAVLPDGVWHRGKIVMTMSPGYG

SEQ ID NO: 1244 - protein, 278 aa, unidentified
  REGION 1..278: note = Table 20
MLFKFEGDKIKIITAPRKFITINLVVSDYQKKFIEEWKNGNFKIGEVIIKKDSIIIPFKKVVNPKNFEHIMTIDINEKNITYSIFDKDGNVIKTTRLDVYKLKRIHENFSKKREKIQKKLSNKPMKLKTLMEKYSGREKRKVEDYLHKISKFLISEALKYNVKILMEDLTNIREAVNKKSKNFRRRLNRWNFSKLQFFIEYKAKWDGLDVEYVNPSRTSKLCPICGCKLDPNGQRLLKCNNCNLVFDRDVVATFNLFKKSQDVGSFRSPERSLMKSSY

SEQ ID NO: 1245 - protein, 402 aa, unidentified
  REGION 1..402: note = Table 20
MVEVTLTVPFKYEKSGEIRRLLVDFRDMVNFCIEKAVQSGVTSYARLRKLVYGEWKRRWDYSTHFCHSACRIASSMLKSWRRKTRRGEADPKKPPKAKKLFIRFDQQLVKFDGERLRISVKPRRFLYVKLRYGEYQRRFIEEWRRGNLRIGEITMNENKVIIPFKKEVDLTNPSDWIAIDINESNVTGVSSNPHILRIEHNLRTIHTTYYEIRRRIQKLSRYKPITSRRLLKKYSGREKRKTHDLCHKISKMIVDFAKKEGLGIIMEDLRGIRKRIKYNRNLNRRLHSWNFRKLQFMIEYKAKLNGIPVVYVNPRNTSRLCPICGGRLAPNGRRLLKCRKCGYINDRDIIACINMLRMRGVPVPPESLSMKFEGKNPMKMERGRLAVAKAIKVTANQNGGGS

SEQ ID NO: 1246 - protein, 428 aa, unidentified
  REGION 1..428: note = Table 20
MSVEVVRTVVFRYEPTPQILKLLSDFRDMINFCIRKALETGSWNIRRLHHVCYPELKAKYSYNVYYYARAYRIASQILTSWRKKVKRGQADPNKPPQAKKLFVRLHKAQFKLEGDRLRVAIRRGQYATILLQGGDYQARFLERYTRGELRVGEITINERYVYIPFIEEIDITAPSNYVGIDINEGNITMTDNEGNTVVINTKALRTAHATYQNIRRRIQALKNPRTKARLLAKYRGRERRKVRDMLHKLSKAIVKLAGDRGIVLEDLKGIKGQNKGRKLNRRLHNSWNPRQLQFYITYKALLAGLPVYYVNPAHTSKECPRCGGRITNSSERACRECGLDRDIAGAINILYRFWCPEAYADEGHRAYLRMRGATGSPECPASAGLGSARREVENGGRANGPHFRHPVGMKLTRASTRGSSSRPARYLM

SEQ ID NO: 1247 - protein, 454 aa, unidentified
  REGION 1..454: note = Table 20
MVKTIFIFAEQTTTDGKRFLLGYELGESSPSTGDVVVLDSSSESLLNTCILINMMEVTISAVVKHRAEGRKDIDELLNAFRDMVNYAIKKGLEKGYSLKKLHAECYQAFKSRYDFHTHIYPQAYRVAQSIIKSWKSRKGKEPVMRKRIVRVPKTIFEIDTERSVLILTIRPKERIEISLELSDYHKGLLSKGEVKEILLGERFVYIPIRVRVDLSEPSGFVAVDVNEDNITYVTSDGKAAKIYLGIKRLREIYHQKKTKIQREVKGKKRDELLRKYGERETNRIKDILHKAMRFIADTLKGYGFILENLKGLRKSANRKVKKYNRKSGRVQEVSVRTKKMKGRLNSMPFYRIQSYIEYKALLNGSPVDYVSPHNTSKICARCGGLVNSLRACPVCGLDRDINACLNLLDVGRCGAPERLSVEVMKVGWRGVETLNAYEVNLLELREQSESSVVG

SEQ ID NO: 1248 - protein, 228 aa, unidentified
  REGION 1..228: note = Table 20
MVEEMAPKGYASVDINLMSLDVLKARGGSAEYRRIDLRKLYGVRVHYFEKRRKIQSLSKYNPITSRRLMQKYSKRERRRVNDILHKITTRIVNDLAQEGLAPILENLKGLSYNATRNKRTKRKNRKVASLPYRKVQNFIEYKMAWLGYKTHYISARNTSKTCPRCGRLSKADGQAFRCVHCGYTADRHFVACVNMLRMWGGGFAPKALDEIIKGEGLGRSNDLPRIST

SEQ ID NO: 1249 - protein, 412 aa, unidentified
  REGION 1..412: note = Table 20
MVQENSLRIVKAYRLKHIHDVSQFITDYLNILRYAIWIIWNNISWKNDKPILPSTRGFKRKLRSELKSKWCYASHYVDSAIKQAYSIMKSWRKRYIKGKAEKRTPVIKRRFVRIKNTLFTYNEGVIKITIKPYEEYLVIDLSPIIDIISRDLSKNPCKSDIGELILKDNEVVITIRKNFTRRKVRGFIAWDVNLRTLDGLKVDLENNTAEWIRYDISYLHHVHRVYEIKRRKIQKKLHRKQRLMRRLLRKYSRRESNRVNDYLHKLTSFIVREFNEYDHVFEDLTYIKDRIASTRSRRVNRVNAKHDYRKIQKMIEYKALWNGCQAYYVKPHYTSRTCPKCGFKVKTRIGQVLTCPRCGFKADRQFVAVWNIAMKYLQMWGIRGLPESPQRVMTPQTLCWGKGELNKNHKIS

SEQ ID NO: 1250 - protein, 444 aa, unidentified
  REGION 1..444: note = Table 20
MQSMQNPALETVKAGKSRRGKAPKEARAYKISHSHDVRDLLIRYQWMLQMAINEIWDNINWREETEENYYTVPRDETVIKLLRMQGKKFEAKGGRIKVYYEVKRIIPEIPEGKEFKKGLRDKLLRHWRNTGYAAHYVDSAIRSAYQVLKSWKTNYVRGRRKRKKPIVKKLAARIKNSLFRVQGNRLILTVMPRKLYLEFDFSNAWFLDRVKGWKVGEIVLREKDLILMFTREKEGRKHEGVIGWDMNKYAMDGFSDRGKEKLSLRKLHHIHEVYHELRRKMQALSKKKPKYAKKRLKRINERERNRARDFVNKLTTRIARKYPNHIHVLESLDKEGMFNWDRGHNRWIALQNWRAIARALSYKVTVREVDPRGTTRRCSRCGSLKTIVANGEVICKRCGIAINRQVNAAINIYLLGKKLKPSIKLWETKIKPKLDPEDYREGKH

SEQ ID NO: 1251 - protein, 529 aa, unidentified
  REGION 1..529: note = Table 20
MLTILLLAQSLPPISYHSLTNSTLRLALSLIAKKYLTSPSSAALGLAWDARGLDGPMISFLRPRFGGPSGPWASPVPPPGAAHPPRLGVRAMANSSEYEGRRCGGRRRKDEYEYRAYKIPWYRAHGVSRDEVIKLMHWFRDVVNYVIRYFWSRIWEVDRGRLRANKIELEGGKVIRTPLFPLKPRRPSDDEYNEVRRQLAPRCPWNRHWAYSAVRYAKDIILESWRQRYFRGMARRKMPMLKRLVARAENTLVRSHGNVVRVSIFPWKFIEINTSGMWFLKRVEGWEVAEVEFHEDCIIITFRRPKQRHNVREYIGMDANFDTLDLFSQKHGWVRVDLRPLIHIIQTYDEKRGRIQRLTKKVLKHKVRKLLAKYSKRRNSRVNDYLHKLTTALARLFPDCVIAHEDLSKQGMYGNSRKHNRELRWRPWGRIIALLSYKATTKAVDPRDTSRTCPRCGGRNTERVDGTLVCKRCGLRIDVQLAAAVNIWLRARGIKPSERTWKIIEPATKRRTRLVLDLRSGMLIPAPSP

SEQ ID NO: 1252 - protein, 416 aa, unidentified
  REGION 1..416: note = Table 20
MKIILTYKMLHEWSVEGLLREYQRVLRQAIDEIWKNTTWKEKKVRHRYFLNSGRYKYYETARLIPYFPKTNKFKRELRNKLLGGWLFAKHYVDSAIKTAYSILESWRKNYIKGKRKRKKPLVNRRFIRVKTTLMKVEGSKIRITIRPRGEYLELDYSKEWFYERIKGWKVGELIIRENDVLLTFSKDVEFGGRVKVGLDSNLMSLDIFHPEKGWIKVDLSELHRIGEIYDRIIDRLKSLQRKSPKRIMSLLKKYRLRRKNRIEDFLNKLAVQLAREFPDAVFIFENLNKFKMLRNGSRQFNRKLSRSTWAKIVHKLSYRVQVEFVDPAYTSSTCPICGSRLKSRNGLVKCLKCGFEADRQFVGAFNIFMRGLGVALSGVKTDDLLPHEPGGELRLMRPKSVVKVSMNGGTFTHFPP

SEQ ID NO: 1253 - protein, 419 aa, unidentified
  REGION 1..419: note = Table 20
MLKTYSLKHDKREEVEGLLRAYNEILNAIIEDIWSNIRWKQVKIRGKNQFRLLPIYRKDNQFKKCLRDKNLKGWIYAAHWVDSALKTAFSIMDSWKKNYVKGDRKRVCPKARRLFIRVKQTLCKLEGDNLRVTTAPKSFVYFDLSKRYFKIPREISSSGIGEPIITLNRIYLPIHAPDKRPEPAIGKIAWDSNMLSLDGYSPKIGWVKIDTKALATVHISSFEKRRSVQREAKSKKAKRVLNKYSRREMNKARKHQLEIARVINSLAEVNGFERLRKERMYRRSRVWNRRVMRTDWRAIMRRVDGSTELPPQHTSKGCSRCGCINRDLNGCMFRCGSCGLTIDRQLNAAINLYLRMEGVPHQMKWWDKHILPSLVGGYFLTGAELKAPYELVRGLYEAVKPKLLYAYDRHADAYLPVPT

SEQ ID NO: 1254 - protein, 439 aa, unidentified
  REGION 1..439: note = Table 20
MQGSSLVIREDVRMYSVDFSDERIRELITWYVKSLQRAIDEIWENMEWKYDFKRRYAKVRIPVIPRNKEFKKYLRDKLMKDNPYTKHWVDAVIRTAYSIMENWRKRYVKGMARKKKPTVKRRFARCKITLMKVDYSRKTIRITLKPYEYIEVSYANQWFSKRIDEWKVGGVVLKDDRVLIPFKKENTYRVNREIAWDCNEKTIDGFSPQMGFVQVDLRKLITARIRYQEKRSRIQSLMKRKPKSARKLWEKYSRRERNVCRDIERKIAIEIVNAFPNTLHIFEKLNKQKMISKRKNKNKNLRKRVARISWINIIREVEMRAPVKKVDPYFTSKTCPLCGYVNKDLRGQVFECPRCGWRIDRQKNASINIYLKMKGFPPSPNTFYRVVTKRMIHSGKVWMRRGSGVTQIGGETNEMLPNERGDEAGVPQSLHRQIKAYVG

SEQ ID NO: 1255 - protein, 436 aa, unidentified
  REGION 1..436: note = Table 20
MRLPIVKSDNKTTIFELPKREIIRAYKLPLKDERLKPFIDFYLTLVRKALQEIWENTRIEKLNKNGKKRVRVKITIPKDKEFKKKLRDKLEEINNKYASHWVDSAIRTAYSIMKIWRKRAIKGKAKIRMPRITRRFVRVKSTLMRVDGEKIRITLVANKEYLHVDFSKSWFYKKDMKVSEPILKEDSVILVFKKDLPLTTPLYAIGLDTNLYTLDGVTVDGKEVHESIKDIFTLKVSMSNKKAKIQSLSSKKQKNMKKVKEKYSHREKNKVKDLVYKKVHEFLNDHRNSIIAIERLNKVKMFNDVSRSLSRKISRTSWRLFHTVLKEKAGEYNSFVIEVDPYLTSKSCSRCGWVDPNLGASKVFICRCGLRIDRQINAGINILLRMCGFPHIPGVFDKVFRIMGGVIPLRGRIVMMSFGSERDEAQGFYGHDNKCP

SEQ ID NO: 1256 - protein, 433 aa, unidentified
  REGION 1..433: note = Table 20
MSKSLRLNDFQPEEEYVYLTYSIKNDKKEETKILLENYRALLQKALDWLWERTKIEKKEVKKGKRAFTKVKVKLPKKKEVYKKLRDELEKINVLASHYVDKAISDAYSILRGWKRRAEKGQASLRKPTLRKVYVRVKSTLRKVEGEEVRITVRPFEYVTFSWSRTWFSRRVEGLELGEPIIKDDKVHLPFRYKLPWFTPLDFLAIDSNLYTLDAYDGDKFVTFFLKELYSLKYGMELKRSRIQSFASKHGRKGKELLRKYSHRERNRVLDYVHKFVNKLLEMYPLTMFAVEKLNKQEMFRDANDKLSKRISRTVWRTIHRVLKYKAPLYGSFVKEVNPHLTSKSCPRCGWVSRKVGRTFHCERCGFTLDRQLNASLNIYLRMCGFPHLFFTPTGSRWVGVIPLKGRRGMNGAMPRDSSEAQRLRIDIKYYEIL

SEQ ID NO: 1257 - protein, 432 aa, unidentified
  REGION 1..432: note = Table 20
MQNSSLVILSYKIKHDYDVKEFLSSYRCLLQRAIDEIWDKIEWKRKGKRLIPTIPKSRDFKRNLRNKLLKDWSYASHYVDSAIKTAYSILNSWRKNYLRGKRGRNKPTVKRKFVRVKETLYTFRDDKIKVTVEPRKTYLEFDLSRIWFKKKVEGCNLGELILKENELIITFRKPVERNPKKKIAWDLNLLSMDGFCDRGWIKVDLKLLYTLHITYENKRRKIQSLSKTKPKTAKRLMEKYSKRYRNKVKDFLHKLTTKLAEEFKDYELGFENLDKQGMYNDRRTHNRVISKQNWKQIVFLMSYKSRIKLLNPKNSTKTCPRCGGKMKHRKGQVLECKCGLKINRQLNASINLYLKMWGFPPSMKVWEEVILPILRRSGVTLKGDETDDMLPMNPEGAEVDVSQGGRTSVTKSAEPQKTSLRSKETLKRRRSE

SEQ ID NO: 1258 - protein, 423 aa, unidentified
  REGION 1..423: note = Table 20
MSGSSYRVRAYSVRHEYDVTEFLEAYRSLLQSAVDEIWARIRWIEKPAEPKHGVPGVRYTARRLIPILPKDGSFKHHELREKLKEAWPHAVHYVDSAIKLAYSILRSWRRNYLKGDRGREKPRVRRRFARVKETLYVLRDGRLRITLDARERYLEFDLRNAWFWKRAKGEPGELIVREDSLILTFREICNKEEPAKRLAWDSNEASLDAFDPELGWVRVDLRGLYHIHRVYEQKRRRLQELASRKPSLRGVLGKYADRERNRVMDAAHKLTTELARRFPETEHRFERLEKGEMFNGGRAHNRRLAKADWSMVRSMLAYKAGVGEPLDPRNSTRRCSRCGGMNKAPKGAVFECGSCGLRVDRQLNAAVNLYLQMEGLPHDPRWFDRVVGGFALTGEERDGNPDEPSRGSSVVIPQSCVCRSKTT

SEQ ID NO: 1259 - protein, 401 aa, unidentified
  REGION 1..401: note = Table 20
MKVSESLLVKAYSIPHTFNVDELIEDYMHVLNAIFDDLWSSITWKRQAKRLIPLLKKDNDFRKSLRVKYLSGWTYSKHYIDSAIRQAYSVLESWRKRYMHGRAGRNKPRLKRKFVRVKETLYTYRNGVIRISIKPYEESAVIDLRKTWCWDKIKDLELGELILKQDRLVVTVKKKVRLEIKDPVAWDMNLLTLDGYDGEKNHSIGLKEIYTIHRAYELKRRVVQKLPEKTRKKLLKKYSSRERNRVDDVLHKIAKQLSDRTNVFEDLKNFKERVARTRSRSMNRQNSKHDYIKLQKYVEYKSAWNGYATIYVRAEGTSKTCSRCGYYNKDLRGAVFKCPKCGLIIDRQENASINIWNSFLKMWGFVGSPRKEQSPMKPPMNPEEAKGDEAQELSKTIHIHT

SEQ ID NO: 1260 - protein, 411 aa, unidentified
  REGION 1..411: note = Table 20
MQNNSSKNETIIRAYSIPIQADEVILEFIEEYHKLARKALQEILNAEKFTKVERKQLRDKLLENWSYATHYVDSAINQMLGLVKSYKKKLKKGKKVRKPRLRKKFVYVKSTLFTLKGSVLRITITPRKHYLEVNLANYPHILPFLKEVLEGKLRLGGLFLFPDRLVLNFVKSVEYFEPRDWMSIDINLTNVTVLAGLTVYRFDTRELYHIHRVYELKRRRAQKISAWNRRLSEELLEKYSRRERNRVKDFLHKLANKIVEIAREKRMGIILEDLRGIKEKLNGSKELNRKLSKWNARELERLIEYKAKWFGVPVVYVNPRNSSRVCPVCGGRLIPREGRLVECPNCGLVEDRDFVAVLNLRMWGVWGSPEWVGGFEGSPDEGLMKTNPYGVMAVEKQRIGLKLHKITPKPP

SEQ ID NO: 1261 - protein, 382 aa, unidentified
  REGION 1..382: note = Table 20
MEVVKSYRIPVESPKDLVEEYFKIKQRALEYVLSKVRFSRKAHLSFSKKERRELRDSLLRGWRFSKHYVDSAMASVIGLVKGWIMLYNRGRAKEPPKVTKKTVYIKNTLFSFRDGVLKISIEPKKRYLEVDLTKYHWLPKDFDRLGGLILTEKEVIITVKKMVDLKADKWASFDVNLTNVTALIDGRVERYDLKKLYHIHRVYEIKRQKAQSLSRFKPKTSERLLQKYSRREKNRARDFVHKLTTTIARELERAGSGAILERLKGIKYRVLSGSRKQNRKLSKWNARTFQFMLEYKLKWLGLPVKYVDAKNSSRTCPLCSGHLVAHGGRLMKCEKCNLIVDRDVVAVLNLQMRGAGFPPRALNELIEREGLSGGNEILHTST

SEQ ID NO: 1262 - protein, 402 aa, unidentified
  REGION 1..402: note = Table 20
MAAVKCIQIPIVPLVGRKERTLSELLKAYSDIVQQSIDYTIEMGITSRKRLHEALYEKLRAKYPNLASHYIYTSFTMALGICKSFKKRKKLGLTKRDKPEVSNLNSLMLDDYHLFKIEGKVLRLNIGNGHLYLPLKPTRFQERFLEEIRQGAMLVKRGDRWFLNATIKRDVQPYEPIGIIAYDINEKSVDALLVKEEKTEWIHIDISEAKHIQKRYQEIRERKRRYIKGKARRKANNILHVATKFLVEKALEEKVVIVTEDIKGINKGINRKGKGVRRRLNLWSHGKISFQMNYKADWLGVPRLKDVDAKNNSKTCPVCGDARARKGWVFKCKKCGYETSSHQIACINILKKALPQMSRVGIPFSAKALVGLSPKWLVATVKGTKPVREGLHRQKTINIYGG

SEQ ID NO: 1263 - protein, 429 aa, unidentified
  REGION 1..429: note = Table 20
MLLERTIKLKLVPLDTESRRLLHDLLKKYAELLAEAQRLVVELDIRSVKRAHEALYKLLREMHRELHNKYAEEAYRRALANYRSYLKLKRKWEKRLRRLGFEEPRPPSAEGNKVIDLHISAFRLSPPLLEVSYGGGKTMKFLAMPNPLLAKYAGWRIGNSKILVDKGSAYLFLTVRRNVEPEARPNRIYVDVNESSIDLLVADWGHGLGLFLSVMHEGKEIRRRYRILRRSIQKKVREIRRRNQLLRKYGKRERERVNQAVRRAAKLMADLALAYNADVVVEKLKDVTWRPRGNGELNYRLRSLPYRRIVESIRDKAAERGVRVLEVDARNTSVECPICGHADKKNRKSTTEFRCTKCGFELHAQLVPTVNLARRCEGVVARPAGQEALLTLEEAPVVSSGEAPHDPVNHDPARGKALPVPKTAKIIKI

SEQ ID NO: 1264 - protein, 308 aa, unidentified
  REGION 1..308: note = Table 20
MFRSYAVHPRTKVLGFLANLDVRKRVKVKGYRNKLVIDINENNVSCMAVDLDKGKATLFRVNHDIKGIRVKYRLIRMGVQRRLGNDGAKPLLRKYGARERHMVEDRLKKIAKRLADIAEAIKADVVVENLELRREKVGKLKARQLNYRLNALPYKKLLTYVGTEFNGGGLKVHKVPPNWSSLECPLCRNRDVRNRMNAEEFRCTKCGFTLNSHYVAALNLYSRFNDGIAIRGRNRALYMVPRSNTSEAAPLVSVDEAPNDPMAREWVLRGKTMPKFIKKILNSQNNLGDGHGRPRSFSPLKRLKDEGG

SEQ ID NO: 1265 - protein, 475 aa, unidentified
  REGION 1..475: note = Table 20
MIKTIEKTIKLKLLPLTSNERNELLSLLNDYTSMIREALDIIINNDVRSRRKAHELCYKVLREKYPHLHNKFAQEAYKRALAMYRSYRKLLNKWKRLPEKKRKETSQPSPPRVKENRVIELHIDAYKLERRHGFLVLTVSKGNGVYLKFLVMEYGYARRELEGARLGNSKILVEEDKVYLLLTIRRNVEVYEHRNKLIIDINEDSIDCLLVNHDRNEATLFSIRHDIRRIRTNYRRIRKGIQEKVKNPRLRDKLLAKYGYRERKRVEDRLKKITTLLAEIAKEYNADLVRENLKDLRLSGRKRSKQLNYRLSVFPYRRFVEYIDYKFYERSLSVLKVDAKKTSITCPICGYVDKRNRLDKETFKCRRCGFTFNAQYVACLNLFSRSNDGIVAIRSGRLYLVTRKAGPVVPVDVAPDEPPNHMRWLREKPVQVPVISKNSKYRARATTILLQLILFYSNSPCLSYEYYNLRKSQFS

SEQ ID NO: 1266 - protein, 218 aa, unidentified
  REGION 1..218: note = Table 20
MTIRRNVEVNEYRNKLFIDVNEDSIDCLLVNYARNEAVLFSIRHDIRRIRTNYRRIRKSIQRKVKNPKLRDKLLAKYGYRERKRVEDRVKKITTLLAEISREHNADLVRENLKNLKLNGKKKSKQLNYRLSTFPYRKFITYIDYKFYERGLNVVEVDAKKTSITCPLCGCVNRRNRVNKETFKCKRYGFTFNAQYVACFNLFSRSDDGMIAIGGGRLI

SEQ ID NO: 1267 - protein, 393 aa, unidentified
  REGION 1..393: note = Table 20
MSNSLLLSETCKFKLKPSMEQRQILEELFSTYRDMVGECLRKAMDLNITSRKRLHESIYKELRAKHPNYPSHYIYTAITMALGMYKSYRRVSRKGENVKPPSIEELKTILLDDTHLFWFNWGGLKLATHKGHILVPFEAHEHSKKFMGWSVKGSRLLRKDDGYFFHITFRRNVEERMVDGLLGIDVNEKSIDLAVVKPGEIMFVKLDISEAKYIRDRYFKKRQRIQSKTRGRIKAKLLAKYSGREKRRINSIIHKASKIIAEMIIKENVKPVMEKLKKMRKRIRYGRMMNRRLHSMPFRKIQSYISYKSIEGGYKPEYVDARNTSRVCPICGELNKPNGHAFKCKRYGFQTDRHLVAAWNIAVKLPMCRPLPLAAKAINEAFKAEVERIVIKC

SEQ ID NO: 1268 - protein, 412 aa, unidentified
  REGION 1..412: note = Table 20
MSERQLETVKSVWFGIKEKNREKVRKLLEDFRDMINFCIGKALELNITSYYKLRKAIYEDFKERFDYATHYCHSACRIATSILKNWRRRCRRGEASWEKPPEAKRLFARLEKCLFRLDRQGKLEITLKEGEYLTLDLIVHEYQQKFLASDKDYGELILKENGVFIPFKDKVKIKETKGLLIFDTNETNLTGLLVTENEVKTIFYDLRKVYHIHRTYEEKQRRIQKLKKQKPLTAAKIQSKYSKRRKRRVRQLLHVLASHVAQIAKEKEVRVVFGDLSGIREKGNKKRRKWRRKEREKMNRRLNSWNFHLLQFLCEYKVLDQGHQTIYVSEAYTSRTCPVCGCMREPNGALFVCERCGFKADRHVVAAINIAKKFGYTYKQLQMWGLPLAPNAFYEVTPFGVIEKEGLRYKCY

SEQ ID NO: 1269 - protein, 444 aa, unidentified
  REGION 1..444: note = Table 20
MKTIKTVRVTSLQLTKRKYEEIALAIACFKDSVNFLIAKCIDNPLFQKVSKKGNTYCDYSSYPKIRKSFYFEWKAKFPRLHTHFCHSAARITKDILRSWNSWCFKKRRRLPNPRYKKNSMKLEECLCYLDGNYVVLRNEPRCKLYIPFQPTRHFLQLKTNRHGEITLKLNPNRTVDIFIPFTQEIQPQKITSLLFIDTNERSVDFLLVNETSAQVRSLDTSQLSTIHFTYSLKRRNISQKIAQGSKYQPQKRKELLDKYGRRERNKTINEMHAVTNEITRIVETNGALVVLEDLTNIRQSLARQKNLKPRQQKKSKKMRRRLNRWNFRQFQTYLEYKVKATGHPVKYVNPRYTSQNCLQCGKRTKCWGKMFTCKHCGFTMERHILATLNIAEVFLNTQNVARPDPAERHQMTMMARAVRNCKDTIIREASQNDKIMGIYPVLST

SEQ ID NO: 1270 - protein, 431 aa, unidentified
  REGION 1..431: note = Table 20
MQSVSSARFITPPLTRRKRELLEYLLDQFAASVNFCIQKCLEHGVTSRASLHRIAYEEWKARFNLATHWFHSAGQVATQTLRSWRKLCRQGQADPKKPPVYEARTMRLELWGDGNASGVCRFHGKAVQIRIRRGEHLWLLLIVTEHHELRYLKDWREGKLKVGEITISAFGNRANVFVPFKREVEPKKIEGICGVDINERSVDLTILKPNQEPRHLSIDVSELPAIRHSMQLKRKSIQEKLDKPRRPLQKRRLKAKYWRRERNRTNQVMHVVSKGIAEIAERERVALAFEGIRGIRRSMGRPKNGGTLHKDMRRRLNQWPFRKLQFYIGYKVQRLGLPVVEVSNYRKSKLCPRCGRYNRPKGHAYRCEACGLEASRHLVASWNIAKDGARHVPADCWRMKPVVEEPVAPAKPSVEPERIPCQSGVRFDTGF

SEQ ID NO: 1271 - protein, 470 aa, unidentified
  REGION 1..470: note = Table 20
MMEDYKAIANHLINFGLHHKIGLETHYYPLSETDKTGKPKPIPPERELRDLNKKWFNEHYKGKYAAHYLDSAASFAMQQIKSWRTNGGDITSIPHIRKPIARLNNDLYTIQESKPDGTMKIRITVAPRKSVVMDIKVNHRHFTEWSLNRPGALVIVPYGLRLCFTDDSKIPKAKESAAYDFNFDRVVIARSDGEMKEVDLSDVMKIQENHKKKRESVQATMAHNPQKSQKIIRKHSKREHNRVNDLLHKKVHGKKNEILTFVGSRHLGVEDLHGTTQDILTDDRGVKFNAKMSSWIHGAFEDIIVHHHPDSKLYYTRGTSRYCPFCSSKLTHPTWKQSKCPNCGMFDRDWLEAVSGLVRTNTKHKKGQPWAVLRDVFPQYIENKLLLSSRLMIRGLPPVKVITESVCPECAVLYSEEQSDIDSGIAAVMHGNRSDVYDPTERVIGSDQLLIESENDANSEIDERMSRLST

SEQ ID NO: 1272 - protein, 409 aa, unidentified
  REGION 1..409: note = Table 20
MVVPFRPPYPLLRALLDVRSGTQRLLADWRSRPEECRFEATKRVYPSLRASYPHLASSWVVTMANEASASLRSWDRWLRRMKRLDPPRWARLHDQIPRRRAVKGSLHRALYRLRGRVLDITLHRDRHVQIELGFVRNPLFERYGTASNWTFGLAVTDRALIFQFRVPQDQPIVAESAGVDLNMPSADLATSDGRTSSLDLRPITAIQGAMARKRAAISRHISKDLRHQRAVLRRYRRRERNRVRPLLHAVGNELLRQVGTRNVVFEDLSSTTEECQKITRGGDPDARRRLSAWTHGEFQRIVRYKSTTAVVRVNARGTSSECPNCGGPLAHPSWRRATCGHCQGDWHRDRAAALVILGRGHHLLRGAAPPPSARNELLEAARWRPDDERSPGPAGEPMKGDDAKASGRG

SEQ ID NO: 1273 - protein, 431 aa, unidentified
  REGION 1..431: note = Table 20
MTHPWKSNGDKRTIVFEYKPSGTILKYLNDMRDLINKAIINAYSMAKSNNNELPSPIVLRKSLKNYYDNNIIYAKHHINPACRNAIAILRSYKKNNNGKLKIIKAKRLAMRIDSELIRIDNNKLRITIRPNEYEYIDIVDKNRKYNEYSKYKISEVLLTDNKVCITFIIGSLNKPLINNNIIGFDLNFKTIDYTIIKDNEIVETNTIDTSDIAKTQRDYARKRTKIQGHIKNPEKRNRKLKESRHRQRNIIRDKLQKLTTKIVNDNSDKTFVFEDLTNIKKEGRKNKNNRNNKNNNEDSKASNKNNKSKRFRTDINTWPYRLFQRFIDYKSKNKTLYVNPEGTFSECPVCGEKLKHPIWKISECSNCGVTFNRDRLSSLSISVRGLHLCGTPFTVSGSSSWYSMRNNYLYHPDHVIIENFNDCKKYVHNNA

SEQ ID NO: 1274 - protein, 249 aa, unidentified
  REGION 1..249: note = Table 20
SFRKPNNREIGEKKIGVDTNFSNLSMTVVDKGRITDVPVKSTEDVVKIQNDFSRRRSKAQKHIRNPQKRNRKLGQARGRQRNRIKDATHKLSASLVKEFPDATFIVEDLTNIRKTARPGNRNLRKNLNRWPYAEFLGMLEYKSPNKLIKVNPGGTSSECPVCGGKLKHPTWKMSRCETCGRDYDRDRLASLAITLRGLDLCGDPFPVSAESSLPSMMDEYLYVRSKPDASEAGRTEMAYDPNRPVQNIT

SEQ ID NO: 1275 - protein, 228 aa, unidentified
  REGION 1..228: note = Table 20
MGKLYTLRDACEISQLDPTTIRKWDREGKIKCIRLSNNFRRVPESEINRILGIKSNRMSFIYARVSSHDQKADLDRQIQKLQTVSPESHVVSDIRSGMKFNRKCFIELLELVEKDKVSAIYIYKSPMKTVYVNPRGTSSECPVCGEKVKHPTWKISRCNNCDRNYDRDRLASMAITHRGIDLCGDPFPVSASASWQSMKDEYLYIRDKPEISEAGSTETAYATNRTGA

SEQ ID NO: 1276 - protein, 431 aa, unidentified
  REGION 1..431: note = Table 20
MNHLWKSLRQKRTIAIRYEPSAQLLSYLSDMRDATRMALAHALVDAKLNDGKIPSPIRLRKKTRPWFVSSMPYARHHINPVCSKAVALLRAYRKRHKRLGLPSLEKLSMRIDGELFKMTKDEDDGQVTIRVTVRPHEYEFIKFRPNHKKWDAYSKGRLGEITLTDSRLLLTFVKGLATKPLGDQLVGVDLNFATVDCTPIDGGHQKMMIRHPVTIPTGNIEHIQDSFSRRRRRLQLHVRNPEKRARKLEETRGRQRCRVRDALQKLTTDLVRRYPNATFVFEDLKHIKSRQPKKGRRFRARLNRWPYRMAQMMVDYKSPMATLYPTPRGTSSKCPACGGKIEHPTRIPSDIRWRVSVCPTCGVNYDRNRLASLAIACRGARLCGRPFSVSEDASWHLVRDEYLWHGPVAGETAMIAGGTEEGANAPKEVLS

SEQ ID NO: 1277 - protein, 424 aa, unidentified
  REGION 1..424: note = Table 20
MNLKYQSLLVLSVQAVKAVQIPYHPSEEILRLLETFRDMVNYCIHVGLEKNITSRFKLSNEVYHKLNNYGLHTWYNLSVIEVATAILKNYRKAVRRKRATKRAYARKLMAKLGNQAYKIADDQFRIPIKPREYFYIPLHKRVRQFLSDATLKLGSITLTACTVSVVFSKTTEVMRPKGYVAIDTNERSVDGASIENGELKVESYDLSRICEIRHGYFERVRRVQAKYANDRRVSRKIQQKWFRNQNSCINSILHKVSSTIVKKAKKKKQGIILEDLKNIRRAVNRKVLGINKFNGKVQVTSKHLKRLKRRLNSWLFRKLQSFIEYKARWEGVKVVYVNAYNTSRICAICGCRMRDPKAKFLECYGINHHVNACLNLLKTQDETLRFKVDRSANVTMIRPLNKAMSKSGEGALHHSALEDAPEPI

SEQ ID NO: 1278 - protein, 372 aa, unidentified
  REGION 1..372: note = Table 20
MRVHTQLVMKSVKTVSFCYKPTAQTREVLETFRMMVNHAIQIALEEKVKGRLNLRNRIYREFRQRYEVHSNYPYSVAEVAWSIIKKHNRWHRKPSAERLIMKLDNESYSLNYSIICLPFRMGEPRIFIPLHYGDWQRSFLMDATLKRGSVTMTESTIIIAFSKETTVVEPLMKVGIDLNEKSVVLSDGARYDLSKVGRLHTEYGVRRRGFYARHPVDQRLKRKFCKDSREKVRVRQFLHLVSKKITEGAKAKRQAIILEELKGIRYVHERGNGESRGRRRRISQWPFGLLQQQIAYKAAWAGVPVEFVDASNTSKECSHCGYLNKGLKMTEREWRCPSCGVTLDRDLNAADNIERRGTIPCLAVVRSGAQGG

SEQ ID NO: 1279 - protein, 363 aa, unidentified
  REGION 1..363: note = Table 20
MSAVKGVKFGYEHSAELAQVLSLFRDMVNDAILICIAENISGRLNLRNRIYREFIDRYSLASQYPYSVAEIAWSIVKKHRRWHRVPVARHPMMKLDSSAYTINNGVLSIAYGQGRNGQRISVRLKFGEYQRLFMEDRTLSMGSVTITADAIVVAFTRNIAATAPVGKVAFDINEKSLVSSDGERYDLSEIARLQTEYGQRRAEFSHKHNEDRRLIIKVSKRLRQRERIRQRVHAVANEVVKRARDESKTIVMERLTHIRKSQRKGNGKAHTTRRRINRWPFSVMQKAIEYKAAWEGVEVQYVSPSWTSKKCSACGKVNRRLGAEKVWQCQCGATHDRDFNAAMNIWSRSNPVCLPVTRAGAGG

SEQ ID NO: 1280 - protein, 319 aa, unidentified
  REGION 1..319: note = Table 20
MAKSKINDFRKTRKKNPNAKIPYYKKPYVTVDKQSYQIMGNTLIIGVRPGRPYVGIPLNDYTVSQFADPHIKIGAITITRNTISISISKETQSITPTEFVGIDTNLNNISTVHSDGHVDVFSDVAKITKIKQKYRKVKSHFRRNDVRIGKKIFQKYGTKQQHKTKQTLHNISKKLVTQKKQLILEDLKGIRKLYQKGNGQGTKYRSRLNGWPFYEFKRQLEYKSKWYNGIPVIKIKPNKTSSKCSICGAKVIPEENRQIRCHCGHREDRDINAARNILYKGVPVVQLRGLRLRPDAPQGEAMKQSKDAKQIVTSQINLQ

SEQ ID NO: 1281 - protein, 647 aa, unidentified
  REGION 1..647: note = Table 20
MPELQQVTKCVWQFHDKKDELTDVFDYFRFCTNEAIRIGDENNLTSRNSLHHELYKTLRNDSNFYAKYVYGSLSVAKARLKLYRTTKKKKPNATRPYVKRDMITLDNQSFKIINGYLRFPIRAKQHLFVKLASYVLEKLEHTKLGSITITPEKLIISYSKEILLKEPKHYQGIDRNLDNATSYDSTGKFTIYNLKKSNDIKQKYMEVKSHLKRNDVRIRKKLFSKYGKKEKNKVHQLLHNVSKKIVSQNQGIVLEDIKGIRKLYKKGNSQGKKFRGKMNTWSYYELQRQIEYKAKWNGLPVKYVKAYGTSSKMVFQKSDINYICNEYLNGKSANKIAKKYHTSHPVILRILKENNIKKRNRTYNIDEDFFETIDSEAKAYFLGLLFADGYHNESKNRIQLSLQTKDKELVLKFKDVLNAENPIFFDKRRNATILSFASKKISNDLINLGLRQRKTFTCRVPEIPKYLMRHFVRGYFDGDGCACISNTKNRKILACSFLGNKSFLTKLIQQFPFEITSSILPKSSVYEFKTSKKETLYSLYCWLYDNSSIFLRRKYEKWNLGLHIVCGIKLVPEEHRMMKCTKCNITIDRDINASKNILARGLRFDPHAPQVEAMKQFKDAESIVASQKVTESASQQKDKLIVCVPVT

SEQ ID NO: 1282 - protein, 383 aa, unidentified
  REGION 1..383: note = Table 20
MPLSRVTKCVWQHHNRKTELQPVFDYFRSIANEAIRTGIEKNITSQFGLHYELYYRLRSEFYSQYIYGALRCAASKLKFYRKMKRKNPQIKIPHISKNHLILEGGAYKISDGQIRIPIRPRQHCRIKLNHYVLEQIRCAKIGSITITEDKLIISYSKQITGQNPVSFVAIDRNLDNATTYDTQDKFTIYDLQKANQIKQTYRQLKSKFKRNDVRIRERIFAKYGKKERNRVHHILHCTSKQIVDQNMGIILEDIKGIRKLYRRGNGQGSKFRARMNSWSFYELQRQIEYKARWLGLPVKYVKASGTSSKCAACGSKMVPEEHRMLSCPHCNIVVDRDINAARNILARGTRVVPVGIAGEAMVEESKKNILKVDAVQLPYQLTR

SEQ ID NO: 1283 - protein, 398 aa, unidentified
  REGION 1..398: note = Table 20
MGAIKSYREGYSPSGDVIDIMSTFTRIVNVGIERALEKNITSRNSLSEELYKDVKNLPIPSYYIPPAIAKAVSLVKSYRKSVRKESRKKRVEDRREIRKPHVNKLFLTTHYGFVVKNNTLSIPIGRERYSREYTEIPLNDYVSRNIRERDVRSFTITEISLVVTVENHPDVIECDDVEGIDRNLNNVTIGNEKHREIIDLSAVPRIKEKYRRKQRHFRRNDHRIRKNLYLKYGTRSSNRTDQILHTVSKNIVQDAVDRREAIALEDLTDLNKRTHRGDGKGRDHRFMMVNSFPYGRLAQFVKYKAEWIGLPVIQLSREDTKGTSIDCSVCGYRTQENGRMLHCPNCNTTIHRDVNAAINIAARGRTWLKRSSTKGQPIEAMNQSKDGELMVGSQSTKI

SEQ ID NO: 1284 - protein, 393 aa, unidentified
  REGION 1..393: note = Table 20
MIVVYVFVYAFKAVKQYFYPSDNLKVLMHKFTDMVNFTINIMIEKNLTSRNSVSNEVYHKLKEYEIPSYYYIEAINKAVALVKTYRKRLKKKQKATVPHVEKPMLSTYYGFKIVGGNIMIPIANREYESIPLNAYVRDATSMVKVHSFALSAYTLSLTIGRDVDAIECTTTVGVDRNLRNITVGNEFHHEIYDLSNIVEIKQRYRKKESHFHRNDRRIREKILSKYGKRERNRVKQIMHETSKAIVSNASTKKEMIVLENIIGINQITKKGDGKGKDYRFLLKNAFPYGMLASQVMYKASWEGLPVIELTRKETRNTSRMCSVCGSLTRIEHGRILKCDSCGLEIDRDVNACINIAFRYRTCLKRSHKGLPGEAVKQSKDVEQMAGSQISMDI

SEQ ID NO: 1285 - protein, 413 aa, unidentified
  REGION 1..413: note = Table 20
MRATKCVVQTYGDDGLHDLLGECLTVTYNAVNYGQKNGVSNRKGMGTFYRSLKQTGLPSCYKVAAITRACAVLTSRMKSEKRGVETKHPQPLRPMICVLSGFFITMKGRLFIPLRRNQYFDVQLNRYVQQTLTQKKIRSLTITPDSLSFCYSEDVKLMSVKTVFGVDRNEKNLTFGNPEKVTQINLSKTVRIKQTTREIVGSFKRSDVRIRRRLARKYWRRANNRTNQMLHAATNYMVENAVANDAAFALEDLTDIKKLYRKGNGQGREYRFRLNSWPYWKARMMLGYKSAWKGISVIPLTKSETYGSSSVHSTCGEKLHNPEKGDVEHRRMLWCQTCNKWVDRDANATVNLSQRGLARFASSHPTPKSRSQQADFKAEEKGLANEAMVQEPGTPVILKVDASKLTLRHFPKS

SEQ ID NO: 1286 - protein, 301 aa, unidentified
  REGION 1..301: note = Table 20
MLRVPQGDRRYFDISLNGHTQKVLSEEGLKVRSFTLTTSSVNLTLSKEVKEIECTGTAGLDRNLRNLTYGNEERVIQYDLSKAVKIAETTREIVGSFRRNDARIRRRIASKYGRRRRNRVNHLLNCATRQVVEEAYNRREAIVVEDIRGIRRLYARGNGQGRTFRGRMNSWSFGEARRQVEYKAKWRGVPIIPLTKGETRGTTKECARCGERLQVAQRDDVRHRRELWCPRCKGWVDRDVNAVTNLSRRGRLRFDRSLPKGAKGEAGEAMKGNPTTPVILRVDASKMTRWDNLQSYQNLRG

SEQ ID NO: 1287 - protein, 408 aa, unidentified
  REGION 1..408: note = Table 20
MSYYTAHKTISQKYSPNSELKELMKTFTKMVNHCLKIGIKENVTNMKRLSSLCYHELDKYDILSSYKLNAISRAAGILKNREQSIKRGIKTKNPVVNHGFLANCYGVKMNGYLLTIPFKPREPVNILLNDHTYNMLKSDPCLQVKSFTMTDHNLGICISKEVEEIECTDVVGIDRNLRNVTCGNEKEVDFYKTNKLVIFKENTILARSGFKRNDIRKKGQFYKERQRRLTNRTKQYLHKISKKIVEKAIKQKTAIAVEDLKGIRKMYRKGNGQGKKSRRKMNNNWPFFELQRQIEYKAQWAGIPFTKINPKNTSQLCPQCGKRLQEDTRQLSLQRKKSCINCGLFMNRDIIAAMNISRKLSPRFRDSRGDADEAQCRAFERPMMESIKPVIRIVDVSKCNNDQVTSHN

SEQ ID NO: 1288 - protein, 296 aa, unidentified
  REGION 1..296: note = Table 20
YIQKPYLVSCYGFKINGMLLSFPVRNREFVNVLLNDHVTKTISNIKVRSFTITPTSLSISIFRQVESITPEKTIGIDRNLRNVTFGNYEKIIQVNTSEMLKIKENYTHVKSTITRNDHRIRKKIYAKLGKRQTNRIKQRLHIISKSIVEYSKKQKAAIIFEDLRGIRKLYRKGNGQGNKYRRKLNSWSFYELERQTSYKAGWEGIQFCKIDPRCTSTLCPICGGRLQEDRQKRRDLWCGSCRKWRDRDVTAAMNISYKGLHRFCNPQGGTGEAVKGNLKEPVILRVDVSKCSDIWK

SEQ ID NO: 1289 - protein, 320 aa, unidentified
  REGION 1..320: note = Table 20
MSRAAGILRNYRKELKRNRSARVPSVTRLSLTDCYGFRVVHRLVRVPVRRGEYIFIVLNDHTLRSISGHTPRSLTLTANGLSISLSKEIAEVEPVGAIGIDRNLDNVTTADSDGSTLRHDLGRATEIKARCRETKSHFKRNDARIRRVVYGKYGRIQRNRVNSLLHNVSASIVKRAKKKRFGIVMEEIKGIHRLYRKGNGQGTNYRARLNSWSFYELQRQIEYKARWEGIPVAYVAARGTSVNCSKCGSRTYPNGRRTLFCPKCDVSVDRDVNAARNILAKGRGVKFTPDGPPGARVEAVKGNEMTTPILRADGGKVTQG

SEQ ID NO: 1290 - protein, 422 aa, unidentified
  REGION 1..422: note = Table 20
MLPVKAIQFRYRASSELDSLFEGFRLMCNDAIRIAFMEKPKSRFKLIESAYFRLKQYGLHTHYLLSACEIAYSVYKNKNRKSSPYVKQAFLKLDNQSYTLNHMLLRIPVRPREFIYLTLQGSDYHFQYIDDPTLKRGSITLGRNSLSIAFSKEVADEIKPLGNVGIDVNERNITTSDTLGVTTAFDTSSVMEVKERYRAIRAKIGRQTRQDVRISQRLYAKYGRREKNRTVQRLHIVSKKIVQQAKEKKLRIIMENLKGIRKLYRKGNGQGALYRGRMNSWTFREVQRQIEYKAAWEGIPVTYVNPRGTSRNCPECGSRVVMLAERKLYCPRCDKTWDRDELASLNIMSKKKMKKMTCVVPQARSSIDEAVKGNEQTVRRTAPILQAEGWKLTLVPKSYQNLKAGSVYLPHRNSHHNPIDMG

SEQ ID NO: 1291 - protein, 438 aa, unidentified
  REGION 1..438: note = Table 20
MPVEEIKLTARFKVDLTDVDEATISEIHRLFKEYRRIVNELIEYAHSHGATSPRRLWYAKYRELRQRYPTLPSHYIHTACQLTAGIYKSFIEMKKLGMCEKERPIFKGRTIWLDRQLFRLDVEGWRASIAVHGGRWVALRLLHGRYHEKFKNMRLGEARLVLKDDGNLYLNVAFHQAVMLPEISADAKVIAVDVNENAIVYGNDDFIERFETNEGIIRTRYFLKRRRIQSRIRGKWLRARLLEKYRSREWRRIKEIYHKAVKRIIDKAKEADVKIIIMEDLKHLNRKNTGSKELNGRLHRWSYSRFQKILEYQAKLCGLHVKYVNPRGTSKTCPICGDELEESSNGRRLMKCWKCGLEEDKDVIAVKNLVKRYYEECMDAKLPKTSFNGRRQIDVGSPRSPRKPPNEKREEGQKAQNAKLTFLPPLSPQYLKSFLRAC

SEQ ID NO: 1292 - protein, 439 aa, unidentified
  REGION 1..439: note = Table 20
MPSETIKLTAKFKLKNPPEELNDLFSTYREIVNYLISYAFENNVTSFYRLKKETYKGLRREYPELPSHYHYTATQMATMIYKSYRKRKKKGKAKGKPVFKKDVIMLDDHLFKLDLEAGVIKLSTLSGRVRLEFYPAKYHKKFKNWKIGQAWLVRTPKGVFINVVFSREVEVREPETFVGVDLNENNVTLSLPDGEFVQIITHEREIRTGYFLKRRKIQKKLRAGKRRKELLEKYGQRERNRLDDLYHKLANKIVELAEKYGGIALEDLTEIRDSIRYSSGMNGRLHRWSFRKLQSIIEYKAKLKGIKVVFVNPAYTSSLCPVCGGKLSPNGHRLLKCSKCGFEADRDVVGSWNISLRALKMWGVSVPPESPTMKMGVGRLSATIVPYVSKVADNQNGDSTTENSSLCGEVRLSFNGEKAENKIGRMHLMPLKGCCSMSS

SEQ ID NO: 1293 - protein, 587 aa, unidentified
  REGION 1..587: note = Table 20
FRDWKVGQAWLVRTPEGIFLNVVFSREIEVEEPKAFVGTDLNENNVTLSLPNGEFVKIVTHEKEIRTSYYLKRRRIQKKIRRGKRRRELLRKYGKREKNRVNDLHHKLANKIVEIAENYGGIALEDLSGIRDSINYSAEMNGRLHRWSFRKLLSIIEYKAKLRGVRVVFVDPAYTSTLCPRCGGRLSASPNGHRFLKCSCGLEADRDVVGSLNIALRARRCGELRSPRKPVDDFETGRFSHACIKSYKSGGEPELVEMEAFKAWLREHEEDFFANDTVGLGCFSYQPGEVVWAVTRRCNLNCMHCSISEAETTELSTEEGFSLIEDAAKLGAVKFAFTGGEPLVRRDIFELVEYAASYDMQVVMATNGTLIDEDVASRLKKAGLYRAAISIDGIGAAHDEFRGVKGAFDAMMRGVNACKKVGLRVQFLTTVSRINLKEIPKIMDLANRLQVDRIYLVALIAVGRGRQISDACLSADEMEQFFRLVLERQMKTNVWLKPICMPQFWAFLEAEGLCGAADRKFVGCTAGITRFHIFPNGDVAPCAYLPLKVGNVHSERFTKIIEKAELFQKFRNREIKGRCGSCEHRFS

SEQ ID NO: 1294 - protein, 427 aa, unidentified
  REGION 1..427: note = Table 20
MIPGRGWWYVMSEKVTKTVELVSLRLTAKKAEALSYVYKVYGEMVKEAVNVMYQKGTTSWLRGIKELYKYFREKYPDLPSQYVQQAIRDAASRLESFRKLKKKGLAYTEKPEVKQWTVSCGNMSWKLSFQGVEISTHKGWIRIPLLFHKQFYIHYNGGWTLRDSCRWKIEDRKLTLYVFFRKTVEPNTNYNRVIGIDVNENNVTLFTLPDHKAITLVTNHSKVVLGYAYRRKSIQERHAHDKRSLRIALRKLREKSVKKALRDKVASFVAKIVKKENAALVLEKLPKNFQDKALKKDGLKSFDAHRLKQSAIRGIQKRITEKALEYGIKVEFVNPKNTSRTCPKCGSSLNIMTNNAQRRGWQPRVLKCKKCGFTHDRDVIAAWNIAKKLDVSLMPWGSKGAHDPHVEWLVTTVNRKVEAQHPLLTVG

SEQ ID NO: 1295 - protein, 413 aa, unidentified
  REGION 1..413: note = Table 20
MKPTRTVKVKCTVSKRNLAILKELLSMYKSMLEYTLNYALKNNIKSFTKLKAKVYRELRNTYPQLPSHYAYTVCQDVSTRIKSFLKLKRKGLTYTDKPEIKRITLWLDDHLWRLNEYMEVKIATHKGWITLGMRPHKLYWKYMNNPTWKLSGEAKLKMNSNGVELLLTFRKEEYKPYEPKAVIPVDINENNITFKVGNEVCMVKTNFKRIIVGYHNHRKRLQEKYQQRIPKLYKKLIRVLREKERKKNIRYQVANLIVKTARELKAIVVLEKLPKRTPNNMISRINSKILKHRIYQASFRGLLNVIIDKCMEYDVPYTLVNPRNTSSTCPICGSRLKPMTGYARRLICPNCNLSMGRDIIAVFNLEKKYLQMRGDMPFTPKLYEVGVKLMNPAQRVKPLPTIHSDTKLHKMKG

SEQ ID NO: 1296 - protein, 423 aa, unidentified
  REGION 1..423: note = Table 20
MSELARTVVVPSVGLTGKKLAVFKELEELYRQVLVELVDYGSRNNIDSFTRLKRDKYRELRGRHPHLPSHYIHTACQDASTRIKSFNKLKRRGLAKSERPEVSRVSIWLDDHLWKRVGYTTILIYTHKGWMPVELVPHKLYWRYVNSGWALRTQPKIRIDYRRRRLLVYFVFAKAVDVDENSVKRVISVDVNEDNVAVKVLNRVFILETGVKRITIGYARYREAVQSVKGNGYVGRAIHGRERKRKRDIRSKIANIVSNTAKSLNAVVVLEELPKQCPRNMIRDVRDPALRHRIYQAGFRGMVKAIEEKCLERGVLVVKVDPRDTSSTCPFCNSKLVRGNAPRQLKCPRCGFRAGRDVVAVLNLEKKYLTPKGLVPLTPMPSDPTPEVAVLPVKKWARRKSLEGTTKHPETPTNTLQGQTVFH

SEQ ID NO: 1297 - protein, 392 aa, unidentified
  REGION 1..392: note = Table 20
MIRVTRTIIVKSVKLPRKVFKVFVELEGMYRNMVEQLVMDAVKNNVKSFIRLKAFEYKEMRKLYSKLPSHYVYTACQDASTRAKSFLKLKKLSLPKRNYPEVKKITIWLDDELWKPNGLTLIKIATHKRWVAIEIEPHKQYWKYVNRGWKLRSEAKIKLDKKNRQLIIYLTFAKEVKEHKPEGYLPVDVNENNVTILTDGIAYLFETNVEKIVLGYYYKRKEIQEKYDKTYGKLRIKKKALKKLKEKKKKADIKWKIANIIVKKAYEKHYAIVLENLGKRVANKMIARIKNKQLRHRIFQASFRGIQKAIEEKAKEYGVSIIYVNPRNTSKLCPIHNAPITYNKSRVGKCSKGKELWHRDVVACWNFFKALRGDGSDAPSPSKLRCIPRAVW

SEQ ID NO: 1298 - protein, 237 aa, unidentified
  REGION 1..237: note = Table 20
MVFKEDDPKPYEPKAFIPVDLNENSVSSLIKNKPVLLETNTKRITLGYEYRRIEEGRSTKDREVGRKLREKDKKLDVRRKMAKLIVLEAYESRSAIILEDLSKRAPEHVVEDVKDEQLRSRIYRSAFSSMRRAIVEKAREFGVPVILVDPSHTSTVCPVHGTKIIYQPDGGDAPRVGVCERGERWHRDVVALYNLRKRVGDVSPVPFMSKESHDPPTVSRWLRVKSLHLIVIEDKMK

SEQ ID NO: 1299 - protein, 503 aa, unidentified
  VARIANT 465: note = misc_feature - Xaa can be any naturally occurring amino acid
  REGION 1..503: note = Table 20
MDGNHIVRTVMLSLKVNSEVYARLKEVEEEYKQILEDAIDYGLRNNINSFTKLKAGIYRQERAKHHSLPSHYIYTACEDASARLKSYLKRRKQGKAYTDKPEIRNVSVHLDDHLWKFSLSEVRIVTRKGWVSLKPFFTKLFWRYYNDGWALASESSFKLCKGNVVKLYLVFKRPLPKPFEAKGYIPVDLNEDNVSVLLDGKPLLVETSVKKITLGYAYKRKRISEGRSTKDRVVRRALKSLKERFKKLDIRRKLAKLIVTEALREGKGIILEDLPKNTDIRRKLAKLIVTEALREGKGIILEDLPKNTPEKMVQDIKDKQLRDRIYKSAFASLKNAIVEKAKEFGVPVLLVNPAYTSSVCPIHECKIIYPPDGSSAPRVGVNPAYTSSVCPIHECKIIYPPDGSSAPRVGVCERGRERWHRDVVALYNLLKKAGNVSPMPLGSKESHDPLTVRLGEWLRAKSLHXPLGSKESHDPLTVRLGEWLRAKSLHLTLNVNKMMGMTV

SEQ ID NO: 1300 - protein, 451 aa, unidentified
  REGION 1..451: note = Table 20
MGRLYKVLEITRGCGIGKLTRAVILESYPLTERKFKAIAKLFNEYREILEELVFIALENEIESHVRLRNLVYKDMKERYKGLPTHYIYTACQDAVTRVKSFLRLKRKGIARTERPEIRSVSIWLDDVLWDFKSFPRLKERKDGQKTLFIRISTKHGRITIPLRPHKLFFKYLNNKWKVRANVKLRIDFEKRVVYAIFTFQKKVKERRKPEGYIAVDYNLNNVAFGDYERICIVKTNVGFITEKYTNIMRGVQKKHLVGWKVKRPSKKGKKLLKKFGRRRANRIKDTLQKLARRIVETACMLNAAIVVEDLGRFFNQRVARRTRSKRQRNKLHNISAKRFLFYLEEKAKEYGIPVIKVDPAYSSSLCPYCGSLLDEDAMRPRVKICHKCGFKANRDVIAVLNLLNRAGPPPSGPKANESPVKGLVAPMTLDLEANLLHHRNTLFALVSAKSS

SEQ ID NO: 1301 - protein, 440 aa, unidentified
  REGION 1..440: note = Table 20
MLKTIKLSKTMALKSKPLTRTKIKIIENTIEAYKEILSIALDFGLKNKRKSHRKIREGIYEEIKNKYPKLPTHYIYTASQDASTRIKSFISMKKRGKAYTETPEVRNVSLWLDDILFNYKDFKTNIEKLFSIDKEGKKTLHLRLSTPNGRIVIPLKPHKQFFKVLNEGWKIKAGFKLILNKEDGTITILIPLEKEITINDDYKAVYALDFNLDNITYGNFENIEMIKADLGKLTEKYSNIMANIQEKFSFKGIHKQEKPLKRKGFILLKKFGRRLKNIREDKLKKLANKIAKELKEKDAVLIIEDLSSYFNQNIAKKSFKKLKHKLHNISAKKFLNYLKNKCLEFGVKVVEVNPAYTSILCPNCGNRLSQLYKLADERALPLRLMYCFDCEFYADRDAVAVFNLIKRFMGLYPFSPKSNEPIAEGTVFPMKLWVEDNPFP

SEQ ID NO: 1302 - protein, 404 aa, unidentified
  REGION 1..404: note = Table 20
MWGEVKEAVKQTGLPFAYQQQAVKDAVEAYNSWAEAGGKPPAVRRVSPYGDERAWRFDRLTAISLRLMSGRIVAELWPHKRFWLYEWLAKTGRATRASTIRLRRVGNRVYAVFVYEVEPEAPREPTAVVAFDVNENTIVAARVDLKATVDRVAQWNRQWVQPPISIKVLLTDFGRLAKRYGAIRRRWAEELSVEINGKRTSGAHTREYKKRVKRLREGDRKRDRVNRIAHALTKEPTILVTENVGKKPQEEMIVDKRSPQLRHRIKQTPMKAVVGKVADKATERGLRLVLVSSYKNSQICPIHGERLSFPTEPKIGLCPRGHWVHRDVAAVLNMLWRAVERLEPEYSEIVKQALSTVDEKILEEWSRTVLEAEGPDVLARASPMTPPGEETVIPAGIEGAHEPP

SEQ ID NO: 1303 - protein, 553 aa, unidentified
  REGION 1..553: note = Table 20
MLRRAVAVELEVTRELNKLLYSVESAYLGIVREVVEYAVANNVTGAIQLRGLFYSKYRLEYQGLHSHLVIQAIRQASGVTKSFIERRRKGLAQKPYPEVRNVSIRFDKTAWNYEQFIRSTAPVRLSLSLLGERREVWLRPHKRFWLYWWRVLTGEAELASTLTIKRRLNRWYAIFIFELKPKEEEPKSVVTFDINENTVAVGRIDLLTTVNEVTNWNKQYLMPQLYTIRTDFGRLARRYEKVRNTIIEKLKPRFALPNGKYVNVTNTREFRKRVRKLRERGRKVSRVRHVANELTRTPAIIITEELGDNPQESMIEDVGRGELRHRIKQTPFKSIEEAVEDKALERGSRLVRVSSYRNSRVCPIHFVRLERTDDWHTLQCPLGHLVDRDYASILNMAWKTTPEAWIKAFWWNIKNLSKNMNWREHEGRSNPLVPHEIVKHIHAALKTFKVSLKQSPAVPARGKPMNPARGANEGRARKPPRPKGTLTLQGGEEVSAHCLFNSENTSFQVGFSNGPNQILSASSACLTRISRPSMYLIECLLANFMSDVSPFTV

SEQ ID NO: 1304 - protein, 363 aa, unidentified
  REGION 1..363: note = Table 20
MAFNDLDTYSTRNHKESYPKLDALFDGQPSQLAKCGPRGRLFDLPTGLHVTALDSNYLQIGDLVIRTEVHALPSAPLIAVIDASPNFRQYTGLDELLTILRDPDANVTLFRERITDVVARGLHAGQPPQLVTPSSGFTAVWHPARTQFIRTPDGHWFTRLAFELTPTADLEPAAQLTTFGLDLGSSPVVCAAGGDGRVEMFGGPLPLLNALRRRDDYSAEERRVLRLLTYAAGREEAEAAIRFLARTASMVYAEQLTIEGMWGGFIATGRLQATLDFHFSWLPQALFRAGVPFERVNARGTSQVCHVHPDTIGKRDGKRFVCPRCVGVQHVDVNAARNVHARGLRQYGVRPSFHWRRQRRRAA

SEQ ID NO: 1305 - protein, 360 aa, unidentified
  REGION 1..360: note = Table 20
MSHHPDLDQYVVRVDPSSFPALRTLLAGGQLQQILTGVAGWPRASVYQPLVRVTVHGDARVHLGRTELSAQLHALPSAAYEALLRRSDEYWQPAGLAELRTLFDMPGVASATFRAALRATLARPLTQDHTPHLAAPQHGCHADWRADGTLLLEQGGTWFLLLAFHLRSLVPRAQERRVFGIDLNDDPALCIVDAARTVQMIGGPHLLLETLRREHVTGESGAALSRTEIQLVRTLGYAAGRAPLEAALYHLLGEAQAVGVERLDLRTLQPRFLARSRERATLDWAMAWLPQALYRAGVKLYRVPAAHTTRACHRHPTQTGTVHGRVFHCPRCGEAQHRDVNAALNVLARTLHARHVEALA

SEQ ID NO: 1306 - protein, 354 aa, unidentified
  REGION 1..354: note = Table 20
MAHQDPDRYVTRLDHTNTTHVHDLIKTGRLKPSRMTLRGWYGATIYRPVNPITAHSDHQLRVGGVPLRAQVYALPSAPYEAVVRASPEYRQPHDMADLVEAFNRPGQDPAQFRGLLRASLIHPVPIDQTPHLASTDHGCQATWLPGETLFVKQDGLWFVAMAFQLKVHVGRVHARERVPFGIDVNADPMLCMVDARGDVRMVGHPHGLLDALRRDHCGQVPGGTLTLQEVRVLRALAYAAGRGPLEAALTHLLVKANVIGVERLTTRGMQTHFVADSREQASFDWLFAWLPQAAYRAGVRVERVDPEHTSQICHPHVRGRLQGREFHCPECGTPQHRDVNAASNVLARIRHTRR

SEQ ID NO: 1307 - protein, 308 aa, unidentified
  REGION 1..308: note = Table 20
MIPLEPLSDQMVKVMDYQLATDLYRLPSSEYSALVRSAPAFRQPPYLTKILQATFQHHADYVWIRSPESKHQAHLPLLSLPNEVIFTATWDPERWALLERHGEWFLVLWFDLLCTAGSLVGTAEVALDLGASPLVCVITSDGLVETVEKQVPVSLSQFASVFQQDPGLRERVEFELQRAELLRFTLFLVSHAVLICAEDLTYRDMDRNFVRWARKTGLLDWHESWLHNRLATAGIPFEKVDSRGTSQRCSACQYPHGQRDRSEFRCPKCGHSMDAHENAARNILQRGSLKGRQWQRAHAKTRLRQGVA

SEQ ID NO: 1308 - protein, 369 aa, unidentified
  REGION 1..369: note = Table 20
MPIIHAILPIDQLSYPTIDRLFQDEQLTRRPSQFLQHNRARGILYHTPPCSVTARNDTTLQVGEVTLQVALYRLPTAEQQALIAASPAYHQYVGLHDLSVHLRSPATSQGRAISAIEAVVERGRHPARHASLTLPDALFQARWQTDRLILQQLAGQWFVVLHFDFRCTRLDLITRRTEVGLDLGARPLIYACTADDDQFTTESCHVPIRGLRGTLLEQVQESPDLLTMLDRITTAWHRRELQRILDRLCREAAVVYAEDLSYDDMFGPYVNGARRNGVLDFHEAWLHNRLQTVGIPMEKIDPRGTSRRCSFCKGHPYGQRHGSTFTCRHCKCTVNAHWNAARNVLREGREKSVIWHSKPGTVLPTMLPA

SEQ ID NO: 1309 - protein, 354 aa, unidentified
  REGION 1..354: note = Table 20
MRTVHHILQLKRHSYPTLQALIRSGQLKGNPKLRLQHDRASGLLYEAKPELLEALSDSTLLYGDVALHTELYRLPSSEYAALVRQSPRFQQHPGLEELSVALRSPTLSVTEAARLLESAVAQEPQPDAQPRLVQPDSLFSAVWDRERLVLQRSGDDWFLVLFFQVQATQPDLFTHRLEVSLDLGSKPLVYASTSEERAHRTQPCETDLIWQVRSRLSPQARRLLDRIVFSWHQAQLQRVSDFLCRHAFYVYAEDLRYKDMKPTFVQRSRRNGVLDFHECWMHTRLQLAGIGLEKVNPRHTSLRCSYCPGHPFGHRDGDIFFCPTCRRRMNAHRNATRNIMRLGMVKAKRWRRAA

SEQ ID NO: 1310 - protein, 363 aa, unidentified
  REGION 1..363: note = Table 20
MIFTHNHRIDLNDKKVVQSLITSGQLVPTNERVSGLTGQVYAPTPGLAAQLRPLDHRTLAVGSQRLTVELHRMPEAELVALQDHPNATDFRQYDVAHLLPLLLRSRTKADEKTFVEGIIAALQVGPQRRVPALVDDIWSGSTWLPEASRVVVEKGLPFLMLAFDVPVSRPDDVDTVRCAAGLDIGLSPVTTVATASGYVNSGGSVYPVTRAEYGAICRAAVKLGIDSEVVKQVLLLLTYAAARAHLEFVTLCLQELASVVHVERIDYNSFSSDFAARGRELATIDFLSGWLAQRMHACQIAVHRVEPGYTSQVCSYCHLLGTRDGAMFTCGQCRTEVDAHANAARVILASGMASTLRRLHGRY

SEQ ID NO: 1311 - protein, 359 aa, unidentified
  REGION 1..359: note = Table 20
MTSHNLRIHRDANTTLDSMIQQGILLPTNEKISGVSGQVYRIADGVDLSALDHFHLRVAEKIIPVNLYALPPEEYAGLLAAAPEFSQYRYAHLATALLRTMTTEQQSQWLKDVASGIEEGLRVDQTPRLLQLPTHPARWQPEGTRLSRAGCGWLLTLTFDDPQVDIIEGLDRSAAGVDVGLHHLTTTAFASGAVHQAPGVVDVSRLSPEQIALPISQREFERHLQLLQHAAARTSFQHLMLTLLSSASVVYLEDLRYDDMAEVFKERSRTLGIRDWMMGWLPQRLHAHNIPLERVRPDLTSRFCSTTHCRGERNGRDFLDGNGRMVDADLNAARNLLQIGLAQRIARELLTKRNIRKGN

SEQ ID NO: 1312 - protein, 367 aa, unidentified
  REGION 1..367: note = Table 20
MFNVTYNLVVRRESTPLIRNLIHDGLLSRTQGEYRQGASGPLYAPSSALLRGGNLHALSDSEFRFGPAILSCQAYTLPPEEYRGLMLASPAFSQFDVQPLHAELCTGWPEEHLFHQTHPDWNQRLIEAVRRGPRLNLDPVLVSPTVQAATWLPEETRLSEKKTGWMLSLGFAVPDPVQLNGVTRSAAGIDLGLRRLTVAVHESGLIHAAPGIPRTGLTSTEAGCQLPNPADQQQAQWLNLGLQYAAARTQLHDFLTVLLSSASSVGYEDLDYDQMSPHFQQRSRELGLRDFSYVWLPKRLKQAGIQYEKLPARHTSQICSLTHLRGTRGTRQRDFLNGNNEWVDADENAARNIMRLHLASQIWGKPK

SEQ ID NO: 1313 - protein, 366 aa, unidentified
  REGION 1..366: note = Table 20
MHITYNLRILRDADSALSTLVNHRDLLPCPTEKIQGANGTVYRPSPSLNGAIEAANDLQFRLGETVINCQTYALPPEEYAGLLLKSPGFRQHKLAHLLPPLTTQMDAAAREKWLNDLAERLQVPAQIDNEAHLLPTRPSHVATWLPGDTRLIKTATGWFLCLAFEVSPPPVRYHIKQAVVGIDIGLRTLAVAVHKESLQHHAAGIADLQVTQSDLKRYLPNRPDLWQGMQRTCVMLQHAAAREELARMLDLIVSGASLVGFEKLNFGGDMCPLFTRRARELGLRDFLKVWLPRRLQMHRIEYIEVPSDLTSRLCNVTGRLGQRSKTDVSVLTNGNGEVVAADANAAKNIGEIALVRSWQRRIEKGA

SEQ ID NO: 1314 - protein, 367 aa, unidentified
  REGION 1..367: note = Table 20
MLATYNLPILGHPTAHMQRLIRTGALRPAAESPSGCRGPAYTLRTPDDWQIIDDFGAELAGTLLQVNLFRLPTAAYRALLFASPRFRQHDVVALAQALRADDPDRHAWWAQLFEAVRAGPRLTRGLAHVQSPLLQHAVWFPDRTVFSRTQGGGWTVTLAFEVHTQLSDDAPRDTAVGIDVGVRPLAACAGHEHLALYATKLLRPSDRRLETAFRDDRSRHLARRLHHLLIYGEARRQWETLMADQLPRASVVCVEQLTLPDMQSRFRWASTELGIADFLLSWLPQTCYEVGVPVVRVDPAYTSLRCARCYRWGDRPGHGGVFVCPVHGPVHAHVNAAQVIQRLGLAELMAEARRTAPWTREGREAKA

SEQ ID NO: 1315 - protein, 346 aa, unidentified
  REGION 1..346: note = Table 20
MYNKKNSNSNINTYNVRVLRPGYADIGQAMEQNQFKRAEGYRSGGGQGQLWQLAGGQATDQAALDDRSFAMGQTVIQANIHQLPGEAFAALVTGSHGQFERQRDISRLLTLVGMGAGAVVGAAAQTPADALSRLSLPSCVWKPSETRLIQQGHDWLLSLCFETAGGWTPQGRRAAAGVDIGLQPLATAVIGDRFLATQGPDENQVRQMNGFRPDVVEVVESLLAGQGLDLLTDELIRSAGYVAVEALTFSGLREKDSFKRFVSRARASAVVDWHQCWLPQQLRNAGIPFTRVDPRYTSQQCQCGSRMTERDGSHMHCYACGWEGDAHRNAALNICRLGQSRLRRAS

SEQ ID NO: 1316 - protein, 361 aa, unidentified
  REGION 1..361: note = Table 20
MEKARQNGEKVHITCNIRVARASYPQLEGALGTGLRQDYGRISGLPRGTVYIPAEPLLIDQQGLDDHTLQLGPLVVGAQLGHLPSVGQAAVVAASPAYRQFAVAPLLAPLRGALGPAAQRRWWGELEAIAARGAQPGLPLQTATPGTAPARWLRGETRLVQSGRHWFAALAFELPARIRPPGERPGAGIDIGLATLATAALGETAATASRAAAPAWTHGPVGLRSPAHRVLYDALQYAAARASLEQLGERLIADAGFVATEELDLSSFQSRFPQRARRLAVIDWCWSTLPQMLHAHTIPLVRVDPRGSSRECHACRSRAPGQRQRRRFACHNPACGVVMDADLNAARVIGQRGAAALHRGA

SEQ ID NO: 1317 - protein, 362 aa, unidentified
  REGION 1..362: note = Table 20
MSLKNRNITYHVLPVARSAYPYLRQAVAQRQLQPSDEQLRVMQKGQVYRPVSALLSAQTLVHDRQLQLGDLTISGDFYRLPEQEYCSIITASNGYSQYPDIKPLMTALLAPMTQAEEAAWLAGVRAAAAQGRQPSTAVDLIDDIWVPTTWLRDRTRLVLRGKEWFVVLYGQAPSGSTPAGHGVIGVDIGLRPLATAAWGQRHETTWDIAQPTVPAGESAEVQALARILNYTAARAALEALMVPVLAEAGTLVLEQLDYGGFRNNFPNAARRHAVADWHQSWLPQRAHARGIRVVRVPAAFTSQLCSQCPGATRGTRRGRVFTCPRGHALDAHLNAARNLVRRYRGELLRAQQLRARAAAGVP

SEQ ID NO: 1318 - protein, 358 aa, unidentified
  REGION 1..358: note = Table 20
MFTPHLERLEMDQKRQRRHVLRVDRRSYAQLQAAVQQGLLLPCDTVVGSMRNGTVYRPAPWSLQHQQLLDDDRLQLGDLVIQGAMTHVPAPEFRALVQASPTYMTYPGLAPLVQQLRDQTPAFKDDLWQAGLRAAVAAGRVTVGVNGTVVGPGPAYRWLPQETRLTQHLGHWFVLLAFEAEATPRTTSTLVAGVDVGLNPLATAVCRDVAVAGIRRADLRGLRIEERLLGEHLLYAAARGALCDLTKWLAERAGVVVVEHLDLTTFASRYPQRSREHALTDWQMSWLPQELHARGIRLARVDPARTSQMCSVCPSFTLGTRVGRVFECPNGHQIDAHINAAQNIIRRWWATRRRAHQA

SEQ ID NO: 1319 - protein, 348 aa, unidentified
  REGION 1..348: note = Table 20
MLITRHNIRIANRQAWQLDELTRTGWLIAEDRPISGMTGGQVYRPARVTQRALDDNQLLIGEVSLQTELHRLPQAEYWALVCGSPGYTIYPGTEERTDALLSPLTPREQQAWLGDLVESVRAGRVPAAGRTVTVVWQPEGTRLVRLGTLWFASLQFAAPQPRKPARINRVHLGIDIGLRPLAVAVSARDTFCPGYVQRLDDLDKDLADLPLPLLEDVRAELGRVQYAVARQSLHGFTGQIMEFACSVTVERLNLTTFESDFVAQGRREAIIDWHQSWLPQALRVAGLAPLLRVEPYGTSQYCSLCRRKGQRDRHRFACPRCGVLDAHVNAGRNILNRGWAVRRSKARN

SEQ ID NO: 1320 - protein, 362 aa, unidentified
  REGION 1..362: note = Table 20
MQKQSTHNLRVSVDQSAQLRELVRTGWMRQTTEPVSGLAGGRVYVPNAAALTRQCGWHDERLQLGDVRLQTQLYRLPTLEQTALVQASPGYAQHQDERLLTQGLLGQLGPAQQRTWVRQVIQTTCQGRRALPVVLGGGGVRWLQAGTRLVELEGLWFASLTFELPTVPRRAGGIAIGIDVGLSPLVTAAGPGALVQLAPPALPDRLRWATFAAHLDLLPPTAQRELQGRIQRLHYAAARQQLDQMTAWLLGQAACVGVERLDWRTFSTDFPERGREMAMVDWLQSWLPQRLYAAGVRLRRVAPYGTSQGCHLCGRPGARTNHQFVCLSGCGVMDAHENAAHNVRHRAWGGRPYARRKRQRRR

SEQ ID NO: 1321 - protein, 358 aa, unidentified
  REGION 1..358: note = Table 20
MQTTTTRYNVRVADADASQLNSLVHSGGLLRQHQPISGMTGGEVYVPEAAALAGQHVIHDGLLQLGNTTLAAELHRLPVQEHALLVAGSPGYMEYPQQQGLAHGLLRPMNPAAQKTWVNRLVASTVQGRAPGVPGLVAPPPGTWRPEETRLVCQGGLWFLSLAFELDAVSRPQRLGLMGVDVGLAPLAVAAGHGGQMLSTRPLHLLDQAGRHALNSQLDNLPPSQRAEVQTRYAALVYGAAQAELATLTTQLIGCADTVAVEALRFGTFRSNFVERARELAVADWVQGVLPQRIYAAGGRLYRVRPAHTSSRCHRCQQTGQRAGAVFTCARCGVLNAHHNAALNIRRRAWRVIRRGRR

SEQ ID NO: 1322 - protein, 361 aa, unidentified
  REGION 1..361: note = Table 20
MSQSQSQSQSRRAEPERQIIQIARLSYTALYELIRRRLLLRIDRLPQGQDPLTGVRSRTSYQLSAPDAFQLLDDTTARIGPVEITAAYSHLPSPAYQALTQASDAFRQYVGLPELLAAARTPGQTPAQVRRLIEAAVQQGRQSGQPGLYVPSQQFQSEWIPDEILVHQTETEFFLSLAFRTRFQRLSRARVTNRVGLDLGLDPLSVAAHENGALHTFRPTALAIPALNSLTPEARQLLNQLLYASGRQDAEQVLAYLTHHARHVYAEHLTHRGMSLRFVQRARVQAVHDFHFSWLSQSLNVAGIGFTRVDPAGTSTTCPQPDCRHRHADNRRGRAFLCRACGYQGDADAVGASNVLTRGIG

SEQ ID NO: 1323 - protein, 393 aa, unidentified
  REGION 1..393: note = Table 20
MSRRLHHDQHNIQISTSSYHAIRKLIAEGLLIPAERAPEVDNPVKGINGAQLYVLAPDCEFVIRSDVECTMGGVPIRAKLYALPSPAYHAVVRANPFTQYPGLDELRTTIRSSATGAREGLRRAVQQGRQPDQRVVVAAESQQFVASWLAQHTLVQIKSLPTRPAPDMFLTLAFHTSFTGVFPPRREAVMGLDVGLQPHTVVARDDGRVKHFHLSPLAQLPTQCLPSAERELLEVLQYAQGRADFEEVVAYLIGHASHIYAEALEHRGMSPRYIVRSRRLALQDAFYSHLSQYANAAGIPFTRVDARHSSTTCPVPVCGAQGERARDVFRCPACGLQRNAHEVGALNVLARGLAGGVHLRTGQWRISDQRGESAQDDFAEWANAYSFPGLRRR

SEQ ID NO: 1324 - protein, 351 aa, unidentified
  REGION 1..351: note = Table 20
MLLSTDQHHVKVHRKSYSSINALIGKGFFVPVAKDDTIKGICPTATYRLQDKADIALLNDRTLTINGAPVNGCYAHVPSPAHNALVAGSPTYTAYPGLDQLLTSARTPTTYPDYLTALINEIVKEGAQPTRAAPMTTPSQQFRAQWLPDQTLLHLTAGGDYYCTLSFDVRFTRVSRVATPCAVGLDVGLSPIAALHYDDGRPQVFAATPLVRPDMQTLSCKGQALLDDITYASGRQDAEQVVRHLVYSASEVFAEHLRLGDMHRRYVFTSRDRALQDFHQSWLPQYLWAAKIPFFRVASGYTSTECPKCRHTSPNNRCRDHFRCQQCGFGGDAHLVAASNILRRGRRGKRR

SEQ ID NO: 1325 - protein, 366 aa, unidentified
  REGION 1..366: note = Table 20
MNRRHQPDRHTTQISRNSYDSCERLVRCGDLMVKRRPRSEEADPLKGVRAEETYTLSLNTRFAVLHDGAVRIGGELIHAQLSCLPTIAYRALVTGAPGFTQYNGIQELYQRVRLGQISERTLPTELERIVRQGRRPDPVPRMVTRPRTLQSRWLAQEVYLFKTQAGDWFLSLSFRTPVQPLAPNPSRRPFGLDLGLDPVTVISDGRTDQFFTLTDLPFLRRDALSPDARALYDQLTYASGRKDLDQVIGVLLREASAVYAEKLSHRGMSCGFIHGGRRRAVHDYHFSWLPQHANAVRLPFRRPGAAWSSQTCSVCGERRQCSRKGDRFVCLAASCQSSMDAHANAAREMLQRGLGHHQERSFPTWE

SEQ ID NO: 1326 - protein, 359 aa, unidentified
  REGION 1..359: note = Table 20
MARNDPDLHWVQIRHSSYSRLGPLVQAGALQPYLGRLSGFPGAQIWRVDSPLTVQSDHQCSIAGVPLQAALHHQPSHAYCAMVAASPHFTQYAGTGELSRLLRSHDDWDPGGFAHALEATVRQGRVPLPRPALAVPPTTYLTYWLPERSFVSRLSNGHYMLGLSYTVRYVPPPGLARRSAVGLDLGIDPLTVAHTDTGATRYFRPTSLRHVRQLPWLSADAQMLLRDLIYASGRLDAEGIVAWLNFHAHTVYAERINHMGMSTHWIHSGRDRAIHDHHFSALSQYLFASGVDFRRVAPHHTSTLCAPCFEHQGRVVYGLRAGDRFRCPACGADLDAHANAAHNVLLRGQMLPPRGRAAA

SEQ ID NO: 1327 - protein, 360 aa, unidentified
  REGION 1..360: note = Table 20
MARKDPDLNWVPIKATSYSTIDQLFRQNLLKPSNATLSGPKGICTLQLSSDADLQVTSDQSITIAGQELIADVYRQPTHAYRALVEASPAFRQYPDLEHLYLLVRQKPYWNQQEVLEELARLTRAGRQPLREPQLVVTPTTYIATWQPAETYLRQLLNGHWFLGLTYRVTYRPAQQALHKVKVGLDLGMAPRTAVYTSTGESKLFEPTDIVPASYLVESGRLPQNQKELLTQLLYTSGREDAEKVVAWLNYYANRVTAEKLTHNRMNDRFIFVGRDHAIHDHHFSALSQYLNASRMDFLRVDPARTSQECGHCLEKTGKVVRGHRWRQIFTCPVCGVTRNAHENAAHMVLLRGEQRRRAG

SEQ ID NO: 1328 - protein, 360 aa, unidentified
  REGION 1..360: note = Table 20
MPYTTTDHHWMKILRPSYSTISDLIDQNHLIACRANQCGPRGDLTYQLSPASRIQVINDELLTIAGQEIMAQLNHQPTTAYRAMVLASPGFEQYPDIDVLLKAARHPEPDWSPERFVALLESRVSRGRQPDPRPRLVKEPTTYKSIWRPEQTYLRQNLKGDWLLGLTCQSQYRSGRTGQNKVAVGLDVGLDPVAYAYTAAGQSQEFKPTSLSHLNAVKVMSLTPGARKLHEHLTYASGRLDTEAVIAWLNYHASHVFSEKLSHKGMNRNFIFDARDRAIHDYHFSSLSQYMHTAQHLFKRLPARFTSTYCPCCRERERVLYKGQRRGDSFHCDRCGHRGNAHQVGARNVLLAGIERYGAG

SEQ ID NO: 1329 - protein, 352 aa, unidentified
  REGION 1..352: note = Table 20
MVYNSNVRISRSSYALLRGLVDCYGHQVSSDLLTRCGHSDKVYRIDAPVTASTRSSLTVGGVTIQCDISRLTPPEQQALPGKPALSFPKTDGEFAALAYCKGQKFADMLRSTLQELRTDTACWPLPIDIKFQSDHIYIYSAQRKIGNATDWFLALDFGVQLRDQPEPLLTGTLGIDTGFTTPFVVAPTSCVADVRTFAVPEPLAQWVQQADLRDTDQWDLARQAFYYASLPAFRFCAQAATVRIEDLSFGRHMSQEYVRRARLCGLTDGIMAALPVYLALQGTEVVRVPPVGTSTTCHICRQPGQRRGDRFTCREHGEFNAHANAAMLIRDGGVLREWGQWPANGTQATGRS

SEQ ID NO: 1330 - protein, 588 aa, unidentified
  REGION 1..588: note = Table 20
MLDDALRRQTVAYGRALEAARPHAIARLRIAARLARTTDKDTRAALIIEDRAAQREIANAARRAATTAYTSSIMADGLAKHVKDTVQSWIGWREKFRAERPGRIARALDRLREVEADPAATVEALQKRRPRAAITVEHVMTSATRRLERERERRPPAYPAGPRIAAPPEDRAALLGELALTARKEDEDRLRDRLATDPKIGRTPLSWSRASGDLKRGVSLIRGDGGRIDAFLPGVLPDRARRAAKVAWTGDKTLVGIKSERTMPRSIGLRVPLSFPRHAWQYLDDWTPRTAKLVAFPAERGWRYELHVAFARRVETVQPNPEQWIGLDRGVANVVAVADASGAEGYLSGNRLAPVERRLRNQRERDQQRGRARAMRATKRAFRDAARNEVNRIAKHVARLAVRRGAMVAAEDLRAFARGDARTLSRAQYAALLAAVERRLELAGYRPVAAKGKRVWQVQPAYTSTTCPECRKVDAASRIDRDHFVCTACGHAADADLNAARNIARKGHETHGIARRRKAARRGGEGPPASAGGVVAAPASAAGATVPRGGANRPKAGGDADGARTPPRARSASPAVFEAGSEGKNAAA

SEQ ID NO: 1331 - protein, 377 aa, unidentified
  REGION 1..377: note = Table 20
RYRTKRRASKYALKCSLPPRVIDNYTLKLPVFGTIRACMPDQVLENEPRSYEFVPNRRGGYMLYVSCRVEVPAPRAAGMTCKGIDRGSAEPTVVATVSPDGRPLAADSYDTVSAFRENRAWNQKMRSRASKMNKRSNRYRRHLQRLNQKMRKVLNKRTYAECIAAKHIVCDGRPGSVVFEKLRLSRMTSKGGAHKRSMNREMRFVRHHIIEQRIRNRAEVEGVQLLYVDPRYTSQTCSRCGHADKKSRVTRDMFKCTACNYIQQADVNAAIVIGRRGLPSSDHAIAVPPEAGTPFVRRQLDARRGIFAGPNGTRESPLKAGRRKTSEDAIRGRRVMNSHRFLITPTTSQRRGGRASYSTTSSAMKYARSAPSGPRRS

SEQ ID NO: 1332 - protein, 229 aa, unidentified
  REGION 1..229: note = Table 20
MPPPCAHTARREVGADPVGYGPADSWMRLTALNGVAVTGIDPGQVFTDYCTTFTEDGMYDELLHPARSVQRFIRFSARQRAVARVAEKHRKWRTNRRDRRAGQHVVFFGVAARVAARGRPPIPTKAVVWQLACRTVIMVPEVFTTICCPGCGQRTQPGGEQHGHRNRVCNSNLPHGVCPIQAAANGGNQGLVNRSDGTNMGMRGVCAVCGVEDIIPGYPWMGPEGDGDE

SEQ ID NO: 1333 - protein, 898 aa, unidentified
  REGION 1..898: note = Table 20
MSVKKDRSLLSYMMEATGDKLLYNDTRRNPIAGESNDEAHGDAKSFSFLVEKQSAEKEKEGVTDQEHNAICKFFEDLNDIRFLTWNELSRSVGLWNELDAVTFGKFLKNTGVGTEKSTQQYRLKAYIHQIAKSVIAKSKGQYAHINQSKAPWWIAYDLEPKISSYLALMKMAGGDQKKNIFDTWVSDTDEDGTVSLEIFNSVIKAELKKWDEKKAKRLLIEKALARLPKLKNFEIDSVGKIKQLKGYEGVKEHNIFIRQLNVYLGGYLGGCTDHALKELSKETGQNFKRVKDFRKFLAQKELPNKLDRDELEKKWKDFRSGPIKTLKEIKKYPSPPTFRPSTYYRDKSKDNVLQDAILQYQHLLNELRKKKFDETRATEKILRQDPKAITLEMLKEQFLELKNEENSNQIISHKKRILRPIIFENTLDALESSLEKESKYLAAKIQNIVSFSNLNATRMRQLASHMQKHLRLELNSRNYKDDYRIFQLDGEIKKICGDLQMSLLKTRPYKQFSFQFKNFDQADIFPQIAADGLGNYKFNLVIQSGNDDNKMTENSIQYYEFKDDGEVVQATRDLRAPIINLPVHFSKRIGRKFFFNHSIGITKKVLDRNDLMTTKLGTPNFFIRYKVNACPEIRGSFAMVKRRFANKLLQYPEKIKTQEGRADYLVKQTRYLIGLDRGENTLLCAAVYDLDDMKLLERIPLGAGFKSKIDELKKDQAQARSEAPNPIKIRRIDQKISGTVKSFVDNAMADLVALALKYSIPARKDKRYCSLVFEFIDSKLKRQGTNAYVELTQMYKMIKTIRDNRNFYELPFHIFEIHPAYTSQICRKCGLIDRKSRNGEQFFCTGCGHRDNADLQASENILIKWLAYKHWVIKDMQKEMPNKKEYWQKFTKEKSWAA

SEQ ID NO: 1334 - protein, 480 aa, unidentified
  REGION 1..480: note = Table 20
MKLLPPGKVSKPPRGYQQTNLIGYAKAVVEKKDTMFHGHVWVPTEEKNRPEELPLQFGTRQGREYFWHFERGIISKDEWLLGGDGRILRIMPPGNEQQAQFFLTLTFTRQAPPPVDELSTDRLIGIDRGEKIPAAYAMIDSNGKSLFNKSRYREFNESMTRWSEAFDKWKKGASGQLPSFDWNPEPGDGFGVICPEYLAQQEAFNALKRKLQQTKGGYTNSLRSKERNRAKALGGEVTRHLLHLSAEHKAPLVLENLGSGIVTRGGKGIIMSRMQYERILVALEQRLSETGLYDLPSQPKFRKQSNRFLKLAGPAYTSSTCSDCGQVHSTGFYEKIASTLCFSEDSWSVTLPDGSARKLPEKYEYFVRGKGWAEKTVDGRIREIFGSKTLETLSATARSRLVTHLRAYWIPYRPTQAQFQCLACGHQANADLQASLNIARKFLFKQETKSKSKEDSEKARRTEMSKWEKWYREKVESEWA

SEQ ID NO: 1335 - protein, 1001 aa, unidentified
  REGION 1..1001: note = Table 20
MKTVKVKIRAGTSDEARMSREAVSKKAQRPELAGDRLSLFEKFMSDVHDMREELYKRLYEQYSKNPLTIEQYAVKVDHGAAHGRKSKPLTRKDSSFVSAPFACLECRQQMIVAERDRQGKSGKPKKEYVGRCPDATHLMEIVLKKRKVETDSSGTGSPDENELYEPGKYSSQDLYNKYVAREFANKGAERGLSKVAPGWVGIVYEAAGAEAAKSVCSFLEKRRTAFNENRGTHSDNLDKQTTLGDTARKVSEPAFEEELPKEILPNRRCIEDANDAIARINMWTNEKMRQKHEVPETLAPMLKRLKGFPSFPVAERSAILRLDFAGEFAKYRDETRAEIASGEGAWARFSPDDVRVVAAAHLPYSHPLRCGVEGRNAPHAGASRPIGGRGRNVRTMVGEHLAWLIEQSTHESNGTGAGGVVETRPFDRAWKRGLSGKTVFEGIVDHGMGVVARVWKHISETVSGRDDIQSRRRAVDWLRALANLAHEGLRRDDFAGYTRKRLLFDKRASDLKAVGTIRENDRVVFEILGFSPQGAKPKRGAALLRGKRPSEGGRACDRYDYFLGLDYRAGQARRGVRFRFNSKDGEFEGLFQDTKTKSSRWVPTVVNADQVLLLPLEFGSRQHGNFIDPLDFAFEDGSWHLNNARLIREADNGVPAYFVALTYSRRLMPARDAVPDRRKAKAIVGVDRGEKIPVVAAICDGEGRLIEYRRIGEGHFQKQLEIQREKEESQRATGAYRASLRNRAANIADATVKEAAAVLFALAHEREALVVLEDLSRGFGRSGRRTLMALRQYTRLEDALVSKLRYEGLFTADTLLTNCAHGPVAKVTAPYTSTTCSGCGEPHASANGSFYFENLIREDSGFRTRLTNGKEVSLDFEYQYWAREERKMRTANVSERLREILGDREANDVAATTREKAQSLLRRALSPRVRQADYRCPNCGHEANADEQAALNIARRWLFVNGSPEHNGYKKRRDSTEGVETGFVDAWKAFYERMLKTEWAT

SEQ ID NO: 1336 - protein, 986 aa, unidentified
  REGION 1..986: note = Table 20
MEKRINKIRKKLSADNATKPVSRSGPMKTLLVRVMTDDLKKRLEKRRKKPEVMPQVISNNAANNLRMLLDDYTKMKEAILQVYWQEFKDDHVGLMCKFAQPASKKIDQNKLKPEMDEKGNLTTAGFACSQCGQPLFVYKLEQVSEKGKAYTNYFGRCNVAEHEKLILLAQLKPEKDSDEAVTYSLGKFGQRALDFYSIHVTKESTHPVKPLAQIAGNRYASGPVGKALSDACMGTIASFLSKYQDIIIEHQKVVKGNQKRLESLRELAGKENLEYPSVTLPPQPHTKEGVDAYNEVIARVRMWVNLNLWQKLKLSRDDAKPLLRLKGFPSFPVVERRENEVDWWNTINEVKKLIDAKRDMGRVFWSGVTAEKRNTILEGYNYLPNENDHKKREGSLENPKKPAKRQFGDLLLYLEKKYAGDWGKVFDEAWERIDKKIAGLTSHIEREEARNAEDAQSKAVLTDWLRAKASFVLERLKEMDEKEFYACEIQLQKWYGDLRGNPFAVEAENRVVDISGFSIGSDGHSIQYRNLLAWKYLENGKREFYLLMNYGKKGRIRFTDGTDIKKSGKWQGLLYGGGKAKVIDLTFDPDDEQLIILPLAFGTRQGREFIWNDLLSLETGLIKLANGRVIEKTIYNKKIGRDEPALFVALTFERREVVDPSNIKPVNLIGVDRGENIPAVIALTDPEGCPLPEFKDSSGGPTDILRIGEGYKEKQRAIQAAKEVEQRRAGGYSRKFASKSRNLADDMVRNSARDLFYHAVTHDAVLVFENLSRGFGRQGKRTFMTERQYTKMEDWLTAKLAYEGLTSKTYLSKTLAQYTSKTCSNCGFTITTADYDGMLVRLKKTSDGWATTLNNKELKAEGQITYYNRYKRQTVEKELSAELDRLSEESGNNDISKWTKGRRDEALFLLKKRFSHRPVQEQFVCLDCGHEVHADEQAALNIARSWLFLNSNSTEFKSYKSGKQPFVGAWQAFYKRRLKEVWKPNA

SEQ ID NO: 1337 - protein, 503 aa, unidentified
  REGION 1..503: note = Table 20
MTYLTYTFKLLQTKGKKGKMLHEAMRRWSVAQTEFLDSCRNRVEELTAACVKETERGQRTDNGALKKWVAANLHEMNSFQQLENSVGASLEIHLAAQLHSFLELRRVQQNTGFPTGRNYADADFDAYVDSLTTRAWVDPEDTSEEQTELEYATIAGKVQGYRPKHTYTPIEFCRYDSANKHRNYKLLKSEDGTLFALLYLLPADTRGSRPTKGDLREIVSGHIQKSISNKAALFPLATSKWVLRKLEHYKPRPARLVYRVGDFYLHVPVDVPEAEQHEALTLMGVDLGKNRTASIGLTTLDGKDVIFKRSFRTLHASKVRDITAKTAKAQAKGKYVYRKYRRTNEEAAHTTANEILAWARRYKSKIVLEDLSSLMKANVAPGKSSFNKGRKSNIYASIREALEYKARIQGIEVVFVHPGQTSQTCPKCGCIDKNNRLKHNPISGRISRESFQCISCGYSDGDADAVAAVNIARKWVFTQCRIEQRKQGSRLSWPDFAREICSG

SEQ ID NO: 1338 - protein, 467 aa, unidentified
  REGION 1..467: note = Table 20
MATQFLTCKFKLHNVSTRKRRIIMHAMREYTIAYQNLLDWAQENLSLVIKEGQYKDSYSAMSIRKLLPRPDAQIHSSMKDSIMQDVASNLASYLELAKQDERTGWPIAILQDNDVMDDSLEHFAHVGSDIDDYNESRDSLLRIARSKHLPLSFARPDGATKNRNFSLLRNTEKYQYLALLYLLPGRHELCQPLGAKQGNLTRVDTGDLFESNTRTAILCPIEIGRNGWQYSKFIEPAQNGEAKIKSAKLTLEEGEFYLHVAFEFECEERYKPRAYLGIDSGILITAAYALVDSKGKVLDLGHYNDKLRELQIKHSRIRERKGRHGQRVTWRDYKTQAYDNILHILANRIVMCAKENKAQIVIEDLENIRVQGSRVKSRFRKFAHILEYKTALHGVPMRETFAQYSSIICHVCGEDMERDDRDVYCPSCGHKDHSDDNAAVNIARRALYRKKDWEKRGGYRAFHRSFS

SEQ ID NO: 1339 - protein, 504 aa, unidentified
  REGION 1..504: note = Table 20
METQFLTAVFKIHNPSSWRKKVLDKTIREYTANVKSLLFWAEANLEHLEQNGVNKRGKYTARTLQQMLPPPAQATMASALKAGLVSNVAMMLASYLSLKNSDSQDTTGFPKILEKNGLGYSLALDRFTKLYLDNDVTTSKEEAERVEDVARAELMRLSKNKSLPIHFCRSRDFTILVDIKQQRLFLYLKLTLSGDPDNLQTNIDGENLVDISTGEIFTKRSGVGVLFPLEVGKKGWLYDQFIVPSVKQRAHPKAAKLIRKNDEYFLHVSFAFDCPDPYEPESYLGVDRGVFFTASYAVVDQTGAVIDKDRQPDGYRDAKITAGKRVQDKQRKGQRVTAKDYRGKYLDSFLHIITNRLVEVALQHQSMIVMENLNIRIRGKFYKSAWKKLHWIVEYKAKLAGVPIKKGGVWAAYTSKLCIHCGEIADRPERDTVVCSYCGHTEHADEAAAVNIARRAMYRKKEWGGTDKKPGDWRAFHRSFANEAGFVTKIDLRQEKRLEQLSLF

SEQ ID NO: 1340 - protein, 481 aa, unidentified
  REGION 1..481: note = Table 20
MASQFLTCAFKLHNPSAWRRAVLDHICEEYTYAMRDLLAGCEESGIVLKDAARKANKQGEKQNKWTGDSVACVLPRSGELQVDVVSTLKEAMISNVAAMLASHYALETIGQAGFPTARDPSPEGLMEAENDLALVGEDLADYERARNNVTRRSRGDVMPVHIIRSRDVRILADTERGRFFAWFRTLPVNHPLGHKTIIDQGNLVDVNTGAPFAYAGDGAILLPLEVGVRQGEWHWQYTKFLQPILQGQASIKSAQLIRKGLAGKREYFLNVAFEFDCPKPYEPESYLGIDRGILYTVAYAVVDKRGAILLKEHQEDGLRALQIAAGKYIRGRQRRGKPVNVTHYRGKQREEVLHKLANRIIAVALECQAGIVLEDLNIQVRGKFVKSSWAKLESILIYKCTLAGVPFVCRVFAAKSSQICIWCGELVERQDRVLTCHHCGAIEHSDDAAGVNIARRAMYRKKDWEKQGGYRAFHRSFANVR

SEQ ID NO: 1341 - protein, 581 aa, unidentified
  REGION 1..581: note = Table 20
MSEPATYIPKPPVQYLTAVFELRPTRRKAAALERVRATAEAIFWNQLERHRATAMELTTADRKTRRAEAWRIEAEAARQATSAGLVESVAAGIARDIGQAIGSFVGLVADGHEAAWPERPKLVTPTDRPAALLQLASSTSIEDERHARDELARIARGLPIRPFVLVRSRDCQLVRDGTGRIAAILNVLRAKDGRSREANINGGFDATTGEIVNTSKRKSVLVVPVGCSRWHENKFLSGKARLKSALILRRAERWFMCAQFEFTLRPVAPSGRTLGIDRGCVHPAVAAVVEESGAVLAVPQPAGTEIGAAIELAEQRRRREQRRRGWSTLRHVRAVDDGLHRLANEIVALAKRHTAEVVFERLGELKRSITAPRAKGVRKGGWRKVLKKAQLGKLEQLLAYKLPMAGLATPRDVLAAGTSQTCAACGHREAANRADRDTFTCKACGYSSHADSNAAIIIARRGVMARSRIPKGARLDALHMNMVEGLRARDDGGLGPLASCRRVVAAHASASVANDLTSARAGEGLTSETGQDVSKIATENALPGVLAERGGRILSRDETTQSQMDSGSSPRSGAGDPSNAG

SEQ ID NO: 1342 - protein, 616 aa, unidentified
  REGION 1..616: note = Table 20
MLERARAATEAAWWAALPHLRGHADAIIARIRAEIPDKAKRKKAPWDKYLKEAFPRRDLDRFVTPDVRARNSAREQAKNARQGLPNVLLDGVYRDLIAVASSYIGLVLGDHPAEWPTPQPVGEDAYHAGLALLAASTDKADEDRGRDMMARLARGASPRPFTISRARECRIVCDAVTGRMAAELLITQPSWSETPATINAGRDACTGEDVIAATSRRAVMVPLEMSDWHRNTFLHGKAKLRSCLISREGEAWFMRAQFQMPKLEPNLTGAVLGIDRGLRRGLVASVVRGDGSVMKLVEILGREMVETIHAAEKRNRVSQRWRARPAKGYRKTIDQELQRATNRIVAWAKEYGAQVALEDLSGFKSAITAKRPKGTRRNAWQKSLKKMQMHEVERMLAYKLAVAGLPAPITVNAGGTSMTCPACGHCAKVNRPAPGAPFACVACGFEADSDDVGAVNIARRGAVLKRSRGLKMADLEKDMVADLRGRDDGGLGPLRAGAGSGVVAVRVSGGVANDDPSGSRIRPSPGAEDHPHPGKTGSRSVLASRPGAFSQGPESHVGAQYQGLVDRSVEAVPEMRADGNRVVAARFNSAKSRRSRKCGLTATRKPRSGELPGAVR

SEQ ID NO: 1343 - protein, 543 aa, unidentified
  REGION 1..543: note = Table 20
MEKLRAKAEDVFWDILAQKRPRADAIAAEADKKARREQSRALEQEINRLVIRDGTKAGLNEPIAQGLGRDIVMAIGSYIELRAGGHEAEYPARITVTEADHAAALDALALATTREEENAARDALGRVARKPGPRPLTIARARDGLIIRKSPNGALALVLNIMRATDEKARPAQLAPGMEAATGEVFKGGVSKTRIILPLECSLWHQNKFLSGKTILRSGLLLRRGDEWFYCAQFEMPERKAALSEARLGVDRGIVNPIALSVVAGDGRILRVSEPLGQEVGASIAAADRRRRAEQKRRGATSHRHVERVDQALHCLANRIVAEAKAYRAQVVLEKLDGLKRTITEARPKGARRGGWRRHLKKAQLGKLEVLLGYKLKLAGLPAPRDVVAGGTSQTCPACAARDKKNRPSQESFCCIACGFSAHADSVGAVNIARRGVAMIGITKGDKLAPREQDMVAQLRLRDDGGLGPLAANAAGGFVADRASTAKGVSSPQGELPGLEQKTTHGDQNARKGVLAARGATFFRGQNGKKPLRGKGVTHDPPE

SEQ ID NO: 1344 - protein, 507 aa, unidentified
  REGION 1..507: note = Table 20
MEASIQSVFLTAKLKFHNPSQRRRALLLDAMRRAHLGYDKLLRTVRDDVERLISGTEKTAYHEDIKALTLRLQVLARPLPLGNGPKQAIIADALAQAESYIELKRGNSETSYPTVSRLRVKPADRNALLDSFKTVTDILTQDELRDALARLNRPGLPRPLNILKNRSSDGALLLKDENGRLWVYINLLPKEAKRKRQVDLTGLMDTRTGEILKTKTGGGDIFPISCGKWFEEKFLSRGTLQSSRLIYDGHDFYFACTFQFSVPVCGPSTYLGVDRGIELLAAWSVVDSNGVRKAHGAISGERLRAIQRREEKDQQSAQRRGKIYSRRTRGLIADEEIHKAANQIVAKAIEFNAQVVMEDLSTITMGPHQKRPKGARKGGFRRLLTRAQYAKLQHFLNYRLQMAGFPPIRRGGPAYLTVSAAYTSLTCSRCGHAARENRQSQALFLCASCSYKENADINAATIIAYKGIHFDSVIRGRTKGKKLKEDEKFAAWLAARKNGGGNAVVCS

SEQ ID NO: 1345 - protein, 525 aa, unidentified
  REGION 1..525: note = Table 20
MFETARFKVHNPSRHKRAMLRYALTHYHLTLKAFLERALAEPDLVNKISVPDKKGRMRVNSYALSRLLYTIAPKGWALAPLRDYLIGDAGAMLMSHFRKLQKGRHESNPPTLPGLDPPTETEIESAYQEFATTIDFPLKPKQTDLIVEAQKDGHPRVVRRLSNIYRNWASSRAAGQLLRKTESNLPRPIEFTRPEFERGYILAQKGTNYYLLIRLFAKGHRYWSQKKLDDGYINCRTQDAIGGRNYPGVILPLELGREYHEAEYIRHGRPQSAKLLVKRSDDGNETYYVHVAFEFSPEAVPVDTYLGIDRGAVKIGAGTVISHSGEVVATGVQLEGKAFAAEMDRLRRKIAELQRRGLQRHRLLRLRGRKADALIGEYANRVVEAALRHHSQIVLENVQATAMARFLSQSQFQKLHFAVSYKAERVGLPAPIDVPAAYTSQTCARCGHKAAENRPRRDAEGRALQDVFRCVSCGYQANADDNASEVIALRGLHQQLNGGKFQRFDTFQTWLIKLRGRDSASASGG

SEQ ID NO: 1346 - protein, 320 aa, unidentified
  REGION 1..320: note = Table 20
MRDVATGEAVRCKRPTWMLFPLEFGLDFQERRFLLAGQPGGGRIVYRPESDRFELHASFTYAVQEIDTGQHFLGVDLGIYTLAAWAVVTADGAIIAEGTISGLELRFVQRRLEQQIRREQQRRGHVSIRTRRAQADEAVHRAANAIVAAAKQHRARVVLEELTPLRRRTKALPHGNRGGQAGRARRRILGRQQYAKLAQVLGYKLALAGLPRPVTVGAAYTSETCPECGHVAAENRPKLREPGQDRISMDAFRCVRCGHAADADCNAARVIGVKGAWLIQVSTHAERGGRTLREEERFAQYLLDAARRRGSSAGRPAVPS

SEQ ID NO: 1347 - protein, 524 aa, unidentified
  REGION 1..524: note = Table 20
MSEPEVVRRGGKKALPPGYIKVFKTAKFKIHNPSLRKRAMLFDAMKRAHLAYDKLLQQCLPDEGTATEIRALPKPERREHFRRMEQRVVKLSEGVGKHPQLNGNAKSAIRVDCLAQIKSTINLGDEQDDVGRPVVALLNDSEEEFDASLDELIHSLDLPSENMARDKLLRASKPGQLRPLGFVRSNKSAGFLLLKNMETGRLCAWLALHPKSSRRARPVNVRDMANLKDGEIMSFRSNVGDIFPLEFGRSFHEHRYLEKGEPQTARLCKKGDDYELHVAFKFVVKKREARTWLGVDRGIYNLAALSVITQSGIVVDEARISGMELRYIQRQVEARIAKGQKKGKVVRDRTRWAQAEIAVHLTANAIVEMADKHDAQVVLEDLKNIGAGKKRTPGSRRGGFRKLFGRAQYEKLRRVVEYKLLERGLPKPVKVDPKGTSIQCPECGHWSPKNREKRPEGDQFKMDVFACVECKHRKDADENAARVIAMKRVWMDGVPSSAWKKKPLPDKHKFEVFLRGAAERRMAG

SEQ ID NO: 1348 - protein, 540 aa, unidentified
  REGION 1..540: note = Table 20
AEASLPKKESARQRKFEREKSLNARITATIKPLPICLASKAARSITGSIIGQIESHIELHDKQDSVGVPTAQPLVKVPAAYEAALQDLADSTSIESENAARDRLHREAKANRLRPVLFAGNRASDGFLLLKNSTTGGYFAFLNLVPSSARFAKMTESERRMGSCRNIADLMDLRTGEVMSFRSSTGCLFPLAFGRDFQQADFLERGSPLAAKLMKRGDDFELHVTFEFSAPAIETKVCLGVDRGIYNLASWSAIDADGRTMAENNVDGRALRFVQKQLERRQRRQQRRGRRFTGQAKRHAADEAVHVAANAIVAAAQTHCAQVIMENLAPLASRGSKRRRSNFNRVLNRSQYQKLQHVLAYKLAAAGLPKAREVHPGYTSQTCPACGHCDSKNREKVPVADGFKMDLFRCQSCGYRHDADLNAARVIALKRLWRDSLSPALRATPMAQVPERKSFATFLKIRAERRGERPCDRKVGSSGGAGLDVQCEDGEVTPDGNIVQPRSGPNTPVGKNTPTQPSAVSPSDENPRLPHANNDGAPDG

SEQ ID NO: 1349 - protein, 526 aa, unidentified
  REGION 1..526: note = Table 20
MTGRSIKTFMTAVFELKSPTKTKTTVLNYCFLNYHNLYEELLEDAKSSNLDRFIKSKTYEIRNFIKNQLKSNPVFANKMNKLHLSLAMEDGLSNDLAASIQSYCELKNDYNSTMENAGIADTEKEKLSLPGLPTIPPLIARQENWENRLEKLATASTLDDENEARDQLLKENKAGQFRPIVFPRHRLADGFYMLQHKTKPSFYILFNLYKKESRFSRKIDLSQYKVLGTEKTHKHTAIGLVFPINFGKSYQYDRFLRWIAENNNDVLDAPIIKPKTARLCKKGDRFEAHVSFEITREAKEPLTWLGVDRGIHNIASLCVIRENGEIIAEKNFTGKQLKYVQKKMERRQKTVQKKGKKYRSATRLSEAKKAIHGIANRIVEQAKKHHAQVVIEHLGNLTSRNKKRNKSNFNRLLGRQQYSKLKDVLEYKLSRAGLPKPLSVSAAYTSSTCPKFGVSDQNNRDRNDPNNAFCCQNCGYKHDADLNAARMITLQKIWRNGLPKNKKTLKVNVLDETDFSLPSFLKRLNL

SEQ ID NO: 1350 - protein, 528 aa, unidentified
  REGION 1..528: note = Table 20
MINVSRSAMFTTLRFKLHDLSACKDKKLRKSLKQNDMAYFKAMVAAKPTAEKLVGITDTKQKKDVITQLKKDIARIMKPLPFGSAIKAGVIEECAAQVLSYAELTQQAKALQERLIKDESSKVITMPSYQQKFDVEVDYKQALEDLVRATNLDDESDAVHRINRILRKKHRPICFQKYRISDGFMLLEDNENRIFAYLNLWAAKDKRAEKISINLIDVRKAPKEKQKKGEKKPSEPFSEWIRHQVVATNKTGMLFPLEFGPFQRQALKTAIPKTAELLYRDDGIYLHVAIKHQTEVVKTETIMGIDRGILNIAAYAVRDPNDGRVISQGAFSGLELREHQRKFERKQKEDQQKGIIKIKPHTNYGNNQLHHITNAIVEVAKKHKSLVVVENLEAITNGAHHTRIKNKRRSNFNRLLSRAQYAALLDMLTYKLLKVGLPKPVKVNAAYTSMICPSPHCGHSSKNNRGDGDKRVHFECEICKYIENADVVGAINVAGKKIWLMKNGRPIKGKKIPTDLLFQNWQAEHLQL

SEQ ID NO: 1351 - protein, 481 aa, unidentified
  REGION 1..481: note = Table 20
MKPFNVFKTHTFKLHNLTAKKKALLDKTFKQNEMAYFKALEAVKDDAEALIPLDKKERKQGVAAIKKKLQAIVKPLPFGNALKAAVIEDVAAQVSSYVELTLSGQDAGYPTRIEAEHQYHEALNDLLRSMSKEEEDKARDEMARAACNKVRPLSFYKYRVSDGFMLLADDKNRVFTFLNLWGARDKRATRLVMDMVDTRTGEPFKTSTGTGLLMPLAYSDWHTDAITVGNAKSAKLYERGGEYYLAVAVEYVVERRETSAVMGIDCGIDEIASYAVRNNSGQVIATGTFDGKVLREHQRKLENKQKMGQKKGKALVQAWSNYSDNLVHHIANAIVDVAEKYNAEVVMEDLIGIKNNPHQKRKKGGRKLALRRQLSRQQYGKLENMLEYKLNMKGIPKPSLVHAAYTSLTCPSCGHSDKTNRPERDTFRCGQCDYNNHADINAAINIAGKKIWLEANKTKLKKDLPDHLKFSKWQAVNLSLD

SEQ ID NO: 1352 - protein, 479 aa, unidentified
  REGION 1..479: note = Table 20
MIKTFKTAVFNVKFSKRKGNIIDTQMRLAENAFYDVIERLAHHVEPLIKLNKEQRKDMLTRLKKEASQLIKPHPLSNASKSGVVADAIAQISSTVELRLTGQDAKLPTRNNRDIDTYDIGMDMLVGSLDLESQDLAKQLIYSKPYDGMPRPLLWLRTRPSDGAMLLRDGLGRYFVYINSHSSKSKFSKAKVVINDLVNVRTGETENFSSSTGLLLPIQLSKWHQSEFLAKGKPKSYRLIKKADGYILAVTFEFKAEKIEPATYLGVDRGIDKIAAFAVTSKKEVLKKDFCDGNELRDYQKECETNARKKQTKGNAKYIRWRGYTDLIMHKIANEIVNTALKYRSQVVLEDLTNIANGHHHRRARFARKTNFNKVLSRQQYQKLQHLLNYKLSYVGLPTPLFVRAAGTSITCNRCGNYDSKNRDLNERSLFLCKSCNYQDNADVNAAVTISMKGEWLTTQFDKEHKKMKNRFSDWIPLPS

SEQ ID NO: 1353 - protein, 488 aa, unidentified
  REGION 1..488: note = Table 20
  VARIANT 39: note = misc_feature - Xaa can be any naturally occurring amino acid
  REGION 370..371: note = misc_feature - Xaa can be any naturally occurring amino acid
  VARIANT 356: note = misc_feature - Xaa can be any naturally occurring amino acid
  VARIANT 10: note = misc_feature - Xaa can be any naturally occurring amino acid
  REGION 50..51: note = misc_feature - Xaa can be any naturally occurring amino acid
  VARIANT 486: note = misc_feature - Xaa can be any naturally occurring amino acid
MSEVYKTCLXKVHNPSKRKRAMMLDAMRRADRAFWILLXSIKEQVKRLPXXDKKTVRAELQEIKKQAEKRLTTFPLGESAKGGLPVDIHAQASSYIELINVGQKANWPTRRPKDDPYPAALEALTASITLAEMTAATEALSAKARTNEPRPLSIVRNDKRGTMLLKDDKGRLFAWVNLHGQGSRFARPVVVSNMVHTRTGEIVNFKSKLGCVMPLACSQWHFQRFIEPGQIKSSKLIYRKGDFFLACTFQYLIKDIDCDTYLGIDRGIEEIASYAVINDDLKLLKQGSFEGSTLREYQRKKEAAAKATQRRKGESRVSWRAYADHTVHTLANKIVEEAYSHKSQVVIEDLGAISQXPQHKRPKFRPRTNXXKVLNRAQYQKLAKVLAYKLRAVGLPPPKLVIAAGTSITCNACGYRDRGNRQSQATFICLECGHSENADLHAAKNIAAKHIYWRQVGPKVKGKKLQDKFKYEHWLKARRERLKVNXEE

SEQ ID NO: 1354 - protein, 465 aa, unidentified
  REGION 1..465: note = Table 20
MQRRYSEVYSDLLRALKGREEEFYEKLATYGGGTTEKYAKRYFKMLLGEQPLKGRMWGGLLEDVIQAIDTYLDTPGANFPAPAGTSATPVEELLGELLGPVTREEEEELKAELKRKSETYERPINFASFRGNPIIRSGDGEKMWVAPHFQKREDGKTGALPPGGHSVEGSWSYPERWDRQHNKETLPIELSRWHMHRFFREGTPKSSKLHVIEDEIYIYYSFEFEEPSGGYEKGNPVVGVDRGEAIIAAYAAVGPEGQVLEDGSSASKDLQSRLKEIDREIAATQERGENPGELWNDRRNLVQDALHRISNQIIDTASRHGAAIIFEDLENLSGPNNSRMKRRQYNRLIEYVRYKEKEKGLSYGGDDFDLDVHPAGTSRTCPECGHREEQNRGGRDHPNLSRDEFRCQNCGYEAHADENAARMIGIRGLWIINGGKDGTGCKTLTQYTKSLSQTRTSQTEVQGPS

SEQ ID NO: 1355 - protein, 585 aa, unidentified
  REGION 1..585: note = Table 20
MVGGSIGERRQEEDKVIIGIGLDKFSFNTNLSSLHGTFQSYFAQKVRSLGYMVVDVNEFYTSKKCPTCENLVAQTESIRLLYCQIAGISGEAPEHPVVSKKSGQVYERRLIVKYIEDNGKDPVNGEDLSVEDLLDIKTSPGTVKPRPPTMTSIPSILSVLQNEWDSIMLETFTMKQQYHQVRQELSHALYQHDAACRVIARLMKERDAAREALANVQAHLGTKAAATEETADVTMGDATTSPGLPSQIREKLEATTAVLSKTRKRKPNTTAEAIQTYTQRKVFPGLHAARSPGITALDLDAKNGLVLTGGNDKNALVFSQSEEKVVATLKGHSKKITQVAWTGRSEEAGQDMALTASADQTVKIWTAGEGKSNHYHVAHTLSGHTAEVTGLCVHPTKDYVATASMDSSWAFHDLETGSTLMSARSDDVVKGYSSAAFHPDGLLFGTGTADSAVKIWDVRSKEAVASFEGHTGAVKTMTFSENGYLMAAAGEDNEVSIWNLRTLAIVQKLKVADQGVINALAWDQSGTYLGVGGTDIRIFKVKSWQELANMTDNTAEITSLKFGPLGDYLVAGGLDRSLRVFGVAE

SEQ ID NO: 1356 - protein, 166 aa, unidentified
  REGION 1..166: note = Table 20
MTETSVRQSGLVFEAGQFPGLLIQGTVLAFDFGQKRIGVAVGDTVLRLAHPLTTINSEKNEQRFSLIGALIENWQPVFLVAGLPCYRDGSAHEMTRLSRRFARRLAGRFNIRVLLVDERYTSKTACAALRQAGVPARKQKQHLDQVAAQHILQSFFDEYHAQHSIA

SEQ ID NO: 1357 - protein, 156 aa, unidentified
  REGION 1..156: note = Table 20
MITNALLELDMPNPNQGPHNYIGIDYGLANIGVSIGQSITGTASALKTINVNHKFSWNELDEIIKQWQPAAIIIGKPLTEDGQEQLISRQSHNFAKKLAHRYKLAVHEVDERYSSMQAQEAFSIARKQGSAKRKHGKNLDAHAAKNILQRWLDNLS

SEQ ID NO: 1358 - protein, 354 aa, unidentified
  REGION 1..354: note = Table 20
MRTSVLPGLGRSAGIDLGILRPAAVVYSDGAREILDFRIGTNDTSAISAAARRIARSCDAVWVERLDFSRKANARGEVLADWQRFVAELEKAGRRSGASIGAVPAEHSSRICPICEYKSGKHAVQVRIWGCIGCRTPLDRDYAAATNVLLRGEPELREILTNAQLHQLAAAEETDVVPGALYEAELFTQIRKTAYSRRRNFTDPGEWRSDVECFAAQLAATMPEPVDPVIVARMIDSITAWSWTHITPEGFSAAQAWRGRRGAAARVQSVITQSQRGGRVPAEIMAEIGRLGAAERRARLAATLPEDLSAEERTQILNRAMLGPGLTAYNEKQKVRAEDLRRRVLAALDLPYPA

SEQ ID NO: 1359 - protein, 496 aa, unidentified
  REGION 1..496: note = Table 20
MPGHETWQGFTLKPKFFADIKTGEILDCADSLKRDVETLHDLVEWQINSLEDGIFREIEEFSHLKPAAAGHYLGIKLPKGVVLKGKPGSSRFEFLFRGHVVEILRSWKARRDASNGEYDGYVSAGWKRTANDRPPTVPYRMNLGFAGQYYAKWLEPGVLAMVIDGHWVGVGFNIPPRYCGKLALPTVRLKDGELFFDFAVSNPYQQRDLNQNFLVGVDLGQKHTATWVVISGGKIIESHDGSRRVHSLENKVNATHRQVIFLHKKLDKRFSYSVWKELEQQRASLSRKRKELAKIVAQEIADTAYMYNCAVVVEDLSHIRNTMATGRWNRGEVNRWLNHYVEQNGSRVLRVNAAYTSQNCFICGNRRKTTPGRIYACTCGFTADRDVNAAANIASRGFTPYLKMIATRKKSKRYVPGKPSRKSPKIHETLKHPGQRRDKSCPTPKQLKRKSPAQAVKDKTAPTVWADVPQMVVQDSKKAARILDYSYRQCSLILII

SEQ ID NO: 1360 - protein, 521 aa, unidentified
  REGION 1..521: note = Table 20
MAKSQTYKAFTARPTHILNLDGEVLDSAPIMSQLASEVCGISAYATYVVRNDTVLGEQLAKAGAVQPTTAGRRVGVTMPDFLVTGKSGRSRKEALIQHRVVTEYRSWQERAKAVNGESSKYVSQGWKRTANAAPPSYGEGDFINLGAVNKQYAAIENNPFADGEINLKLVIQGKWYRLIFTFDNKRFTEGKVTLPLIKIEDSRPVFIFSVATDNPVIQFSSEYTIGVDVGINNYATVAVRNTATGKVTHRTTLSQRVHSLWNSVRASERQVKKLREKAVSLSLYDRQAIMAALDEADLHRKAASRKKRELAILAAQEIAYLSHFFDNAVVAVEDLSWISNTMQNGRWNRGAFVQWLTHYVSQNGGWVVSVSAANTSQVCHVCGEEVTHPKHKVSQCAQCGVFDRDVNAAANIAARAVPKVEKARKKRSKNSKLQPQAPLNTPVARCSLKYPGRDRTKNAPTPKRKKKGVNTLSSPARAQAKCLEATVLADCNTCSINVTGTSQAAIKQGNKTYTCRLCNLN

SEQ ID NO: 1361 - protein, 436 aa, unidentified
  REGION 1..436: note = Table 20
MMRPKTQDGCLPHQLPAYVIDPETAEELDYETVVAIYIAPLLEYVREKTKNTITADKQAIFDAIESEEKIKQPTGLAWKHGIRPDLSDAKDKGILATSRVEKVIQHRIVSEVQSYLANPNPDKAEPTFDALKANLGAADKQIATVTYDPELGKTLLYWKCWTRELLFIFDLPDFASDYDISKVCLPSVYYSKTRERVEFDFPFVEALDYSQNEFHHCYGAYDAGRAEPYRLAFKNGKGALIAEYRASGRCRALNAKRERVLANIKAVQDKLAQYDALGLPDDYPRRTVLVEEKKRLKAKAKAEGEALARLMGWEIARHCRRHGAAVLAAEDLSWVNDAHGSSRWNHSAQQSWVERECRRVGTAFMTVSAKGSSSTCSACGSVDVSHDSSKRTVKCRVCRVELDRDVSAARVLAGRCLVSYRKYMAKVVLSRMRMRC

SEQ ID NO: 1362 - protein, 418 aa, unidentified
  REGION 1..418: note = Table 20
MSPRIMYITVKGKVKASQAAIQELREAMIQYKQAVNTAVKLLAAGVEKGKVKKWLGQASPLMRTLTDAAVDYARQMLKTTHSKEKPTLKKPLLKLKLRPSKIITLNSENSVLAIALHLFKEKSEQCYHAYLPANKYIKPPKPTRITFFEKRGKILVALPKAITLPEPKQTNIYIGVDLNANFRHAAIAAIGVYDPEAKKLTITHVYNLADHIKYGVAKIPKLNEKISEIHRSGNNPRKYYAKITRIKKDFAHKIAAKLAKLAEQHNASYIFFEDLKTLKPSKHEPKHLRKTTSKWIRKLIIKYARYKAYQKGTRTAYVNPAETSKRCPFCRKKISKDEPHYCQYTWIHANHALAAVNILRRGVAKIYKINEDKIAVTVTPRCPRGGGVGVPRIPEAGAQCAMKAPQRGASASGMQTPR

SEQ ID NO: 1363 - protein, 448 aa, unidentified
  REGION 1..448: note = Table 20
MAAWQARERVADAIDRVGWLKATYGNVCEELGEDVDRNLFTNVLDHEGHFTVPVVGHTRFCYDQSNDNSCRRGELDADTGVVTYRRMAVADRFVDITLRIAQFTARYPDAVRVSRPDMRKDSTGNIVFDVVVFVLRPLMQDVSKSAHAVGFDLNADWHGGISGTRLSCNGHVSRPLVVSRNTKRQQDKLERIYVQYRRCLDRLDRLMPWQRASDPDNPADVAAHPKWANLYVQSLALRDKMYRIKEILDWRYAHDMLDHAKPGELVAVERLDPFDNAGRYEFRHGSQLDKLDHVAAKRGQRVVKVNPAHTSDTCPWCNTRIGNLGRNREYECPRCHRTVPRDYGSAINIAKRGCAYLGHKHVRPTPKKGRPTPKRPKLIQKRHSGAAHEALSGTGKGPVSFHTERTAPTPSSGMATATVQGKRKRATPGRQLGQCYDAAAAGTATTSS

SEQ ID NO: 1364 - protein, 510 aa, unidentified
  REGION 1..510: note = Table 20
MTHRTYQTRLKNLSAESDLALSSYAAIFSKAERTLFAQTFAQGIRPTQTHKSGFQLRFGITARQYNAILYGLRGKVESIKELRKDHIQAAKARIKSSEKAVKALERRLNADRKTGAATKNKTAFKLHHKKRRLATQKHRLEKLLVAEKASTVSLCFGSRKLFHAQYHLEANGYKNHADWKQDWQTYRDRQFSVLGSKDESAGCQGCQLKRINDQWLLHLRLPNSVIEQTGLYKQVVLPIELPHGEDAIKCTLKRGGAITYRFVRDEKGWRVFLSIEVQAAKKKSIEAQGAIGVDINAHHLAVVEMDRHGNPINKHRINAHTHGKTTHQRMAVIGDAVKQLVEIAHRTRKPIVLEALDFKRKKQDLKANEDRRYNRMISAFAYSKIIEVIKARCLDHGIEVKDVNPAYTSQIGKHKFAERYGLTPHPGAALVIARRSKNYREQPNREDQTASWLPERKATEHVWSYWRKVARKPVAYATLLSKRKLSRQSALSNGTESRTVSHTSGVSARA

SEQ ID NO: 1365 - protein, 984 aa, unidentified
  REGION 1..984: note = Table 20
MAKYDPSNVEVTSAFNAPVRLEGEEVLIDFIRNEILPAADKLLELLLFFRGKPFCLSGVNYSESDVDQKLKEIYNSVSIVPEKAKRFGVKDASDFAFDQFKDEAQKLYKFFIGEESPDDGNKIKQAATSFYAIFFAKATGNRITRNIPSICSSSLFPIASFANCNLGASITAEVERKIKSFEELQKLRNEEYTKLNNAGDHNPDGEDDGSETIFASAVVDVRRFCQSLYENSKTYGFKEFGKENIKSVSEFLSENVEQLRSIFAEKGGNFSFEDEADLSRHKIVTGYKANFVNAIYSDFDYVWKSRPDVEDVYEDKKRRVRHKCLMTDRRYVKLALDLCKFIKKREINVSRFGDKGGLPCLLLGANYIGYRLEERDGNFFIRLTDLTSKEASRSAPKMDVRILPNGYLNNFKVIEGDHSKGIYTISYNTARSSEHTEIIETTYTGTIKEPRLRYDRRAKRITVDLCITNVQSSNNALDKVLMEEQKKVARKIHFDLGVFFKTSYSEAVLSKKGRQLPFDRFRVMGVDLGLNPIAALAMYDVCKDDNGYDIGGTKLSWSYIGSHKAKNIPVEDIRKIDKVTNMAKSVKSLIGYARQHLAAIKAKKFGKKAYEVDIAYAETKVGKLLRDHTMFSSVEEYLKDVESRLANIPPIDWKKRQTGWVVPSLLAKVKEAFSEMRSGYNNAKDKRDYVRTRNFACTKDLRKIEATKAVLSLSKSFTFLGLSDDEKNSIESFGESMNDYINGLRMFFSKNLAAMIVHHAIKNNINVIFVEDLDAKAAYHLTQEENCLKQIWATSTIMKYLKQFALKHRIVVVLVKPDFTSQIDSETGEFGYRDKQNKSRLYMNGPVPLRFCDADINAAKNVALRGIKRHTDIPSFRAVQLSESEYLYELQSEGTKQRQGTLMKSLNTVDRLDGVIFKLEPDGTFTLDAARNTKDLKEKADEFRKSQDPKNEKPRTEFRRSGSRWYRREDLEKVIEGIAGKVER

SEQ ID NO: 1366 - protein, 892 aa, unidentified
  REGION 1..892: note = Table 20
MLTQEETVNQVKKESGKKLSRCYSSKIQLSRNDDAYQALLITHEIFNHAVERAIRKTFEVVKGREGDDFARLTKWAIKEIPAKECSTHFFNPFTIDNSSLEAGGKHSAFDKEPGMRSLFFKAKEEGKKIYNDQEIFLDIPQDGLSSLKKEVNQQVAEKIKAYFELLDIWGNGSESSKKAKKTSLIHIQNPNDFTTEISNAINNFKKNDILDDEFINQASVNEDLKNLLRNHTQRSFRRDINNFLNDLFENKLLREDEILDIESFINEYSSENIGKSEWLIRKKSFDKNNSDFIKIYNDLLERYRSLQVNQKTAKSFRLPLRWKSDPNFLKVVDEFFSNHISYKDLYKSPLLSLELKTWCDNQKIPSDYSCLNTKEGRKKFLNALESLNGSLLFNQATSFFRQLNYYRQFEPKINGKKYTEFKRPPAFRFPDPYQHPEWISFSAKGNMKYRDLIFRSTKAASVDGSIRVKLLTPCKTKWEFYTLDLKFDSRLKNIKSLQVDQTEDKTSVEYSIPNKEGINEKLDFKGANLIYKNKNFYLNFRYETAKTFSGKIKINNSSSSPYKAGTRLLGVDLGQKADAVISIYELIQEVSGQETSIHEHLKPIKFKPFTFSKKNKQSETYYQWIKIPGGGSFTAINHAEKLRSIKRKQHAKKLEKNSDDPTIGHFLSRNQESFKSLNKYISNCKDQHCKQVAGALMKIALENKCHGIVLEDLKSYQVSSKLERSENRRLGIWSLQKKIDLLEALQKSAGKLVLKTNASYTSQICHQCGSYGVRFNILDKKQKKYEHEKIAKEANIQRAKISAGGDWFLCSNQNCHGKKEDKEYYTIQADANASRNLLIKLYLRQYWSNIKSRIPTNEEKETIKEELQKYLNKTYPSKIAASIEDQRRAVSF

SEQ ID NO: 1367 - protein, 720 aa, unidentified
  REGION 1..720: note = Table 20
MTKTVRRRPRRQRESDDSQKQLTMDGRLITTHSTAHQNTGLKYLVQSFILCSTDRELNKKGKGKRPDPRFRRCSPEPVREELETVTGRKVTDVDLSLLGRYFEKYVELVNLVLGRVYAHKERLEFLGEELNSYRGQGYNLLQKEEYLAYKDNPDIREQCFERLYRNVLENASRIIQSNWLRRQLMESAIDLVRENRDLLLRLLKNKYVPSQLIKDLRARFENTKNHSSSSGYYFALSVLKQLRRGLDEHILDKRGEGLGYRPSQRRRVRQYLGDETECSAVMSLVESRLQQFATEGYPFQTPRMISYSEDFSASTENMPGQGYWYSQDLQRENEILFFVKLPEPMEGKELQDSPFRIRTLPFRFFDWLPRAVARDRVKADRAEREGKHMRAKKLRFRAMRFEDQHTQLVNTIELQHATYQLVKWKNRKDADPEKVAQLKEKVQRLRKSRTCGPSRLLLRNHRVTLQIPFHPPTRKMVNDVLGKRRYNRSAGADRGIRVPIVLSVRNGNNEYTDKMLPFGTLVEKRDTLRDQTRHLSSRIALMRNNWEGKHGKDYPKPGHLRKKERHLAAIWQKIRRLDREIARQIASATVWFCERHGVKTLYLENLKNYKPPGGYGTLSWRLSSNLWSKVLETIQYMRESLGHRRGGIWTVSPAWTSQKCHACGEKGLRVETQDSTTERRAGEFFYCPHCGEQIHADVNAARNILDSHTEQPSAVAGRTI

SEQ ID NO: 1368 - protein, 229 aa, unidentified
  REGION 1..229: note = Table 20
AGADRGLRVPVAVSVQKDGKYFDELIEMNELLKKRIRLLEDTKWLQSEIARKQNSWEKKHPELDYPSYILKKKRHHDAIWGKIRRIDREIARQVASRLVWFCEEHEVKTIVFENLKNFSAPPGFKNLSWSLSANLFSKILETVRYMRRSIGHSYGGIWAVSPAWTSQTCHQCGEIGIRVADELSTSEIRTGEFFYCKECSEHFHADVNASRNIIHVQQKMSSAVPGRLA

SEQ ID NO: 1369 - protein, 731 aa, unidentified
  REGION 1..731: note = Table 20
MVLILYGLISCFKDTIPRYLVMKKDKRRRSRSCKTPKASEQKTMDDNYYGISSLNYLVESFSLNSSQREVVRKGKGRTPDPRYRRKNGSSSLVLAAIARQSGGKVDDIDLTALTSHFENYVKTVNLILSRIFKTDRRAEILGEALSNYRGRAYTLLRNERDLCYQHNDEYKGLVYERLHRNALEHAGRTLMADWSRRQLFNTAIAFLHGSKDDVLRLLRSKHIPSDLIRRVRDQCAAVRNTGSGYHYALGVLRQLRLAIDSHILDTLGVKINWRGRQRKKVASLLAKGSLDFQNVQRLVKRKIKSWAKDGYPFAIPQLRSYSLDFSASTENSTSQGYWFSLDPERENEVLLHLKLPPGIDGREQIDSPYKSKTLTFRFLDWLPRAATEDTVKANRAKKISHLNRVEQLRFRAAKFLDMHEQLMNTIQFQHVTHQLSRLKHKKNSDPKVIGRLADEARRLKGSRRSAPPRLLLRGHKVILQIPFLSPNGTVSSKVFRDKVYTTEAGADRGLRVPVALSVEKDTKFVDLLISVEPLIAKRMLLRKNASVLQSKVDKRKNNWELKRPEQAYPQFLSRKIRHFNATWEKIRRLDREIARIIAAKTVWFCEEHGVKKLFFEDLRGFQGHAGSKDLSWSLNANLWGKIIDTVRYMRESLGHSRYSVWTVNPRYTSQTCHQCGERGFRVNDESSKIKKQGGEFFYCIKCDAHHHADINAARNIIHVQSKSSVVPGQTT

SEQ ID NO: 1370 - protein, 533 aa, unidentified
  REGION 1..533: note = Table 20
MKLAYKIAFPDELIDTYDFLQKEFNRVLSDEYMRESILSIDNELHPGKYWPLLRDLIGQDTQYKWKTDKRFPSPSWYFCAFAEQIRQIHKSQKEQLALYDALQRFDNNDNVEFYQYCMNNSIPFNKAKVKNLKRCDERPELPYSATFVLDFAFINSQAAKMVDNTFHYAIFNENNKLIWNQLPIIFHQSSKYQPGMRVSKPRFSKDEDGNYYGVVSFDFEESVTFGENIAAIDLGKINLYTFAYIRPDGTYSDNYFIHSKMIERLKQKLETLYNEKAILIEKNKHVDELFKYSDYIPDASLKKWILRQGKIERLSTKITAIKDAISAEMSAEIVELCQKHNCSTLFMENLSWLESVGGKWNHSVQQDTIALKCAQNGIAVYKVNAKNTSKAHPITGELGKELGRNIIWSNGDILDRDFVSCLNQIQRKGKRRTSHRRIETKQGIQLKSLRDKHQPTPKRTKRQTSRRYENLKKLENLKNKNTSRTTQMVVVLPRISNDYPATWSCVDKKSIQEGNNCMRRTDVYKKSYMYICN

SEQ ID NO: 1371 - protein, 480 aa, unidentified
  REGION 1..480: note = Table 20
MRGYNFVASDYLDEGAVNKITALILSLSKEIQCILSDKELVNKLLQTRIRSGGHFRNDFLKIRPQPTWTNVYGNKAKYYRIIIEQVRRNLLSLKQRQQIAEICAKYNYEFSQDLRDALCDHNLYPTNATVKNICKAKAMPVQEVELAQLDYTTEDKQISVVGFENGVIHSKFQVNGEWLSMDVGMPSHVAFIPEGVTRPCFYLKDDTLLVRFTVKKTIPLVETGICIGVDLGLVKPFSGAVRFADASHSNELYCSNEANRVNQKIQRLQVHKDALFQKKSHIAKLLVNNNCEKLLDKYQTLDEQYTAVRHKISNQKAHLARLVGRDVLAHAVHNNTDVVKLEQLSWIRDKEHTTWNFAKTQQAIEEKAELCGVSVVKVSAKNTSRTDPFTKQGIKANSKRQQKSSIGTQDRDYLASLEIATRQKKKPSLPLSSILRCVKSKPPIRELPSRYCATVAAMQVVTFNEVQRDFQSNAKYHELQ

SEQ ID NO: 1372 - protein, 498 aa, unidentified
  REGION 1..498: note = Table 20
MKKKKVHWKSFNINMPSELIPIYDFLQNELNFILSNDETRALLDKIDLSKLRGDVWRDMRDSLKFRIKDWPLHNKTWHSYILFENIRREIKSKQEAIIIWNQLVKNDFNINEDLFNSLHKLKLYPTRSRIANIKRNNSIPELARSAVFNLDYTISEKQIFRMKQGNICEIKVSKKDWIEYEIIFPSSIDERFTGRIAKPRFIKRKRDNQYIGICSYEYEVGDYVLEDKILGVDIGKIKLFSSVVVDRKGNFSNEFVNTKRSQETEYKINKLYENKQILYDKLKSYEALRLTNQSKYEIWKNLYSNISNKIINTKDYQAKLLSNEIVNLALEQKCKTIHIEDLSWLNSQGGKWNHSQIHSKIIEKATMYGIEVKKVSAFNTSKEHPITKEIGVVNDRTIEFTTGKIDRDLLAAINIAIRSTNIKLKKSLPKKAKTKRVKPKSNKKEIKEKVNKLKGNGQIVSFLTNVLDSTVQVELGVRPLHEVLPYNSLIHYYNKLQM

SEQ ID NO: 1373 - protein, 460 aa, unidentified
  REGION 1..460: note = Table 20
MKFNKTKGTVFRMYKTKGPDLLLPLYNILQGELNRILSTSTYVEALSKIEFKYKDENGVEHSKLNGMLWAEIDDIIGNSLRGKGLYVWYIRILYYNIISLLKSRQEQIKIYEILKSNQYKIDNTLRDKLAQEKLYPTNAYLENLANAKDLPVLPKRKTFILDFSVSDKQMFRVGKNSNAYEIKIYNKKEIKENNLKTGWISFDMYLPTYIREGFTGKTAKPQFYWDCNKNEFVCAIPCEIKKLPHEYENIMGVDLGQIKAYSATVLREDGSISDEYVPTEELQNLVNKLKRMNQHIKSVYEKRKRSSKYGNFTNRQARRKLDYKRSRNKRTKLQFAIARLVAVEVVNIAIKEQCKEIHLENLSWIKNSSGKWNFAQVQACIEEVAELFSIKVVKVSAYNSSKTNPVTLEIGKISNRDVIFKNGQKVDRDQLAGLNLALREPKKVKQRKIKTLNVRNSVVI

SEQ ID NO: 1374 - protein, 532 aa, unidentified
  REGION 1..532: note = Table 20
MTSLTLAYPLKFPQDATLRHQLDMLRDLVMQAAQKLLTELWSDHWIDTLVSTCKKTKKAYKVINEQRVTLTSSNGHVVYLPSRIRRCIAEQVGRILRSQATRKQCYYDVLRVVQNTGVASNLNKLVRTVGLTLANFEGKYYRWALIRQTLRMFRRYYYQLGLDISILLQFPYTAMVKPHIQSFTLPYSPDEGQAIRYDWQQEDAHTISIRLKVPCRSQPSQRSHWVWREFTLSVPDKIKPRITSPNSKLCAPTLRYLTLKSGLILPFLECAWSVEGHTQTQQHSPHRQPSRANRVMATDLGVINLTTSVICEAGSQLSPPIFWSPSTTLLHNIEHLYHHIARLQRKLGRYPVNWCGQGTRHQELERLYRKLNRYRQEILHLASNQLLETALRWGCNTIVLEDLRNYEPPKHRRKLSRKLSNWLRGALYEILSYKATRVGIKLVRINPRWTSSYCPRCGAKGEKISDPRTRHVIKRGRFFYCGTCSYLADRDYIAALNIYRKYQELQKKRCSLKHSKPVPYMATGIPLNRPSG

SEQ ID NO: 1375 - protein, 247 aa, unidentified
  REGION 1..247: note = Table 20
MASDLGVINLTTSVICEAGSQLSTPIFWSPSNTLLHKIEQLYHHITRLQRKLDCYPVHWHGQGKRHQELKRLYRKLNRYRQEILHLASNQLLETALRWRCNTIVLEDLRNYEPPKHWRTLSRKLSNWLRGALYEILIYKATCFGIKIVRVNPRWTSTFCPRCGAKGEKISDPRSRQALKRGRFFYCGSCSYLADRDYIVAINIYRVYQELRKKRFSLKHAKLVPYMAKGIPLNRPSGDSTHVLLVGG

SEQ ID NO: 1376 - protein, 565 aa, unidentified
  REGION 1..565: note = Table 20
MDGKLMTVYRAFRFKVAPVHQKQELFQYFAYLVQLASQQLLERLWTEDWLDKVARSMKKTYKVINEAQVSLQVANQAIYFPSRIRRGISERVGRILRAQHTQKECFYDCLQAVEQIGLESNLNTLVKKVARTIQLVNGQYYRYTLIRQTLGLLRRLNFKYGLDVWTLRYTDVVQPAIKQFVFPYGPDDGQALRYTCTGYIINYQMKLPVVSVPITRRDWQWLAGTIIIPVRLQKKIQEAVDIQPQRPLLKYQRLKGGIVVPVLQFPWKFPENPLIKRNTKIKAQRVLCVDLGVRNLATLVVCEAGYQISPPTFIKLLKSRFRHIERLYNHVAGIQRKLSYYPVHCVGQGRRREERIRVYNKLDRLRQELAHAVSNEIVTTAWRTGCTMILLEDLRSFNPPKGKKNVSRRLNNWLRGRISDLLTYKCKQVGLQLLKVNPWQTSTICPRCGQRGKKIKDPTSHIEKKTGRFFSCTHCGFQADRDYIATLNVYRAAQINRRQQETLYTTKPVPYKGTGTPPDRPGGDPVALKPTLGLAVTGGCLFKMSTMKGTVPSMASSTTRDPLLK

SEQ ID NO: 1377 - protein, 537 aa, unidentified
  REGION 1..537: note = Table 20
MSLRTNIKSYKFKVVMGEQKALHNFKGLVSELSNDLLAVLWSEKWIRRLGEEKRLRPYNVITLEEINSLVVKKNLYLPSRIKRGIVEYVGRIVKSHYKSWRCYKDILELIAYIGFEHSINKIYQILYNSAKNKFTRYIYKKNMVQKLYHLIRKLNLAISLDFTMIPYSILIKPVLKSFNFLYSTDDGQALKYNCKVDEITYQIKLPLRTKPLTNKDWAWFEGQFKIPERILEKFLQVKIIQLKKPILTYKLLKGGKGYFFIHFPWIFPKNNFLLPYNNRKLSVDLGVNNLAVCVVCENGNQLSHPIFIRIHSSIRKQIDRRYKHLSGLESHLRELKNGTTGHIFTFNKLSIEYQRLTMKQRNIHNQIAHDFCNTLIKIAFFWHCQTIIFEDLRNYKAKGGSKKISRRNNDWLRGKIRFIITYKSKLHGLTIIRVSPYFTSTHCARCGYTKGLKVRDSKSLLRDTKGRWFYCPKCHFSVDRDYNAALNIYRAHTIDYVQAKSLAETQPIPLAYIARGTPLNHPSGGLDISNSIITVSS

SEQ ID NO: 1378 - protein, 538 aa, unidentified
  REGION 1..538: note = Table 20
MFPKKKIPIRSYQFKLARDERLQWFQELITKATKDLLKMLWTEEWITKLGESNLKAYKVINEAQMVLPNIYLPSRVRRGGAEWVGRLLRSQYKRMNCYYECLEIVNWLGVETKESKLMAVVMQHCRKKSKRSKKTYPKYKKVMVQQTITMIKNWHKRLAIDFTMFSYTDFVQPIIWRFAFPYGPDDGHAIQYFSDEQTIHLKMKLPKTAEPRSISDWEWVEQELTIPEKIQEKLAQANSQQPKKPNLRTKILKGGLEYFFLQFPWEYPKEPKRNGKERVLAIDLGLKKVATAVVCEGGKQIAKPIMIKFKGSEYKHIEHLYDNIGGVQSKIAEQKKRRKNKQFGVKRKEEERNRLYQKRNRLGEELAHTTTNILIQLTLKWQCSKIIIEDLRGYKPPKGRRSWSRRLSEWLRGKLALLLDYKCQEQGLTLVKVCPWNTSTHCPRCTAKGQKVLGPNNLTADKKGRWFYCEACGFTADRDYIAAINIYRASFIDYSKIKSLKDTSPVPYMDSGTLHSTAPSGGSEMNYTNTIVVVTGNG

SEQ ID NO: 1379 - protein, 530 aa, unidentified
  REGION 1..530: note = Table 20
MTSYLKSYHLKIVLPKNQDSLTYFKQLTLSATNQLMDKLWSEEWIKQLGRTKSKAHSIVDAKRVLLELDGQIIYLPSRVRMGIAEQVGRILRGQYKRMRCFYDCLEIIELVGWRTHTNSIIKLMNATHRNKKHIPFYKKVMLDQTIRMIKNWHKKLKVDFQMLSYCDLVKPRIKKFTFIYGPDNYRELKYEIKNQKIYYEIKLPTIQYPKEKKDWQWISGEISIPEKIQHKINKSIKLHPKKPELIIKVLKGGLHQYFLSFPWEFIGKKREDQIKNRVLSVDLGIKKFATAVVCENKYQIGKPLFLTLGGKQFRHIERLYKHIDGLNKQLSENPNLKIKNEERTRLYRKLRRIREELAQFGTNILIRYAVNSHCEKIILEDLRLIKPRRGQKKWSREMNEWLRGRITQLFELKCQEEGLKLQKVNPWRTSSDCPRCSSTNGQKVNGSNNLMQKKEGRWFYCPECGFSADRDYIATLNIYRASFIDYKEIRSLKDTSPITYTELGIPSPDCSWRRSRDEPETTQIVMVTGG

SEQ ID NO: 1380 - protein, 591 aa, unidentified
  REGION 1..591: note = Table 20
MSRRNNIILESYKVRIPDQYHNYVFNLLNIAQELINAILIVKWKEYREKGKIEIDNKGKAYVALGGTAFKGSLFYPLYLPNRFVRCIFEEVGRILRSQDERQDIYTSLVYGWEINKNFIPFDIIGAIADDEIYEALDIIRELREKYDSNLINQEIKHIRNLVRKRYRLLKEGKDIRNYFDVTLPQKKSLSLDYAVDSDSQLCKISWDGTYLNIEMKVPTVAIPISPKDWKWISFKVRPTKKLLERLRQGCKIKKPRLVAKRVTNGRLVPMLEIVVEVPCEKNIDESIKEVLRKRVKKLKRNVRVLSIDLGLRKFATCVPFEVTKDGQIIQLGRPIFVRENNSILRKLSRLFDEVSRIQSKLSRLREGSRRWRILYREFHRKWRKIRNIIYQLKHYVSTFIVRLAKLYNCDIIVVGKLDSYRPPAGYGKLSSLLTMVFPRSVRLYLEYKCKRSGIVLVTVSEEFSSRICPKCGKIGLTVKSYNNLTQCRTGRVFYCPHCKYMADRDYVGALNIFRIFLKKYLSSLSYYSYTYTPINPRSNAPRVSPSVCVSSGVFSTKMQNYLTTLTVIIHPLQITQLIMTKTTKDNNYHSQ

SEQ ID NO: 1381 - protein, 735 aa, unidentified
  REGION 1..735: note = Table 20
MSANNRERYAVILFTQVLDNPGPTPDLGVPAQWVTCNIPRALVLKYTAKDREKLPQAKAVKSALAAWAKGRRLKKIRLAVLPSLDETEILRLLRAWDTRRGAVGAVVTLTYTVALPKEARDKTTVVDLSQRLNWLEERCLPWLNQRIKELHREDALEAALNWSRPVWKHGDLKAAPEWAPSRIGRCLLETVGRAIASQAMRRQAFLALTGNPKAKALLAEGKLYPAVLEAQAAWEHEEKIKAGLLLGVAEQMSNDHFRRTEKKWNGSAWAEWASFCGEPAPAPWAEAYTELQRPPKMKRLFLTYAADDGPQGQALRYFPTNNNKALVCELLLPTPPEAEKWSWCAFQLPLPDIVQTELARGGKLEAPDLRKTPDGQWVLDIKVQAQPKGARRNPSRRALAFDWGLRKLITAVVVEQDDQGHIKQLTRPFFLQAGGIYAKLKELRAHASLLQKKADRLRNRRNTAEPPERDAIIKEEQNTRAELAAVWQRYHELQDQLAHQAANFLLTLALEASCGVIAGEWLGSLKSQDKGNDLNWRINSQIRSAIIEKLKYKARRVGIKVRLVWPRGTSHRCPRCGAENQPIKDHPPNFEPQRKPGSYGRTKDEPGTKRRPRRYSWFQCQCGFNGDRDYVAALNIGIEFFAEEEARQEEKSGGRRLARAAKAHRQVVSYTGAAVARPFTSQNKWFPILSGRHGERKHTTNVRQWNYHGGSLCGWRGRHVSITPYVIPQRLPPAA

SEQ ID NO: 1382 - protein, 512 aa, unidentified
  REGION 1..512: note = Table 20
MSTTTLSYPLKFINSFSHTLKSLSPVMCEKINPLWNDESVFEELISARRGLKVYKILEPIVDFNTYLPSRVKRCMLETMGRILKSQLERSALYNNLCELTSNPDEWTYDFLKKNDFASKYNYVKNIRSQTQKFIDEHKRLPASYHELVPKLLVGEFITMAPDDGQFIKIKGTSEFKKKRYLTGKIKVLKERSSVSRKSWKWEEFQISMPDFIADKQEDVKPPDIRINAEGQVIIDYKIEIANQKQENNNRILSIDYGLRKLLVITCFEMTDEGLPVQFSRPFFVDIKGVQNKIERIHQEIDRLKAKLSKSTDKKKIKILKREIKLRWKKLKKLSKELEHLASNIIIAIAKIHNCSTIVIEDLRGLNGKKFARRLNRRIYRTIRAGIFEKLTYKADLIGKTVKTVFPAWTSQFCPKCGECGDHKNYGEFTCSHCGYSGNRDYIATQNIARKFFKISLKSSTGFGYISESASAAVTAGEFLSKIDRWLNGWKKCLNVAPFIVEMKNWKAYPLIV

SEQ ID NO: 1383 - protein, 546 aa, unidentified
  REGION 1..546: note = Table 20
MSKKHSRRRFITNHNHETEILTYSVPLLTPFNKEILNTLFVAKRAGNYYLRKLFSKETVESLSTSNIPAYKILEPFLCQHDYYIPSRLNRGILEVTGRILRQQGDRESVFSALLSSSIDPTNWDFNLLLEKKNLYSKSQYIENIKEQTENYISLKGKFPASYVAMTKTPRLKRGMLSYAPDDGQALRFSTSQEAIIVEMKVAKTTSPSSGKDWEWKTFSLPLFEKISGDDFASFDLRCGTVKEKLVPILDIKVKVEAKETKETGNFIVVDWGLRKLITVCVFNRKGEQISPPFLLKWKPIQKKLLRIRKTLDNLKSKRDKLPQNSTSWRWYNREVAKHWNKFRQIQKQLSHLASNCIVEIAKIFQCDSIYVEWLKSLKSDSCGRETNWKINSTVRQALYEKVQYKALLNGISFSRPLPAGYSSQFCPKCGKKGHHVKAPDRLTEKKKSGCWFYCPHCNYNADRDYVACQNLARRALFGNKLKDSSKAFAYRTKAISEKLFRQSIENFSLSLKQRVEILEKLRHHLNGWKNSVFLEPVIERAGTLRL

SEQ ID NO: 1384 - protein, 544 aa, unidentified
  REGION 1..544: note = Table 20
MSEEKKDKIKNGQVLAYPIVIEEKKVAEKLRETLEYVQQKSNEYLEFAHENRLYNVFDKNKSKYSYKVLEPIFVKLYRQSKLPSRINRGVLEIVGRTMRQVRDRKRVFDLLMKKTQDPKKWTSKLLVKDGIYIKIDYIKNIKEQVINYKRKNNNELPQDFYALQKPPKVKKKILTYAPDDGQAIKIEKKNNKVVVSFKVIDRKNGAIKWYWLKTNIKLPLFLEDKHITSPDIRFECVRGNYLPVLDFKVTIEKPQKIESGNFITFDWGVRKLTTLCVFNEKGQQLSQPHFVNFSRVQDKLQRIYKDIDHWKSKRDKLAHKDSLFKKCNREIAKRWSKITTLNKEIAHTTANIIVFFAQHFNCSKIYCENLKSLKSQKKSKDKNREINTTVRQKIMSLVDYKARLCGITLAKPVHPAGTSSLCPRCSHKGQHIKASDNKQKIHKTFSWFHCAKCKFSADRDYVACINIARKVLFKKNLKKCTKTVVYKKTRLPDSLFRQDAGAKTHCTSHIHYLKGWIHSVSLSSMVVQKSFNSFKGTIFGILRV

SEQ ID NO: 1385 - protein, 487 aa, unidentified
  REGION 1..487: note = Table 20
MTNLLEQACNHFLKEEAFPTSYAQMQEPPMLSVGCLTFAGDDGMMLGQTYRARIDLVTCCDLSTRRELHQATLALRLRSPDEQGKWGWTPWVEKIPLPETLYTYLEQRAVLQAPTLRELRQADGERVAVLDLILEVPARLVFPLEQERRVLGWDWGVRSLITVSILELSEDWREKPDAPFTQLSRPLFLDTGGLDGRQARLRREIDRLKACKERYERLISIATRTHQEKPTPLPAEYDGWLSRVRGYEERIAACWHRYERRNRELAHLASNLLILLALIYDCHLICGENLSTLKTIGRGRGVRGRFRNWRNNSMVRGELWRVLKYKCHLLGIRTRQVEPRGTTHTCPRCHEPAKTYASPAARDRKKAIDWGPFLCCANPDCRWSGARDYAASLNIARLGLAFLRTALRSSRYTSYRMADASVNPCSYTGQGALLLLRVQGINPCPIMGKQVYYAGWIRSMRLCTSQTTQTLSLLSASQLRKTVLLRA

SEQ ID NO: 1386 - protein, 594 aa, unidentified
  REGION 1..594: note = Table 20
MFERAMRNAAITQTLSYPLRLPDFIQADALRLLDVSREVINLTITALWDRLDAFATRTNTYAYKQVEEMMAPPLKHGHRQWRAEAEQAGRILRGQAERKKLFGVVLPLLEQGMIVPKTDKRRAGKNRKTIKQAMADLCEANTDGGSTVELQSLIEQACNFYLENGCFPATYEEMQRVPVLKAGIVPYASDDGPKMGQTYRLSLDLDHQRLTLALRTPDEVGTWARSWRERTCQMSLPDVLAARLQEGAMQAPILREIKEADGSRYAVLDFMVLVPVCSVEAWETCQNVLGFDWGVRKLLTASVVDLNGNQVGRPFFLDTGPFDGRQARLRRQIDQLKVKVGRLEQQRDRFPLGDPRRNPSEGALFVLRREINRCWRQYEARNNDLGHLAANILLVLATAFDCHLLAGESLKTLKSAGRGRSAKGRWRNWRNNAQVRGALWRVLRYKCFLSGIRLEWQHPRYTSHVCPRCGSSANTYQSPEHRAKVNDWGAWLCCSNPSCLWSGSRDYAASLNIARLGTALIRHAQTTGKVVHLSVLNTSVQPVSYIGTRTALRFPPSVPRGRLIHSGRVSCNGWCSSVRLRSSYATSILLRLCG

SEQ ID NO: 1387 - protein, 508 aa, unidentified
  REGION 1..508: note = Table 20
MKLQEQALGHYWSLEGLEKVAAHSGQIWKLLDAEMSRPEDVYIPSRPWRCILESAGRILRSQAERKRIFEHLLPFFTGGAKNTARKLYKEFKAEGNPEKFGYLLNVAEQLAEFCTEHERLPQDFFEFQRKPEPKRFTYTLAPDDGAEDGQAIKYRLEENRLSGEIKLPVTIEVRSKKDWQWFPFSVEIPAELQEKLAAGGALCAPDLRLKVKPDGELVALLDVKVEVPEEEPSGDPGRALSVDWGLRKLVTCTVVSRKGQLTPPFFVFWFGLKARLFRIREDIKKLQKERDRYEKGTPDWKKCNRKIAAAWQKYHRVQHTLAHTVSMLLVLLAKIFDCRHIFVEWLVTLRGKKGRNRDLNWWVSTVVRGLLFRLLRYKAKLAGIRVFMVPPGGTSRVCPRCLGAGKHVISPGNKTEKDSGSWFVCPSCSWQADRDYAGSLNIARVGFNLTRPLSYKVGGAALLFPSRVASAEISPEAMTFTTTLGYVCSVFLANIGCLVKLLDLQSCT

SEQ ID NO: 1388 - protein, 517 aa, unidentified
  REGION 1..517: note = Table 20
MSKKLFLTLNTRIITNAPLDNLVPLAIGIPNGLINQYWKEETLNSIFEYNYAYKFFSESDFNINGLYLPSRFKRALFEKVGRTLKSQYQNMIIFNKIISKCPDLDWDLKEYSDISWYSVSMLLTRLSKYKELPNNFFEFQKVPQFNNFSLDYSVTDIQLIKIDYTTGNLKIKAPIPEIPEKATHWIWADGKIVKHNKLREYLNSYKVHIPELQLKYTKSGIPYYVLSIPFEPKTKKFSKKIKRVLGVDLGLKKIATLCILDKYLGQISTPFFIKSKYIQKLFKLKQESKALNNKLQKLRGKKQFKECHAYYKRVNRKFRDLLKQIAHLMSKIIVDYAIANKCDTIALEQIINKKKGDLIWQISNWLHSRIMDYVRYKAKLHGIRVKIINPNNTSRTCPRCGFKGFTCKSSESEEEIKDGSWFKCKNCNFNGDRDYIGALNIARVCLYKKLNKAKAVSYKESATLANPSVRAISQVDKNNLISAWSLLFKFSSLRCVIKCLKGNFGKNEGLKSYNFIY

SEQ ID NO: 1389 - protein, 350 aa, unidentified
  REGION 1..350: note = Table 20
MVEQLHNHYDTHGNFPDSYTDLVATPEPNGTLPYAPDTGDYHIHEVTINGGRLEVTLNAPGTLNTDSTSDWSDHEIRFPVHSRFAEMLTHRSMGAPTLHQSAHGYTLDVPVEIPEHEYKRSDNRVLSVDLGVKNQATAVVVDRDDGQIAPPGILDHQSTQKLFRLTTEAENINDRLAALRRDGKAHTERFSHLHSEYQKLRQKETRLRKQIQHDVANQLVWLALQYECETIAFESLGQIESPDMDGTLAHSISTWARGNLLDLVAYKTELVGVETTTVNPWGTSRYCPRCGECGEIIKAPDDHTECHHGGHFHCESCGYECDRDVVGAINVGRKYLSDSMMEEANPVAYM

SEQ ID NO: 1390 - protein, 608 aa, unidentified
  REGION 1..608: note = Table 20
MTDHLSLSLRLPDTHHAAYRRLDELVQQIATHILHDHWTADELDGIHAANHQAWKYFDEHQPFDDLDDEAVYSALYEETPPADFELYLPSRIRRCILQKIGGTLRSHADRREAFQSIQYVLPTHKIRRIHRRRIKEELWDDGEYLSSGYIDILIDQLNAHYDRHGRYPDSYFDLQDPPEYDDGTLPYSADDGSTSGQAVEYSRDDTADTLSVKVKTPDTVTPQTRGDWSWHEHDLPTYDVFNDLHDIGSISAPEFQPGRRKNGDRIYELAFPVKVDGTDTSDEMERVLALDAGMRKEMTAVVVDETGKQVSRPHFVRFTDRGGMRRLHRERQRLNARLAELRRKGRAHTAEFKQVQAEYERVNTKLSNKREQLVHDVANQVVALALVYDVDAVVHEDLRSLSPPSGEGGLSWELSSWARREIIEKIEYRADYIGVAVERVFPKGTSRVCPRCGGAGHTCKSPDHHEEVWWGGHFRCDNVRCEFQGDRDYVAAVNVARVFFSDGAGLDHGFTSSYTEDAEIVLADRSAGERSDASQSTSELVSDAGTRLAFGRGVVAYEPEQARATAGSGSARVAPAVALSESNADGSDGCGPATRRYTRFQRVTAEHC

SEQ ID NO: 1391 - protein, 555 aa, unidentified
  REGION 1..555: note = Table 20
MSEQILSTPIKLPRSHQENFRHMENLTRRVANHVLEEYWNEEHLVRISEHEGRAWKYFNEGEAFDDVDLYLPSRFKRCILQKVGETLRSQASKLRAFQKTKPLLPEKALDKPDKRQIRKKIYEDDEFTDLDEVSSLLKRIDNYYREHGRYPDSYLDMQNCPRYEKGTLPYSADDGPEKGQMIRYGRDGEFRVEIKLPETASPEVRGNWSWFDVKPDVHEHFHRLAEIGELKAPEFHPKNGKTGERFYYLNFPMEVRELDKKQETGRVLSVDLEVKKIATCVVMNEGGEQLSKPHFIRSSETEKMRRLYYERNDLNSKLGNLREHGLAHTHEFKHLQAEYKRTQNKLNHKREQLQHSVANQLLSLAIYYEVDAVVFENLGRLKAPRRHKTTSWIISTWARGMLKDKVEYRAEIAGIDVETVPAWGTSRTCPRCGKRGETVKAPDIQEKDRSGGHFKCKECGYQADRDYVGALNIGRKYLGNGHLKEVKPVAYTESGNTPGDRSLGVRPASFEAEKSEEPSSHPSRIVPPHRTLIDGGDEPRLGGKPKGIVQLVEDY

SEQ ID NO: 1392 - protein, 367 aa, unidentified
  REGION 1..367: note = Table 20
MTRQIKNLGYVPESYFSLPAPQFNGNVVLMEIDDGQFRKISYLDQTIYLDLKLPQQDKWKWVKAIPIKPYERLKKILDRGKILSPLIRKVQGNGWEKYLLTMRVEVSLPQTQQDVAKVLAVDLGLGTSALAVLGVIENDGKKSSPIYLKAQKIVKKILRLRFTLSRLQSKIANWHQQKAWERIKHLRAHQKGIHNKINRLTKELLEILTKEIVYIALLYGCRKIVIEDLSWVEPQKGQKTLSWLKSRWFTGKFKARLKEKAGLYAIAVVEVSVKDTTSRCCQCHEKVEKTKERLVICPNGHKKDRDFNAVINIGKRALGIPSLYGKGCEVECSISLNSLLPLSTLTAWIKIVKSTFFNHWLAKARDG

SEQ ID NO: 1393 - protein, 520 aa, unidentified
  REGION 1..520: note = Table 20
MSVNTTTLTYDVTLPKFLWKHLHRLFEQGKGETNRLIRELWNEAGFSILKRKGEASAILKGVVKRPSYIPSRIFRNILECSGRIIRSQIKRKEIFEKLLKGENLKKNLLVENILRQIENLKKKGRKPDDYFQLSPPLFSGNIFLTSSDDSIENGQLKKLKVCKEHIELKIKLPVAFGRYRWFKAEIKTPERIRRTLLLGGKIKAPVLRRVKNKNNKYVYILSIPMEFKSDRRAYQEEKVLGIDLSPSVKRLAVGVIKGRKEESRPIYFKAERVVKKVLRIRKEISFLERKIDNIKNQLEETKSSDHKKKLHKRLKHLFSEQKLKQRKLKNIRKQILEILTKQIAEVAKLERVSLVAVERLKFKDFPEWKGKTFRWLFSSWFYSKFAERLEQKLRLSGIKLKQINPAYTSKRCHVCGSSLKGEGLYLFCENCKKKWDRDYNAAWNIANKGYISLFQKERKPKGLAPEGARELTVPSGSLLRSWSEIVEVKSAILQSLKELVSSVKKNGTVYSWYLRNKDCT

SEQ ID NO: 1394 - protein, 544 aa, unidentified
  REGION 1..544: note = Table 20
MDNLTLSYSLTLPQSIYPHLDYLMSINKRQIKNYLKDLWNNETLSKLTEKAKALAVLKKDTKRTDKWIPSRVYRNSLELTGQILRSQIERKQIYEFIANHPCTIVYNENYLAKYLEKSPLFILNIQRQLKKQIKKGYIEKDYLKAVKPDFNADIFISSADDSIENGQFKKLEFYKKKGLWFMKLKIKLPITNQKFKWFEIKKAVSNKIAKLLNKEAKPKAPLIKKELLSNGYEIFKLIIPFEIKINTPKVEKIEEEKLLSIDLSPSENRLAVATVVEEKGHSKPAFFKAKRIIRKIDRIQKEIDRLEKKIDHIANNIHTTTNKTHKEELQKRLQHLYQEQKRKQKKIKQIRKEVLEIFTNWIIEYARSYGIKVIAIEKLSFKNIPNWKISKAIKRFTDWFYSKVKDKLEYKAKIKGIKIIEINPANTSRYCHKCGEKGKAEKLVFKCECGEYDRDYNASVNIGKRAIKIIKRIKEETGKSKSQEQGSRDTPARNPFRQGLASFRSLLSIKPLTQLVAYSSLVEVSAIKLKKLSKWIDLHDYGYG

SEQ ID NO: 1395 - protein, 534 aa, unidentified
  REGION 1..534: note = Table 20
MSNTYTLSFELTLPQWVYPYLDRLFNVFKWQVRKTINSIWNEEYFQKLKEKTSAMSVLKKDIPKPPHIPSRVHRNILELSGQIVRSNIQRKQIYDFIIEKPCRVIWSEYKIAEELQTSPLFVENIQRQVIRVLKKYKQKKDYLEVINPIFNGNVVITFADDSIEKGQFRRLKLTSNFLEFEIKIPSGNSWQWVKLKKLIPDRLKKSLLKAKRVASPLIKKVNLKSGYSIYRLVISLEFETKDLKENNLRTFSVDLSPSENRLGVGVIAYPEGYSKPVFFSAEKIIKKLERILKEISKLESKIDNISNQIHITTSKSHREKLKDRLRHLYTEQNLRWRKFKALRKQVLEVFTNLVIQHAKAYNCSFIAVERLKFSDFPQWKDSKMRRHFSQWFYSRFNERLKQKAIIFGIKVLSVNPYKTSRICHKCGKEKKPEMLQFSCECGVYDRDYNAAVNIGKRALQILVRGTKSKPYMGKDTPGRVPFPLVPAHQVLPYKFKAFLSLISLTKLISYLRIVETSYLRLKNLNRWTGSDKYG

SEQ ID NO: 1396 - protein, 232 aa, unidentified
  REGION 1..232: note = Table 20
PTTLENCSIQVFVLPPTPETGWVRIDTSKLASVHISSFEKRRSVQRKASKSKKARRVLAKYSNRERNRARKHQLEIARVIHSVAGVVGLEELKKHGMYTRSRLWNRMISRSDWRSITRILVEKMGEAGVKELDPYGSSSYCSRCGWENKDLNGAVFECGGCGLRINRQLNAAINLYMRLRFGYTEKWVGGRKRVQLRMEGASQKEWWDTVVLPSLLGGCVLKGESGVTPMNS

SEQ ID NO: 1397 - protein, 277 aa, unidentified
  REGION 1..277: note = Table 20
MEELVESKIVELGKLRKIYSDVQYLRSYLGVLRKSGTPSGLSPPDGMPKQLFSLVINGAPPRLGPLPIEGNNPYLVKDLGCMVSTDRKDKPLGAVIDLSQGVKVYLVFERPQTVVGIDIGLRHLITAVAVTNGRPVKTRMWGDEKLNMEFMRFLGEPQGLARVGGLRQRVEKMLEDVVVYIASWNPKTVALENLRETTGRMGTSLRIVQETLERVMYNHGVKYKRMSPLNTSRICSNCGYRKGELTGSLFQCPVCGYVADRDFNAALNLALKCYYTC

SEQ ID NO: 1398 - protein, 247 aa, unidentified
  REGION 1..247: note = Table 20
MDTVKKLGGNIPTRPDSIPQQLYNEIVKGGRPRLGPIPIKGADPYTLEGIGAKVICNKRGVAIHAIVDFSSGIKIFLAYQRDKTIVGVDIGMRHVATVVAIKGTDIYVSKSFGNKEIMGKLMRYTGEPQGLGSSDEIRRILKPIINDIVNYIVELNPKVVVMEDLRKVNGRIGYALRTVQDMLIKSLYERGVKYERRSAYSTSRICSKCGYKGGELIGSLFVCPACGFTADRDFNAALNLATKGYYS

SEQ ID NO: 1399 - protein, 272 aa, unidentified
  REGION 1..272: note = Table 20
MKEEIIEARILEYGKLKSLYNDIVFFKKYSEILERSGETVGSPPPSIRELQFVQNRIGPLKVVVQGRSAKLPEVNAVVLLPRNGIPKFALADFSNGIKVYLGYEKESLIVGIDIGLRHLFTVVAITRGKLYKTRFFGDKEVIETFTKYLGEEQGVTHLEEIKVKVRGIVKEATSFIKELEPKVVAIEDLREYEGKVGKGLRVLQDMLEKELYSNGVRFRRIDPYNTSKLCSHCGYKKGEVMGSIFVCPSCGYKADRDFNAAYNLALMCYYTC

SEQ ID NO: 1400 - protein, 279 aa, unidentified
  REGION 1..279: note = Table 20
MKVKLFESKVISKGELERIRNEVLFASMYVASLKRKGLDAGPPPITVPKGVYYQVVSSDVVRIGPVEVVRQGNNYLLKGLNAVVEPPLEGEPVHAIAEVGKEIKVYLAYPVEQSVVGVDVGVRHLFTVVAIDKERRVVAKRYFGENLISEEFAKVVSTSEGLGEITTIRKKVEPVVQRAVDFIEGLDPKVVVLENLKGIENRIALVLRIATDSIRQELYRRGLKYRFVNPYRSSRLCSNCGYREGILEGHVFFCPKCGLRIDRDLNAAVNLAMRCYYEC

SEQ ID NO: 1401 - protein, 460 aa, unidentified
  REGION 1..460: note = Table 20
MPVVKNIISTKQRIGRFITGSPEMIRRTEEIYRAVLGFYLDVIHDNLDKLPGWDRNSGTRALERLTVRTEPRMNRKTGKPFGGNPDPPYPIDAVWPKFPAYLRRAIIAKAIGMAKSWHSNYQRWLRKKERIQERNESRVAEGKKRIPFDEHPPKYPAAGNVGITFYKGDFKNLSLKANTIQLKVWDGSDWRFITVEVEPTRHSRKLHLDDAWEMTVPTVYEREGIFHLVTAFEKKSNVMKFTDYYRSKNPKVLAVDLNLGRKNRAVCALVGKDGTVHKVRHIGLTACNTTDVHHLLGLIARNVSDLGIVPKGHRPCKKLWRKVHAANDNYAHHVSKRLVDLAMEWDARVIVFENLKHFRPDRNRHGSAKMRQRIGYWLHRRVMKYTTYKAKARGILVALISPKDTSARCSLCGSLETSRAGNILACRNCGPVHNSHVNAAINIGMAWFIREEKRLQQKTA

SEQ ID NO: 1402 - protein, 426 aa, unidentified
  REGION 1..426: note = Table 20
MAKATKTILKRLNLRKPEWFLETQKLFNQVAAFYFEVIQAHEEVLALKNKEALTALERLTMKTKDNPEPAMPLPYDVPAMFRRAAINAAIGSARSFYSTLHKHHTKKEKMEAKGKKYNRRPPVPPREWNRNVVFYQGMMKELTLNSVMLKLYTGTSWAWVKLEFRGRSIPEGWDTGSPHAVVHKNVIQLHFPVEKKIEKPQKTEKQAQNPDLRICAVDLNMGDRQAVCTILKSDGTEIARKFIEGGDFLQHRRKRLLGKVAVKRSKYGGILPEGTQDNARLWEKIRNIEDYEAHRISRRIVQFAQEHGATVVVFEHLDNLKPEKGRYSKRSNTKRAYWLKGRIYKYTKYKAWESGIITARVNPRNTSKQCSKCNAEVFRHRHGEEPKEYIVGAPLFTCPQGHRGNADLNASRNIGKKLFERYLKAC

SEQ ID NO: 1403 - protein, 434 aa, unidentified
  REGION 1..434: note = Table 20
MTYRVRLYDRHFSWLKATKELYTQVVQHFFHVLQQEEELLKESDFSLLRTLEIRCIGTKEMKAAGIRPDYPLTGFPKIPLYFRRSAINTAVDLARKKAGTVNPHITLYKGMYQNFTDTTIELKLFNGEKWVWVTYPFTGRSLPPEAERLSPMLVLEKKTAWLEVPLSFEVQDIRTVKERMETEERICAVSFPDHDVLAAAVILSRTGEELEQKVFRGGNEKEDQRRKLSARIHTSEESRGMEERRNRFDVRMETVSDCGDGSNVTGTKENSAKENAALYAGIHDLNRYYAHRVSRQILAFCQQQNIKIIVVPNYENALDFRDKQYLKTDGYRWLGRSIIKNLKYKAFRQGILVTSVRPYHISDCCSECGEKIRKYNEGHTAGKKYYGGKLFVCPNGHKGNAAFNTARNVGKSFLGYFPEEKGLSHRKGIAETYE

SEQ ID NO: 1404 - protein, 414 aa, unidentified
  REGION 1..414: note = Table 20
MENKSNQVKSGQITITYKMKLYHRHLEDLILTKKLYNQVLKFYYEILLEQEELLELSNFLLMRELEILSVGTKEDKKEKKKPKYALDEFPTLPLYFRRAIINHAISLMRSYKSNYQNWLDSEKKKKCPIPAQTFCASPIYYKGMYKDFTETSIRLKVFDGKRWNWLKFPYQGRKIPEKAVALSPVLYLKGKKAWLHVPVSIEVEQVTTIAERMKEEEKILAVSFPHADTMAVCAILLKNGEMAGYEYIRGGKEWRGKKKRLLERLEKSQKSRKQICVSDNKKIFQKIENLNDYYAHQISRQILEYGKKHQIQVIAVPNYEMGIEFSKRKYFEGNRFDWIGRKIIKYLKYKAFQEGMIVGTVRPYHISDSCAECGSRILKYNGGKLYVCSKGHRGNSGLNTARNIGQHFLKNYNN

SEQ ID NO: 1405 - protein, 422 aa, unidentified
  REGION 1..422: note = Table 20
MIFLCKKRRTKMKEPETGKKENTGKSGYSITTWRLHLWCRHPEWLRTTQEFYNRIAEFYYNLLLDHTDLWEMGSQQTLRELEIMSIPGRGGRIPSDPLPWQKVPLYFRRAAANEGIASAKSYISHFVQDEKIGRAEKLNAAVTYYKGMYQDFSAKKITLRVWTGDTWTWMHCRLSGRDFPENARLMSPSVVFEYKYDMLHVPVRQNNENTATVRQRMQAGCRILCIQFTNSDAFAVGVVLDGTGQEIAVKFWKGGKEYSHHCRKLLEKIQKSQEATGGRQTGRVDQKYWMHLKHLSEHYGHQVTSQILRFAVEQDVSVIVLPRYNQEYSRNVMKGSGNWGPLHLSTRIRQYLDYKAWKNGIIVIEVHATGISKICAKCGAEIIRTDTRTELCCCANGHQTNRYLNAVRNLGKKCLTQFGRRA

SEQ ID NO: 1406 - protein, 401 aa, unidentified
  REGION 1..401: note = Table 20
MKTGYCIKTIKYKLRCSHPEWLTETEKYYRQVLDFYFRLLLEHEEIWELNLLQMQGALERLTIAGRDGRVPERPLPFDKVPVYFRRSAINKASASLKSYTEKYKNSGDDLVYTIPDTIDASVTYFKGMYKDFRENKISLKVWDGKKWNWMDCRLKGQSMPEDGMMLSPTVVFREKEFWLHVPVKQQTEDARNAKERMMSRENVCSVQFTNTDIFAMCCVLDGDGKQKAVYSCRGGDAYRSKCKVLLEKIEKSRVYTDKDNAPHANHKYYLRLKNLSEHYAHQVSREIVDFCVREEASVLVFPSYDKEFTKVVRYRSGMYSPLYLGSRIREFLKYKAWSTGIVVLELSAEGTSSKCFVCGGKIKKNGAMFECENGHQGSRFLNSARNLGVKCLKDFERKRKI

SEQ ID NO: 1407 - protein, 302 aa, unidentified
  REGION 1..302: note = Table 20
MKTGYSIRTWRMRLFCSEKQILAETEKLYCEAVAFYYELLKDRNELWTENLLTIQGQLEKLTVPGKDGRVPEYLPPGGKLPVKQENSDARTAKERMKEGCRVCGVRFTNTDSFEVCSVLDERSRPVSVKNCHGGNAYRYHCKTLLKKIEASKVFTDKDNVDQPNKKYYMRYKHLNEHYAHQVSREILDFCKENQAGIIVLPEYDEDFYRMTMYRSGNDSPLHLSTKIRNHLKYKAWAEGILVLELCADGTEKYCSICGSPGKKQSKLFICQNGHQINRFLNGSRNLACKCQQSFQKRSGSKS

SEQ ID NO: 1408 - protein, 425 aa, unidentified
  REGION 1..425: note = Table 20
MEKGYGITTWWMTLRCGHPEWLVETEKLYRQVCLFYYNLILEEGIVDGKGGIQQMQREAERLTIRGRDKKEPVRPLPFEKVPSYFRRSAINKAIAAARSQKARQYAGRSEALEAPVTFFKGMYRELTGQSVELKVWDGEKWRWLHCRLKGKPFPEVCQLMSPSAVCEYGRWMLHVPVRQETEDARDARSRMAAGERICSLQFTNTDAFAVCCVLDGAGTLLKVKFIGGGKEYQHHCRRLEEKVKRSWGAMGYGEKGPAKGERPEGQPNKKYFLHLKHLGEYYGHKASKEIVEFCREQGVKVLVMPEYEEGYSRMVKVKAGNYSPLHLGNRIREYVEYKSWAAGMVVVKVSAAGTSGMCSECGAQVKREGEKTSGELVVCVKGHRKNRFVNTGVNLGRKCLRGFGEKKPGMKGKAAVDEAAGNEMG

SEQ ID NO: 1409 - protein, 404 aa, unidentified
  REGION 1..404: note = Table 20
MKKNTYYSVTVKKFSILFRHTDWFLKTQELYNDILKFYYDLYLDIFPETQPGSLETMRSLEKLTVTGRDGKPVPYPLPWEKIPLYFRRAAINTAVSAARSYLSREEQRERTKIFTESVTFYKGMYKNFDENEISLKIWDGDSWRWIRCRLRGNRLPETGMMMSPALVLRRNPEDGRILRAELHIPCKTPVADGRNVKERMASGEKVCSVVFTNKDASLVCCILDSRGNMEDCLFLKGGAEYSHRCRMITEKLEKSQKSSGGGDNPRANGKYWEKLKNLNENYAHQFSRQVIRYCGENNAKILVLPEYEQNHRKIIMLSAGSFTPIYLSTSVRKKLKYKAWQAGIVVLEIQQHKTSSVCSVCGGKARIRGSEFFCENGHQGNRYLNSARNLGRKCQQGFERRESI

SEQ ID NO: 1410 - protein, 403 aa, unidentified
  REGION 1..403: note = Table 20
MAGVKGYYAIRTKRFVLKTSYEPWLWGTWELYNELLRFYYQLFLEHSELHSLGKQKLLRALEQLSIVGRDKRPVEQPLPFKGVPLYFRRAAINAALAAGKSYLAREGQKQPTEAFEAGVTLYKGTYKDLDSHSIRIKVWNGERWLWIRCRLSGNVIKEGDVCLSPRMVFCDERIELHVPVRQPVPDGRTLRERMEKDMDICSVQFTNGDAIGVCCVVDCRGCLRTARFLRGGRDYAHRCRRIQEKIRISQESVGRRRGSNDNKKYWKKLKQISDDMAHQVSRQIVDFCVETGAGVIVLPKYSETFTKYVMASVGNWSPLHLNYQIRSQLKYKAWQSGILVLESEVSDIKRYCAACGGVVRSQGEQFVCENGHRGNRRINAAVNLGRKTRESLSEHLSCDKQNG

SEQ ID NO: 1411 - protein, 426 aa, unidentified
  REGION 1..426: note = Table 20
MAAWSTTTYCLKLHCKRRDWILKTQALYNDVLSFYSRLLLNDVSLLELDNMKLLRKLEQMTIAGRDKKQPEVELPFPKLPLYFRRAAINAAIGMIRSYTGRLRGWEKAREDARKKGLIWNRKPPAAPSHFHASTVLYKGMYKQFGQGRILIKLWTGGSWSWVGHAYSGRSIPPNARTLSPSIVARGKLIFLHVPVSCPVEDIRSVRERNAAGEPFCGVSFSASDVMAACVVFSGDGRANASYFVRGGKAFAHRRKRLLNMVKKRRGQTGGKLVAGENARLWRKYRNLRMAYAHLVSRRILDFCIRHKVKTIVIAQYSYDEQKKRYYGRGIAAFPGKQVSAYLKYKAWRAGIIVTSVAPEFTASKCSACGAPVKRYNEHHQASANYFGGRLFICPNGHRGNASYNAAVNIGKAFIRKFTNIQEEKAG

SEQ ID NO: 1412 - protein, 401 aa, unidentified
  REGION 1..401: note = Table 20
QDHQDLIGHSQWLKMAENLTHRTKDNPNPEYPFDEEFPNFPSGFRRNAIAEAHGKALAWKTSYEKWEERKRRHEERNQRRIAAGKKPIEFTERPPQYPEYDNCWLSYYNTEYKWLDSNHIMLKMFTGKSYVYRKIVLLQPFIVPPGYAAGSPMLVEKPTGWELHVPIVQTIWKNIKKIKELIKDPSLKICLVDLGMNRHAVMTIQDTEGRVYVTKFISGAKDNHLRKRYLEKIVNLQKQTKIIPEGERFAKYLWDKVSNLNDDIAHRVSKQIVKFARQHGAKIIVFEYLDNLKPEKGTKSHYLNQKFNHWVKGRIFRYTKYKALHEGIVTCRVPAKETSSRCPYCGFLTVVRYSKGKDRKETKGVDLAKCTNCEVHDVNADYIGTLGIGRNFRFKHLSPAG

SEQ ID NO: 1413 - protein, 523 aa, unidentified
  REGION 1..523: note = Table 20
MATAVKTLILPLLDANPGKREALTATETLFTQMVQFYLDILLNQPSFWDKVVEGDIQTGAILSEQIPTNKDILTRLEFATISTATHPIPPHPLSGLPGAEAAPVLFRRAAINRAIGLAKSYRATRRRWETRAAHRRGKAPTIPTVRSMPVTLYQGMSLLVREETRSFLRVKVWNGEVWRFEAYPVAIAPYQRSLLSVAEAEQARMDKVRAEARTLQKAGREEEAQTLLKTEGKQQKGVPVMASGTLFHDGSHWRFHVPLFTPIRVKRAQDQLAENPNLPIATVDLGVNNLAVAVAFQGAKVTGTRFIPGRPHEQRRFRRLKAIAVRQHKTGGRAKRGANHPIWKHLKHREDAVAQQVARQIVDFAQANGSKVIVFEALSHMRSPQRIGWMKRQNVRRSYWMRGKIMHWVRHMALHAGILTVTRDAQFTSQACPRCGHLGARFREATRHRRRGQDVFHCYACGWSGNADLVGALNLRKKWLRIFPAIAKLRHEQKLREAQGQRTNRRRSETVPTMKTGPNRSGV

SEQ ID NO: 1414 - protein, 526 aa, unidentified
  REGION 1..526: note = Table 20
MGQVQAVRTMILPLWGPNGVKNEALERTQALFEKIVAFYIPVLRQEGGLWAKVPKRDKETRAILFDPETGEIKMRAPTADDVLTRAEAITVKTKAHPDPPYDLSAVPGAAKAPVVFRRAAIKRAIGLVQAYRSNLARWERRGRRGRMPGMPTVERFPVTIYQGLGFIVRGPLRSFLKVKLWNGAKWDWFEIPVRIPERAATLLAASEATRARMEAVLSAARALEREGRTEKAQAVREELKPLPWEIAQASATLYRHADGWAVHVPFVRTVPVQKAENQREANPGLAITTVDLGENNLAAAASWKGRKVTGTLFVPGREHEARRMRRLSAIRRRQTASGKPIKGVRSNKRRWVRLAQAEEDTARKTARAIVDFAKAHGSKVIVFEALNRMPGTRRMGWTRRQNLRRSWWIRGKILEFVREMALWEGILVVRRDPAFTSKACPRCGTYGERFSQRAHGRGPRHTFHCPACGWEGNADLVGALNLKKKWDRTFPPLGPLMAAAKEARKTQTAPAGLGDKGAVGCAANAG

SEQ ID NO: 1415 - protein, 241 aa, unidentified
  REGION 1..241: note = Table 20
MTTVDLGENNLAVAVAWRGRKVIGTLFVRGRAHEGRRLRRLSAIRWRQMASGKPARGVRSNRRRWARLAQAEEDAARQIARRIVRFAKTHGSRVIVLEALNRMPQAQRMGWTRRQNLRRSWWMRGRILSFTRAMALWEGILVVRRDPAFTSKACPHCGAYGERFSRRTGGRGPRHTFRCPACGWEGNADLVGAINLKKKWDRTFPPLGPLMAVAKATKNDTKTAPARVEDKGAVEGAANAG

SEQ ID NO: 1416 - protein, 498 aa, unidentified
  REGION 1..498: note = Table 20
MKPVRVSRTVRLKVRPEANPGKQAALEATWTLWDRAVAFYLGFFLAHLGILAEIPKSLELLTWAETHTVSTPDHPTPLPGWDIEQSVPGVPVVFRRAAINSTIGAVRSYASNLKRWEAADPKRGQAPKPPRQKPHPTFYTGLYRVDMADFQQGFLRLKLFDGRRWQWFNLPVSAPPYAADLFAASAAEKERIRQIRQEQNERMRAEGRKKRTKEEKEALRPRGWVAQSPVLVHKPDGFWLHVPFEKWVFVAGKADEQRTQNPSLRVGTIDLNADSAVAAAWEGKQCMGVKTVWHTRENAKREKALQKVTRKQWRSGKPVKGEHSNRLLWSYIRNLDGTVAWQVAATIVAWAMAAGLSVLVFEYLRPYRPGRGLSWSRQTNRKRAYWLRGQVLRHVRDLALREGILVVERNPAWTSQVCPRCSRLGERFSPNGRGYPSRFRCGPCGWTGDANVVAAFNLKKKWDRSFRYPTQEERKAAELRRARKGGAAAQPKGLPRTG

SEQ ID NO: 1417 - protein, 262 aa, unidentified
  REGION 1..262: note = Table 20
MSLSLYVKRDKQYPGGLRFALHIPFEKWGDAPPKAKAPFATNPGMSVVTVDLGVNRLAVMGAFRDDKLLATQFIHGGELNHKRHLLLNAIYKKRGQSGRLQKDVPDNVDLWNKVRNIDENAARQVARQIVKFAIDHGAKVVVFEYLRGYRPPKERMSRSGRKNHKRAYWLRGKIVTWVRDVAFREGILTVERNPAYTSQMCPHCHMPGERTGHHFTCQNPVHSYHADADFVGMMNLYRKWNGTFVYPRKKRADEPNPAQVTA

SEQ ID NO: 1418 - protein, 485 aa, unidentified
  REGION 1..485: note = Table 20
MAEAIKTIKIKIVNPNKGKEEALESTLEILNSCLSTYIDLTLQHRSLLSAQKEFLNKRTGEVRLRPLYNSEILTELEKLSLPTVAHPYTSINIKFLFPGLPTNFRRSIINTAVGMVKSYLSNLKKWEEKKKGKPPKPPAAFNLPTFYKGTYQFQNIQEEKFRIELLDIKNQFVRLKVFDGSKRPIEARSLPHRNGGSDNLWIWKNYPVKIGRKQLNLLNDPNWSSLSPTLVPKRKKRIIEWYIHIPLVKKVSVLPISEQKKDNPNLTTLAVDLGLRHLAVVTVRQNGKIVFVKFFRGEKCSAHRFSHLQKVFKKQHQSGKPVIGERSNKAIWRHIRSTNTDVAHNITREIVEIAQKYDVKVILLEHLSRFQPKKGEKRSKKLNRKLTYWLKGKIEEQLRYKSFFDGILVSCVNPAFTSKICNKCGGFGERFSNKSLFRCFYCGYCANADFNASVNLHKVFWDIFSFPKKKKYKKPARKGKGIVDC

SEQ ID NO: 1419 - protein, 370 aa, unidentified
  REGION 1..370: note = Table 20
MPVVYRRSVINDAIGKVRSYLSHLKKWEKSGEGKGKPGWPKADNYPVLYKGTYSLQLIGLDRKGSFVRIKVFDGSKWVWVNYPVKIGRWQEKRLAEPGWETKSPKLVIGAKKIFLSVPQAREVRARKVEESKLDPELVTVGVDLNVKNLAVVTVMKSGKVIETVFIKDSGLDRHRYLHLKLISKHQRQSGKAVRGERFDWRLWSHIKRTNLDFAHKVSRKIADVCAKYPRCVLIFERLGRSGHGKGGKARRINRKQANQLRGLIRDLSKHKAFQYGTVTVETDPHGTSHYCARCGEKGERFSFKNGKRVKRGWGKLFYCPHCGYEVNADFNASVNVHHSFYREYHWRIEGKARSGLKRPARLQAGWEKLP

SEQ ID NO: 1420 - protein, 392 aa, unidentified
  REGION 1..392: note = Table 20
INKAVGMVKSYISNLYNWYKEGKELGHSKPSYPNPRNYALTYYATDVEFENILQKGTKKPFVRIKVVDEKGQYKKVNYPVLPYKRFYERLNQLEKEGWKVKKTATLIKKEKDYYIAILFEKSIKKPNPKKPRYIINVDLNIQRNIATIGIYEIDWEGKEAKLYGVKFIGGQLSRLAYKRDYLLHQIQVKQRQTGRSPTKGDNKRLWDKVNNLNKDIALKVANEISKIAEELKEKGEVIVVFEELKGLRARKEKGKRLNRRLNYWLRKKIVDRVKEKGLEKGYKIDDIYPQYTSKRCSRCGQLGERFSPNGSTALFGCKHCGYIVNADVNAVFNQFFIYLSYLLKAGRKARYGSSFKTKKTRDDLKLVPPVVREGASLKSSKGSSQKSAVVYN

SEQ ID NO: 1421 - protein, 747 aa, unidentified
  REGION 1..747: note = Table 20
MATKSYRARILTDSRLAAALDRTHVVFVESLKQMINTYLRMQNGKFGPDHKKLAQIMLSRSNTFAHGVMDQITRDQPTSTLDEEWTDLARRIHKTTGPLFLQAERFATVKNRAIHTKSRGKVIPSPETLAVPAKFWHQVCDSASAYIRSNRELMQQWRKDRAAWLKDKNEWQQKHPEFMQFYNGPYQNFLKLCDDDRITSQLAAEQQPTASKNNRPRKTGKRFARWHLWYKWLSENPEIIEWRNKASASDFKTVTDDVRKQIITKYPQQNKYITRLLDWLEDNNPELKTLENLRRTYVKKFDSFKRPPTLTLPSPYRHPYWFTMELDQFYKKADFENGTIQLLLIDEDDDGNWFFNWMPASLKPDPRLVPSWRAETFETEGRFPPYLGGKIGKKLSRPAPTDAERKAGIAGAKLMIKNNRSELLFTVFEQDCPPRVKWAKTKNRKCPADNAFSSDGKTRKPLRILSIDLGIRHIGAFALTQGTRNDSAWQTESLKKGIINSPSIPPLRQVRRHDYDLKRKRRRHGKPVKGQRSNANLQAHRTNMAQDRFKKGASAIVSLAREHSADLILFENLHSLKFSAFDERWMNRQLRDMNRRHIVELVSEQAPEFGITVKDDINPWMTSRICSNCNLPGFRFSMKKKNPYREKLPREKCTDFGYPVWEPGGHLFRCPHCDHRVNADINAAANLANKFFGLGYWNNGLKYDAETKTFTVHTDKKTPPLIFKPRPQFDLWADSVKTRKQLGPDPF

SEQ ID NO: 1422 - protein, 693 aa, unidentified
  REGION 1..693: note = Table 20
MSTKAIQAKVIIEKPEQLQILWQVHSTFNQYLPFVIKQMYRMKRGEAGKEYQEIFNSISSSQNAVGKMEAVTDLNWETSKADSENERDQWAKVASKLVKDKKILFDRKKELPNISSEFRRKIFEMAFQLISGHDELMKNWKSEHKKWIEDKKKWEEKNQQYLKVRSVFDQFEKAVGGKVTGRRQRWHKYIEFLKSHPELAAWRGKEAKVLEISDKAMKKIAKAPLRKKNSIYAKEFFKINPELEALDRIHNYYEREFVRRTAKRRNSDGFKHPPTFTQPSAITHPAWFQFKKGPGYQALNIKDSSVELNTFKGWLKFTFKADPRLYQFEPVKIVKTTRGGKEKEADSYEWTDSNLQCKRPVDIKGIKLVFRNIEFENKTGNLISADPYLIFTCDIPDLSSKHKLRQDSCDKYSFDWVRKRIMNDTDGKIPVTCAIDLGIRHLGAATVRKDGKIIRTRIIWEDSVYDTNDSTNIYQRGPGLGHIALHKRQISKIRSLRGKPIKGEESSIELQQHIDNMGEDRFKKGARKIIQFALGLDGSKNNDIKADLILIEKLGGKTFVPMAEREHGINKALINWNRGNLVTWIKRLAVDAGLRVVEVPPAYTSQVCSKCGEFGKRYSYEKNKEKQIIVKDDPCGKLFRCSKLGCYADVNADYNASVNLHKKFFGEMSDYQNLKDKFEEFKKKVVDFFAGNK

SEQ ID NO: 1423 - protein, 687 aa, unidentified
  REGION 1..687: note = Table 20
MSTKAFTARLIVESPEARDALWRTHRLYNECLRFVLRHMHKMKRGEADPRYGEIFGAIRNSQHATAVMEAVTDLRWKPKKDPKPWHTPAAALIAEGKLLFDRWKELPGLPGRFHRKLWEGAYQAMDSHKELMALWVSAHQEWQKARAEWEAENPEYMKVRPALEAFEREHGQAAKRRQRWHKWLAFMRADPRLAAWRGGKALANPISDQGQQRLRRARRNKRNKVESEEFFNANPELKELDKLHGYYQREYVRPWAKKRNPDGFRHRPTFTEPSPEKHPFWYQFKKGETYKALDLQAGTISLQLLAPEGAKRAALWTTFAFRPDPRLRLIQKANPPLKEKFTYAFADPAFPGQPARPAEIRGAKLIFRRAQPDGAIYLSFTCDVPDLDSRLSILQKSCDKYGAKWACKKAMSDLGGQQPVTCAVDLGLRHLGAATVRRDGKIVRARLLREEDQPGKGPALPAIAGHKRALAKGRRKRGKPIAGEESFIELQRHTDKMGEDRFKKGARRIVAFARENGADLIILEKLGGDRRGALIPDAERERGINRALVLWNRGNLAKWVKQLAADAGMRVVEVHPYMTSQLCSRCGAMGARFSAKEGLPAFEPVGKLFACPDCGYLANADHNASVNLHKRFFGELPEVQRPNRDKRVFRVTPDDQPTVEVDMADVEKRILARGRADDLCRGKRTPF

SEQ ID NO: 1424 - protein, 465 aa, unidentified
  REGION 1..465: note = Table 20
MSKRRTKKQPLPKEVIRTDVWSLSVTADQKRQMILTVESYRMFLKPLVLIVNAQWVNISDLTSTERVNAVEKMIHKTADNPNPKHKYFQSIVKKIPSFRKFPSYLRRAAIADAIGIVSSFNTRYYQWQSGIRKHRDCKPPSFTSFCNTYPALYKGQLVRYGLNYSSVDIKVWNGKDWVWLESIKIKGHGLSRHLIDGNKLKSPALVVNKRTCQLSMPVEIKKVEFKNSDFVCSIDMGINNAATASIIGKDGTVKARKFIHPAEDIDRRNKRRMMIAQKSKQTSNITGQKQSKGFCKGLYRKSSNINLEISRKVMRGIIEFAKVHNVKVIVFENLVGWKAKAGKKRSLQKQKFHLWCHRKIVELTQERWSELGGTVVFVNPKYTSAYAFDGSGKVKRSKINYSLCRFTNGKHYNADLNASYNIGARYWYCVIMGDTNYSRVFVDQSSNDTLRTPVTLGTLRSLRIV

SEQ ID NO: 1425 - protein, 245 aa, unidentified
  REGION 1..245: note = Table 20
KPEKRQPLANITAVDLGINTTATVAVVTHSGTVIHRDFIHLGRDIDRRDKRLKSVSARASKTMGKGGKLHKGFCSLTYQKCQRINNQIGHIVSKRIVEIAEKFNSEAIVFENLKGWKPIGGRKRSNLKQRFHGWLKAKIRDFTEMKWAELGGKVIEVVASYTSKLAFDGSGTVKRNSQKYSLATFPSGKRFNADLNGAYNIGARGVFKLTRRNDGEGRSSKSSGRPPRSWVCLCDLWAAASPRLA

SEQ ID NO: 1426 - protein, 445 aa, unidentified
  REGION 1..445: note = Table 20
MVQSIVRTDRWFLKPSRQTTEHLAATVTQYRAFCKALTYVVYGHWVEIKSAKSQCVAVERLIHKTKSNPSPKYQYFGKRFYKFPSYLRRAAIEFVCGQVSSFVTRYQEWQSGIRKKRDARPPKLNPEAGCYPALYRGQCILFGNDLEAVQIKVWNGSDWVWSEPTTIKTKRDRHLLSHSKTLSPYLMVNHKGVYLSVPFGLKPEKLKGDRVCAVDVGINTLATASIVGSDGTVTARKFLHPAADIDHRDRLFKRISRKARLTKKLHKGFCNSLYRKARHINQNLAQQVSRQIVNFARGNGASVIVFEQLKNWKPKGGRKRSTLKQKFHGWLHRKLVELVEQKFEEVGGITEYVYPRGTSSWAYDGSGQVSRDKSNYSNATFKTGKQYNCDLSASYNIAARYWAYKLKLTRRKDGRLLDGKSSSNKQRMPVTLSLLWEPRSSIVVD

SEQ ID NO: 1427 - protein, 450 aa, unidentified
  REGION 1..450: note = Table 20
MECIKTVKFKIKVSDKSFNDTIAIYNEALSYIISIINDEWNTISTLATVEKQLNFIEKLIHNTKKNKSKYDFDSRFYKFPSYLRRAATAEALGAIKSYYSNLENYLKKKAQYEAKGKILKDKMPVLGTKRYSYPVFYKNNMFERTGSNTAKIKVYKNNDWVWHNIEFKTNSLNHRDMTNFKEMNPMLVKSGRKYYLHFTYEKTVKLNKTPLKDRTIIAVDLGLTNSAVCSAMKYDGTVIGRLFINQPVEKDRLYHKINKLAKAQKISGIGRKPNLWRKINNIKNQIINDTVHQIIKFAVYYKADAIVFEYLGKLKSKGNYARRMRIKLKYWAKRKIQEKVREIAHSYGIRVSWINPKNSSALAFDGTGKVIRNSKKDICEFTTGKIYHADLNASYNIGARYFIKEILNPLSEKERLQYQAKVPEIAARSQQTLSTLISLVKAGTQCGYIA

SEQ ID NO: 1428 - protein, 452 aa, unidentified
  REGION 1..452: note = Table 20
MSATKSKTLKYKITNQTNIFELTIQIFNEALSYFMNVIDKEFLSLDDWNTKGIVPAVERLTHTTKTNPLPKYKEFSQQFYKFPSYFRRAAIASAFGKVKSYRSLLRNWIEEKEQAKQEGKRFSKRPPSFQLEHNEFPVFYRGNMFEKRSNHEAKLKLFIKKDWVWVDITYKPMDLEKRGVSGWKECNPKLIKNGKKYYLAISYEKKIPLNKTNIKDQTIISVDLGMTNSAVCSAIRPDGTVIGRTFINQPIEKDRMDRMSKNVKIAQNKYGYISAPNLWRKINGLQKHIVIDTARRIANFAEQHRADVIVFEFLGEMKFPPNTYGAKRLKQKLHHWCKNGIQNKVQQMAHYRGIRIRRVNAANTSKLAYDGSGEVVRNHKKDLATFQNGKVYHADLNAAYNIGARYFLREHLKAFSEKKKLKLEAKVPQVLARTQQSLSTFISFLQAVALAV

SEQ ID NO: 1429 - protein, 455 aa, unidentified
  REGION 1..455: note = Table 20
MSQQNLEFTSYGIRILEYHHIFDDTLKVYSAAVRYLVSVVLNEWETLKDLDSFESIRVMELLIHKTKENPLPRYSFDKRFYKMPSYIRRAAIEDAVGKVRSYKSNLENWEKEDPSKRGRKPRSPKVEVSFPALYNKNAFMWVDDYTAKIKVYIRNTWDFVTVKLRKSDVNYFNRHNDPGVQGCPKLERVGKRWTLRFPFKHKIKLQDVPPEDEIVLGVDLGINNACVCSAMKSDGTILGRRFLSLPRETDSLDHHIGFIKKAQQNGSRNPLKYWALVNNINLDITRKTVSFIIKTALEFGCSRIVMEHLEFRGKKRGSKKQRLHLWKVREVQKLVTAKAHILGMRISTVCARNTSKLAFDGTGNVTRDESNYSMCTFKTGKRYHADLNASYNIAARYFIRVICESVSEKVRLSISAKVPNCDKRSTCTLSDLRKLHSLVSEVTQIGVQPAPAGCS

SEQ ID NO: 1430 - protein, 441 aa, unidentified
  REGION 1..441: note = Table 20
MQVTSSYGVEIRKQNIPIRHTLRIYRSAVSYLIQVYTQAWGELSEIPNAKKRFNEAEHLVHGTKKNQACYDFDLHFPKLPSYLRRSAIQHALGSVASYETRLELWKNGKLTGKLKLTQENHAMPVFYRDVMYREAGEKEEAAYLKLYDGHDWKWFRVRLLHTDMEYLRKHWAGEKASAPTLEKRHHKYFLRFSYTEEKNLSKTAVKAQTICSVDLGINTDAVCTIMQADGTVLGRRFISFPSDKDRLYRVLGRIRRFQRQHGARQTHNRWAYAKRLNMELSRKVSGAITAYAREQQADVIVFEYLEMQGKKMGSRKQRLHMWRKRDIQKLCEHRAHRSGIRVSRVSARNTSRLAYDGSGIVARNPENHSLCTFTTGKQYNCDLSAAYNIGARYFIRELIKPLPETERSSLEAKVPAVKRRTSCVYADLRLLSRELGSRYAA

SEQ ID NO: 1431 - protein, 439 aa, unidentified
  REGION 1..439: note = Table 20
MKIMVSREVRIVDAFKAFIDTIAIYQNAVSFLIDVVNEHYVNVCGLPSQKAMTFIERLVHSTSTREAFYPSFDIRFHKLPSYLRRSAIFDALSAITLYRKNLAEWEVSDKLRKKPFLKRKRNVMPAFYRDNMFILDEENGVYRAKLKLFSDGDWKWHVFNLSQADVRNIQKDFSLEEVKCPVLKKHGHRFTLSFVFETEAELPKKGNKEYSICAVDIGINNAAVCSIMKEDGTVTARRFIAFTGEEDRFNRILNERKKAHSLSKCRTHRLNRFLKNHNENLARLTSSAIAEFASSEGAYVIVMENLNGKGKVKCSKKERLHLWRKRDIISRVEALAHRKGMRFSTVWAAGTSKYAFDGSGQVKRDKDNHSQCTFSNGKRYNTDLSASYNIGARFFIRETLKACPETEASEAKAKVPGLSARATCTLSTYISLLAVRASA

SEQ ID NO: 1432 - protein, 742 aa, unidentified
  REGION 1..742: note = Table 20
MEFATITRTFSLHPTASRKSQAYPQLKEYLLKVRDLENAYVAILIRAVRNGQLGLQDFSGESKAFIKSHIYNALNLNRVVAPSYKSYELKERMKRCAIQYPYFAMRQWLIRTHHLATLARALSELFRKKKVHILTFLRGRPFSRAILNHLWGELQKDCFGNRTPLSYFFITNMLRQLKNLLISAELLEPYLKQRIREISRNKALLQTFCTSCLNTFSRKKKGKTIMIPPSELIPSILTRYFAAVKRYSTWNAKKRVSTTDLDAFKRRRKEEFLPIIATLRAKGKALSSVHVKALLKRLFSELLDELGSSPDIKMVNSIFKPTFKSPKVGLKPSYEGFQSYLRKMLKNKLKDNLKGHFLTKGILKILTGILDTFHKTMYEIVPPPKIKALAVPINQSEQVYAPDFEKLTVKLSFIPRRYHTFSIRDDKGRLREMLARGVCPGLPVLKMEGQKTLLHVPFDVKRKPLSKPSPSPSPSSSTEGGALRSESARKGRITMGVDLGVRYPAVLSIMDRSNPKKPQELARYFLSTRTLLDMTFNINSGRFEPRGRFKNPISNAPSNQKLKLRRLRQETRHIQRKVHEYKKRCQKRGITRPEEKYKYTSLKRTLSSLWDRIRHCNEELIHLLNHVILELAKYHKVSEIHFENLKWSRHSRKNKTGKYLAFWQTHWFFSQVQEAVKLQAFLHRIRFKRVNAAYTSKTCSECGKRGRLNGKLFTCGNSETHRGGRVIELQSDLNAARNIALA

SEQ ID NO: 1433 - protein, 829 aa, unidentified
  REGION 1..829: note = Table 20
MSVAIVTRKFAFIPEGGKLARANTINTIREQFIKFRDLQNIYSKFLVDLVISDPSIVNNHPWEYPNFHLSITKAHRTQFNALKANGTISPEEKLPTDGKARIRKYFYDHFSDLSNPSRNLSRFNTNYQKRVQFIERANQNALQYPFYAVRNWIIRNERLKTIANTLIVFLNSPQQQKIHYRKQGIDTSVPSSSYILEHFLGGKSIHREFLKQFSVDTKFNIFGQFDSPSYEYISGHIGQLRNMILKKGILETAVRVSINQIIAQISQNPTISNGLLERILKCYPEIQKHFLKMYIRLVRIRTTKYAKMRLKKDTSLYGTSFVITFVNEIFDTHDIQDLDQFKAVRDVILNEERILQSEGYKVLSLDEIKAGVLDKTIQFLNAILDNPSLNASRAIFKPSYPRIDFISFDFHGFLDYLSTKLFYELKSQFHSLFLLYGEVDRINRQLIDELQSVQNTIYESTSPPKFKKLSIPLIQPEYMYELDGATRTAQFGMLKRRGKEYSLHISPNQRDRFNDLYEPNFELNRRTQLNKDNLSNPVLKMEGRKLILCQPFKIKMGNAPNTSQREFTSKIEVGVDLGIKHFAVLSVMDKTDPSEPIELQRYFLNQKTLYDMKFNDDTGKFERLTNQRHATNIKLKLVKLRQEHKNIQRLRAEYENHHPAIFHKKTKHYHRSKTESTLWHKIQNINSDIVARLSGLIVQIAKHHRAQFIRFEDLRWSLHQAKREKGKFIAFWQVHWFHSQVQSMTAQNAIRCGIRAVIVDAFMSSQTCAHCHKKGTRLTSNTKLFHCLHCNTTLDADLNAARNIAKQATVKVLPVSFSAEYLCSVDGFQ

SEQ ID NO: 1434 - protein, 1890 aa, unidentified
  REGION 1..1890: note = Table 20
MEKKNLERLKQNAIDRLKKRNSLSGWTPQPIRDDKNAFLGETIPLNSRNQISQDEPQLNEKSRLNEQAYWKLAGQFITKIRQLKNESLNQIFNIKTVSRISYKNLKNLYEKLKDVSPEFSTVQSIRTIFGSPSETRHIKDSLHVHVNIPKQKWDDNCKAWITQFHNNLTRFWIGIFGHHVRWTANLSNQFSKIDVQVNGQRLGTFSFGKVIGALMNAYLEVLSQEIVEIDDKEGEWNLYDDEESMFFVDNPKPENIKQVGATDSSEFKKKLRKLIEPYEFSTNKEDLLDFMTLLYEQDSSTAMKVFERLEGQLSLNLPKLSWGEIIKRYGDPIFAQLVKDIKINFKKLFLKRFPRFKWDDYLHYVLFLAQPLIVSQFAHQEKSFLRFIKNCLNGSNCDPMFYIREKSDAIFFFKWFQRIINKYDKLKTIENPDKFDPERIAKLNRYRSQHNAFLVLATCEVLISRPDQCPECGGRLLRDPLYDYWVCKDCGITPGENKLEITIRPRDYSTEKKRTHWAPRDETTKHQSTLRQRDLSRYPQLKRAQKFAREVDIKALYDKDKEKYIELLAHRLNYPQILITEAILLFRKASEKNLAYAPCFVRGLSGAILFYLARTNSLPHTKAIIANEINDFNVKQLEKCYAKLIEGLNLSYPLEDVTRLVPAILSEVDLYTPQIQQRIETMINQFYEKYPAKVGNPISFIAALLFLLSHEMHLGLETSILAEKLEITTTTIRYYLKMIKSLIEEPKLGDDSFESLVISDEYRHRLETINSIFTQEIIKSQIPRFIREKAPKIFPVQKIRSIFERIIDLWIDQCWTQVPKLITEQPFEPYTILHPYLYDYCQDWGSWTFCCAVYCGLVISELRGDLTVSLNVKEDSLVKLFSRFIEAIFSLIENEIEKRFSDFTHMILRFVEMKQDAAIKTPILSKLRITPEVRKEPSLDPIPLEGTVAFAQEEQEEIWEFIRNHPKITPEQVRTHFKLANTPDIVEELTKYVEIISTMSDYSRKLTYTQLAQNADSSLSLVKDIASHLNLRWRFYKSSTNYTVTRKFSLQPHKGTLGGKYEKGEHSSIHFIRKQLFKYRDLQNLYVQFLIDEIRANPNILANKPWEYPNFYLDLTKQQKAQFKAKYPNKRFLTDSKKRIEEYIYKYYRQQPRFKNLKSNYWKEENLLERAKQNAIRSATYAVRNWVIRNERLKILRDKLVAYLQSTESTEVYSYSQKAKITIPSQREYIIRAFLMGKRFYKEYLRDLSNTTKRNIFGEYDRRSFEEIYNHIGQLKNILYKTRSLDVVFEDAFTSLWDYLQDPPEIVDRFLESCFERFETDGKPLGNVFLKMFVRNVRTKSTKLAAQLIEGKKGFGDSNSPINQLTKDILKGGITHIDSFKEERNQRFGQHTVMETEVVFDREDLKAEVLARLKEYIQDEVLNIPNRHFAKTLFKPTFRAVKIQSLDFEGLINYMITKLFYETKERLPELIFALNIGDDLIRATIKELNNIKMYQLPTPEMEQLTINLTRKQQLFRRTCPECRNKVTKCTCNNPPNSHQFEFRLISGTRGVKGGQNWTTFVLTPRQERRYSRMIRDGYQPKNPVIKLERRKLIVCQPFDAKKAEAPISESVQRQGNEMGIDLGILDFGALSIKDSQTNQYLAEYRLGEAELYDKCFEKGSFEYIKYVNEFIAMDAKNWGRSLKNYVDKEAKPTRIKAKLINLRTEVQKLQRFKAEFESEFPDTYKNHRVWFHRAKSVSLLWNKINKLNKDIINRLSGLIVKIAKYHNVKRIKFEDLRWVKHRKKQRTGKFLAFWQTHWFFSQVQSMVTQNAKRKGIEVVIVEAAYTSQRCAECGVQGTSHKKVFICPHCGFKKDRDLNAARNIVNSKIYHNLYLMDLSSSPVHWAEMSIF

SEQ ID NO: 1435 - protein, 722 aa, unidentified
  REGION 1..722: note = Table 20
MTTTTITRIFSLIPTSPYKKDIYKNFQAYFVKFRDLENLFIKTLIYALNKGHLSLQDFSGTSTSHIKRKIYNHLELNKIKAAQWKSIDLKERVHRCAIIHPYHAVRIWLIRNENLSIILSELIELFASDPSHIIWFLKGKQPPKPVLKCLFRILKKDPFGTTQFLTSFHLTNMIGQLRNIFLSNTQLEPLFMERFKKIKNDEILIDNFLRICLGSFSRKKKREQITLTPEQLYNYFLELYFRKIKWLSTRYNKMKMSTLDFICYKKQRDTAWDVLKKEFISQQSQFSLKDLNSLMVSVFQEVLTELETHSSNLLPKNVFNPFLQKKKVDYLTPTYHQFLIFFQKQLKDKMKEMLSDLFLVDSIVAFFIAKFERIRIELPGLINVLKIKRLSIPIQNLRETQVYNSNLENLKVTLSFVSREFHTFIINDKKGRIKEFLEKGAYERPPIICSKQGKMFFYLPFYVKKKSCLKQAPHENKNLIELGIDLGLKHFAVLSIMDKSDPSCPKEIMRYFLGQKQLFDMKFNTITGKFKPRQRGPNHIVNTPTNIKLKLINIRSEIKLIQQKLHTYQNRLSQKGISNSKRKFKYNRLKIYLERLWERISHINKEIVNLLNHTILKIANHHHVSVIKCENLKWTRHSKRKEVGQFLAFWQILWFFSQIQSAIQLRAHLNAIEFKTKNARNTSQKCSTSGHMGQRTGKAFFCPHCEMSLDSDLNAARNIALC

SEQ ID NO: 1436 - protein, 798 aa, unidentified
  REGION 1..798: note = Table 20
MSAITITRTFALLPNELPYQSYKEMTNLLVKERALKNRYTALMIADIKENSYHSYKSTSISRFRQAVYDRLNFSQVLSSQFQKLKLKERAKQCAFYDAYLSVREWIKRVENLKRIIGYLTDIIRKDRAFTLSFLRGKRFRSETLKEIKKLLRNDCFGKRQDLSNDFLNNYILQVRNLFLSCNDFGMESLYSEYSGSNALQAKMRESVQNLHLTDDLIGQISTGFHRTKKGKRISVIPSDLTDYMVDCYIRQLQWITTRKAQQILSLKKKIKQEQEKKKKTKLSSFHLSLDKISTSLSLLIGEVTFSSQHEFKKKRALILKPFRKELKKRVKSFEIDLLIQKSFESELLDIKQHHNQYVLRRLFKPHFPKIPIDGMHYDAFITYFTTKLQYKIRELLKEEVISEQIISLMNSRLQTLKEDILSIIAIPHHKMLSLSVINRDVYKEYFGNKEQKKDFIIKLGLLAHQFKTFKIKDEKGRIKQLLHNHFIPALPRISLKNRKLLLHLPFQTHKKDCSKPSLIAQNCALEMGIDLGLKHLAVLSIWNKEQNKEIARYFLGTKQLFDMKFNHTEGTFNSLTIPPSGRTPSNIKIKLIRLREQIKALQKKKNNYEQRLLQNNISNYRKKLNWNKIRRTLSLCWERLHRLHYHVVHLLSHAILSIATYYNISTIKVEDLRWASHSRKKDAGKYLSFWQTHWFYSQIQTALQLQCQLHSIQFQKVSARNTSKICSCCGTIGIREGKHFKCSHCGFRLDSDLNASRNIVKRQKNYHKIPPHIDIPYMGCQDLQLQVNKEDVHKYPDF

SEQ ID NO: 1437 - protein, 348 aa, unidentified
  REGION 1..348: note = Table 20
MNRDVYCEAFHLDLDDPKTIYHSIQLGLVSREVRSMRVKDERQRITSMKTRAFEPLLPRITLKDRKLLLHLPFQQKIEKKEHSKPSSSKDANDAKVGMGIDLGLKHIATISIRDEENDIEMARYFLSPKELLDMVFDETTGKFRYQDRLRDDENVRHHSNIKSTLIRLRQQISDIQRRKNEYEQRCLERTIKNYKERVKWNVICRQLSQCWASVYRINLQLVNHLSNCIMKIARFWNVSTIKVEDLRFSMRSRKQAAGLFLAFWQVHWFHSQAQQAIKLQSTLHDIRVTKVPARNTSKRCSCCGKLGNRSGKQCTCPHCGLSLDADLNAARNIVNYKKPKHASSGASH

SEQ ID NO: 1438 - protein, 1280 aa, unidentified
  REGION 1..1280: note = Table 20
MELREKLIFTASLILPILFTCFIGALSYKIFLSWEYDADLTVLFLERHLIWIIISVSCFLLSWTVILLSLYSYELEYLFLKNTYFNILLGISYGSLWMTQREIKVGIATTIFPPFDGWGILILIIIVSIGLLYFLIKISERYLNTKFSTPDYIYGAPADDKSLKNEEIVLSNRQGAEDVIPIGTNNENHNPLESEIDHDQAAQVLSIQKIRTSASNQYFIEFPNDLRIALCKYIFQEESARPKATSEIVRELIAQLSKVLENALNYYNEQNQENAQLSDLNLSQIEEMSKPYLDDLFALEHTPGVLGELFNLRTKKNITSFRNGILRLVRTLGEEKDLTTRYLERLGAISHEVLHHIQRQEPINIVQLNQAVLFTEFNLSFNQVRKIATALVELSGQPIQLFDSVYSKDNSGNNVYFKIARTFSLLPEGQPSLDIYFKKYRDYQNQICKTFYARLMSEELFSELKQCRAHQSELFSGKIKKNEYRSLINSFDLYRYFSGKYPKSYIYDKGDESLELKNLIPKTYPDTEFHERIQRCAVRQVYDPFCNWIVRTEHLYQLCKMFPDFIDEPIDPNWRQPNMPNSETFLQEQYFRNERLSNLRKVLQYTIFGNSSLYSTAYINNLLSQVRNLYFKRADFKLSTLSQSQSTLQEFIRGQIEAMRQSDDSHNLNQLANFSEFEDYVFEDFKRKRKGNYETIPRAELLDYLKDSYIRRLKYKTANLVRYALKLRKKLSKEKSKENSDPHTAQVLTSLETKIERLSGVSQPYNTLKEFKQLRDDPNGTINSLKQQIVTNLEQNPYDLDSLLINALGTEITSYLDYASVQPKEDFYVLKRLYTPVLYGFEFDTPSESEFEEFLQHQFLLKTRIHFKSLFFTPLKSNPVQTNLISIIKQEIFQLKDQLYQALSIPQFKQQSANLINKNVFQGEYCTPEGSFANIAFEIEGRKKLWIKCKIHDSKQVKINNIVYHGRLEALIKGEGAIPQMPVVSFKDGKLLLSQPFIVTKKSCSKPSQNQTKEVRMGVDLGLKDFATLSIKAQGQEIARHFLNEKIFDYNFEKGSFVWKNPNQTQLTNIKYRLIRIRRTIRETSRKIKRYESYFIRKYPQWEKILFNTPLIEVKQRQGVLFDRISNLSNFQTKYFERYCQRKIFLSRLWERVQQINTEIANLVAHNLVEIAKHYRVSHIKFEDLRWAKNSRTQNAGNYLAYWQVHWFYSRIQSITEGLSSRAGIKVLAVDPRNTSKNCEVCGEKGSRTSKGFRCTNKHCAKYGITVDADLNAARNIVRR

SEQ ID NO: 1439 - protein, 1666 aa, unidentified
  REGION 1..1666: note = Table 20
MCGKLISEELIRNYRNGGDKIYCESCGYLVSMDFSGEISPTPSEQREPVSEKENSPKENAKSRGKLISDIDSFFYRYAYQILMNSKICSLVWDKKKNIGLSQIRKYTDIMKDLILKHSFPAHWISRAATSQDKLLVQIEMVKKDLNHDQRYKAKVFPFLAEVIEVVFDLIVGNYKFRNLREKQQIQIIKDLKSTFGFRIGAQEYQTFRYCLSEWFAQEIYHKLQQSELDNSKGKEHSADIPDSETPSYHAMVSSLINKFMKNPSKYPTLQPYSRELKKFILRLTIDQFYYTSFVDYVRWLTRNLDAIRQAKQDLKDLNPLLNRLLNWLIFRSFIIDCRFPKKFKANLALILSRMIFIAVKRFAMDNKLNLRKLKVPDAFYKGVGNNLAHKVRKDRPIHNFHLLRLETISHEEFFNYYTRFQKILQEDKIYFLSFKKYVIGLTKLIRKHLTGTKERTQFNKFDHILHRELRYLDTIHPEKFLIKDKKGSLNNSSSIKDQNKIKDYSEIMALVGKDKVISLKNYSRRGRNFLLQYALAHLVNKPSVSLDTVGSDLFNSMENMAQFLKKKSGRRTDNIAAYMNSEAFPLLKSLTESQQNVVLYKTYRKTNPDEKPAIHYFTDKEQVKIFDEIMKIYFSSPQAIQLFKKFVLTIINIAHYCMTHGQTRISLHELQKTVLFTYGGLRERHVEKLISRAKQHPLIEPQFKPKGYSKKSIEITRKFSLHPLVMPNDNSNPSTKSERQYLKADIKHYMNQGLNLRKVYYERLKDFIRELYPHEIEGILQKRAELVAQQLRLHKIRKAVKTKRKTPKLTRKLESLKKVIATKEQELESYSLIKFFSSDPSETHIKGKFYNAFNLSQIAKTQEVRERFGRCLYEEVFHAARNMFIRIGRLHVLLKYFEDPQQLGKLIANKGMRSKALMDLLKYDIFGNFNPLSYAFVENHVRQLRNMLLAKLEFSTAEFRTLPEPNEGEEKQEEFVKNSLIQFLHNALNALKDNPKKYFSTVKTSLLTELNSQDLKEAFAKYKKYYKINIKRATIRTFKKIQKLRQNIAKIVHQEKNNQPLSKRQLRNKAKWIRHLNRLTKNLTQLLGFTEIDLSNWNLSQFKVERDHVLDSFENTLKDAIKTEFGAKPMAEVVQNLLKGVLAEELQIYLDPPSTDRKVLNHLFNARMPSLTVKTLDLVGLLSYIRTKMIRHLRTTFPEILFKGAFHLRKLGQIISRALGQLRESSLNLFDQIHFHSPTFSTAKDDDQVFLCNYDQKLIKLSYQRGKDNEFLLQLRDDDQRLNHLVEEDGAIPLSPTITVSGPKILLHQPFRIPIKARTHDEDTIKIVMGVDIGLKDFAVVSIRREGKEIARYFLNERTLFNYYFDSQRNGKVNKELVLKSPVRRLINNPSDKFSNVKNTLISLRKQQKTIQSKLDKLKGYYDQKYERIRTQLAALKKNDPKVLQELATILEELIESRKAGYSNYELPYSEFLPIIKQRLRKNQLGTKLDELKLNFSELKHLLYYLKNPGDNSRLTPRYRYKSEYNRLYRIQKSLDRRMQNLHSELVNLTSHHLVDLARLHEVTEIKFEDLRWSQHQRKDQIGYFLSSWQRHWFFSQIIQASTHLATQYSIKTLLVNPKATSYRCCKCGNEKKEDRQEKVFKCSQCGIQLDADLNAARNIAMVSSP

SEQ ID NO: 1440 - protein, 683 aa, unidentified
  REGION 1..683: note = Table 20
MEQIVITRKFRLNNLDIADDLFVQYKAMVNDLIIQGLQLPYSEFEKDTLVAVKKFYRQFVNCSCDLKERVHRCGAQYSYFALREYRRNQKHLIEIIKIMIKNGIFNNNHKEILKNTDLSYYEIDNKQNFIKNQLIKKLAEPDITQFYNDTNELSKYSSQIGKKLNNKKFIDKTFRSFTNRVIRQLNKRFKELQQSKYALLSNYDTTILKLLNLQHLSEVSKISKREWQNSKNKWKRDLKHDLNQSLNQSLNQSLTQVNLQLNNNWGKKFDNILKSLLKPKSNNQSNDRLWVNGTSFTDLLEFMKLKFDIVLKKQLLEYLKINFLPVINQDLSVFEKDLNKQIPSIMKIPEMDKSSIPVGIDDGQVYRLNEIFEDNKLKTVNLNISLQANDFISTELSTVDRYAELLNKGFKSQRGVLNFSRGKYFVFIPFTKKVSEERDNDLIASADLGLKTFTTMSIYKKTEEIDRQFLDQKDLRGKKTDWFNNKSKKLNKLNGLKGKLMDRRLLAKLNQSIRMTSKKGTMRHWLARDKEKTQWKKISNIHKELVRQISARIISYLNYHNVGSLILENLKWSTHSSKSQSGYYLATWQIHWFFSQIQSMVTNQAKLHGIRVELVNPKNSSKICHLCGKLGKRAGKKFYCTNIGCRIKHLDSDLNAARNLIHRSKKYKKYERYNLSQFSDAIS

SEQ ID NO: 1441 - protein, 697 aa, unidentified
  REGION 1..697: note = Table 20
MISVGLDFEDNLFIKDGLISVKRFYDEINRRTEEKNYLKSLGIKERLIRCASQYSFFAIRNTKQIKKIVEVISEILSETSSWISVSRQNFDYWIGKNLKKQEVTNALNNRYIKQIRERYTKKYPKDITILNRTIIQNYFNYLKKVLLRNIKIKNENLSVFSDEIREEIIKKYDDSYLEDLIKKFCIQTSSILTRHFKRLRKNKYSSKTKKQEKGDSGLSKLIYRICGTKKLDSIDNELWQLHKLEWMRSYRSKFEDCNLLKFLKNRINESENRIIKKPIEFFMRIFLNKENIEIRYLFSGKSEDDFLHFLTQLLEYHIALLIVEKLQRLILPEIRLRLLEISQNPQFYLKIPKFTKASIPLGLDDEQIYSLIENGKEVYVHLSFRPNQKYFYKITNPERYFKIRKKGGKPIRGVLKVQGGKLQLALPFIKRLPERIEGTHEKEQRILNCDLGLKTFATLSITVNGTEIDRRFLDQKQLAGPKSEWFNYLSNKRGAEKKEKNNFVNYKQKLIRLQKQAYELQARMAQIKGISKNKKQKFNSNFRYVQSREYWYIKREYKHKWYKIRNLHNELVHQIATRIAEFAKYKKVNTIRFEDLRWVKLSSKTKVGSFLSTWQVHWFFSQVMKSTAGIARRYGIQSELTNPYKSSRLCSKCKREGIRKGKRFKCTNEICGLQIDSDLNAARNLGDLTRKTIPLRL

SEQ ID NO: 1442 - protein, 394 aa, unidentified
  REGION 1..394: note = Table 20
EDFVDFFSQIAMHHLTRLIIEKNRDVFLPEIRKVLLEIKNNTMNFLKQPTFKKSSIPLGIDDNQVYSIAESNNEVEIKISLYPNEWQIFRLKKPKRYFELRKRNYSSHRGFFSVKGGKFQLAIPFKKRLPDLTEEKSLEKQKMLNIDLGLKTLATLSIIRNEVELERIFLDQKQIIGPKDKWFLPVDKKNQLETCDFSKLINFKWRLIKLQRKAFDFQSKMNRIRYENKQKRKTNHKLPHYNKTKAYWYARRHYKNTWLKIQRIHTELINQVSARIVEYAIFHQIDSIRFEDLRWSQHSRRDSIGYFLSDWQIHWFFSRIIEATSIIARRNNIRTYIVDPKNSSKACSKCGKIGRRVGKNFNCVTEWCKLRIDSDLNSARNLGSLSRKTHLIRL

SEQ ID NO: 1443 - protein, 659 aa, unidentified
  REGION 1..659: note = Table 20
MTKGQFSRVYLGNTLRWVRNLLKRGFHTKYMQLVVDSFKTLPNPPHLAVEIARWFTRDMTKFLKSYLRILSGRMTWFVKRVLNSSRRTLPSGGSGLGSSITKILAKNRLSIKNVGIKGWGKVRKQWRDGALQALQQKLGGIDIGALANHAVKEARAGLSPERIIKLLFNFRPNRMKLGAGDLMEFKAFLVKCAINEIEHRLITFLKPRLVPTIQQVLTALQGASRGWVQLPQFKKQSIPFGVDDRRVYRDADLQDLYILALQEQGVTMEEIVRKLIKKLPKQWRENPKTVAKIRKGVEELIKHDEETHWLEKIKKRKAPIRLQLRLERGNPMWFELKTPKRFLKLVQAGYAPQKATLLKKAGGGLILALPFEKEVPRSQCLEPSDLPQMQDPTAGLDLGLKTLAVLSIGKGDQTGLEAWGQAGREIARYFIDQKELLEKRSEWFKSNAKKATIPNPKKIKHPNYKGRLVTLQRAASAYQAERDAYRNALRERGINHRHARKFFDLNRNVKHIWRNVHNLHEELARQVATRVIAACKYHRVRVLRMEDLRWAKHARKQKAGYFLATWQIHWFFGQIQEHIADLAPRKGLFVEWVIAKHTSKRCSRCGKLGQRKGKIFKCPHCGFQLDSDLNAARNIRVAPRSDIPPSLYALAGGSPSLPQ

SEQ ID NO: 1444 - protein, 731 aa, unidentified
  REGION 1..731: note = Table 20
MSSDACIITRKFGLRPAELGVNLTLDTFSKFEKVVNTMIKVGIKLDEEYYQKNGLTAVKRFYDLVRVTPQLMKIKDCGLRERVFRCASQYAYFSTKEYKTRGKLVSILADLINSESDLSFLFKKKFPSRNLLLRARRIIIDVGLDVCVSYQFLKNMFLYLRNILKKRILQKYSTKLDGLISAVIKSGDLKTMVVSWLNQNRELVLKSFLRKVSRLMTKRVSRVREDADTFLGEGHFDAAIIEILQKQGYTIKDWKKARKKWRASHWKTLKKGLKAINVHEVADRILPIINSQVSPERILSLLTRHKIRLPWVDGTSFEEFLAFLKARAVKKAELSIARRVISSLLTELRNSLKEIENSPWHLLKKPHFQGQCIPLGIDDGQVYDLQINRDPENDLITGILVRLSLRPREKLLYEVKTRERFIEMVNKGLEPKRGVLTRKAGGGLLLIIPFQSGNKAESVQKCYDSDLSPGKYKVGAIDLGLKTFATISIDECVRDLDGNWEREKRSRGDSHRYFLDQKQLLGKHQEWFLKNHGNDLEFINFKRKLVNLQKATKKLQSKMKIYSNKHPTNYRHNVKYRKLRDAYKSTWRKIKNIHRELVRQISTRSIAFLEFHGVQVLRLEDLSWAKHVGKNEAGYFLSTMQVHWFFSQVQEKLTEMAHRSGIHVEKVVAGGTSQRCWRCGKIGIRRGKKFICPYCGVEIDSDLNGSRNILVAPNSPNAICVRGRRPFPPHR

SEQ ID NO: 1445 - protein, 310 aa, unidentified
  REGION 1..310: note = Table 20
NNMAPTLTKKAGGALKLSFPFEIRTKKKKGKKLKAKAKILGGDLGLKTLVTISVVERLEAVKQKTKLSKEDFDKLFEGIDIGAHESARYFLDQEELAGKASDWWIYPKGSRPFFNFKKKLILLRQKERELKSQRDNFKKKHKNYRQKKQFFVIRREWKRIWQKIKNIHQEVAKQVATRVVQLARFHEVTLIRFENLKWSSHSPKEKVGYWLSTWQTHWFHSEIIRNISQLASRFGIKFELVNARNTSKRCSKCGKIGERKSKSFVCNHCQSPSGPPRQLDSDLNAARNITIAPLPLSHWRKRKPPVPGIS

SEQ ID NO: 1446 - protein, 232 aa, unidentified
  REGION 1..232: note = Table 20
VADIQVEVENHYIEGLPEAVVGIDLGKWHNCYSIWVNDKEVYRAFDSFGDYHKTLLKIQDEIGKLQSNFEGTRKELSKALMPLYEKKRMVLRQYYGTLRNRILAHVPEGFNAVFVVEDLDDLPRAELCKAQRTWACQELANGIFASQIEWNGYKLVKVNPRGTTHTCSKCGKPVKSRKDRKIVCPTCYPQGLDRDLNGARNIARRYMLSGIPQHTCSGKTPIIPLKPCAICG

SEQ ID NO: 1447 - protein, 376 aa, unidentified
  REGION 1..376: note = Table 20
MDYRSVTLRLVPTPKQAKIMDRNLLKVSKLLEISKREFQKAIWQRARRDKDLGGAHTRLLDLLAQRFASTVMGNLLYPLDERNYSFVKREGWYAIEVRFKPRTKVTIPVARPEREYYEDIIDGTSYPAFIYKHGADYFLSVSIPLERRFDERRPTVYVGIDLNQRKHVASLYNPETGKFERNIFFDLRPVDERVKEIQRRISAIQRGKRSSKLNEGDRKKINALYEKIRKIIEKGHGDFISKLVGVADEYWERGYNTVFVLEDLKGITKKVGKEYSPFNHWLHSQWCYRRFGILLETHSYPIKQVDPGGTSKRCHRCGTELEIYGKHGRLVRCHVCGLSDFSRDLNAARNLALSGKDGENEFEKQYAEVKTCNLYF

SEQ ID NO: 1448 - protein, 342 aa, unidentified
  REGION 1..342: note = Table 20
MMRVYNLYRTVILQAYPTLSQEKLLRKAEESVFKFLELSRRELQKLLYHKFKNDGIEPRMLTLLTQRFTGSLGEKTILCFDDYNSKFVCENGIWYVEVKLSKGRNARERILIAKSNNEYYDVIEELKNFHFVMVRENDKWFVYVSIPVEPQSNGLVVGVDFNLRKWVVAPYEGRPFFFDASEYAEKIDRLQRLISRAYSGKDYKKANEYYRKIQEIVKLTHGNFLSKIKKIYGICTLAIEDVSIMFRLTEKENTMINNWLYKKTAMRKFVLRAMAKGFNVVEVNPAGTTRTCHRCGAEVKIYGRTKRLIRCDNCGLRDYNRDLNSARNLALRAIHLLSKNDK

SEQ ID NO: 1449 - protein, 712 aa, unidentified
  REGION 1..712: note = Table 20
MSRKLPLGEGETARTACARGLLRAGVVEKTGEMLSATVLAQRVGWAADLVSGMAAELLAGHWNATDVDRLASGEDAGGQKLPSNAWMALRRLGWTAAPAGGVRVNDRIVRMAQEQAGRTLRSAKWRADLTAGVRTTWPAEPGKRTPEEWDAVREAIPDGEHLPSSVIRSRTRQITAFAAENGRLPADVFELEAPPGAARMLLLSACDGQQATLERGEDDPQRALLRLQLPTRPDPRTYRDWTWVACPITLPPTIPPGAVLHLPTLRLVGGKVRADLAYTHAVPKPRRIGHSVALGVDWGLNTLLSAGPARLHDDGHITALGHGAQFRAAGTLAKQHRLRRLSEHLHSKADHIERLIDADEQHELSGRHEVLRDEIRFVSARRSNLNDALAWAAARWTVDQAITAHATVIYLEDLRSMEAGGMGRTTNTRLSQTVRGQIADRIRHLAAEVGIAVVTVPPRNTSKHCPQCLTPLRHRKAPDRPTVTGWKWAVCPDRAGCGWQGDRDHGAWQRIAARGLTHQTKTVTDRATGQTAIRTVVDKLETQAVITETAETSRADRSKTGPTRRRATHPAPRRRGAPSPTGPSGPAGQRPEGHAPTGRRTLPRAAHRHQGVTTISTPSPGLRPGGRPSGRHRPRGAALGAGFHLHAHATSPRWAEPTQTLCLTWDQADQRRSASRATLASAGPGAPLWAKGRAAVHSRGRSPSSAPAPPGL

SEQ ID NO: 1450 - protein, 662 aa, unidentified
  REGION 1..662: note = Table 20
MAGSVLTSIATCTAYRAVCGGKPGVPGVRVPVSGRVLAERVGWLADLVRGMADEVIAAHWSNAEMAELAGGVGPDGRRLPSSGWMALRRLGWCAVPSAGVVVSDRVRRIAEEEAARALRLACHRRGIVAALLATWPADPFARTDDEWSALRAALPAGTDNATIRNRTRQITGYIGVYGRFPVGLCELEGPPAAARQVSLAAADRQQVVVDRVDDRVVRVWAQLPICAAPASYRDWVWHDVDVVLPATVPAGVKVCTPTLRPGDGKVRVDLPWQTPHTRPPLDGHTRALGVDWGVNTLLTATVADLDQDGSVVVRGRPLRFDATGVSAKLVRLRRHREHLKTKADHLTRLRDGRPADAPADPALTGKLVLLEAEHSAVCARIRHLNKALAWSSARWLVDHATAVGATVIYVENLATLEAGGRSRSLNRRLSGAVRGTVFTAIAHLAAKVGIAVITVPARGTSSGCPRCGGAVKHVKTPQGRVAGYRWATCSCGMSMDRDHAAAQRIAARGLANQAKTRRDRNGNAAIRTATDTPVRHRPRRPTQAATIRPPRDRRKTVPTPKQVRPATVKTTRLLPSRRQVPAPADSPLGSAGKRPAGRTPQETNPKGPVPQVPHTVPTTAPRHPHRVRGAVLGRGFHRHVHATPVTDRNGNAGRMPDLPRIT

SEQ ID NO: 1451 - protein, 736 aa, unidentified
  REGION 1..736: note = Table 20
MCLVGAAREGVVGVGRLMATAPCTAFGGVVEGSGERVGGRLLYQRVSFLAELCGGLTRQLVASRWDEDSLDLLAAGVDGQGESLPSKGWMALRRLGWAQAAAPAEGVYVSDRVRRASQEYAARTLRLALHRRALVAAILATWPGDPHRRSEAEWTALRAALPAGVSKAEIRNRSRQVSAYVREHGRLPAGLCELEGPPEVAGLVVLAAMDRQQVTLVRVGEATARLRVKLPLCPAPASGRDWAWHVIDIRLPGTVGADAVLHTPTLRPTRSGRIAVDLPHSQPAPPVKSTGHRGAVGFDWGVNTLLTGTVGRLSGQGPESRVVTDGRPLIFDATAISAKLHRLRGHREHLAAKRDHCQRLAEGLGAPHLAWAELLDKAAVLEVEHQRVCARIRHLNQALAWSAARWAVDQTAALGASVIYLEDLATLEARGRRRGNARLSGQVRGTVADAIRHLAAKAGIAVATVPARGTSAQCPGCLAPLNHHPAPNRLDERGWSWAHCTRCGLSMDRDHAAARRIVSRGLLAQAHTVTERATGTRTIRTTVDGTVRPVRRPKKTTRRLRRARQAAMAPPRPSGPKTTQSKGRPTPSRPTATHQRRPPHAPGQPATATTAPTTTAVAKAGAVVGAVAVKISRRMPDVRTVPATTPQGVVQRPAGHDTQTPALPGPVSGHGVPTPPCTEEPHPNTAGRLSRGTCRRRTDAAERTGFHHLHATEVHTLTPRFGPHPGDRRPRRARKA

SEQ ID NO: 1452 - protein, 475 aa, unidentified
  REGION 1..475: note = Table 20
MMAASGAAGSVGQDRTAGLTATATCRLPGSVTEVEAAPRVSGQILLAACDRQQVTVERDPDRPDTHLQLRILLPACAHPRSHRDWQWLTLPVRIPPTVPAQASVHTPTLRLVEGRVRVDVPWRIPVPAAEPAGHVHALGLDWGNTTLLTGSIARLGTDRQGRRRVLADNTPLSFDAAGVSAKLLRLRTIAEQVRAKTDQHARLLTGRPDPVLQTRHDLLEREHQRVQAKIRHLNGSLAWAAARWAVDHAITAQVSVIYIEDLATLETRGLGRSMNRRFGAHVRGQIFDALRHLAGKAGIAVVTVPARGTSAGCPRCGHLLRHVKAPDRVTSRGHKWAHCPHCRLSADRDHAASQRIVARGLLGQQHTTGTRAGTLAIRATIDGPVRAVRDKTRPTPPRPPRQQSRGFRVSSPAPSRHRVPAPPPPRPVRWDSVRRDDPPRPGPPGRARGRPRDQTTRPAATTIAAGPSAEDSTGT

SEQ ID NO: 1453 - protein, 608 aa, unidentified
  REGION 1..608: note = Table 20
MSKAKVVKPAKVVRSTPLRVNQAWTADGLPLDRVLVEQRCHWLLDLTAEVGTLTAASWWTPGHFDQLATGESPDGRPLPKCGHAAARRMGWHTVVPDEVYLPDRFKRGVRVRLMALWQARLGDVDLFPVMREEVDLAGEFDAGQVRATSAGQWATNQQLDRLAQSLTRFRKTAEHDPQHLTEVFLPPVIRRPVLPLSCMDDQFVEMTVDEDRLELKLKLPVVARPVRREDWVWHRICLSVPASRRNLGEWSLPDLRRDEEKILFSAVQTSQGAMWKQPTAALGVDWSPSALVVAAVVKTHAGRLLTTGEATGFDEAGRISKLLRLQREEEFTRRKARRIGALLAGQACEVLSDKHQTLSAHQDALSRKRMYLGRDLAWHAANHLVTLAGQCGAGLIAFEDLRDFDPSGRGAFQNNRSSQSVRGQVYAATEQLAARQGIEVVSVPPRGTSAQCAGCDAPLERPEGYHSAHCPACGLSGGRDVMAAVNIAKRAVLGSAEIKRPKGRAKRIRSALHDRVNVLNTKPVTPQLTAPLPPTRSAELPPRTQRIPKGGLSREMRLAWRKVEQERREKKIFPARLSSWGMVERTRLRVVSSHVNPVLPLMVVLPDG

SEQ ID NO: 1454 - protein, 593 aa, unidentified
  REGION 1..593: note = Table 20
MADSVSGAVVVQSAVPLRIAAAVDEVTGEVIDVDARIGWLLDMVERLSVALMQSCWRPATFTALHAGVDALGRKLPSTAAVVAARLGWVPAPPVGVYVPSRVVRLAQANVVPVLKTMAFRDALIPQVVAALDEQGRLDRHRLGDSQARYVTAAFLRNLSRQLRRAGDKPIASVTEIQDPPTVARIARLGAADRSLAELDTSDRSGVWLRLKLPTCPAPAGRDEWSWCRLWCPIPPHLKGRDIARWHLPTVSTQRGKPLLRFAITETVPEPATAAATAALGIDWSPASLGAATMVADRGGQLVTDAATLVYDDRGLSVRLARLQSEGQALTGKIARLSNLAANAPESTKPQLSAKITVLQENRRALGAKRSRINRDMAFDFAATMTAMATASGAGVIAVEDLRDLEARGRGPVNNNRSAQSARRRAVAALEHTAAKAGLEVVMCPPRGTSANCPSCDQELTRPGGYHTATCTPCGIHRANRDQIAGQNIAKRVLLAKANIKRPKGKPKRITTVEHQPIHKTRHKTTATPKQRRHKRTRNSTPIARTSGQCLPNLPARAASVWDRDQQPTPVASTSAQPIPDTRDTPVSASARDR

SEQ ID NO: 1455 - protein, 580 aa, unidentified
  REGION 1..580: note = Table 20
MTISSATLNVPMHPGLARLFALAEASAATLMARGFTTAVLERLCAGTDATGRRLPASAHVAAARLGLVPTHRKGVYVPSRVDRMIQANVVAVLRTLAERDTALQRLAGTGELAASHPKVRAGVAQNLGRQVAQNLGRQVARHLKHHPGAEIASLRLPALQDTPAPGHRLVLGAVDKQLATMELTPAGTFLVLTVRLPSRARPTGRGHWVATEIVLPIPRHLQSRPITRWHLPTITPHPSRPCIARFHLAYTEPDAPEREKSTPITSVVGIDWSPSALGVMSRVTASPDGALSSAFEGYRYDDRGLGTKLARLQAEGEILSGKIARTGHLADGLEESSPLRARLEAKITLWRQLRTELGAKRGRVNRELAFHFAGWATGHAQESGATTIAIEDLATLQAGGIGRRNNNRVAQSARRKAVHATTHLGARAGLEVIEVPARGTSARCPGCDAELTRPGGYHRACCRSCGLQGNRDQVAAVNIAKRAIAGQDSLTVDRKTGRKHIRKAVHAPVKRVRCPKNASTPRRTRHKRVRNSVAPVAVKTATTFLPASQASVWDTNQPPGTRERRTTTPDALVSGNDRAP

SEQ ID NO: 1456 - protein, 744 aa, unidentified
  REGION 1..744: note = Table 20
MNDVTAAPASLSGPFSGRCGRHSNNDGVSTTPRQFAFTTRAHVAVDDATGEPIGLDDVDTRVRWLLDLITAAGGQLVSRLWQPATFDVLAAGRDRHDRRLPAQGHVAAARLGWNPHYPDGIYVPSRVSRVVAAQVMATLRTLAYRDTAITALSERFDPATGRIAPPTAAADCAPLGFARGVRRQLVAHARRTGGALAGRLRITDVQGPPQVAAMAQLSAADRQLAQITATERELVFTVKLPTCPAPAGRAQWRNVRLTATIPGHLHGRAITDWHLPTLVLDRKGLLWRCAATELVPDCDLGSATVAVGVDWSPSTLGAAAITTENPDGLSSDYRGFTYDDRGLGTKLARLQTEGQMLHRKAARLTQLAATAPPEVRARLEEKIAVLNEHRTSVGVKRGRINRELGFHFARQVTDYAEAAGAQVIAVEDLTTLETRGHGRVNNNRAAQSARRKAVTALAHTAASVGVAVVSVPARGSSAQCPGCDAPLARPGGYHTAWCPRCGVGGNRDHVAGVNLAKRALLGRGKAIRRRGQLPAIRVAEHAPVRRSRDKTSPTPPRPRHRRVRRSQPTATPRVGVTPKQHVPAPQASVWDTVKPAPPHGDAGSRDTRSISDIRHASGREYEIYVDAVSVHRVFVLCEVQDGVAVGEGGELPDVALDADPDLHSARCLPLGGDSPGVTAMLPRMLSGTVITTLLPRRLVPSPQVTVIPSAVSSMLVTVVFRRMSAPAASAAIASRSDLVPRANL

SEQ ID NO: 1457 - protein, 231 aa, unidentified
  REGION 1..231: note = Table 20
MSVLDVTVVGVDVGVKRSVFAFVGVRARLLSDLVVIYGRQNGVSLMQLGTYDAVTRAYVVDVRYPGVDKYRGAEMTGNIVSKTLGAMVRAIHNVQRIHKTLVGLVLEDLRQFNGYKHDLAKARAVWGGLMMSNFSKGVSKCSAVKVSWFWISYEGEVMIPTKDSIPIVLVEPEYTSSTCPRCGAYLDKVKGKVTCDYCGFKGDRDVIGAINIAWRGFLVLTKCVREGALRI

SEQ ID NO: 1458 - protein, 226 aa, unidentified
  REGION 1..226: note = Table 20
MVGVDLGLTRSVFSVVGDGASDLFSIVVGGLEARGVPVRLIRANGYFVFDVTYPSVDYYRGSEVVFNLFERVVSVIRNAFEMASRWYGVVTALSLENLLSDKGLARGIAKTWRLLLMALYNNKGAVEEVASYLGDARASIWCYDQWLTYNGHVLNLPGSNSYVVLVSPEYSSSLCPSCTRYLGPVRRGVEVVRPRCGFRGDADVVGSLNIAARGCCVLRRYLGGKS

SEQ ID NO: 1459 - protein, 301 aa, unidentified
  REGION 1..301: note = Table 20
MRLAGTGWLRRRLGEGFRVKACELVWRDGGLWAHIVLEKPVCAVEVRGLLSVDVNARTVDAADWARGLYMVLLVGAWLGVKNRYLRAISEIQRCVGGRKARRRLRAKYYGAMNARLRQLLHTCAAWIVRYAAAGGLAMALENLRYVKEANRIDVVTRGIFNRLQAYIAYKAALEGIPVVWVNPRGTSSRCPVCEQAKLKRDGASGAVSCGACGLRAHRQRVGAVGVGRRALQAKAGASPRAGSEPCPASGIGPMAGRLLHGEKAVLRLTEKGLVVEADPGGVVASQGLPTRPKSKSSTVRE

SEQ ID NO: 1460 - protein, 1019 aa, unidentified
  REGION 1..1019: note = Table 20
MEKRKLSNIKLKKLDSKKGYPNFKPLHRYNSLIYPQSIDKSSCGYKIDNSPLFKKRENRELKLTLGRQEKNVYLTVRIRMERSFQGNCKTLTIKRKNSKFYALFSCENIPLKILPLTGKKVGVDVNLEKKSYITLSNGKKYKHPNFYKKSEKGIKEASRNLSKKVEEKMVNQFKHEVHQITNELVRNYDKMAIENLKIRNMKTEIVARQFIRVNPHNTSQTCSNCNNLAEENIMKEKDDLQTEKENLEKELIRAETIIKCQIRADEIRERIKEIEEKQLTIHIQILQGGEVNIDAMNKKNTPKLESLENGIELNSEQKLIQELVLKGESICFTGSAGTGKSFLLRHLITLLQKKYGPNKVGITSLTGTGASIIGGTTLASYFGLKSDSHLDADTLFKRIISPNFEHSYRNWRRTKVLIIDEISMLDGELFDKLESLARSTRMNFFPFGKLQLILVEQSSGQLAELTKNCLAVDHLQLKIGTQGYPVVKFTTGQELAIKEHTWEKVVGYDAKNEPIITATRTQIPLILAWALTIHKSQGQTIERLKVDLSKCFTAGQVYTALSQKIEKSFKYRLCLNEIIKVIIDKDLEICQKDRTEIKYTHQQNSLPDLKKLHPFLKEVQSQVLQDVARRVDKAWQDFYKRIKRKEKLEKLGKKLKVVHYPRYKQLGRYDSFTYTQKQDRIGLKHMLDTGEKKDSPYFLEQAEKVLTKWAKKISRKKHKRDKGDKTKSSQRYQKAKLRLAKEAEKVANQRKDFAFKETGQKVVKVNPAYTSQTCSRCQKRHPVKQEKSDRIFICAYCGLVLDRDINAARNILYKAQITEFGMNFVKQAHARTKEIERAGEKQRRKEYKEINDYFHQRKTEDLIKKYGKKLEKDQKTSSNLNLYQKLQLIQSQIKELIRTEENKFQKYKFFNELQVLNLLKPLLEKYHLTILLSDDETKEFSCEQNNDPAKAKGSAETYAMKYFLSKLFLMPVKDEGDPDYRQGEEKEMPSITKEQKAFPTEKMDQTPEELTTKAVISIL

SEQ ID NO: 1461 - protein, 210 aa, unidentified
  REGION 1..210: note = Table 20
MEKGQLILSQGRGERELKINIRLHTQLKRPLPNQIETCSIFLKNEVKQFPKTGKEVGIDMGLDVFCVLNDGEKVPIPKFYRTVEKELGELQRISGRKKHKRNETDKTKPSKRYLKQKTKVIGKQVVEINPKNTSKTCFNCKTIKGDLELKDRIFICACGYEENRDVNAAKNLLYKAQTTEQELSSLGKNMVYDLFAETPTEKHSSSNSLS

SEQ ID NO: 1462 - protein, 670 aa, unidentified
  REGION 1..670: note = Table 20
MAARRSLGGGRVLGSGKNLAPPVPARPGKQPIQQASGLLSPSESSVSLSSQTSSTPPISAENEDITSRVALDGHGSAQAAATASSRMVCPICNEEMLTLLQLNRHIDDNHANLEEVEQQEAKTWFEQQVVKARKFQPFHMLNQKLRGMEDFESNNALPPLHVGTPPSQGSRGASPAPAPPPRPVDAQLDPEEVISKSHWQRSSGNDVCSDPICGRRLGATNGQINCRHCGKLFCDEHTMYQMKLSRSAQHEPVRGLWYRVCETCYKTRQGYNDHNGFARSHIDFFKSARRKTVDKQYLETSRLETRLTRLTQLLADPPPDPNQSASNVLWSSIAGNKSYLQSLEQSVVPWEEDASSNECPFCQQPFSQYSLRRHHCRTCGRVVCADPATACSSEMGLDVDAKKSLGKVPVDVRLCKDCQRTIFSKADFARELAAQTTDQRAYNNLKQFEHGIRLLLPKFQRLLVALQDPEKPPTPTQLTEASKVRKRLTEAFTQYDVAARRIRDLPTDSPTQQRLQKAVHQQATSFLHVHMLPLKSLPKIMKHAAPPRSSSLPNGKPQPGPLASIKNNETSDNGSGARPSSSRASSNSSAQVTALEAEEKELRERLIVLEEQKFMVSEMIADANKRRRFDEVAALAQNVEDLSRDIDQIQGQLAQMDFAGVYTGEGNVIK

SEQ ID NO: 1463 - protein, 1032 aa, unidentified
  REGION 1..1032: note = Table 20
MLRARGALIAVPPQNTSRSCPECGHVSAENRKRQAKFVRMECGFSANADFVAACNIREAGLALLACSYPSGDVSPSSGTHRRYSCVCMRPVGILSLQGREEVNALRHRLGDGRPSDNAGPARSLKFAGFPQPSTRRDRFVVALGRAIGYRGSYGKTGSMRRSVVEKRNKETRQPPPPLPRRDAGAPIPQEEEVRSLVAKGKTKAAVELAKEIHRRCGRPESEALLVDAYGARIWSLQEAGLKKEAKELFELVRARHSGSAARLVHASVLVSASDGNLDGLLRPLGDPVLPVETRRAIETFVKDEVCDLNAVAQCATLAADHPLSTAASALVKAFAAVTTGPVEESALALPEVSHRSALASWKMLVRAVAYFYRQDDQACERCLELVDPASAPARLIPAMRAMLGAGTRKRLPPAAESLVEQVCGNTASLRGALQTLDSAFQTMEQGEIVVAIQRATVACNLAYPELLERLRQHISVRALELQLPLRKVRAAMGGPSIKNAYFWRLLAWSEENSREPMEPLICAHWEQFRKHAVAEGWFQEKSQEAAALYLHMAELLLDMPAEMLNNLRKSFVARFSGFEAYYEDQPPAIRAVETKGKTRDFYFLSPDELFERACSIDPHREAFDLWLNWAREESDWRVADYVAERWHEALPNHCQPLLYLMESAENRGALNKATAFLEEVQKLDAVNPEVRRAALRLLVFRAARHLRQRKPHLVEQDLAALEALPQAQEGDRPVFLLALRWAGEVIRGNTEQAASLLSQIGRLLRNSDAAVLACRQAGKLCGLEQADLDRYLRQEISLDSADSLALAVARVCALVDDMGATLTIPKSWHGRLAEELAKGPGKLESRQMDLLGKAALRDNQKELAYLISARGLGMGGNTQARFLLLRARALPEWEVDRRNDCIAAAVELGRRQRDFSVIKEAVELRRARRNTMWSFFWWLDSESWHDSSMTTEEINAVLQREQRFCAFPEQQASRFRTPFGENTASLCEEELETNDEFPALEDAAHPAAEMSPPREKRQKKDLRDFPVTGDLF

SEQ ID NO: 1464 - protein, 515 aa, unidentified
  REGION 1..515: note = Table 20
MKSIYVKIVSIFSLIILFGMLINTIFSQMMLQKTIGYTEQLLTQQMNDKVQTADTLINTQVENSKKTSTLLAEQFALHPEVIKGVTEGNKAMVHAALKDSTVVAREKAGIDLVWVTQLAARTPNGNTPILACPSNPSFDGFPNLHYASTNEALHTGKTVVSWEVNGEDGKLQVSAPIKDAKGKVIGAVVVGQQTYQPLLKRISDRSDTAMSIFLKNGKDFYIMTDTQKDEIGRKLFKDSHDKYAKDVKQAKNMAELASTNSDYKTILSFLNQVADKKDFTETILLQGKPYVCNFTPLTTYNGEVIGVLVSRFPGLLNTKEMIMSQTSTMRILSYTVTICVVVVSLIASIFFSRSITNPIQQMVQSVDQIARGDLTRKIDVRSKDEVGQLAEYLRAMTESLKKVIQEVSSAAHHVSASSHQLQANIEKTTKAAHQITMSVQHVAQVAENQQQQAEKSTAAIQVMNKKKMSSRNYVCSCGYQEHRDVHGARNILSKAIHEEIRHFDMPTKQKYLRIA

SEQ ID NO: 1465 - protein, 1219 aa, unidentified
  REGION 1..1219: note = Table 20
MGGNPAFWKAVKAARQFYDSASGLSRCQWLQSQITFTQVVCIVDVSVIMRTILPLNPKLAVDLFEGTRDNVTKSLRSLSAKVKDYVEQFIPKEYSIVYVLEKPGVGFSKLKTQKRSSQRASRINNGIRKLYLSSGDFKKRQGRRLIAKHLSLNSEMVQCLALGLNGYVANHYESDSLIIALARSHRAAGFFTIAVSSDADLIALSDSNTIDVLLTPQKKFFSILKKEDALKTLQCNQVVLAYSYLLAGCDNYKQVRFRKGFNFWRAHLIKNDISSYEAFTLNCSCYMCSITEVLNEFNVDLPALSILLLKTVANEGFETALKFSFVNAQKDDGSFVRPGLRLKILSHYESAALLDSQSVTEIESHAKSKTAKGKERKAVAERRASNAIAFQSEIKVIAGLESRSPINEPAMKETQETPKVKLCARKPNETKQEDYHHKAMFQSLSLRCGDWNHLLRTELRQLHDIASLRTQNSSDSSESTSFNFAIYVEKYFQFYRSILNESRMKFHSLLLADISGLASWKHFSQMLQGVVDRAVNFLTNDLKKYCMESLFNSAGIRQVLILELWSYKSLFLTGIFRVLEQDFKDQLIALFPQCSAECSGIIAGLLVSLLFGAPSKEHKDDEDLEDSQENAETNDTSWFYRVLVQLRPVCVEDKTIILWFLEHTWSKQELMIKFMPESLRPLVANGKRQFQENIRDDNYLLILQFFHHYNLKCGRVVQLMGLQPSTAASFTLLNTYILAQLICGYQNFLHSAGVDNKAVFGFLEPENMSASSALVTGANNYSFAVPPELLKPDSRKHPGKSKRIKQSYSSFIDRIKFRYQHWCRFPDFVWFLAFPGLYEDVLLNGTNKNLFFLHSAQVREGSIHVLCTDTRRHTARSKADEYAAEDTGGGYHFRHFLKYKNGNEDNILDFHSIVGVVDEPDKLHRGLASYHNCANGTPNFRGLIYLDHNIEHFAVGSKAAKDLLDNHIIISIDFGILSEISAVFIDGKFNSEGTLEGRFTKLQFSNGAKYQNSGYLKFTGDYAAINEKSLEHSTALSVATKRTNDASEYEKFSELYKVHGKAILEENTRPEMIKLKNELEKNKQRQLFEIVNVLVAHAEALRGTKTGVPLIVAGNPTFSPTVKGQRSVAPKSLLRWLSKFFTVLVVDEYNTSKNCPMCFEPLDKYGNEGTRMWKCKDCKTSTGHDLIVNKDVSAAINMANIAVHYFLTGERHPSFSRQV

SEQ ID NO: 1466 - protein, 232 aa, unidentified
  REGION 1..232: note = Table 20
  REGION 109..110: note = misc_feature - Xaa can be any naturally occurring amino acid
MKENTRPEMIKLKNELEKNKQRQLFKIVNVLVAHAEALRGTKTGVPLIVAGNPTFSPSVKGQRSVAPKSLLRWLSKFFTVLVVDEYNTSKVILCCSESLNFLELSDVLXXAEALRGTKTGVPLIVAGNPTFSPTVKGQRSVAPKSLLRWLSKFFTVLVVDEYNTSKNCPMCFKPLDNYGNEGTRMWKCKDCKTSTGHDLIVNKDVSAANFMANIAVYHFLTRERHPSFSRQV

SEQ ID NO: 1467 - protein, 766 aa, unidentified
  REGION 1..766: note = Table 20
MEKEITELTKIRREFPNKKFSSTDMKKAGKLLKAEGPDAVRDFLNSCQEIIGDFKPPVKTNIVSISRPFEEWPVSMVGRAIQEYYFSLTKEELESVHPGTSSEDHKSFFNITGLSNYNYTSVQGLNLIFKNAKAIYDGTLVKANNKNKKLEKKFNEINHKRSLEGLPIITPDFEEPFDENGHLNNPPGINRNIYGYQGCAAKVFVPSKHKMVSLPKEYEGYNRDPNLSLAGFRNRLEIPEGEPGHVPWFQRMDIPEGQIGHVNKIQRFNFVHGKNSGKVKFSDKTGRVKRYHHSKYKDATKPYKFLEESKKVSALDSILAIITIGDDWVVFDIRGLYRNVFYRELAQKGLTAVQLLDLFTGDPVIDPKKGVVTFSYKEGVVPVFSQKIVPRFKSRDTLEKLTSQGPVALLSVDLGQNEPVAARVCSLKNINDKITLDNSCRISFLDDYKKQIKDYRDSLDELEIKIRLEAINSLETNQQVEIRDLDVFSADRAKANTVDMFDIDPNLISWDSMSDARVSTQISDLYLKNGGDESRVYFEINNKRIKRSDYNISQLVRPKLSDSTRKNLNDSIWKLKRTSEEYLKLSKRKLELSRAVVNYTIRQSKLLSGINDIVIILEDLDVKKKFNGRGIRDIGWDNFFSSRKENRWFIPAFHKAFSELSSNRGLCVIEVNPAWTSATCPDCGFCSKENRDGINFTCRKCGVSYHADIDVATLNIARVAVLGKPMSGPADRERLGDTKKPRVARSRKTMKRKDISNSTVEAMVTA

SEQ ID NO: 1468 - protein, 763 aa, unidentified
  REGION 1..763: note = Table 20
MPKPAVESEFSKVLKKHFPGERFRSSYMKRGGKILAAQGEEAVVAYLQGKSEEEPPNFQPPAKCHVVTKSRDFAEWPIMKASEAIQRYIYALSTTERAACKPGKSSESHAAWFAATGVSNHGYSHVQGLNLIFDHTLGRYDGVLKKVQLRNEKARARLESINASRADEGLPEIKAEEEEVATNETGHLLQPPGINPSFYVYQTISPQAYRPRDEIVLPPEYAGYVRDPNAPIPLGVVRNRCDIQKGCPGYIPEWQREAGTAISPKTGKAVTVPGLSPKKNKRMRRYWRSEKEKAQDALLVTVRIGTDWVVIDVRGLLRNARWRTIAPKDISLNALLDLFTGDPVIDVRRNIVTFTYTLDACGTYARKWTLKGKQTKATLDKLTATQTVALVAIDLGQTNPISAGISRVTQENGALQCEPLDRFTLPDDLLKDISAYRIAWDRNEEELRARSVEALPEAQQAEVRALDGVSKETARTQLCADFGLDPKRLPWDKMSSNTTFISEALLSNSVSRDQVFFTPAPKKGAKKKAPVEVMRKDRTWARAYKPRLSVEAQKLKNEALWALKRTSPEYLKLSRRKEELCRRSINYVIEKTRRRTQCQIVIPVIEDLNVRFFHGSGKRLPGWDNFFTAKKENRWFIQGLHKAFSDLRTHRSFYVFEVRPERTSITCPKCGHCEVGNRDGEAFQCLSCGKTCNADLDVATHNLTQVALTGKTMPKREEPRDAQGTAPARKTKKASKSKAPPAEREDQTPAQEPSQTSHHHHHH

SEQ ID NO: 1469 - protein, 376 aa, unidentified
  REGION 1..376: note = Table 20
MERAPWVRDHVDPRRRQTWSKRNDIKGHAPCPVKGLKEALRKRATVVSMDEFRTSKLCTQCHQTLSSATTSLEVPGRLKLAIQQVLEQTTPLYTEAPAYGYEEYYAAARPSTETHDREATEGGYNAGEETEQSLLACYTDGYDYATYDSAAGQYHYDPANSAATGAGDEHQQGEEVLQCDECDVVEAHAVEVESALGYEEGALVPDPSQCEGTVGGEPMGSIPATRIGEEVLTETWTCGQCTFLNPMAASFCEMCIGHISLSPEAQAAASGSSIATPEPEPVVYAESSAVRVSPPPTALYLPSAPDFESSYLSEDDAMALPAPPPYGVSCGGDGVDFLALAFNTNSPPKIKTPGSSPLAKASQMRREEATTATEHT

SEQ ID NO: 1470 - protein, 154 aa, unidentified
  REGION 1..154: note = Table 20
MNKPTPKIYRTTYWSTYNKALINRGNICIWFDSATQWYAPSIVKQGRNHTYSDAAIQCCLMINSLFHLSLRMVTGFVQSLNTSQTCSSCGHIAKENRLTQANFSYVECGFSENADMNASPNILAVGRNVLSVEGRCSKGRPAKQKASEICEEVA

SEQ ID NO: 1471 - protein, 434 aa, unidentified
  REGION 1..434: note = Table 20
MTELGGQPSEWQWLCAGGWSALLPYIEREPAVAKIRDAYGNSPASGFTMDFFALNAPGANQAYLASPFVSTFKPVSLLTERGCNVRLLVRLCSITPPQVIRQALADPNVTLRYYTSRSFHAKLYIIDDIALVGSANLTDSGLMTNREVSVVLRKERDPAFDDLPAMFNLFWDYADTMTPEICSQYEQAFKAIGNAKEEAAFQAHLEKFVGAATPPSAKVGSDRISARRSFIQGLRRKYDEQLIPAFQEVEEIFLELGKRRPEFADADPEIELGRFLGWLRIARAPGDSWQAVALLDRPQRHQRIAGFLEEWHDTEDTAVGDMFQGENEVANINRLRAALASPDTRLILVGPAYTSQTCHKCLHIHSVRGESYRSGKTFSCGHCGWHGDADLNGAKNISVMGYFLAVPRGSGLACSLSDGRIYWLGEDLGRKERE

SEQ ID NO: 1472 - protein, 256 aa, unidentified
  REGION 1..256: note = Table 20
MPQEQTVILYVEATPKQDRLISYIRGVDLTSLRLQGDHLKFKTNHHAFNLRVIYRYPELEAMILSSHVKSLNFYRSSERRWKVHLRLAPHVVSLVPDGPVYPEGVMGLDVGSRSHLSMFWVKNGQQGFHTFNTGKELDYDDFKLLAAQVYDCLSTHRLHTLRIEALSSEDRFRSRCPELLDYIRTYVHLASADAIRVEAVSPLYTSQSCPRCRHIASQLSPTGVYTCRACGYTLDRDLLAAQNIQRGGCVPQEKAG

SEQ ID NO: 1473 - protein, 663 aa, unidentified
  REGION 1..663: note = Table 20
MNPEQGAKSASTASKKVSKPREESGKCASDGSTPPATSTPPDESWNVDFNPPAPYPVEKIVSIDLGFKYPVTANVLDTADNFEKFVTLTSQEYNQLSGSNRRIKLSHKILSKETKWKEKLRKNLKLKDLHNDGKREKIFKYYSLIMKIKKKKLRQKKLQALAKATRVETHKFWDNFVNKKLIEKSKDVLFILGKYIPNVGCGYRKSNLRMLIHTLNNKSKELKSKNIRVQTVDEYNTTRVCSECGEKNYKLASSPHRYYICLTCGHKSDRDKNACINIRQIGLVNARYLEKEDIKGNEFFRFEKQKKPGQRPTPWKSNKYDELICKDCMESGHNSRRSSRCSMYKKTGRQILAESHENGNFTQEIVTRNLKFYECFIDPNIRKGIRKDQDFTVEFRNDFTNFMQSALNNNEIVKYIIEREKAMDLGSFAIYFHGGHGRLKDFPWETMKNLFTDFQEAIGFELIDMKNRRYLLKDKLQQLETNWKNLISLNLRKRMNKFFMCHIPNDPKDPTRKLYREKLIKQLFQENVHPTNLKFFKKLLKGSPKNLDFTKIDKNYWRFLLILKKIRKYMIHHKKPSFDLFPKARVTDTCVSYTTCSIQEFFKRHNLGNGEANIAEMNDLSEAEKIKRKWSTFIQLEEKHWNRFAGSLTTNCYEVHLGVQKQN

SEQ ID NO: 1474 - protein, 259 aa, unidentified
  REGION 1..259: note = Table 20
MPPPGVIEPLYVGEHLLLGLSAGGESGTGVRQKAGLNRSISGEAWGRTSTLLEYKLFDRGGHLIKVPALNTSRRCSVCGFITPGNRESQDRFVCKAPGCGHAENADTNAARNIAHAAKQEAPQDIVGARMWSPRGYPGDEASTTSSGRVPLAGFSRLWAGEDVKFLTYTGETPGGWVNDAARAGKWGEWHGRRRGGRGGGSVLGGSPRLWNPMLVRTTIPTTITALFQRRGGVGQACAARRRPADRSGGHQSGYWRGTR

SEQ ID NO: 1475 - protein, 509 aa, unidentified
  REGION 1..509: note = Table 20
MKTVELKLKPVNTKKRSLLIQAARSLTLAKRQIVLRFHRPATIRWLYKHSRFGLKKSGERYVFGKKGSGIVLSRHPAVKKVFSSIENLNSKTKESLAGKAMQEIQAYHAQLRSWQKKRNKIMRENEKRGRVRRVPSRPGIPGSTPPGGREVRMLRRLGIVLPKEKKRDGLLIYEFGIKNRGLELVYDDRGRVFVAFYFKNAYPDRPNESLNGLYRLTDGEPVKMKQRNAILLPVEHEDPDGYPAKLLDRIRTQKVEVHDVQLVERGGEIYIQLTIDEPPAEPFAFQRRYLGIDVGISDRVAWSLVDERGDELENGTLNPPLATDDNGDPVPLFKVYHSLLEKRRENQRAGRRPGVLKLKRREEEILHILSKEIVRLAKEKGAAIVLENIKGLKYERIAEHEGRRTRSDRKKNFFLGQAPLRKLQEMIRYKAKDEKIPVFEISPAYTSRVCPVCTPLEAYRRRESLKVYTENATRKGKKFECKQCGREADADTNAAWNIARVAVLRMKKK

SEQ ID NO: 1476 - protein, 419 aa, unidentified
  REGION 1..419: note = Table 20
MKKRKKPPKKGEPRTITRAITHIGLERANPGKLAALDELAEVYLALMQQYVTLFCDEELPNGFRAPCFPTTLSERWQRVAIQQAAGIAKSWRTNRANAYQAYLDALAEYQKQREEGMLKAEAKEPQWREWNIPTLRQPCIQANVNVVQLEAATDSTVDYWLKVSTLTFRKQLLIPVVLANYHNIQLTDPHTGKRRKINSSVALNKRAGAWWLTLTYDEEILPETTNEAPVIGIDVGIANFITTSDGKQYGSFNGRMKERNRQDREKRRRKAKLRACLKKNGVPKEKLPSTTSRTGQRLIRHIKQSINRTVNLCFEEHEGCQFAYEQLSVPSMRFKARAMNAYLRASNLAHIPAQLEWNATKRGVTATKVKSGYSSQECHVCHYVDRKNRPNQQTFCCRVCGHTAHADTNAAQVRRFGVH

SEQ ID NO: 1477 - protein, 468 aa, unidentified
  REGION 1..468: note = Table 20
MVRHPLLRAGAADRHTPLLIESTLSDKWHRCAIRRAAGIAQSWLSNRDRAWREYQEALAEYDAHPDEHAPDEPLPPGCRVRFQMAAGTQTVTSPDGTTRPYRTPPTWTEPSLPHLTRTVLLAENDVATLRHAEEADAFPFWLRVSTLTAGARIDLPVTLADYHLDQLAGHDIDGDVYLIRRENGWWLQLSYHDQPAATSDGASPAVGVDVGIASFLTTSLGDQYGTFRGKLARRHQRDREQRRRKAKLRACLKKKGVTKLPSLTNQRLARHVRQEINRAVKAFFRDYAGFQVAYEDLAVRTMRFKTRRMNAYLYASNLGHLPKQLAWGAKKRGMKLTAINPAYTSQECPVCHHVARANRPNQQTFCCGACSYTAHADEVGAGNILARLTDAELRTCSDTAAIKALLGRRHRDYSFSHELPAVQPPAQIPATGPSGAGHHRPRRGNINAISSRHCSHSDGECKISRWFW

SEQ ID NO: 1478 - protein, 429 aa, unidentified
  REGION 1..429: note = Table 20
MAKKIKKKKNNFKLHKAVTHIKLDFANDGKLEKLNEVGAAFMLLVQAYIDHIFDNALKTVSKFDTIPEIETKLSARYQRCAWQQAVGIMQSFFSNERENKPVLKNITIQGNANVIKLESSKTSEFDYWLKISTLEKGSPILIPVKIHKYGIEILKSGKLCLGVTLNCKNGKWYAAFIVETENKKEEKSGDIVGVDLGIKNLLTTAGEHFGQFSDKLVNLVKKNDEKRRRKQKQNVCLSKKEKPVISLHNRKLESTIKNEIGRAINNFINSIQENTTVVMESLSVSDMKFKSKAMNRVLKASKIGYALDRLKQKLDSKHIHYSTVAAAYTSQACSKCGYVDKNNRPKQEKFLCKFCEHTENADVNASKNIAKRFGDDELNCLTDFRKVKSFLLERFFKRFPDARSASGGLELGFTLREISGQLLTVNQLT

SEQ ID NO: 1479 - protein, 208 aa, unidentified
  REGION 1..208: note = Table 20
ASKIIGVDLGIKNLLTTPVQYFGQFSEKLKDKIKQNDLKRRRKQKLNACLKKKGLVPVSLHNEKLDGFIKNEIGRAINLFINSVTEDTTVVLERLSISDMRFKSRNMNRILKASKIGYAMDRLKQKLDLKHIRYASVPAAYSSQQCSCCGYIDRSNRPTQEKFICKFCEYTDNADVNASKNIAKRFGDVELKDLTDFREMKPFLLERF

SEQ ID NO: 1480 - protein, 478 aa, unidentified
  REGION 1..478: note = Table 20
MIKPIWSEEPMNRAINNLKLEAANVGKLKRLDELAEVYILAVQRLVNFLIATGQRVPEKYGEIPGDEANLIGPPSPENQLSERWRRCAWQQACGIVKSWSANHRINPPCLNVEDICIQANANVVKLEVQGAPQRARLEQIERLKTKGEAEGKVVRIPKTLPDPKGGRQFEYWLKVATLRAGEPIFLPVKLYEQAAKLLKSASRTASSVLLTRRRGEWQLQIVVEHQAPEPVTASAPAVVGVDVGIVNFATVSPTHEVDAGESLPETDQRPFHQSFGGIPGTLSDRVERDAERMGRKQKLNACLKKKGRPPVSLANPATTAWIRNLIGFALNQLLFWLPSPDSVVIVVEDLNVADLRFKSRQGNRLLTASQLGFVRARLLKKLHQRGYRIEAVNAAYSSQQCSACGFVSTANRPTQAGFHCQHCHFQTNADCNASDVIAKRFGDHQLNLLSVPRTGDLLLERFLEHHQLLLRPITHRSP

SEQ ID NO: 1481 - protein, 430 aa, unidentified
  REGION 1..430: note = Table 20
MKKAITHLKFDRANARKRHKLDEVSVEYLRVVQGYIDWLIDHEQREPNKYAPIPEEEIPTALSDRWQRCGWQQACGIVQSWYSNERTNRPILHNLCIQANANVVKIEQPEKASSFDLWLRISTLDKGKPVLIPLTLYGRAKATVSQFPKLCSSVTLNCRDGEWYATLVVEKRGPKAKTKEVIGHDIGLVNIISNSTGKQYGQISPQLRQRVQHSGARYRRKQKLNTCLKRKGLPTVNLSDQRTEAFARNEIGRALNQMLNEFPEGAAAALEKLSLKDMKFKSRQMNRVLRAGQLGYVRDRLKFKLDERGIRYRSVQPAYSSQECSQCGFTFSLNRRTQADFECLWCGFRTHADLNASVVIAERFDDDGLNALPFREVQMELALRFLRQFPGAGRASAGLELQSEEVTIWLPRGKVVVSVGQSPPTVNQPS

SEQ ID NO: 1482 - protein, 575 aa, unidentified
  REGION 1..575: note = Table 20
MEKLTYFGILCVNHSIILNPDPRGLPRSFLSKLAPELNSGKLALLEALHSEWVRTLPQAFNWYWQLFLRGGLLPKRPPRSGPKSTFPATRLVTSQKDLMAIAIEGQAQSWASNLKNRIARALMRDAVLAGDPALRRELLWINSMRAWLLPFRQQTALLAALPAKKDALTMLSPQASRLMRKLARAYIAQHRLPDPMQLPLQVNQLSAVLAPAIKTAAPWAGSWLRISTLERGRKIELPLMANVHAQRRGGERATTFSLVKRPVAKGHGWYLRSTQYVAPAPWEACTEVLGIDLGLRNLLSTSEGDVFGDGFLNTLRRYDDQLLRLQRGLQGAGQVRLAQCRRYRQFVARLRGWLKTTIQTHLNRLLQMRRPKKVVVEDLWFVGPDSGLSRRMNRLLRRFGQRYFLQTLEEKSQEWGFALEHVEPAYTSQTCHRCGFVHRSNRRGDAFHCTACGHRAHADVNAAKNIVRRSGEKASSAPGGLRTRWAQSLLEWMARQRAALEADTSALSRRLRAAACARAGLRTLLHHKDSANRLSRVARERLCAALARKTIDGLLNGLCMDRAILLNAHSTRYSE

SEQ ID NO: 1483 - protein, 559 aa, unidentified
  REGION 1..559: note = Table 20
MKVAPELNVTKRHALLALRAEWKRTVCKAWGWYWAPFWQSGQFDPHMAVSGLGSRFPATQLVTSQKDLMLVALAAQAKGWTGNVVNRARPSVANASVNDSFRHELFWINAMRLWHVSNARQNELLADQNKAADLNAQKATTKKRKLAKPEERLTAISQAATRMMRKWFAKHLQRVKLPNPENLPLAFNINSATLVKARESKYQYFNWWARISTLERGQRVEIPLQGSQYFDTRQGEMNTTLELHERGGELYLKVCFTREPEKWSAFKTDVLALDLGLRNFLASSEGDLRGENFLNKLRQFDKQIQFVQKGLQQARVEKFGECRRYSSLIARVRGYLKTNIRKWLRSILAARQPRRVVIERLAFTGQDMSLGRTLNRLIRGFGQALFKEALAQWSVEFGFEVEEVNPAYTSQTCTHCGFVHRRNRIGNRFACLSCGFKAHADVNAAKCQRGRSAPEPESAVLPAGRHEWWSRTLKGWILRLRESLLKAAPGSTLELCLVGRACAGVSLLLKQKGPKALSKKMKRWLERALQQPDIRHLRNVVVRCIPRMYRLETLNVSTR

SEQ ID NO: 1484 - protein, 469 aa, unidentified
  REGION 1..469: note = Table 20
MLRALAGQAQGWASNLSNRGRRLSRSISDSVLRHEVMWINACQLWNATNANQNATLRTGTGPTSISQAATRITRRWFDNYVKRYDLPDPDGLPLQFNQLSAKFEAVKDTKHRHFGYWVTLSTLERGKRIRVPVEPHAYFAAAGGIVAKTLTLRTKDGALYLDIVRDVPTERWHRPGVPLLALDLGLRNFLASSEGDIRGENFIDTLGRYDRQLQATTKGLQNAGIVRLTDCARYRRLAVRIRRYIKNNVQRWVRSLLQAHSPEEVILEKLNFVAENSGLGRRMNRLLRGFGQAVFKQCIKSWSELKEFKVTEVEAAYTSQMCSSCGFVHRANRKGNSFGCLSCGYLAHADVNAAKNQRGRSAAGAPTSTGSRHERWVSALREWLVRLRTGLLEASPGSTLHSRLVWRACTGIAVLMNEKRSAGKCGAARKVLQEFTLTLDRVSDACLYEKITWLVTTEAGSPALAVSTD

SEQ ID NO: 1485 - protein, 422 aa, unidentified
  REGION 1..422: note = Table 20
MPTLESFVSNLLNSFVDIVLNSTLEEKTKKVLLYLASRQEIFCVKSQTAKWKDQELEITEYERLLARKIFKHLLSKYKKPSFRKNTLILDSKCALIERPTKARSYDLWVKISTLEKGKPVWIPINLHDYFHQREGVLTPVVQIVEEDGELKLRLVKEVHQREMQRHGVVALDFGMNSLFATDRGDLFGRSFYQKVKEYAEKIDKLQRNLQRQGIKPKESKRYRRLQERLSAFVKSEIRRLLNRIIKLYSPEVIVIENLNGFLNEVINNFPKSVKRVLIRFGLGEIRKKLRELQEEYGIRVVEVNQAYSSQACCQCGYVDRENRKDRDTFECKCCGIKLHADVNASRNLRERFLGSLHLRRMEQALRWQVERFLQNLSSERFKCLRGKARSLLTQNPYFKKVLGDSSKPEVWINNLKGDICPC

SEQ ID NO: 1486 - protein, 500 aa, unidentified
  REGION 1..500: note = Table 20
MKSLKNKEEKLYRALPYKHFANKSKLKTIRILFKLYQKDANTIFKYIWEKFIKSKTPITKRENIKQIKTILSERYKYTIFNYLVYPTYSSYLEIAKNYIKNLITHSTLSEENKLQLYILNKRGLWLNPPDEIQIKVKKENKEETKTIKISQQNKHLIKKLFHRYLKTNKIPKFNNAPLIVDNKTGEFQQSKTSKKFKQWIRLSTHIKRQVLYIPVEETDYYNQRKGKDTNIFHITKNDLGTIEIKRVKEIKKENTDTQENIIALDFGLKSLFTTNKGDLLGRNFFEKIKEYADKIDKLQRNLQRQKINPKQSKRYIKLNFKLKQFTKNEIRRIINRIVERYKLSIILVENLKYFLKQVINKFPNSVKRALIRIGRKEIKNKLKEISEEYGIQVVEINPAYSSQTCNNCGYVDKENRKTQEKFECRLCGYKLNADVQASRNLIKRFDKGMFVCGRKQALRLQIEEFIANLQLERYKCLWSKALRLLTQNPYFKGLSDSSLT

SEQ ID NO: 1487 - protein, 497 aa, unidentified
  REGION 1..497: note = Table 20
MQHYANPAKVNLVLDLFRAYPKAAQQIAAVQWRCFFDTGAFKRNLPIHIASPLSARFKQTCQYQVVGMLNSFIANRANDFKDAVMGIPDAILAAFDARHSERAWLGSHGRPVSYTRVALLYLGKYRAWYRAAPAMKGLPIPAEILRLARSIMRGVFARHRRPSMGQIQMLLDEKVARIEATRSMAEHTPFAYWVKLATLRPGKPISIPIHANVHYESVAGERMACVQINLGERGLSIGFVKDVPVTPYAPRMEVLGVDVGLRYLVATSAGDLMGRGLLDRLIVWDRQITALAANRQKQGLRVRSRRYDTLVARVRSFLKNEINRVLNRLLAVRQPDEIVIESLDFRSPDLSRRMNRLVQNFGRTVFRQALAAKAEQFGFTATEVNAAYTSQSCAKCGYVDKKNRRAERFTCRHCSHTAHADINAAMNIRNRRSVATMASRWVSQSAILEALVRQFLERCTQRPYSRPGSGILSNPYFLGFAGWRTESSMENSEAPLL

SEQ ID NO: 1488 - protein, 501 aa, unidentified
  REGION 1..501: note = Table 20
MMRTYPYSHAATARKERQIWDVLRAYRQSAQQIANDQWKSLFITGGMEKDGPICPADHVISKRYRQTCQRQVVGVLKSWLSNRKNDFRMLVTHSSLGKDPTENGERLRIQLLFINKHGLWFKDRVVMRKEVIPPEVMRLARNLFRRLMNKHNKPSFRHVGMALDAKVARVDTPNKARSAAFPYWLTLATLNPRKPIHIPLYENPYAMAADGDEKAFVQINVRRGTASSGRPGTLDIARIKEAAPVFSLEGPRPLIVDTLGIDVGLRTLVATSMGELLGRNLIDRLSHLDAQISRLAAERQRQGLPVRSRRYDTLVNRLRSFLKNEIGRVLNGLFARVHPAKVVIESLDFRSPDLSRRLNRLVQNFGRTWFRQKLDMLSEQYGFLVEEVHAAYSSQTCKSCGYVAKNNRSSQAKFHCRFCGRKAHADPNGAEVIRQRRSLPEYALWRSKRQVLQAVIGHFLKRYSGRLSKLQVDSALRLVVEGNPYFADHRAALWPRNTTTD

SEQ ID NO: 1489 - protein, 491 aa, unidentified
  REGION 1..491: note = Table 20
MIRADTIRHSANAGKVERVLGFTRRYRACAAAIAAREWRAFFEAGAFSGKYGNVSAFNAYCGAAPAQMARAQVMAMLGGFLANRQNEFRDAVTRSSLGSEVKHALHTINGRQAWFSREDVVVKGETAPIPAEIRRLARCIMRAVLHRHRRPNARGIAPVLDIRTVTVAPAASARHSDLWASFKLVGQPVFSIPLHTHAHWRGRQGKRCNVLQVVPDASGTGFSVRLMTDMAEAFAESRAAYLPRTERIGVDFGLATLMATDRGDLLGRGFLDAMRRLDGQLVAIARHRMRAGGKPRDSARYRRLVDRVRGIVKTRINTALNRIVSLHAPAEIVVEQLDFRMPGLSRRLNRIITNCGRAVFRAKLADLKDRFGIEAAEINPAYTSQECSRCGYVARENRLSQSRFRCVQCGHTAHADVDGAKVITARRSRGLDFRFTARGQVLAELQRRFGERRRRHHHHVQRGTKASSRQPIPKGQSQPGRTEIRLSHESQ

SEQ ID NO: 1490 - protein, 599 aa, unidentified
  REGION 1..599: note = Table 20
MMRCDPLPLLDPNPGKIRDLLAVLKAFRDCAPAVAADQWRRFFETGRFEKKLTAAEEKAVPALAAAKVMLGAQRMQMLRFQVVGQLKSFISNRANDFRDVVLASSLDATLRHQLLTINKEKAWFSRDLVRMKSGPLKGQVIPDNVRRLARSIMRAILACHRKPRFHRLNPNIDQRQVSFGEAHSARHGDLWISIAALDLLDKKTAKEMTAVDAGRAARQGRAPEEFRPGSHRMIHLPLRSHAYFNARGGDLALTVQLIERPASKHSIKLGRSTHRLPDGRPGELVIGLVSDMKAAFEQSRTGYVPRCDELAIDFGLRTMLATDQGDLFGRDWIDRLKWHDERIAGLAARLQAQGIRPNRSKRYRERVEALRGYIRTEIGRALNRLVEIRAPAHLVLERLDFRSPELSRRMNRLLTNCGRAVLREKLKALKEQYGITFEEVNPAYSSQTCSNPRCGYVSKTNRKAQGTFVCGACGKKIHADVNGSRNLGGGRSAFDRAARMTKAESLELTVMRHLERLGAARAGVVLDPSLWPARTRDRVIPERSVYVSNRYFGDALGKFFPTPAAAPMTRRFKSNRRPSAPEIVAAQPTQDMVADVSAG

SEQ ID NO: 1491 - protein, 536 aa, unidentified
  REGION 1..536: note = Table 20
MVTYPRARSTRATMIPDADRMTATAIHRTDLLPTAMNAGKAAAVRELLRAWRRAARAVAADQWTRFFRDGGFRKNLPAAQEAAAPGVAAAKAEIGAQRLQMVRYQVVGTLSSFLANRQNEFAELVARHEGFDERTRHMLHVVNKAGAWFDRCRDVVMPDTGEPVPDAVRDLARRIMRHVLGRHRRPSFKRVNMVIDRRQASLSSAASASAFPLWLRLGTLEHGRRIEIPLQSHPYFERRAGQRCRTVQVNEDRDGRISVGVVTDVSAPFAAQRAAYTPLRDDLAIDFGLSTLIATDAGDRMGRGALQHLERLDRRITRIARHRQKAGLKVRSRRYDKAVRQLRGWLRTEINRILNRLVYLHRPAHLTVERLDFRMPGLSRRMNRLLTNCGRGVLRAKLRDLEERYGVTHTEVNAAYSSQTCSHCGWVERANRRSQSEFRCRCCGRRMHADVNAARNLGARRSCPVMGNPRRRRRAVLGEALRRFAERKPCHPPEAARRSPGRGSRGDPDRPDARAGPRITLPSAHPQDLVGRSATQ

SEQ ID NO: 1492 - protein, 565 aa, unidentified
  REGION 1..565: note = Table 20
MPKRKRERFPVYRCDKLPTFMNAGKEELVLAMLRRWRGAAVQTAAIQWRCFFEQGRFDPFFDPATAYRKAGVAVRAALLVQIGAHYGLDSGAGKPGATRRYPKMAPGLVDPLAELKSELGAAQVQMVREQVLGSLNSYVSNRGNDFKQIVFGSSVGETTRHMLFVINKARAWFDLSRKLVGGGVEIPASARRLARKIMSHVMSRHRSPRMTSINMLVDQRIAKLSEATAATGHDMWLRMSVAKGMKIDIPLKGFEHFDQRRGTRAKSFQIIKDRNDCKIYVGVMTDVAESFEASREYYAATVKTDAVALDFGLNTMFATDQGDLLGRGFKAKLQAMDRVVSGIAKHVQRSGQKPRSSKRYCAWVAKVRGFITTEINRVINRLIEVHRPSKLYLEKLNFQSPGMSARMNGLIQNCGRAILRTKLAAISQEFGIEATEVASAYTSQTCSCCGYTDKRNRLAQKFQCRFCGSRMHADVNASRNVGSERFRFFGSPTSGFRQRILDTLVSQHVERYSWERGAPPDPRKSNPYFAGQTIAARLSLQEVAQPRRGEAANENEELSSTLSAA

SEQ ID NO: 1493 - protein, 269 aa, unidentified
  REGION 1..269: note = Table 20
MITDVGEAFQAARDAYAANANGPLALDFGLKTLFATNEGDLLGRDFLRKLKALDETLSGIARHVQRSGRKPRTSKRYVRHAERTRGYIRTELNRIINRLIATRRPSRLFLERLNFRSSRFSRQMNRLLQNCGRSVLQTKLQALSDEFGIETTEVVSAYTSQTCSCCGYVDKRNRPSQEQFSCKWCGNKMHADVNASRNIGSERFRSFTVLRPGIRKAVLDVLVSEHIERNKRRRGSPSDPRETNPYFEDWKPEVRFLPLAASCEWQKGV

SEQ ID NO: 1494 - protein, 520 aa, unidentified
  REGION 1..520: note = Table 20
MARTKPEHPPVHRTDLLPSNLTASKEAAVRALLRAYRRGAVLLGREQWRLFFETGRLEKNHDVDKVTFAAVIGAANRVQMARWQVVGQLQGWIRNRANEFRDMVNHSTLAPATKQMLHAINGLGAWFWRGEVARRDTGEVIPVSVRRLARAMMRHCMARHRRPDLSRISMRLDHRAGSIARPIQATQRGRVGWWVSLSTLEKGRKIAIPLLTYDYHAKRPGRVTNGIQVNEREGRLSFGVVTDMGEVCAKSRAAYDGHGALALDFGLSTLLATSDGRLLGQGWLKRLKRYDALLALIAASQQRAGRRPRESQRYRALVEDVRGFLRTEVGRVLNRLVEQGKPKELVLERLDFRHSDLSRRLNAILRNCGRSIVQEKLRDLEERFGIPSAEVNAAYTSQACSSCGYVDKRNRRDQKTFVCLWCGHQMHADLNAAANIEARRARPNGWLFQGKAAVLAELVREFGERPVRALGLGRTGSRGAPADPRSTNPYFGGVPSTVVRSSERREASMKSPDPPALVAA

SEQ ID NO: 1495 - protein, 584 aa, unidentified
  REGION 1..584: note = Table 20
MARKGKNPKDGSKSKAVLRCDPLPHAMNPGKLQSVLALFSAWRAAACIEQRHQWRLFFEGGRFEKMSDAKLTVGLVGAAREQMVRHHVVGQLRSWVSNRANEFRAAVLGSTLPEATRHMLLIVNACEAWFRRDEMVMRESGETIPGEVRKLARSIMRGVMSRHSRPSMHRTSMQIDQRQATLERTRNATGRAPTDEAIVGPAAPRFAYWLKLATLEHRTKPDGTSERAYNTVWIPLRTTAPFERRRGARKLTIQVSQDRETKAVTFGVVTDITDHAAAVKMAYAPKAAFIALDFGLKALFATSEGDLLGRGVYDALIRYDQRLTTLARHIQRSGGKPRDSECYRRLVTTIRGFIKAEVNRVLNRIISLRRPKHLVLERLRFRSPGLSARLNRILQNCGRGVIIAKLTALEEELGVTSEEVNPAYSSQQCNCCGYVDSRNRTEQARFRCRWCGARMSADVNAGRNVGERRSSPETTPVGRTKSAALAELVCRFNERWPRARTLPPDPGRKGQRGLPADPRWTNPYFRDWASAARLALGSASDLGNLPTTPALVAVGLNARVPIDRVGTVEGHPQTGSELVAGGPR

SEQ ID NO: 1496 - protein, 560 aa, unidentified
  REGION 1..560: note = Table 20
MFEVPANACKIEAVEQLWVNWQKGLRAEALVARRDVMSGRGLREKLLAAEEAREPEIVASKARLGAAEQQMVRAQAVGTIKSWISNRENEIAEMIERRYTPKRWRGKARRRFEALPDDGRRALEDEFAELKADLRAINDQQMWMVSPDATILRKKGGQPVSAKAQWIARKMFLGLAARRSWPKFRNMAMRLDSRAGAGNRWLEPEQDGLFTWWINLKTPSGRVALPVRGWRRGKNKTGKGANREGALGKTINLVGNEDGTLRVALDRDMTEVFAASRDAYEPKIDVLGLDFGLRTLFATSEGDLLGQGYLGNIMPLVERADRIAAREQRNGRKPRDCAAYRDAITRIRGLIETEVNRALNLAVELHKPRVIAVERLDFRGSNLSKRMNRILSSCGRGVVREKLKDLTDRHGIEIHEVDPAYTSKTCSSCGYVDGRQRNGEKFHCRHCGKKIHADVNGARNIAAAAGSAEDAGGCSAQRGVKPCRHRRRPRVPLSVSRTRSATLREIVRRFDGQYPNLAAVSRPKRGKEGTRESACDPRETNPYFKQHSLREEYPMCAVST

SEQ ID NO: 1497 - protein, 243 aa, unidentified
  REGION 1..243: note = Table 20
MSADVFPQQAYQPQCEEIGLDYGLRTLFATDQGDLLGQRFLHQLRIYDRRISGLAAYRQNHGLRTRSPRYDRYVRQMRGFLRTEIGRVLNRLVTNAGRRIIEEKLNDLHEQFGIEIEYINPAYSSQTCSACDYVDRKNRTGETFHCGWCGRTLHADVNASRNLRARRSRPAVGSVKQAKAAVLRAQVLEFQRLSMERWGNPKGRRGTPRDPREQNAYFGRYAPKVTSNRTSATSANAACATDR

SEQ ID NO: 1498 - protein, 434 aa, unidentified
  REGION 1..434: note = Table 20
MLPANKGKSEWLRSGLFHDYAAVANALAPDLDAQWLRFFSSQDKGDRPMPLMSSVHPDLKDLVTTTVTQQAYANSVYPASVSKVGNVVNDIRIEINAIRAGDNPPDADLLKQLYYINKSRKWLSSEGLPAEHAAWLEDRFWHHCRRRCIPEFRENVICLDQRNCKVQQAGTSREFETWLRVSHRGKGVSMPVETNSYADRHDGKTKGLYRIRFNQHKHRLEVDFIKAINYGDSVDAYTKACDALDKTVALDFGLRNVFVSDSGNRYGVDLIDYMVKLDKRIQHIQTQCQKRKFRLSRSKRYRDMIHRMRTTIDRSINEALNAVVKTERPSMIVVERLNFMHPDLSRRMNRLIRNCGRAAVERKLNALEQEFGIEHIEVNAAYSSQTCSQCGYVDLKNRGTRDTFKCRWCAHTDCADTNAASNILTRRSWPKWWL

SEQ ID NO: 1499 - protein, 489 aa, unidentified
  REGION 1..489: note = Table 20
MPIRAYKHKHNINNGKIQIIKEILKEYRKTAKGIAKKQWHIFFKEGSFDKNYKVKEIKSKLSERYKQTCQYQVVSILNSYISNRQNDFVEIVYNSNLNEDIKFILLTINKTKSWFNEKLKEAKLKDKKGKEIKKLPIEKHHYKLARKIIKQTFKRNRFPSFKHISMQLDQKVVKIEKRKEEKAKEFDWWVKLSTLEKGKPIYLPVYKNSYFEEKEGKQLNFVQINEKEDNIEIVFFKEIPKETNYIPKTNKISIDIGLKSLFAVNTGHLYGKQFYKFLKHYDRIITDLQANLQKQGIKPKQSKRYKELNRKLREYIKNEINRILNRIFKIYQPKEIVVENLNFQNGELSPQLNRLLSRFGMKIIKQKLKEFEERFGIKITYVNPAYTSQVCSNCKYVDKRNRKTQEQFECLMCGKKINADVNSSRNIGTRSSSSMLRYKRRTVLRMLIRAYLSDAKHYAYNSRAREVILSNKYFIGYYEPLKITSKEKS

SEQ ID NO: 1500 - protein, 325 aa, unidentified
  REGION 1..325: note = Table 20
STNSYFEGIDGEISNFIQINFQQDIDKIDGERPLATRHQIEYNNYKIDFCLIKNIEQEQYQPKIDKLALDLGLNNLFATNIGELYGRNFSRLLKEYDKIITLLAQNRQKQKLKTVSKKYKKLINRIKAYLKNEINRVINALIQNNRPKEIIVERLNFTSPKLSKKLNRMLSNFGKSIIEEKFESIKEKYGIVITEVNPAYTSQECSRCGYVEKKNRKRQAKFICGFCGKKQNADINSSKNILARSSSHLKDIFAKRAFILDKTVTNFIERHLVVLLYIFRNKDLGKSSSYTLSKIKNKNNLCYNSLANTLTSNPYLTNYLKGNFL

SEQ ID NO: 1501 - protein, 478 aa, unidentified
  REGION 1..478: note = Table 20
MVRTYRVNHNANIGKQDKITAVIKEYRKTAQSISSAQWQRFYKEGKSFNKYFDIKHIQTSLSERYKQTCQYQVVSILNSFISNRKNDFTRMVYRSHLPEQIKIDLFTINKYGWWFRKELKKIDTDTLKLARKIFKYILSEHRNPNFKNISMHLDHKVALMSGKVQDKATSFDYWVRLSTLDKNYPVYMPVKTNPYFENIEGKLKHFCQIGLKEDRDITLSFIKDVPNEKDSYKPVINKISLDTGLKMLFATDKGDLVGRNFYETLQKFDRQITKLVSNRQRQKLKVRCRKYDDLISKLNAYLKNEINRCLNKLVDLYLPAEIVVERLNFRNLNLSKRMNRLITILGKTLIKTKLQSLHETYRIKIIEINPAYTSQECSVCGYVDKNNRQEQEAIKCRFCNTSQHADVNGARNHLVRSSDEVINIYKNKKAVLHILVDRFLYKLSDTERKYAMPHSKAMALLSKNPYFSGSLAQAKGFL

SEQ ID NO: 1502 - protein, 500 aa, unidentified
  REGION 1..500: note = Table 20
MACRTYPLKHKANKNKTETIVAMFEPYRDFAQDIAGVQWNHFFATGRFSKYIDNLHHIPSMLTERQKQTCRDQVVGILESFVSNRANDFKRIVFRSSSPEDVKLQLFYINKRHLWYHYGDIKMPLFLDGERVKGEFVLIGSEVRNLARKIFARVLSRHRRPTYQGINLALDAKVASILPREENKATEFDYWLKISTLDKGHPTYIPLQTNYYFEDVDGELKNFCFVNLKDDGNMDFCLVKDKNRLPYRPMIDELSLDWGLCVMFATEFGDLYGRNFFDQLKRYDEILTELARGRQKRKLNTASKRYKALRGKIRDYIKNEINRVLNRIARQYRPARIVVEKLDFRNQELSKRMNRLLSRCGRSAIEAKLQTLSEDYGIEVEYINPAYTSQECSICGWTEENNRKSRDGFVCRNKNCSTMLHADVNGARVIRSRSSTPLANPYVSREAIFNALRDQFSANVERYPCWPNKTVDRERRNSPAGAGAPRGAAKSKELCGNNVP

SEQ ID NO: 1503 - protein, 506 aa, unidentified
  REGION 1..506: note = Table 20
MSTSTPVVRAYRVRSSANPAKLVAVAAIVPVWQAGLARAQAEIRRTLLTAGALPRWVDAKDWGGGLSQRQWDSVNQQAVASHRSWLGNCERVFRDLVVGSTLPELTKFDLLYVNAAHAWYRPLTADAPVQLSAKRMIEPQVFVLARTIMRQVRKRVGAPDLRRVQTMVMDGKIASVTTADAGEHADFWVRISTLTSGKPVWIPLHSNRNITQRLSRPGAVLANHCQVAIRPGGQVQFRLLVKTPRAEQSAERSRAVGLDWGMATLFATSDGTLHGRGFLERLRRYDQRLQPLIAALHRNRVKLCDSRRYRELVRDIRGFVTNEVNRCLNRILDPNKGGAGDVARVVVEKLDFRGLAKTGRLSKRLRRLLTVAGRATVTRKLEALRDDLGFEIEQQPAAYSSQECTGCGYTHPSNRRDQARFRCRFCGKTVHADIDGARTLLRRSQTGGLTPYRTRGQVLDHLDECFQSHWGLSFAAVAERQTKPVPRVAPSSATTAAECYGLPSVA

SEQ ID NO: 1504 - protein, 522 aa, unidentified
  REGION 1..522: note = Table 20
MKRAYPHTLNAVNDTKRDCLLALFPAFRTALKTVLAHEARHLQQGGTLHRYVQLPDKRRVAGLSARQMKTVGNMVRNALLSWQALLERDVRAVVNGSTLTDWERMVLHRVNTRHAWWANDLCLPWAENGDGELRPCTMRTRGMLLLPVPAYLLKLSRRIVKHAITRTPIPDLSHVRTLVLDAIIAKPERPHTGGSERFGWWIRIATLAKGKPVLIPVDRNEHFEQHYAHAISHGGGLCGVVQLTQHDDGTLSCALVLDQPDAPLRTDGKPLGIDYGMADALMADSDGNLMGHAMLATLKRYDLRLTQLGAWLQRRHIKPSTNREYHRLQHRIRAYVTNEIGRILNRIAARHGDRKVRELIVERLDFRYGGMSPRMNRLVTRIGRAVFKQRLAALTENHGITVHDVPAPYTSQECSGCGYVSRRNRPSRARFTCRFCHKKQHADINAARVIMSRRSWQQPDDTGPASRRNTLRLLDERFRQRWNTPTQGAVMDVTGAPCGIRTATTNEENAGTSSRCHELTHN

SEQ ID NO: 1505 - protein, 529 aa, unidentified
  REGION 1..529: note = Table 20
MITAHRHRLAANTGKEQALMDLFPAFRDTLANLSSMTVKELQGGRPLAKWRILTDLPFDTRLSARQVKSAYNQVHAAHASWLALLETAVREAITASTLTGIRRTTLHRINSRHAWWATDLTLPWRQTPGGELIHATHTYAEKHPEKCVWVPVDPADLRLARHLAKHTSARKVRRPDLSRVRTLVLDSTIARPERPTGATEYSWWVTVATLVRGKPVRIPLKNNTYFENLAAQPGAKVAGVIQLHLETTGAGQPAGAAISLLLNTPDALQRETGTVVGLDFGMANALFATSDGRLLGQRMLRTLKSWDQRLTEIAAEHQSRGLRLRDNPEYRALNKRIKDFVTNEIGRVLNILARENGEDRIRELVVERLDFRGHGMSRAMNRLLTRTGRACVKARLAALGPKHGITVTEVGSAYTSQECSGCGYTAKANRRGRHFGCRFCGKKLHCDINAARAIRGRRSIPLTDHHSALQRRTTLQRLDQRHRQRWGPGPAAGADPGLAGARAAGQPSCLAGKSTGFHGIPCNYVLYMR

SEQ ID NO: 1506 - protein, 507 aa, unidentified
  REGION 1..507: note = Table 20
MISAYRHMVTANPGKVAALHALFPEFRSAMGHLAARSHRELLAGDQLVHWRVMPNNQVWFPTRLSARQLKSAQNMVHANVSGWLVRLQDRVRELVTGSHLSEHQKTVLYRINARKAWWARTLELPWVIDGEHLVPVEHGRLAKTPAVVVWIAVGPETLKLARRLAKHAAHKQIRFPNLSRVTTVTLDGIVATTAAARTATHGGRVSHWVKVATLVRGKPVQIPLTTNARFVGELNQVRARGGKLCAAIQLHRAGDGVAVSLITDQPDAAPRPSGTVIGVDFGFSSALFATSAGQLLGRAMLARLRELDAVLEPLAADLQRRGVALKTDAGYRKLQRRIADYVANEIGRLLNRLANKDIRELVVERLDFRGGGLSRRMNRLCTRTGRGVLKARLTRLTERHGITVTVVPAPYSSQQCSGCGYVHKTNRKTQSRFRCGFCGKKLHADVNASRTVASRRSRPLPDGTGPRARENTRRLLDSDHRKRWNLPTQGAVHGITGARGRSHSRAA

SEQ ID NO: 1507 - protein, 529 aa, unidentified
  REGION 1..529: note = Table 20
MTEATGLPREAMKVRAYPLQAFANAGKLSRVHALLGPWRSALGGMQSQLYRQLLDGQPLMKRMPTKVTDLSFTTELSARQVKSIYNQTFQAMNSWTGLVKNAVRELISGSHLDDEARTILYRVNARKAWFAKELSLPVLVNLGTGEVRHSDGKPGKGWAAQDLPVPAELLRLCRHMVKQVGKHAVSLPDLSRVNTMLMDGTIARVEPSKDSSFDYWLRISTLQKGDVARVPLRAHRHFRDAPGEVSDFVQLNVLKDGSLQFVLQKKSPLAQPRPDGVHLGLDWGMKSLFATSDGRLLGVGAMPHLMELDRQTLELAKSLQRQGIRPKTNRRYRNLQRRMGEYITNEVNRILNKLSTEDIQGLAVEKLDARGGGMSRDMNRLVTRFGRAAVKKKLAALTEDTGLDVVEVNAAYTSKECSSCGLVHDGNRSGLKFHCRFCGRKTHADINGARVVLSRRSWHTQGDSRTKSQRGTVRRRLDGAFEARWGCAPPTAGSTGSRIPGSRRRSAVRLATAPSQAPVRMRENVEKVP

SEQ ID NO: 1508 - protein, 532 aa, unidentified
  REGION 1..532: note = Table 20
MARARTEGNSVSAIILQPLGPLGNGSLTDRVVPLTKGRKPREVVRTYPLPNSANVRKTEAIVAMLAPWQAGLVRVHSGLTRTRFEGAHFPKFLDTKPLAETSVLSQRQWQCVTKQAFAATRSWEEIAKQRVAVLIRGSRIPKNTQFWLYRVNAFRAWWLKDGSLLLPTDEEAPPAAAYRLSRQMIKQVTRSHPRPRLGSIRTMQMDSLIANVERSRAKTFDYWVKISTLDRGHPVMVPLSSYRHMETAPGRVLHYAQVRVDTDNQVSVSLLRKNALAQLRTDGTVLGLDWGLSHMFATSAGQLLGNTIFTWRKERDAELLALTRALQKQGIKPNASRRYRALTRRIREHTVNEVNRILNQLSRRSIRAIVVERLDFRGGSMSPRMNHLLSRSARATVKAKLTSLTEVAGIAVTYENPAYTSQQCASCTNIDFRNRSGELFRCRFCGRKSHADINGARTILGRSHNDSVQLWMYRGTVKKIIDAQFTQHWGSPPTGLTRRRAPSSTRVEKAHTAFAVGLAGLQQPANAIQETS

SEQ ID NO: 1509 - protein, 465 aa, unidentified
  REGION 1..465: note = Table 20
MAALLPWWQRGLVHVQLIQVRALQSGETRLGWLGGAEAKALPGYLSARQWKSVVNQANAALISWQEAAKTGIREMIRELDIDEVVRTDLFRINAHKSWWTTTTTLIHHRIPTERVQVGAEALPIARELVHRWLRRHPFPNLSRVRSMAMDGPIAEVSKSTTPLADYWVRISTLRKGQPVYIPLHRNDYFDAAPGEVRNFCQVQVTDTGQVRFLLIKKSKPAPARTDGGELGVDWGLAAMFATSDGRVLGRKLFAWLKARDDEVVTLSKALQANGIRPKNSVRYRRLQSRIRGYVRNEVGRILNRLAAENLKLLAVERLQLTGGGLSRRMNRLVSRAGRAAVSAKLASLTKTHGIAVVEVNPAYTSQVCTGCDYVDRRNRITRSRYSCRFCGKRLHADISGARAILRRSQEPSRGGLALGKQTILARLDRKFHTRWGMDPTVLRERRIRGHSTAVPDLVGAQPPNG

SEQ ID NO: 1510 - protein, 463 aa, unidentified
  REGION 1..463: note = Table 20
MGKCTRSYVLPSHANSGKIEAIRQVLPWWRRGLVHTQLIQVRRMRAGERLGYIDTKSMPGYLSQRQWKDVVNQVNSTLRAWQEQMTAAVKPMISSLPGLSDETRRALYRANLAHEWWNDDVLAPIVRTLMRSTLPLPNFSRCSTMLLGTSVVVEDAAPDSPHALWARISRPPGQGTPIPIPLGGNRYEAAASGARANFMQITVPDAGSVLFRVVKHRPATPPRDSDSGYTLGVDWGLRTLAATSDGRLLGRKFYDWLAVRDRELTELGAALRRQGLRPRDSRRYRRLLSRIRGYVRNEVGRVINVLASDPDLTEIAVEDLDFRSPGLSRQMNRLLSRAGRGAWASKLRSLPADTGIAVTHVNSAYTSRQCSGCGYVDARNRLQQNRFKCLFCGKILHADINAARTIRQRRSVASGGLLMSKSAVLAELDQDFCHQWTADPGRLRERQLRPGSRAPRTSVRVNS

SEQ ID NO: 1511 - protein, 533 aa, unidentified
  REGION 1..533: note = Table 20
MIRRDQDHREYHHFDQEKRKKKPPVVRAYRLQHKANVGKVARVAAVLPEYQKAAKIIQANQMQAFVQDGAGFWSRRDPGEFETKLSERYKRSVQNQVVAGLDSWLELSKQEIRQIIAHSELPDETKADLWWLNACNAHYAKEATVPVWIYPDDVRTGSGERRSAPPETLSLLRAIMKHVRRHRVHVPQLWRSRTMALDGTVAQVTPTQGSMYELWVRVSTLDAGHPVWIPLKKNQFFNDAPGELSNFAQVTVSRDGALKVTLVKRSNRAAPVLIGEDISLDWGLNSMFASDLGDQLGRQFYPWLRKVDVQLTKLTVELQRRGIKPKTNARYRKFNQRIREYVRNEVGRILNRLVKRYGIKSITVETLDFRNGDLSKKMNRILIRAGRAAVKERLKSMSETQGIEIHEVNPAHTSRECSGCWFVSKQNRKGPHFVCGFCHKRLNADTNGSRTISMRRSHGLQYPYASRQTVLQRLDARFEARWGLKPGEAEKLRLAKERRKTTPCHSRANLSLEHPGIGNEISSMPLLLADKHQ

SEQ ID NO: 1512 - protein, 520 aa, unidentified
  REGION 1..520: note = Table 20
MNGNEILRALEVRHSGNKGKIQAIKGTLPLYRETAKRIAPVEWLCFYTTGSFSKFISVKGVPSPLSERYKQTARDQVAGMLESWVSNRKEEVTSFVVRSSLEEQTKIDLLFINKYGKWFSPDEVSTSGGGGKGKKTKGPDGKALRRAVPEETRKLARLLFKQAAARHRKPSFKHINMALDAKVAEVVPADEGKSSHADWWVRVSTAEKGKPVRIPLHTNEYFEEREGTLKKFLFVEEREDGDLTFRLVKSVPFDEGYRPVLPSLSIDFGLCTPVATNMGDLCGQKFYRHLLKMDKVITDLAANLQGQNIKLSSSKRYNRLVKKLRGYFKNELNRILNRLVEVYSPRKIAVEKLDFRSPGLSKKMNRLLRRCGKRYMKEKLQALSEEKGIEIVYVNPAYTSKACPNPKCGYVDKRNRKSRSEFECKYCGKKGHADAIAGKNIDARSSDAELRGPGTSPKRTLAVLTRRFSSSALNGGRPLRPRSWAEDLLAENPYFGNSKGFTKTGTGSLKPQSEAVSLSG

SEQ ID NO: 1513 - protein, 418 aa, unidentified
  REGION 1..418: note = Table 20
SSLPREKREVLLLLNSREAWLKPEVRQALAEGQPLVFKVVRKDESGRERTKTLQATPEDLRLLLHLFRRARKELTWPGMHRIQMHLDGKVVRYEPRGRGRGKQATHFPAWLHLATLEKGKRVAIPLGENPYAEGRKGEWRDFFQVGEENGRVQIRRVKALSPKPYTPRTERLAVDIGLSPLIATDRGDLLGRGFLRLLAAYDTEIQTIAKRAQREGRKLSQVPEYREAMGRLRGFLKNEVNRLLNRLVALHAPAVLVVERLDLRSPELSRRMNRLLSNFGRRYLKEKLARLGELYGIKVVEVNPAYSSQACSRCGYVDPRNRRDTQTFVCQACGHRGNAQVNAARNLLRRSSPEESVITFTPKRETLRLLLRRYAERSRPGSRLRPGIPGGRSAALEQVWGKNPYLKGFPDLLRTLGG

SEQ ID NO: 1514 - protein, 395 aa, unidentified
  REGION 1..395: note = Table 20
MFNSNLREEDKLILLALNNVEGWLKYDKDEIEIYERKGKKRKVKVLEFHKRLAKKIFKHLLGRNRRPRFNNISMHLDGKVVELNKKEENGAKSFDYWLKVSTLEKGNPVYIPLKANTYAEQLEGKFLNYCQVVEDDNGNIEFRIIKQLKKKEYIPATNEIAIDLGLRPLFATDKGDLFGRNFFDTLKVFDEKITKRMVSLQKRGIKPRSDKKYRKYVDNLRELLKNEINRLINVIIKIYKPRRIVVERLDFRSPELSKKMNRIIQNFGKRYIKEKLQRLQELYGIEVVEINPAYTSQECSCCGYVDKKNRKDTQEFECKACGNKMNAQVNGARNISKRSSLGNLTKKQVLKILIERYLERLKGCKSPPLDVIRDNPYFKDYLDNVLNPRQSLTPS

SEQ ID NO: 1515 - protein, 507 aa, unidentified
  REGION 1..507: note = Table 20
MKKKEPSEQTSKTIFRMLPAYIPYEINEGKKKMLLATIDKAVELYGVHVKCHLRHLYETGEVEFLPNALNYPNNGMLQMWVQDIAFQTRNPVRLWRIDIDGEVLRILKSRFSGNEYRLLARLVKFKHNFGPIRPIEFRREDIGATDESVEEAYRLVLDVTRHVRKHRRPPGSIGKYGWLNLSKNYCATLELKSGLSTDAVLIVSTLKKRHRVSVPISIPEYTKNRGLVPTGAVQIHRTPDDKIEVKIAAEGKGKPIELVPDLKVGIDVGAAVPIATSDGDLLGRNFWQHIQKMDAKLAKCWKGVKTRGKTQYSHRYNKLQRQLSGYVKNEIRRMLKGYIHRVRPSVIVVEDLGDRVFANTKGFGSKRLKRLLQRVGRREFKLALNQYCEEYGIELVYVNPCYTSKGCECGYYGNDARPNQKTFHCPKCHRKGNADVHAAKRILSRCSVQGLSRSPQEPNWYSGGRKAAQEYQARLAAEHLHFCGEHWRKAGVQAPAEILGGVAEASL

SEQ ID NO: 1516 - protein, 476 aa, unidentified
  REGION 1..476: note = Table 20
MSQTFQKSRFFLLHPEVNAGKVERLESLHREYVAYVRICVQAMIDGRRLNLARSEKQAFFPCSETLTSQIEKNARDHAIQVVSTWAKSRYTLRVKGVISKAKRDGEVSPEQAKALYTIGKYLRDQPGRGITQDDIDLYWKFLDERGGRKPEISDTLPMRLTEMTARLEDPKEASIGDFWLRVSSLEARKSIWLPLVGSPYITKADQVSKGILVRKTKKGFWRFEVVEKREWVVPEPKDLPSHAPRLGVDVGLNILAATSDGDLYGASFKPRFDRLYKRVRDLRANRMRQGFRDNSPRLDALESKLSGMIKTETGRIANNLVQRHPGTVFVLEDLDLRGCRGQKRFAYRALYRALSSKAPVEVVNPAYTSQECPSCGYISRSNRSGTSFSCRSCGRKAHADWVGASGILRRSEDKSIGCGDHPSSVKATLQRRFLVKRNSPARSLLAPSPLGRSLTTEVLVQSGIGTGSNLVSASPP

SEQ ID NO: 1517 - protein, 230 aa, unidentified
  REGION 1..230: note = Table 20
MRYRKSIWLPLSGNPYVSRASDVSKGISARKTKTGKWRFEVIDKREWEIPEVPEDAGTLAVDVGLNVLATDSEGRLYGESFKPKFDKLYKRLQTVRANRQRQGLRENSPRLDRLESRLTGMIKTECGRVVNELIRKYPDTLFVVEDLDLRGSRGQKRFAYRALQTSLERKTAIEKVNPAYTSQECPSCGYVSRRNRSGVKFSCKSCGRRAHADWVGASGILRRSEDKDIT

SEQ ID NO: 1518 - protein, 547 aa, unidentified
  REGION 1..547: note = Table 20
MVKKTKLTGNELFRSVHITVPKKLVNKAKLDALYELDQLHTRAVNEWIGRWYNRTELIERILRGTATTLMQKEALARPLETPLPSAYIQIAGNRMLDILREHYLAVQDKIASDVWKDGNLSLEYRLVCAVFVRNATLFHRFVNGLAEAEDVVAKWRASKSEQLRKVAEAYDSLSPQARAGIAEFIASKFREIRENWRMPVFKGGVIQLDCRVFTLEEARGTKEFNLWAWVTTAVPHRRIAVPLCLTADKRRLLDSLFPGWLKSTARKAQLVIRGRHIRLSVPVAKPRVEPKGEPEAVLGCDIGMNTLLNLSNGLKLGKSFKEIAGKLYDEYLRLQETRNKIRNLRQRAEKRLSITKNPETRRRLERKIAEYDRHLSDHRWVELRRRIKAAVSTEIGRVVNQFLTLLGPNPERVLVVMEDLSEMTAEGVRRSSRARFDLRVWARGELQDHLKRDLEWLGGRVAFVPPEYTSQTCPICGWVDKENRQGREFRCQRCGFAADADVVGAINIGERFSDAELSALAGKYWYSKNLRRKKIKELLLVRAANTA

SEQ ID NO: 1519 - protein, 533 aa, unidentified
  REGION 1..533: note = Table 20
MSKEIKSVFLYGYPAKDKLEELQKLQNIYTKQINIFIEDLAYNKEYYIDILNNKKKYSNIRSYEKLYRNKIIGSAYSQNCIDRAVTELHSHFIKIRNAMYGESINDKTNLMFVSSLALFSQCLLNKTIEDCVALIEKLELVELSNKKIDTYKVEFYKSILNTLKTTDRIILSESMLDVKQCFFDELNSRKIPYVINNTVQLDARLFNIVKSNNNISEPYVIQVKGLKIGHRISVPINTSSNSLRRMNQYKTYSPNIKVINNKIMVLLPFKKKVELSKITEYKGVDVGITTLLSVSDGRLIGSFSEMQTKYDSELLPKLKYRSNLRNLMRKYRKLIKSKDITEDKKGILRLKICHINTMLQKRGTLDGLRRGYNSKTKELVNKAVNEYVKNTSINTLTIVEDINLIINDDIAYKNRKFSNWCRGLLLRKLEETLSWSGKQLAKVDPAYTSQLCPRCSLISKNNRHGKRFKCIGCGHENDADVNAAENIKNRYFNEDIRSICETYEYNRNLRHKAIKEYYKIINNNFNISIVINC

SEQ ID NO: 1520 - protein, 546 aa, unidentified
  REGION 1..546: note = Table 20
MSAKTKSVFLYGKPTNIKLTEILTMQKLYTQLVNTYIDLLINNKNLYLTIFLNNKKDSEIRQFEKNQRNKCGLNYLGSALGQNAFDHALKELHNHFIRIKNYMYGLYVNKGDISNFISSTTLLNASLLKLNPYAELNRLIDVNQKIIDEKNGKCTKEYENKILFYKELLAMLYKHTSEEIQFMMSTVRTTFFEELAARKMPEIKDAPIQLDSRLCKIEKADHIKADYVIRVKTLKKGKWIDIPLKTSNDSARRLNQYKNGSPTIKVLKSGLIRVSVPVEKKTKEYKYDKIIGIDVGETELIHTSENKIYGSFKQMIEIYDLTVLPKLSNRSKLKALMRKYRKEIKKANDENKKQKLREKIGNINKMLQGRKSLNRVLRSYNHAVNKEISSAIKGFINDVKGKEILVSMEDLNILEFDRGRKSNRRDTNWARGQLLKKMQEKLEWHGVKFVGVEPAYTSQECPICHNANKKNRNGKQFKCICCGYEDDADHVGAINIAKRAEDKEIAEIVEKYKYNKKYRHNKLKMLLNERHNKYMDSVAITQIIAI

SEQ ID NO: 1521 - protein, 530 aa, unidentified
  REGION 1..530: note = Table 20
MASETKSIFLYGNPTKVKLKMLSEIQIVYTNKINEFIDLMISDSNYYLDLFNNNKKSPLIRELEKMNRGDLGSALGQNAIDHAVKELHNHLIRIKNDLYGYTIDSDSNVFVSYTSLLNASIQELTYEDVIHLLKSLNPKSKKEQRDYQELITQLETFGKEKVEFLMKDVQTLFNLELRHRKIPLVKKAPVQLDSRLFTLESPEKVKADFVIKIKKLESQKEKGEDIRIPIPIKTSSNSLRRIKQYKKSNTSTFTITEKGKLKIAIPFEKKIVQRSKPTQLRGVDIGITDLMVDSEKNYYGSFVEVNHFYNTKVLPEQGKLNQLRSLMKTYQKELKNKKTPHHRKIALRKKIFNLNSMIMKNKSLSRALRSYYHKQEEVLSKAVNDYFETIKGTEITTVIESLDIQEFNRSKAENRRDSMWARAKLTNKLISKLNWHGFEVIEVDPTYTSQMCSVCGCVHEENRHYKEFKCQHCGMELDADYNASINIEKRALDKELQTIVEKYKYNQTLRHREIKKHLMNQHQMFKAKAL

SEQ ID NO: 1522 - protein, 543 aa, unidentified
  REGION 1..543: note = Table 20
MARPRAKKKKVSYGTHTRSVFLYGSPNAEKRSALEKLQADYTDAVNFYISLLSDREDCLLQLLQNSKKDPLLRRLEKESRVKALSSAYSQNAFDEAVTKLHNRLDNIRKDVIAATGGSVFAVSILLFHAVLTGQSREEMCDLLARIRDSYKAKEKIQYYDKLRDTVKTMEEKEFHDSVSEVTMFYHIISDEYRIPVVEKAHVMMDTRLCCLEKAKDVTTSHVLSVTIPDRKGERMEVPVQADRDALRRMEQYGISGSMRYTITAGGSLKLTCSFEKKTQTPEEHSAVIGVDVGITDAFHTSEGQAIESFQPVIEFYQTEVEPAFGNLSALRNRKQQLRRFLKKHKGVLPEKVILNLRKRMDHLEKDIRQAHAPYRKKRHYYQLVEHTIRNAVDTYIESLQGDKTVLTAMELLDIKEFNKSRRVNGMLSVFSRGKLAEKLMEELSWHGFPFVQVEPAYTSQICPVCGCLDKASRNGKVFHCTCCGHTDDADHVGSINIKARAEDKELIGICEKYPYSKKERHAAIQALQAERNREWKKEQAATA

SEQ ID NO: 1523 - protein, 551 aa, unidentified
  REGION 1..551: note = Table 20
MPKARKRKDTQFDNKISKCVFLYGEPTNDKAEKIKRMQTEFTKLINRYIKQIYNNSNLTLQIVKDDKRNSQITAFEKNIRPDKINAAYSQNAFKIAITHLSNRLDNIRLDMCRECKSIFTTSKVLFAMSIDGRSKAEMITVMQNISKSVKSKKDTSFYDECAEELKSIEDSEFEFMQQEFRVIYDMVSCEYKIPYITRSQIPLDSRIMTIEPSENIEAPYVITISNMLDVGGDKIVVPLNTTKHFIHKINTRKMAGMVSISMDIQKCLKVDWSYKNCISQPKTSKIIGVDTGISDAFHTSEDKAIGSMGPVIDFYKNDVEKSFASLSDMRNKKRKISHYLRRHENLPKDVRRSLIQKMDRLDQMVQKAEAPHRKNRRYYGMLEHEVKSSIDSYIKSIDHETLTVLEKLDIKEFNNSRKANGKRSMFARGQLQKKLMETLNWKGYDFKEIEPDYTSQCCPVCSYTDKTNRNNKSFKCQCCGYEADADYVGALNIKARAEDKEILDVCEKYKYNHDEMQKHIKMVFHARNEKYKAAAGKAMQKNEGSDSRDAA

SEQ ID NO: 1524 - protein, 526 aa, unidentified
  REGION 1..526: note = Table 20
MPRSRRRKDSSFEASVTKSVFLYGRPNKDKLALLRQMQTVFTALVNEDIQILSTREDLMMQLVKNDKKDSTMRTLEKTIRRKGLSSAFSQNAFDVAVTHLSNRLDEIRLDLLAEGMDPFARSKVLFAMSIMRRSRLEMISAMEDLKEDFYLDCAKKLRDMTEEEFMITQKIFQDLYAMKCMEYRIPQLRSVSVPLDSRLMKIEPSDHVKTPYVICMTDPFRKNHRIQIPIDTSAHSLHKIQSRKMAGTVTMQIRKGKLRIGWAYSKHMKQPKTDDMIGVDIGITDALYTSDDRQIGSMREILDFYHDTVEPAFAELSDLRNKIRNISSYLRTHDLPDDVRRSLIEKMDRLSDMMQTMDAPYRKKRHYYDMLNTAIASAVKEYMGTLSPEILTVLEKLDIKEFTKSKTSNARFSMFARGKLQHRLMEELNWRGFDFLEVVPDYTSQVCPVCHNLDSNNRNGKDFTCTCCRHHDDADHVGSLNIKARAFDKEIKDICEKHKYNHKNLQTALRALYAKRHQEYINTESA

SEQ ID NO: 1525 - protein, 527 aa, unidentified
  REGION 1..527: note = Table 20
MTKAIFLFGSPNTGKRALLKKIQLYYTDLVNRDIGILSDQPGLTMELVKNDKKASVVRALEKSIRPAGVNSAFCQNAFDCAFTKLANRLDTIRIDMHAENQTPFTQSKVLYAMSILGRSREEMAAAMDGLAAGVKKKESRAFYQKQAADLRSMTTDEFLFMQKEFSDSYLTHCLSFAVPHVNREQVSLDSRLMRLEVSTDTTYPYIINITNPFAKGDRIAVPIRCGRDGLRRMKQYKVSQTVYYTVWGKDRVRVQASFEKKLQAPNPQKYIGVDTGMNDCFYCSDGRSIGTMEQVIAYYRGVVEPSFAGLSDLRNKKAKILHFLRKHPNLPQEIRLKLLRKIDRLEKMIRTANLPYRKKRRYYAWLSEEVSADVRQYIEKTDRDTLTVLERLDIREFRKSRRLNGELSVFARGLLQKKLMSELNWHGMAFLEVEPDYSSQTCPVCGHIDAKSRNGKQFCCPLCGHTDDADHNASVVLKNRAIDHECLDACEKYKYDHKGRQAAIRAIGKKRSNAWKKAKIKMIKATA

SEQ ID NO: 1526 - protein, 574 aa, unidentified
  REGION 1..574: note = Table 20
MSKNKEESILSNFMFGSPNIGKYNKIKETYDLYLKSINKFIPIFKDNPNCYLAIFNLDTKANIITELEKQHRDINLGSAYSQKASHVALDKIHGMFSLIKRKLYGFAQQKYKEILPLVESITTLNACLTNDCPIEALELAIFREYEKILTKKEKDYKKYIEENKKEPEFKTLKKSETLVFYQETLKKLKSIDKEKLKFLIEEVRFQFFDRLDNYKTPYVTFSPIPLDSRTCNVQKANKNSEFDYFLSMTVAKNEDEKNKRINIPFSTSGRCRKRLKIYKNCQPSIWIDKNNRVKISISTKIPKIKSEYKGKTIIVGADLGINKIFSLGDGMKFGTFKDLLPFYKSECEIKLAGRSSLRNKMKEYQKELRKLKKKKDSNEKRKAYLRYQISEIARKLQGRKRLQKSLNKYNNKAVEAISKAIDEFILYLKSLKSKVLVVLENLDINNFNGGKLANQMSSMWSRAQIIEKLTTALKREGFNVAFVDPAFTSQVCPICYNVNDKNRDGEQFKCTCCGHQDDADNNAGVNITARYKDTEISKIVEKYDWNNYLKHEEIKKLYKKRNENYLKKLNKKYP

SEQ ID NO: 1527 - protein, 530 aa, unidentified
  REGION 1..530: note = Table 20
MATKTKSVFLYGNPTKVKGECFRETQKAFTALVNFFINEMVQDETYTLDLLNNNKKSSRIKGFEKAKRHTHPLGSAYGQNAIDYAVKELHNHLIRIKNKLYGYVVHKEERLKPYLQSIGLFHACIRDEDEMETLQKLIQNEQDKKNLQEETLQFYQDLYKTLLSFSAEERRQHREDVRMLYREKLENWKLPFVKKATVQLDTRVCSLEKSEDTCSDYVLRVKLLGSSKWIKMPVTGSRRGLRRLDQYKMCSPSFFLRNGKLKVTVPFKKKTRTYKTKNVIGLDAGITDLLYSSEGEQYGSFKGMDHFYNEKVQPKLHMRSNLRNKMRSYQKELHRDGVTEERKAVLREKIHHMASMLHGQKKVSKCRRVYAHEVNRRLNEAVNGVMGTIQNRKVLVAMESLDLTEFDRGKTSNRRDSSWIRGKLIGKLQEKLDWKGIAFKEVDPAYTSKACPVCHHIDDCNRNGKTFECTVCFHTSDADYNASVNIALRALDEELETISKDYAYQKKKRHDRIKALYRKRHKAYIQKLSA

SEQ ID NO: 1528 - protein, 540 aa, unidentified
  REGION 1..540: note = Table 20
MQSKKKKTKSKKTVTKNVFLYGHPTKVKQDLLQTTQKAYVHQINHFINVLMADLPKYLLILLINDKKNAKIGQLEKEHRTSLGSAYGQNAVRHAITELHNHLIRQKNKLYGWMQSHEPDLLPYACFISLLHASVLDEDELTILKTLIQREQGKGKPDAEKLAAYTDFFNELSTVTSEQRAENRAIVHALYLERLENTRLPFVKKAPLQLDARLATLEEAKNIRSSYVLSVKLTGSKHRVLFPVNTSRNGRRRLAQYKTGGMTVSWEQGKIRVGVPIKKNITKQKWTEKVGADAGINDLFHSSIGHAYGSFSGRVKQFEELLETRTGHRSSLRNVMKRYQKELKKTDDLWQQSFLRTKIAHIAKTLNGRKSLQKVQRRYRHQRDLAMHEAVNQLFEEVRQDHLVLVLEDLELTNFDRGKKANKRNSSWIRGQLFQKITERLNWYGMPYVTVDPAYTSQMCHACGHLDKTSRSGKSFVCTVCGHSDDADHNAALNIKDRADDAEIKEIAEKYPYNTKKRHQAIKEHIEERYRSQHPQVAPAV

SEQ ID NO: 1529 - protein, 527 aa, unidentified
  REGION 1..527: note = Table 20
MGKNDRKKSVFLFGKPTKNKLERLIETEQAYTNLMNRFIKEMANDSKYYLDLMNNNKQAPKIRALEKSVRHTHQLGSAYGQNAIDQAISLLHNHFMQIKNNLYGYIFHHDKGIIPYVSFISLLNASVQDENELAVLRALQQSTKNKQAAKTYENAYMILSRLTEEQRTSKREYIRALFYDKLDHWKLPFVHKATLQLDSRVSKIEKSHSTTEDFVVSLKLLNEKKYVEIPVSTSENSLRRLNQYKNGSMTAKVVNGKVKIGIPFTKKVNKRAQEELLGIDQGITDLFYTSNHTKYGSFSGMVHVYEGSLEKKLGNRSSLRNKLRAYQKQLKKTDNQFEKELLRKKIKHIADNLNGKKSLQKERRRYHAVVDYEISQAVKRLFEEITTNSYLPVFEDLDIVKFDRGKKANKRDSFWIRGKLMRKITAKLDWHGYHYKTVDPAYTSKMCGKCHHVDEDNRKGKTFTCTVCKYKADADYNASVVIKNRALDTEITAIVEKYKNNTKKRHKELRELLYKRHCSYMKKVQFV

SEQ ID NO: 1530 - protein, 190 aa, unidentified
  REGION 1..190: note = Table 20
MLFEKKAEPIKEKGEVVGVELGFRKLAVLSDGQIVGKELKAEIKRFYGRKKGHLIIKEFINRESKKIDFSNIKTLVVEKLRNVKKNKRGLFTHHTNRLLSHRAYRHARFRLEMLCEENRVQIVEINPKGTSKACNRCGRRGIRRDERFVCRTCGRKVDADYNAACNIRDLRNPQGAYGPLLEAALNIPYG

SEQ ID NO: 1531 - protein, 366 aa, unidentified
  REGION 1..366: note = Table 20
TIRRCSRIYLSYANKSKVEMVRKSLGQYVQIVNYFITFFWSSSDREKYFKTKYISKKIYQRGVDRFNITAVLSLIAADQALKIIKSQRKKSKNQQKMPRFRKRAMTLSCQLFSIINYKEGSFDFLIKFRGGLPRVVIPFNRTKHMNNLEERGFRLKESVIKLGFDNKKRLYIDLIYEKEKLSIKEEGETIGIDTGFRHLVATSRGELYGKEVAEKLKHVDKRKKRLHAWVDNEIGRIINRLDFSNIKVVVVENLKRVKHKTRGKFSRFSNRLLSFWHYAKVLQRLRHRCEEEGVLLLFKSPWKTSQRCPLCGNIDKRNRRADRFVCSNCGFEEDADIVGAMNLEALGLAGVYCLRSLPSSTIEATK

SEQ ID NO: 1532 - protein, 369 aa, unidentified
  REGION 1..369: note = Table 20
MNLTDNNKMKRTSRIYLKEVNINKVNKLKEFLVTYNRAVNYTIERLWSAQDFSSGFLSKEVTDGISLKFNITARLSQCIGKQSKEIISSQLEKKDKRMPRIHKTIANLDGRFTRIYDFDGSFDKCVKFGSGVPSVVILFNLNKQINELLKDGWQIGKSIRLGWNKENGLFIDLILEKERPEKRAEGKIIGIDRGVNSMLFTSDGQDIGSEMKAEMLSVDKHRKSYHQYITTEENRYIKKLNLEGVKAIVIEDLKNVTMNKRGRFSRRVNRLLSFWHYARVGIRLEQMCEELGISVYRKDPWKTSQRCPECGNIDRRNRKGIKFLCLRCGHADNADHAGAKNLEFLGLAGEYSLRSLPGKLNGGSVNECL

SEQ ID NO: 1533 - protein, 370 aa, unidentified
  REGION 1..370: note = Table 20
MKKAHRKSKSPIMRRTSRVFINDLNAGKTAELREFLHLCHDVTQYFIDLFWQRQDFSAELADLPTVQRGRDRFNITTRLAQALAKQAKETIRSQREKDHQRKPQLHHWTVTLYYHFVTIQPFAGRHFDVAVQLTGSGAPCMTIPVHATRHLNRKLAAGWQLSKTVRLGMHKGRLFVDFILEKPRPQKKTEGRVVGMDSNYVNGLIFSDGQHIGQELVKDIRQFPRRKKHTHTQIKSRIGQALKQMDWSSIRVLVIEDLKHVKRGKRGTFPRTHNRRLSHWLYAYIVDVLARYCEEHGVRLERKHPAYTSQYCHICNRWDRRNRSGDRFKCVHCGYTAHADHNAAYNLELLGLAGVYGLRSLQSSRLQSFE

SEQ ID NO: 1534 - protein, 348 aa, unidentified
  REGION 1..348: note = Table 20
MIRSVKIASPLNQGKLKQVHQFLETYQNCVNYFIARLWSEQRFNGKYLEASYIQAAGQRFNLTARLIQCAGKQALAIVKSQRKKSKRQRRMPRFRRFVANLDNRFWKITDRCNSFEWIRLQSGFTFYLPFKKTRVWNYWADKGFSLSRSIRLIFERDKLFIEFFFEKETPELKTIGNIEGLDLGYVNLAVCSDGQVVGEWIRDYIKGFDKREKHTHQQITQQVFHELKKLDLSKAKTLVIENLKKVKHKTRGMFPREHNRRLSHWLYAKVIKWLEQRCEEEGIQLLKVSPWKTSQFCRFCGNWDRRSRRGEEFACVYCGHRDSAEHNAAENLKLLGLAGVYSLRSLKT

SEQ ID NO: 1535 - protein, 416 aa, unidentified
  REGION 1..416: note = Table 20
MVREDVKEKLRRLSGHWKMIRKSTININNANTGKLNILDDILHEYNRVVNMFISHLWDNGILKGSFVQQTSFVQTWLSARMKQAAAKQALAIVKSQHKKKKKTGPVFCQLVMELDSRFIDICQDVNSFDIWVRLSSVGNKIKILLPGRKHKHLNKYLPEWEMKKSVRIRKNDKGFFIDVFFEKAEPTKKITGGFLAVDIGYKKLLVDNNGIKYGADFPALAKKISGKKQGSKNFLRALKERDIFISRVCNALPLKDIATLVVEDLKNVKYKSKGRLSKKFNNKLQRWTYPKILEKLERLCAEAGVRFLRINPAYTSQICHKCGTKDKKARNGEVYRCKNPLCANYLKKIDADYNAAENILHKGLTLAGVPKIYKTRTVLYKNSKHSKRAGVPKKPTAHFQLPLFSCELQSAGFHKL

SEQ ID NO: 1536 - protein, 344 aa, unidentified
  REGION 1..344: note = Table 20
MIRRSTISLNFSNKNKLEKLNTIFEEYQRVVNYFIDYIWSKNVFHGSFLSSTNHCSTWFSARMIQCAAKQALSICKSQRRKRKKTKPSFNKFSMELDQRFYDIEFDKNSFDIWLKFSSIGDKMILWCPSKKHNHFNKFYEDESWNLKKSCRLRKTDKGIFCDIFFQKEDPKKRIKGRRIGLDVGYKKLVVSSDGLSFGKEIEEKCNKIANKQRNSNNYRKAIVEKNEYINKSVKDFFEKYDNLKEIKIERLKNLKHKSKFSRTFNNKFQYWSYSNFISRLKLTSEELGVQVTEVDPAYTSQTCSSCSHVDKSSRNREMFNCTYCNIILDADHNAALNIFFKFRL

SEQ ID NO: 1537 - protein, 374 aa, unidentified
  REGION 1..374: note = Table 20
MIRRATINLNDANTNKIANLKLVIEEYSCLVNSYIGILWEKKMFKGTYITPDIQREVPTWLSARLQQCAGKQAFQIVKSQRKNKIKTKPLFEKRTVELDERFCKIDFDPKTRIFDIWLNLTSLGSKLKIILPSHKHYHFNLFKDWIVKKAIRIRQEGEVLFADIFFTKEVPLKTEGRDIGIDCGYKKIAVTSSGQFLGTELPAYISKITKKFRASKGFQRALKTKNEYINKEVKKLKLDNVKNVVVEDLKDVKKYTKKNKTMSSKFMNKLQYWNYKYFLGKLENICEVVGVQLHKINPAYTSQRCVVCGNTHRSNRNGEMFECTSCGYTSDADQNASLNILNRFTAGEYGPCAQKLKFVGGCGYIQGVYICPYK

SEQ ID NO: 1538 - protein, 353 aa, unidentified
  REGION 1..353: note = Table 20
MIRSSVIHIDNANTGKRQKLLAIMQESRRVINVFIDELWKQRKFNDKFSTLKTDTWLSSRMQQCLGKQALSIVKSQRKRKKKTKPVYDGNVLELDQRFVQFRFDENSFDVWIHLSSIGNGIILNLPGKKHRHFNLFFEDSAWTMKNSCRLSYVSGKWSITVFFEKDFEQQPGSKVVGLDCGYKKLAVVSDGQVIGKELEDKIAKISRKKQGSKSFYRALKERDDYVALEIKHIDLSNVKTVVVEDLKNVKKKTRGRISKKFMNKLQRWAYSQFLQRLRNWLEVVGVQCLSVDPAYTSQTCSKCGCVDRKSRNRERFCCTACGFESDADLNASQNILMRFLEQENMVPALEPTS

SEQ ID NO: 1539 - protein, 234 aa, unidentified
  REGION 1..234: note = Table 20
MFIRLTSIGNKISLKLPANRHRHFNRFNSNNWNLKKSVRLRKIDGKYFIDCYFSKEKSELRIEGKLKAIDVGYKKLIVSSDKEFIGDCKIYEKIARKKQGSKAFKRALIERDEIINTSCKQLNLYDVKCLIVEDLKNVKHNTKGKTSKKFANKVQRWLYPKVLNKLSMICDESGIEMIKINPAFTSQTCSSCGFVDKNSRKGGDFKCTKCNYSEDADYNASLNILYIGEYGLYA

SEQ ID NO: 1540 - protein, 401 aa, unidentified
  REGION 1..401: note = Table 20
MIRSSKHILKYQTKKKNNILFETIKLIKSQIQCYIDLICDNKLPLKKQLSSKDLSSDFITHSRWKQLCYKTASEIIRSQIKQASNRRYKSYKKLYKKCFDKDNKSKHLRFTNKRFSELNLKSILLSKYFRIPELKNFSINIDSRFFNIKNTNNHFDCFIHLITPIFNGRRGLTINIPFKHHRQSLKYKNWKLLNSTRLIYKNDKFFIELIYEKNTPNLKNTGKTIGLDNGYKKIAVTSEKQFLGDKLPDIIKVIINKKRGSNAYKRKLINRTEYINKELKKLNLFDIKELVIEDLKYVKFKSSLSKYMNNKLAYWIYSYIIRKLEILCEENGVLLTKVDPAYTSQKCSNCGVVDKSNRKGEIYQCNCGLLIDADYNAAINLSRMGIYGIHSHENLNFIDFH

SEQ ID NO: 1541 - protein, 362 aa, unidentified
  REGION 1..362: note = Table 20
MIRSSSHTLKYANRDKIDLYWKIIKDYKELLQLYLHKIHDGELPLKQNLSSKFCPQLNDISNSRWRALCYREASQIYRSQVTLLKKKRIKKITESVIKSHSINLNYMLWDIEEDKTKEFDCFIKIFSPYFQETKHRAILLKLPINHHRVSLRFKNNGWKLKNSFMLSDNFSLKLFWEKEEAEKKKNKLSAGVDCGYKKLLACSDGKVYGKELEDIYEKISRKKQRSKAFKRALRERDEAINLAVKKFYNEHKDCGQVIIENLKCIKYKSKFSKKFNNKLQRWSYIKVMNKFESLSETEGFQLIKVSPAYTSQRCHVCNTVDKSSRQGEVYHCKTCGGTFDADINAAINILRLGVYGPHDKIS

SEQ ID NO: 1542 - protein, 390 aa, unidentified
  REGION 1..390: note = Table 20
MIRVSKHSLKFSNKEKIQKLDNFFELYKLTLIDYINQIKVGKLPLKIMLSTKLCPDSIIKHSRYKQLAYKQASEIIRSNLIQIQKRTYNKYKKLYYKCIKNNIHKSFTDKHFKDLNINYLKRININLKNLSITLNENLFNVQEGNSFDEFIKVFLPWFKEGKKRAETINLPLKQHKHSLNFKNNNWLRKSSIQLEVKNNKYYLNIFWEKELVKTNNQLKIGIDQGYNKLISDSNGVHWGKELKEIYIKLTKKKRGSKNYKQLLTYKRNKINEVVNRFIETYKDTDIVCEDLKRVKHASKLYKSTNNKLQYWSYKQVLDKLNSLSELKGFKLIKVEPAYTSQTCSNCGQVIKANRQGELYSCSCGLLIDADTNAAINILNRGVYCPSTQQT

SEQ ID NO: 1543 - protein, 361 aa, unidentified
  REGION 1..361: note = Table 20
MKRSSRYTLKFATQKKKELLNQTFEVYGYYLQKTIDLMWTKQISLKKKMSSKQITWMDNLGGQYKDIIYQKASQIVRSCRFKKGRKNKPIVKHFCIDFTQNQIKVEPASNSYDKWLRLKLPFVKDDKKKERIEILIPLKEHRHSLKFKDWKQAKTIKLSPTYAIFTYEKETPKPKDEGEIIGLDSGYKNLLTTSKGQFIGKGFDKIYKKIARKRQGSKAFKRALIERNQKVNQTINRELDLANIKEIRVENLKNLKKNIKGKFRKEFNNKFQRWNYGQVLIKLERKTEEEAVQFTRIPPAYTSQTCPQCHFKHKKNRVLERFKCLKCGYSEHADIVGAINIASQEFYVPDTTNIYLSELNR

SEQ ID NO: 1544 - protein, 375 aa, unidentified
  REGION 1..375: note = Table 20
MKILRSVKLHFTSATKKKHQKIHSIMDEYKHVVNSYIDIFWVERCREADLKKELLDRVQHPYFTQRLKQQAAREALSMVNAAIEQAKAASKEAEREIVPVKPTHYGNRMALSTAICSLTEAKQSKTFDRWLSLRSIGDKIKIDIPIKLHRQFHKWNERGRLMGSFVIFRNYVQVTFEIQTGEKKPITNCVGIDTGINALASLSTGEQIGLELKTLINIVRRRKKGSKGKTRAIKTLKDYIALNAKRIVMSDISLIVVERLKGITHGTKLKGRLSKNMSSVIGSWNVRYWLTRLEMLCEENRVSFRRVWPENTSITCRQCGYVDKKNRNGEIFLCQSCGHHDNADLNASRNILNRFFTGPYGAGYEAGPILLNTIG

SEQ ID NO: 1545 - protein, 364 aa, unidentified
  REGION 1..364: note = Table 20
MTILRSSKLSFKEATEAKLAILQKIAEDYRRAVNWFIDWYWQHGLRRFPETEVVNACPVDWFTHRMKKVAAQQALGIVRVACKRGRKTKPEYKQLKIQAQCTIARLRQPKEAESFDYWLELRCIGNKLRLDLPLKANKHFNRFVAEGWKQHSGLLIDVKRRTVTVVFEKDEKPADDTSHPVAVDIGASSCLFACADFAHAGCLGLQIGDLLQKVARKQHGSKRQKKARRRLRHYIDEQVKNLLKAFQPSCVVAERLHNVLQRTKQDRKLNKAVRCLLGGWCYRYALERLRMTCEVNRVGFHVVPPQYTSQRCPACGHIEESNRRGRMFRCRQCGYIDHADLVAARNILWRFTEEITVPQAAEAG

SEQ ID NO: 1546 - protein, 211 aa, unidentified
  REGION 1..211: note = Table 20
MQSEIHDRDQAARVEARPCRIWPRRQFLHRHLLERAYREAVSPGQRLNSYIITDRYVQFSFKIETGRKKASGEQVGVDTGVNVLAALFTGLKLGIDIKALIETINRCQYASKRQKKLRRALKQRIDLERLRMACEWNRVSYRTVPPYKTSQQWSECGHTEQGNRLSWERFRCRRCGYADDADVNAARNILSRFLTGAYGPGSQTNSVACPT

SEQ ID NO: 1547 - protein, 222 aa, unidentified
  REGION 1..222: note = Table 20
MKFSGKKTKLLLLRNMFNSALKLIQALKKSKRRVIRIDSGINALVSAFTGDQFGLDIKGFIERIKRCEHGSNGQKTVRKALKRRIDETVKELLNHFKDIDVIVVEKLRNLNYKSKLRQRLSKNISHFVGTWGYWFWLRRLKHACEINRISFRTALPFYTGQKCPVCDHANRKNRSGAVFRCQSCGHTDNADVIDGQNILERFFLWILTVFVTDFIWFIVKGV

SEQ ID NO: 1548 - protein, 371 aa, unidentified
  REGION 1..371: note = Table 20
MKLIRSSKCSLKFATDSKRSELKRVLTEYGRVCNIFIEHFWKNGTPSKSELLKETVDLPEGTWLSARLRKVAAREAIDMITAVKERWKNKPWKISMPVHKGRRALVSCTIAELQDKKDSSEFDAWLHLSSIGEKVILDLPVKYHKHINKLFAQGKRLNSYILTEKYVQLSFEIDTGPKKSGKNAIGIDTGIKALASLNNGSQFGLAIESCVERIKRCDHGSQGQKQARRAMRQRIDEVVKEIVKHFEKIDLVVVEKLKNMNYKSKLKRRLSKNMRRSIGTWAYRYWLKRLEQACETNRVSFRTVAPFYTSQTCPCCGHADRGNRVLQEFRCLKCGHAGNADIVAARNILTRFLTGVYGARYKPYETMFSFS

SEQ ID NO: 1549 - protein, 382 aa, unidentified
  REGION 1..382: note = Table 20
MKIHRSSKCYFNKWLTTKKKQELKEILVEHSRIVNYFIRKYENDIPQKKKNELLLANYIQECISDTKTFFTARMVKNCFSEGYGMIQSSKSLSTSMGKKYVSPKHYGKRMILSETIATHDIARQTKLFDFNLTLGCVRTDRKKHKISIPLKRHIQFNKWSILGKLSKSVVITDKYVIFFFKVETGKKKTEGELVGFDFGLKRLGTLSNGDVIGKNINKLLLELNIKKRCSKAYYRKKEEIREYINKEIKDINFNDKQLIVVEKLKNMKYKMKERGRLSKSIRSVFYNLSYRQVLQRIQMLCEENRVSFRSISPFWTSCECLSCGHIEKKNRLSQESFVCLKCGHSDNADSNASKVILKRFITGKYGFCYQQDNLKEYYISAN

SEQ ID NO: 1550 - protein, 377 aa, unidentified
  REGION 1..377: note = Table 20
MKIKRSSKVTIKLAAGKKREILDGIHDEYARTANFFIDYFWDHPEIRSANQITSEIYSLPETWLTARMRQCAAREALSMVLGARNIENRRKSSIELEAEELLGEEIFTEPVKPVHNGKKMTLSSQVVRIEKGRNSFDLWMVVHSVGNGIKLYIPLKKHRQFNKWAEIGKMGSSVVINRQHVQISFEIETGEKKQEGKLVGIDAGINHLMTTSKREFLGNEVSPLISKIKRKHQGSKAYKRAKKELSYYIHKTVKDYFADNNLQLVVTEKLKNLKHNTRQKNRTKELRKTLSNWNYRELLNIIQMRCEENRVSFRSVSPFKTSQKCPNPDCAHTQRENRNNEEFKCLKCGYSEQADYVGSLNILYRFLTGPYGAGFKT

SEQ ID NO: 1551 - protein, 447 aa, unidentified
  REGION 1..447: note = Table 20
MIRSSKHSLGKTNTGKTECLHRFIERYRLLLRDIIDHLWEKGFRGDQNPEYEKKKKEWWYWFDLKKDKLRLPSMLPSWFLEKHFSEAYPEFTQRMLQCAGKQACSMIHAEIEEQKRRFWVLRSLQKKGTPSPSLQRKFNKTALTKPSTRRANPELDPRFVDFEEGEFFDSFVQLKLWKIEKGTKRKEASQNGYWIRVPLEETKVSNKWKLRLKRLGSIRLSRNCITLFYKGKTPKKSGKVILGADQGVNRTLTLSDGWETQKCPHGHDWRSILEKKNRCAHGSKGFRRACTHEENYVNWSLNQYKSWSKVQELFLEEVRDLRKGRRQRKGFLRHWRYPLVTEKCERLSEEEGFFLGRTPNMFRSQRCSVCGWVRKANRKRAVFLCTSCGNTLGADLNAAINNSMPDLFKIPVWVRSGKYNRKGFFWTPEGVFYPTGERIVPSTPKTG

SEQ ID NO: 1552 - protein, 428 aa, unidentified
  REGION 1..428: note = Table 20
MISKFKDTVLYKSEDKYIRSTKHNFNSYLNISKNDFIDKFIVEYRRVMAVCLKELYSKTYYWEFKGRNYRFNLRNRYFPFGLPSFFNTSKFHCLQNYTGFLSGRMLSNIVNQLCNILKGELKSSKSLHHRFELPSIKNINPEIYPKHITMELNENENSIFKLYVTLLNFTKKRNENITIPIKLHKMDDKHSKKGILMHSILLTSTYIGLRYEFEGSETKDKQLVVGADTGIRKICSFSDGQTTPKENNQHKTYNDIEEKIYRKKHNTKAYRKAVNEMKCFTREVLNKIKLDDISTLKLESNKGIKTNTKNANKYWQREVINTKIKYMCQDSGCDLISTLSQFKSVRCPNCNYVHKNNRIEEKFKCKCCSYEGDADVVSSINNSIELPYVDLWVYRKIARTSGFFWSIDGIVVNDNNTGHTAYPVLKLN

SEQ ID NO: 1553 - protein, 422 aa, unidentified
  REGION 1..422: note = Table 20
MPIVRASRLYFGFANKGKRTTLLEFLAEYRSVVQTTIDHVWNTRITFNDKVLDVKNNELCVPHFIPASHYPEINTSLSARAVKCATTQAMSMVKAALKRRAKDLSWLSRLEGAPVPKTLVKRLERPLVKPSADHVKAELNSICATLTWGDETSFDGWLVLSSLGKAFGKINIPLNKNRHFNRLSRGRQLASFLISADGVDVRFAIEPETHMEASRVVGGDTGLRTVLTLSDGQTTPECDRHGHSFQSICHGLARKKKGSKSFSKAQAHRKNFIHWSLNQLNLSSITEIRLEKVRNINYGRRASRYMQAWTNADIQRKVMALAEEQNVSVKLQSSIYRSQRCSVCGLVRKANRKGKIYSCKGCGFVCDADLNASRNHEQNLPSVPDAFYRTKRNLGAGFYWTSGGCSNSSGVELAVPPSNNQA

SEQ ID NO: 1554 - protein, 427 aa, unidentified
  REGION 1..427: note = Table 20
MSNIKSTSHSTKFANKGKLADLNIFLMEYRRCLQHFVDFLWNNGYRYTDSKGNIKVFNIKLNLLDCPSMLKSGIIQESGLHSFLSGRALKCCMGQAAGIVSAAVEKQRKRLYVLSKSKDSGSSKKQRKLLARKIRQNIPQKPNCSNAKAELCSICCDFRDSENFLRLKSITKTKLDIKIPIRPTRPSIKFSKIGKRLNSFLIGESCINIRWELPETILKEDGLVVGADQGLKDVLTLSNGTVTNKIDRHKHSLDLIIRKVCRKKRGSKAFARAKAHQTNFVNWSINQLNLSGIKELRLEKIWNIGFRSRTGKKLSHWQNTVIRNKIESKCRDEGVRFTLSSSTYRSQRCSVCGNVRKANRKGKIYECKNCGQKIDSDLNAAINHSVDLPEIPYVFRNLNLNRGLGFFWKSDGLYDLDGRSLQSPPHV

SEQ ID NO: 1555 - protein, 395 aa, unidentified
  REGION 1..395: note = Table 20
MKFSNTHKLNELNLFVSEYRRVLGLFVNHLWELGEYTKIPVLLPKEYTDKISTWLSSRAVQAVAKQASGVIRGVRTKQKRRLYQINRLNEAGKFKQARKLQKIYDEAKNSKPKINEVCPELDSRFVKISLSNPTSFDGWITLASIGDKLKILIPFKNTKHFNKMLLRGKLKSGLRLSRKSATFNFKLAPASLKTEGTTVGLDKGIKNVYSLSDKQESGDDIHGWNLDKIIKKMCRQKRGSKAFKRSQEHRKNHIHWCLNQINFSNVKTLNIEKILNMRRGKKTSKYLSRFTYPIIDSKLKDLTLQAGVQIKELSPVYTSQRCSECGWTCKANRKGKMFVCVACGNIRDSDYNASLNISLDLPEITKAKQLQHSNRKGFYWNAVGKEPIVSSVQTA

SEQ ID NO: 1556 - protein, 200 aa, unidentified
  REGION 1..200: note = Table 20
MIGIDVGIKNTISCSDGQQTGCDIHGHSLDSIQRKLAKKKKGSKAFLRVQNHRKNYINWSINQLNLKNVDIVKCEKIKNLRSKQRVSRYMSSWTYADIFDKLQRKCEEQNVSIVRVSPTYTSQRCFACGWVCKKNRKGKSFKCVKCEYAFDADLNAAKNISLNLREIGKKERLLQKNKNGFYWSVEGQEHIVPDTQKDRS

SEQ ID NO: 1557 - protein, 403 aa, unidentified
  REGION 1..403: note = Table 20
MIRSTTLTLKYANSGKREQVCGILDEYKRVAQFFVDLLWERYAVGEKIPALLPKSVTSKAETWLSARMLQACAKQAGGIVRGCRRKHEKRLFMLAKLEKEGMTRKARKLAAIIRKNPISKPVLDDVEAELDARFVDIELNSNTSFDGWLTLSSIGEKRKVAVPLRLHKHINELREQGKMLNGIRLGRKSISVSFELEPPVKAEGRTVGIDVGMNRAFSCSDGTDPGKWCNGHTVKSVCERVARRKRGSKGHERACRHRKNMIGYFKNRIDWSSIARIRIEKIRHLRTGRRRSRYLDSFVYRDFFGSLKSTAERRGVLVEEVAPAYTSQRCSCCGWTRKRNRKGRRFECGVCGYAADADFNASLNISLDLRPIGAGERLKRPNLAGFYWRERCNSGQEPVVPVV

SEQ ID NO: 1558 - protein, 349 aa, unidentified
  REGION 1..349: note = Table 20
MIVGEYRKAVRNCIKGLWEMETLPKSPDSSVYKLCGDFGNTAFRQACARQALQIVKGTRKKLDAKKYVVERLISEGKHEQARKLRKRIDETLISMPDVDKFGCQLNHRFIEIELNNINSFDGWLKIKFIGNGMGVLIPFKRHKQFNKLLAKGKLLNGARLHDNHIELSFELPDEENHGTKTVGIDIGQCSVLSVSDGQQITIDKHGHSYRSICEKLARKKKGSKSFQRTVKHRTNFIRWSLNQLNLDDIKEIKIEKLKNVYRGKRVSRVMSHWNYRELRALLISYFKERDVLISEVSPGYTSQCCSICGRVRKSNRKGRLFRCDHCGNTMDADLNASLNIALNRKPLNM

SEQ ID NO: 1559 - protein, 404 aa, unidentified
  REGION 1..404: note = Table 20
MIRTTEHSLKYITDYKKQKLDILFDEYQRVVNQYINVFWNQTSWKSKATADEYKLVDSWLMGKVMKCAYAQAIQMIRSTKDKQKKLVYKQYKRVYSKAKRKNKNWDIVNQTFTVWSKDKTFRDRTKIPFFSGDSIELNSDLCKIYQDVSISHFDMVVRLGSIWGNRLSLELPIRKHKHFNQLFASGFGVKTSLRLSRKNNKYSINLYMSKDFEQVKDEGNIIGIDVGIKKLMSVSDGTFIGTDIESIIRKYKRRKQNSKNSKKTLKQIKDYIGHSVNQLNFTDTQCIVMEELKPSNMLVKGKSSKEFRKILSKWNQNLLVERIQNKCELNRVELQFVLPHHTSQQCSQCGEIHKESRKGELYQCVGCGYTIDADYNASLNIVNKFLNKEFTVPSNTKTTIPRFS

SEQ ID NO: 1560 - protein, 315 aa, unidentified
  REGION 1..315: note = Table 20
MHRSRPQATERPALGLPERHGKFVGVEDKETCPGDPFDLVIRLSTLKRGKRIAILTNRTKPLNKWLCRPNARLVQGCSLSEDWLTLWVEEPNPFILYSPGPEAVVYSGDLGMRKLLTVQDNEERTAYLGREYHDLQDRIRRARPGSENRKKLLTERDHVIGRALNAVPWNLIDVFGVEDLNGITRGKHGLGKNKEFRRKRLPWAHRSVLERLLAKAIENRVLLIAVYARGTSRECPNKVQPCGCASALNRKGEVFRCIACGYTADADRVGAHNIRSRTLAILALRRDWQREHPLGRSRGRPTLRAKDALLCTSAA

SEQ ID NO: 1561 - protein, 409 aa, unidentified
  REGION 1..409: note = Table 20
MPKLPKQTLEQWAIDNSLPYATALSLFQSKNLPYQTSVDIDGNIFIYPTNLVRSIKLSLKFLTKTKRRKLRALLEAYTAAVNFYIKSLWKVKGRADKTTLARLQNTRLSERYKSQALRQALSIVSSTHRSAKELKVKAKCPKFSDGAKLDAKCVSIDEGDNSFDLWLRLSTLNKGSPINLPTKATKVLRKWLSRENASIIQGCELHLDYLIIWVELPYQPIKPEGSILAIDLGEVILAADSDKNFYGKELQAILDKIKRRKQGSKGQKQARIERDNYINRCLKRLPWKELRFLGKEKLNGIKKGRTGKKKYKSFRKARAPWNQGWVRTRINHLAQENRVLSVNYDPRNTSRKCPMCSEVHEGNRQGRLFRCLFCGYSEHSDYVGALNGVASTRLLLGSLESPKPTKDDI

SEQ ID NO: 1562 - protein, 361 aa, unidentified
  REGION 1..361: note = Table 20
MRRTATISLKFATKAKRQQIESLAIAYQHVVQKYIDIAWEESSVSLNKQSLALIQCPAISERYKSNALRQALQIVSYTKKSAIALKKLANKPNFNGTMILDAKFATIYLNRTNHFDGWIKLSTLTKGHPEWLPFKRTKPLNKWLNKGFVPLNALRLRKYNNSWYADLVLEKEIATIKTEGQSIGIDAGTKKALSLSTGQHIGDNYRYYINKINRKHRDSKNYQQALIERDNYLRQELNKIDYNSIKAIYVEDIKYIQRNTKKEHQLNKTTRKILSTWVQAKTFRWLSHKCEENCVLLSYVPARYTSQACSKCGHIEKSNRNGELFRCKKCSFTTDADFNASLNILSVGLGQLEFPVPKVNR

SEQ ID NO: 1563 - protein, 362 aa, unidentified
  REGION 1..362: note = Table 20
MKRTLKFSLNLGNTNKRESLKDLFKEYKRAVNHYLLILSSQNKYILSEKEIKDFNSLLSYRYKQCAKRQAIKIWKSWRRNKKKGKLPEFNGSLILDSRFIGVEKAKRTTFDYWARISILKKGRRILIPFKSYDYANKYFNDWELVNGGRIELENNDWFLLLTFEKKTAQKKEEGKIIGIDIGIKKLIVDSDGNQYGKDIERLMDKIQRKQQDSKAFKRALKERDYYVNKTVKELPFRETKVIVMEDIKNIKKNTKKEKRLNKQFRSKFQRWTYSKLTSRIKQLSEVDGVHCQLIAPAWTSQTCNRCGFVHTLNRNCEMFKCRQCGYTTDADYNASLNILNLGLAQQSIVAGSKKVNEVDYVY

SEQ ID NO: 1564 - protein, 343 aa, unidentified
  REGION 1..343: note = Table 20
NYFLGKLQKGEELTEEFLKRFSTPLSYRYRQCARRQALAVQHSWERRWKKRLDKIERLKRHNPGSKRIPEPPKPPRLRKPAMVLDERFITVEKGVNSFDYWARIATINKGRPILVPVRSYRHANGYIDDWKLLGGGRLVRKNGTWTLILTFEKKVEQRGDATPLGVDIGYRKLITTSDAEVIGGGIKSTIERAARKKKGSRAERAARQQIRCEIGHAVNRLPEKTCMVVEDLKNLKKGKKRVWNRKVNNKFNYWYYALVLKRIEERCEVAGVQCHRVSPANTSRECPLCGHLDELNREGESFRCLGCGFSHDADYVGSLNVLSRFTGEPIVPRSVKPELVFVE

SEQ ID NO: 1565 - protein, 367 aa, unidentified
  REGION 1..367: note = Table 20
MQSSIKRSLLFSLDFSNTGKLSFLENLWQEYQKACQYFVDVGYETKTLPSYKHVKSYPYQTWLSKRYLGCALQQAKAILKSLFSKLKKGKNPQKPLIKKPALKLDSRFYRIEKGRNSFDFWLFLRDPQNQRWIALPFKSYEYANNYFRDWKLCSDIELLKRDGKWYIKLIFEKEVKLESKKPKGIDIGYRKLIATSEGEVFGREVKEVIEKRIEPKKQGSRRWKRAKHYLKTEINRILKKVIDGSFSPVLEGLKNLKKGKSGVWSRVVNRRFNHWLYGYVLKRIKELCEVVGVQYHIVPSAYTSRACPECGYQDKLNRNGEYFKCLRCGYEEDADVVGARNVLMRFTRELIVPLPAKPRPVEYFSIG

SEQ ID NO: 1566 - protein, 394 aa, unidentified
  REGION 1..394: note = Table 20
MKLSYKLKVFANKGKIAVLESLANFWVRKVNEYIVLYWRMPDWEIKLAKPPAEFRGSGSKLENLASVKAWQMVRAVRKKKRGPKVKPVLKKIEFELDETLFAFGDFTTKEFDLWIKAYSGEKGKRIAIPVKKHRRLNYWLKRGARFQKTVKFKKINGEWYAVVFLSPPPKEPKGDVPVVGMDLDYTNGAVDSAGRVWFDERWVNLRQRTKWRLYPDGNNPLKQEFNRLAKRLVNEYGCHLAFERLELRGKRGRSRKFRRDYKNLPYGHLARRVKVLAGLEGFRTVRVNPAGTSQTCPVCGHRERRNRKGEEFRCVRCGFSAQADVVGAVNIAIRAGQKHGFRPVVVRAVAEGWRRRSIRPPVERFVVWTLLQSRPPADFRGCDPPCHAYPVSYG

SEQ ID NO: 1567 - protein, 328 aa, unidentified
  REGION 1..328: note = Table 20
GWVAVFWSDSGFIKGSYPPKEYCRGGRLIRDASVKAWQIVKGAKKNKQKERPYFKGKEIDLNQFSAYIIPELKTKEFDIWFSVISLNSRHRLKIPCKRTNLFNKMVKKGKLRKSFKLLKINNDYFMECFIELPEKKKQNNNKIGIDVGLNNAIATSDGKIFGKELKDLRIRTKWRSYKGKLSSQKQLLNYYAKLLVKLYPNTDFVVEKLLFKGKRNRTKEFRRRNNTWAYNHLANKLEELGRLEGFQVIKVNPQYSSLRCPVCGFTDKANRVSVEVFQCSQCGFKGNADCVGAWNLLERVAEEHSVPILSQRGLKRQFQRECRIANLQ

SEQ ID NO: 1568 - protein, 438 aa, unidentified
  REGION 1..438: note = Table 20
MLKSYSFYSDNVNKGKIALLKSKAILIRDFKNLVSSFIFNTYMNEKIYLSKKLSRIEIQKQCKVLKPKGISERMYNAAILEVITIYNNRRSTCKRPFKKAIFFSKLTFSNTNVLSSSQHESIIGRNTNNNSSNQYFIKLSSITDKHGEMLNIPIKVSKKYHGLIEEYNTSVSKGKQFFTSYTVQFVSKNKIKFILTREMNEVLEFQPKQEIPIGIDVNIKHNLLSLSDGGKDFVLEHNKNFLSRYISFLKYLDRKKMNKSKYKNSCKTLSKRDTLKYNTYLRRLEGIYNELISETIRELKEKGYNTLVVEDLGKLPKSFARMKDYFQGFKVSRLSRLMRLSEIKNIFQRLCNKFEMKMVAVNPAYTSQQCHVCNHISKSNRKSQEMFSCTKCNNELNADINASINIMNRYVKFNEVNDFKNHKEIKIFFEALSLNVIV

SEQ ID NO: 1569 - protein, 489 aa, unidentified
  REGION 1..489: note = Table 20
YREIDKNKLITKLKYLNKYTKISSADCQQVIRDVYTKYETNLDMLIKKYCKINTNDKPIKLLFNYMVRYYKDEEHFEKMLEDQFIEVFNKINVKNPRKKDLEDYNFRLKLLSKYVLLKRKNFFKSQTNLNFISFVRYTQDSIIKKINKVTYKSLTFNHMNVIGKTMNVSGMLEKSHIKLTNVIIHINLPKIAIIDLPVRHSKTYHGVFKDYKCNLNKTTGQKQYLIQISFDETKKEVKITLVRDIIKNISDLKDKQILGVDVNTKHNIFALSNYETQKIDNNLVNKIVKEKKKLKEIQSQRDKLKLPKEYSKRQRRIQDKINKQVEYLQNYACHLLLKNHKNSILVMENLEKNLKKCKINNTQYEEELNYNDLFSLLKIYSMKDTVIRMSGNYNVNVVLVNPDFTSQTCPKCGYISKKNRKSQETFCCEKCNHKNNADINAAKNIKGRFTNPKFKKELQKEVIDTQLISEPKISNRFKFKQKLFEITNN

SEQ ID NO: 1570 - protein, 424 aa, unidentified
  REGION 1..424: note = Table 20
MQFSKSTTNKKAISFYSHHLNKEKLNTIKVFAEKIRILQNHISYIYFDEYFNKQKIKCIDFIKLMNRRYRDKDFPCAFFRKICKQVYEKYNKKKPPKEQVIFKKLSFIGINQSTTIFIEESSNKYTNGIINLNIPHFGVIEIPFRYSKEYHGNLSDIHYSMTGQNNSQYIKQYTCTIEKDRLKVVIVEDDNRTYSISNGNVIEGIDVNIKHNLLQCSDGYTIDYDRKMVKSILKRKKKQDRITSTKMTRNLSTEYTYKQIKQNLKDKRRSVSMVEQCLVELFKHCNKNNINHLVFEDLNKFTRKYKINNKEFNVSIRRLMSILHIVDIKNMAERIGKKYGITISLTNAEYTSQQCSKCGYSHKNNRKTQEKFKCIHCGYEENADLNASINIKNRISVDVLRDSLHIEVEKNKYIPLETNHEKVE

SEQ ID NO: 1571 - protein, 365 aa, unidentified
  REGION 1..365: note = Table 20
VVDKFGFKRLYRLALSKREQTLARYASKPIEFKSLTFRGRSRKQQIVAYNKTYNSVINAFVSLSGFERKSFDVPVKFNKDYHGSMHDYEKESNDYEYTVAFNERKKQVSVILTKKDDRYFPDAGDNIVGIDVNVKHNMFTLSDGTTYDYDRELVKAFTEISKRVDELKAADKEYTVGKRRQWKLDAIRHKIRETEKQEIAKMCKELQEQGVTHIVMEDLNGKFGKSYIKDKCNGELNFNRIVGALRISTLKDEVEHIARKYGIAVSTVHASYTSKMCSVCGCIEDENRVDQEHFSCIECGHEENADLNAAVNIRNRVAVTVLRDKLLKRLDNGAFEPRKLEREWVKEVLLLYRTSHLKGGEPKIS

SEQ ID NO: 1572 - protein, 523 aa, unidentified
  REGION 1..523: note = Table 20
MLRYQDMSKFDAFNLFNPMFTNRLSSHYLKKAIEDVWRAYQLRFDAIRKHIEFEQVTELVPTFYKRRTKKHNVGDLKSIERHTTKTELTKTLTWLARYGNSDTEYWLESIILTDIPDTKKKFYQGILCRIHKYGFERLMRLALSRRESVYTEYMTRGAIQFNSLSFSGRSRIKRPIIAKATKKGKFDYYAEISWDWTDDGYRGSSSNTMCIPVKYNKKYHRNLARYCNGSDTSYNMVIRGNDIHLVLARKGKRYTSDEDISEENTIGIDVNSKHNMFALSTGEFIPNDNALIADLEQELLKVDTKQKNYNAKFGNKHQEAFHIAKKDARRLTAISNKLNDSNKRTIARLCKRFASSGIKHIAMENLDGFQGSKLYAKDSNGVNLGRLHLRTGLSSLKDDFIHIAPRYGLSVSLVQSEYTSKMCGHCGCIDDRNRQTQEEFCCIECGHSENADIHSAKNIKFRLTSTVLRGYLLQAGDSGYRNFVPKGILPRWKVKKFLEKCRYDGLFKQSIENHPVSPIGKFA

SEQ ID NO: 1573 - protein, 529 aa, unidentified
  REGION 1..529: note = Table 20
MLLDKAVALRNFRNEISTTVCSSIESFNKYANLTEFDWINDFRKSIKCCNSQDISHAISTTFTSYENKINTYKKQLSIKIQDNIEFDYYKKNTSIHKKGDINSIHLNMKYTNFTKAISYLCKYWSPNLIEFLRTNKSDKEKINEFRKTVLFYYDKYPERITTLVKNIRERVVSRLIAHPINYVSLSYTSCNELHGPLLKRNNNKRSTFGGIITFGAQNTDTGKLFIPVKHNKKYHGNIEDYQTKITSKNQQITSYTVCFEKKKTIRIVLSKNVEEEILPDTENYLGVDVNIKNNLFATSTGTKIDFDRDLFDDYIKWIKKCDEKTKRKKELNLNTTFSIRDYKTQQKCITRIKDMLKRKSRELVDLAIKAGKNHIVMEDLGSFAKSFSRSDDFMGFKYSRLVKLLNLTDLKNIVSSIANKKGINVSFVQSCFTSIACDCGNITKENRKTQETFSCTECKFTMDADVHSACLIENRMADDVLKAKLLNKVGSHYIPKPMSKDKVKSILHDHYTQKWVIDGNKHLDAFLCI

SEQ ID NO: 1574 - protein, 232 aa, unidentified
  REGION 1..232: note = Table 20
EPLEFKHFNKAIGIDVNAKHNLFALSDNSIVDYDHNLIDNFFSELEKLDNKKKLTKKDKKHYAKLIRQNESYFKWLISKTLDKLESQGITDIVMEDLEPLSSSRISNSEFDERYTRLCRVLRHGSQKDWFKKQAEKRGIRVHLTQAEFSSQQCSQCGVIRKTNRETQEQFKCVNCQHESNADFNAAKNLELRYTNVLLRSKLHLMDKYQRLIPDPRISFLEIKEILIKEFHH

SEQ ID NO: 1575 - protein, 544 aa, unidentified
  REGION 1..544: note = Table 20
MIKSVLLTSKYYNKTKGEEVFAVLKRTTEIKNKLSECIYANRHLFLVSDGIKKLNALYSSVNLHNDETAENPTKDPLILSWNIQKEHQMLVDKYKNALNKRLQNFKVRLQSEMIIERYKKDTKYAKKGDTKRFEIKFKSTKLTKFVKYLVYLELDKDILPQLKNEGITALYEYYKTKPYFARIVNLAKNIQTRILNKLKLIKFTETSSLLLDHTVNKARIDYDNENTLYKYWFVFRMKNGKEFRLPLQINGDYHNETRKPTAKEFVIYPSAKGNKINIATVYEAEKPTFKPYSKPIGMDLNLKNNFATLSDGYTVDYDRNYMKRIVSNLKELDQIGYQNLTAKQLKKLKKIYRQLDWYVSYLIYSLLNYLEKNSITDLVIEDLLLSGKFGINEEFDIKYSRLSKLLHLSNVKNKLITQAEKRGIRVHITPSHYTSQTCPVCGHISRSNRKTQEDFECENCGHKANADLNASKNILLRFVSDVLKTNLHNTDDYGRLKPKKLSKRTIKNVISRYFEDIRQCCITPFVPDPLGIGTAEFIKNANNI

SEQ ID NO: 1576 - protein, 528 aa, unidentified
  REGION 1..528: note = Table 20
ANEGKLNEVLRVFDRACALKNAMSAFCHANLQALFVDAYAFQTHYKTFHSSDLNAWERQTLFQDLIKFYQTSLKRRFQSMALGVQTKMVIERYVRNTRTARAGDVKHFRIERRATPLTSALKYLLHVEDFARFDPNGIKNEAVRDNLARLKAGPHWTRLTALAAAKRARLIGKVKLIHFSTGSHRRHPKESDSRITFDATNGKYQHFYRFRIGTGAARRYIHLPLLFNARRCTPAMLRQDAVHVCYVRRGKFMAGMTYEAPVLSFKPEDQWLGLDANTKHNLFAASDGRAWSYDRLEVGRLIALLEKTLAGGTQTMSYRQKARWAKLCRQNEGRIQRLISELLDTFEAEGITDLCLEDLDVRNDMTFLEHQGLKVKYSRLLRLLRLSNLKTWMMRQAEKRGIRVHLTNPAYTSQECPHCHHADRANRTTQETFSCTNCGLTAPADTVAAYNTMERVRGVLGSRLHAHDAYGRATPKPMRRDVLKSLVINQPVSALTGLGGFTELSTPSMMTSRLSSRKNKPGQAGLSH

SEQ ID NO: 1577 - protein, 579 aa, unidentified
  REGION 1..579: note = Table 20
MARKSRCPLKNPRSTRLTSTDRIANADKFEMVLSLFDRVLSLKQTMGAYCLEHLADLYTDTYAFKKQYNLTIFASSDLNAWECQALFSDVVDRYRDTIRQRIANQEVFVQAQPQGWSIERYKKDTYRLAGPDEYSESGKILVHAKGDVRRFDLIRRRTDLTAMVKYLAYVPLATFNPDDLKNAEIRERMQHYRDEKPEIWRRACQLAQAIQTRVIGTVKKIRFATGTHRRDPKQSRSQVIHDPSNAEYQWWYKLRMGSGRAKKTFIYLPLTFNPKYMKPEDLRLDAVHVCYVRHGRQFMVGATYEGEPPKFRAPWVKSHGIDVNTKTNLLALSDGRFFDYDRQWVEKMISLIDHATRFGTQEMSIRDKARLAKYARQNEWHIKRRLHGFLEIMEAEGVTDLVMEDFNLQDDATFFTHPALKVKYSRLLRLLRLSHIKDWMNSQAEKRGIRVHLTPHDLTSQECPKCHRIDSASRVTQAVFSCVHCGYTGPADPTAGTNIQCRVIADVLRGPDALLHEKDSMGRWRPKPGLTQRYIRDVVERQLYAGLTPGDFTEPLAPGKTKSGEAVSRSSKYVLKLHP

SEQ ID NO: 1578 - protein, 439 aa, unidentified
  REGION 1..439: note = Table 20
MSRFNKNKVKINLKSKKFRSIKKLNKGKVNSLRTIFDFVKNMKNQISNEIFDNIELLPNDEYRNNIYKSGYKSYSKNNEFLRAWEVQKIYHRILEDYQISLKANNGDTTKIHCIKYKDGSFFRKAIDNGCVCSKILNNQNNTYSFIYKFKVKTLGDIYIPLQISDRYHDEDFFFEKDHLVSFSEIGGFEAIITYESNISYSSEPQINERSLAGIDVNIVSNLLSVVTYNDSFMMDIDRDHLSKKIEIVKNGINHKKGSKLNYLAVKTLRSIETDIKRLISELLNKLKELGVTDIVLEDLNIKKSNNPSKNNKYKVKYCLLARILRISNIKNWIKVQANNRGLKVHSTNPSFTSQQCSSCGVIEKDNRSKQHFDCKTCGFKEHADLNAARNIRGRLLLSNVLINKLHKIEEGQYVSSKLNCGYLKVLLSSDLNNGVSGVA

SEQ ID NO: 1579 - protein, 549 aa, unidentified
  REGION 1..549: note = Table 20
MRKPKQIYSVDDAMRVHEHSHAVTDRIRTAWSNHGKKEVVAAHFEQVMAIKNAMAVFAFLRLPIITHPNFRKYGYQIFTAHALPKALAGVLTDWEMQQLFHKVACEHTITHVQQVVSNRTFHTAQGALVMDRGKARWKSHRHYGGLATMLNAIRFRLPQAEDASVPEKAKSAWERYSTKYGRDRLIALLHAHQENVNRRLHPVHYTTGSYMKAAMFNKNSGKPTWHSHWFRKEQCKRYQDWYLFKTPGWQKAFPLAVNYGYHNKNYDIRKEHWVTLNRHGEVDIGLVYNRTDVLMEPRAAVAFDLNVKTNLFAASTGVLIHLEEDWLKRHEAKLAALERKGYQHLDTEEKLRLKRITKHRESSLRNQIQQVLLQCKQEGVTDIVLESLTITLGGGLTRRMHKLLRLLRFGTIRTWMREQAHKLGLRIHDLPAAFSSQACRCGHVDHANRTEQKFHCKVCGATAHADTHAADSLLWLFEQLRDVLAEDGFLSINAFGEYVATAKAKKSYKAIKAYYERKTGASHIQGGMLVINQRALWDGYNPPHSWGGT

SEQ ID NO: 1580 - protein, 494 aa, unidentified
  REGION 1..494: note = Table 20
MTKEKRAIKFYLNKSVNKSKKDKILKFLSECNLVENQLLTYYWNNFDIVIKSKTKIDFIYNNKINFKDITPQLKSHHFQSIIQQVYEQMKSIQSKIINKKIRFKFKDDTNKQRIYNYCKQFCFDWDKLEKYNKKQLNKFKKKDEKYHEFLLLVKDYINDDKLYSELKQDIENKFWEEKAKFKLPNKTEFQIRCSSFNSVDIKLKEFEWLFNISNNDRIGGTEKKGIYDKIIIPVKFSNYHKQKLKDKKLASTFNLKLNNYGRIEIIGCYEVEVDYSKNDINNEIGIDIGFKKLITSSDGEIIEQNDKIIKMAKRVLSNQHNRDGLEYHLKEKYNNRDFKLPNKRHKLLQAKLSNFVKSDNRFKIKQFLNGRENYHIIMEELELAYNRTYNREVNYLMKRIGIQSLKSDIEKYCKKYGINISTVNPAYTSQQCPVCGYVNKKSRKTQERFCCVNCGHTANADFNASINILNRYYDDRIKLYTPIWRIKEILNVNT

SEQ ID NO: 1581 - protein, 256 aa, unidentified
  REGION 1..256: note = Table 20
MVKCPNCGEESSSNFCPNCGEKLEKKVICPNCAAQLDPESVFCSECGYKIEAKNEDEKASDEEEKTEETKEYDKDEITEKETSEEIKRCPHCNDILDEDDAVFCSNCGKAINADINSSNGIIESINFKKLIIVSILGFIVSFVLGIILSLIIGLTGQGTIGYPIALIIALFIGVGFFASFFEDILNSGLTGIIIGFVFGLLSNTCVEISSGLQFSYQLFSGYEIIIFTVLGLIFALLANKFLRNIVLKYIDVDKYF

SEQ ID NO: 1582 - protein, 489 aa, unidentified
  REGION 1..489: note = Table 20
MPNQAKIDQLKGMAVAVQSLRSDVWSILRQRDMAAVSMYDFRTVMTERGLTPGHYGLQQRIWRQNVETAFREVRLWQEAAKQQYGLKRKIFRRAAGNKAEERRLFTVLKVGDWLSDPWLHKHTRKAFRAKPKPSRQKLRLSFDSASYNTKRDSEGRLWLSLMGAANRQRIKLCFGRVPEKLTPCGEIQVFFHAENDIQIHTGFDEFHACAGDAIPEPGRKVSTHTRRAERESLSAKAPAAPVDRATTNKPYRILGIDAGRTEAFIDSHGTVYGHGLGQLCEEHDAKTKGKRASRSKLREQAKALRKQAEVARRAGNPEKARRLTRKADNIYAHNLSTGRQTAARSRHRARVRDLIFRAVHEIAAVTNCIAAEKFSQNFSYDRSRKQNRLNSGWMRSIVAEALDAAARRRGSSVIHVNPAYTSQQVRRCGHLGKRTNGSVYCTEGSCPEFRVKYHDDMDAAGSIEDRAADPHITLSMTPKQVREVILSRY

SEQ ID NO: 1583 - protein, 538 aa, unidentified
  REGION 1..538: note = Table 20
MDERLWGLRLRFGMVVQQARGVVGGQGYGAHMAVSTRLVARQLPVRGPMNPGKAATLWAIGSELDRVRAAMWTRFSGAKTAHLSKRQVRDRLMAEHARDDFGVPQRLWRATVEDTVDKIRAWQQAVIATEVRPKIYARACDDNDERNRLLMLAKTGRWCEDAWLSRQCRKAFASKKPRPRRSRRIVADNCSYDVQRDTQGRVWLAVMTPTRGDRLRLNLGPLPDELVPTSTIEISPDGREGWQVIAAYSAKAVCSNRPRHNNLIPIEGIDAGVTEVFTTTDGRRFGAGQYQTIANRAERDRARARARNKLCAVRDRHLARAQAAIGAGDSTTARAATAKARRIERNNLARKKLSAQRSHDRAVTKDVAYQAVHDLVDATAHIVAEDLTGLRGKSKFGRTASRVYAAWQRSFLADALASVPSRRGSAVTLVNPAYTSQQVHPCGHLGIRRGKNVHCQTVGCPQQGIVYDTEINAAGNILSRATDPQISRYTPKDEVKRILTERAGTVENCPTTTQVAVGNGGVNCERNTLPSKPIALKK

SEQ ID NO: 1584 - protein, 463 aa, unidentified
  REGION 1..463: note = Table 20
MMKKAKKVTRITYSDDLNQAKYDALQEIAKRCGSVRTTVWHNYGAKSGLDAKFRPVRDEWIADGHIKNLPQRIWRVTLSDVLGDIKANREAAKINVNSHIFRNIDDKNKRKELFKNLKNDSVWINNSYQRRLMRKYWKHGKNDTFNQIVLEPGSYKCFSYHGKNDIEVISKTHGKRIAIPITTNYPITGQIRLILRSCQVEIHYTIDNTDARACGLPGSKIGIDKGYTEAFVDSDGNFHGEGLGKILSDETDFLNKKYRKRNKIGAILEKLKQNNPKKAKRIIKHNLGRKKLDRRKSRHRGKVKTLIFTAANNIVGKAETVVCEDLTKTFKSKNLGKTVNRRLSGWVKGLMASAIDTVASRRGSRVVLVNAAYTSQTCSRCSSLGKRTGDKFHCTPGCGAVMQADLNAAINILARLDDKELHRWLPFTKVKQILLKRCRRSDETAHPELQLQLQKLSTESELS

SEQ ID NO: 1585 - protein, 457 aa, unidentified
  REGION 1..457: note = Table 20
MSLVTRCVVSKNLTKAKYTRLTEMARLCGAVRAEAWRRYGGLNGLGKNPRDIRDQDWMRSDGLGATTQLPARIWKATLEDALNAIKANRASAVTECTKKVWRSKRCELDKKLLTAMLRNETWTKNNLLHRLMRRQLPHGKSHTYNQIVFDIQGYNCFTLNDQCWIKVSSLRRGRRLAIPLGQFNHQITGAIRICMRDDGEVAIFYTVNEMDACVTRPCGDQELGIDKGFSEVFTDSDGQRHGTDLGQLLTQESDHLKSVYTARQKIAAIAKKTKNAAKAQRIRKNNLGRKKLNARRRRYRQKIRAKIFAAAHAIFDKAHSIVVEDLTHVIRGYDRGRNMNRRLASWIKGLIQQAIESVSRRRGASVNLVNAAYTSQWLPNCSAFGKRIGEFIYCPLGKGVFVADHIAAVNVLQRKNDTGISRYLNYREVKKILDERSRQTERPCIVFGQCVVPFGHA

SEQ ID NO: 1586 - protein, 440 aa, unidentified
  REGION 1..440: note = Table 20
MKVTRIFQDRDLTDTKGNKLSGIASLLGGVRTDIWNRFGSIAGVNKFHREIRNGWMQSEHIKDIPARLWKATLIDVCGDIKAYRTAAIEKVKKAVFKKYSDKETRTTLCRALNNGEWVNNKYLSRMMRKYFKHGHTSVKNQIILDSGCYTWFEFNGQGWLSVQGMERGKRIAIPLNTNHPVKGTIRLIIKDKVEVHHVVEVEGRPCGVGEIGIDKGFTEAFVDSDGDSYGVGLGAQIIKNSNKLKTVYQNRSKLRSIAGKKLHKAKNIIANNLGRKKLNAKKRLHEINLRDIAYKSANSIFDKSECAVVEDLTSPIKSKNNFGKNQQRRLSSWVKGLLAEALDNVSARRSASVVLVNAAYTSQTCSTCGAFGTRKGDAFYCTQCGVELHADQNAAKNVLSRLYDPQIDRWTNFKKVKSILIERFRRSEETVPPGLELQPA

SEQ ID NO: 1587 - protein, 463 aa, unidentified
  REGION 1..463: note = Table 20
MSKVCRIVQSLNINRRKYSELCEQARLMGHIRKETWQRFGSINSSGIDFRVVRNDWVKTRDFAPLPAKAWKETLRDTLDDVFMHEQTAKLKVREAVFKRIKDPAKQRELFRLLKGEGWKAHSFLRRKMRKFRKHGQTSVANQIILETGVYAQFKGLDGNTWLKVPTFERGRRLVIPLNAKTTLSGCLRLILKDGTVFVHYTIQQKTFKPCGTETLGVDKGYTEAFVDSAGRFYGCDFGKVMTEGTQKRHVRGKARNKLHQIEKKKFKKSRHIKRYNLGRKKLDRHNSLQKKRIEGIAFQSAHAIVDHAKTVIAEDLTKPFSTRTKWKTYNRTMSAWAKGALADALESVTKARGSCLRVVNAAHTSQMDSKSGHLEGRRDGDKFYHTNGEVSSSDINAAINIKRRADDTEIRLYTPHKRVKKILLDRLMANGGVNPAKDDRPSRTPVARRKRTSTESELGGNLA

SEQ ID NO: 1588 - protein, 464 aa, unidentified
  REGION 1..464: note = Table 20
MSTTVTITRIVYATATSKEDFDALARHAKAVGWLRKDLWHRFGGKAIMQFPFKDIRCKTTRLYENLSEMGFGKIDGTVRNESIKDILNDIKACKAAAIEMMKGRISARLVSEGIPEKKRKTELSKRMRLIQTGSYEKDPFLHRTVRNCFKHGQGHADNQFVVRSDKHIEEIRMINGRNVLVIKLRLCGKYLELHCNSNGTNVNLANTNLRIILDHDRVCVHYAATKTCSRPCGTKEAGIDKGYTEAVVDSNKKHYGTNFGKILTEYFDRNDRIMRNRNKLFALAQKHEANGNHEKAQRIRANNLGKIKIEGMRARFRNRIKDMAFKTAHALADEYGHIVSEDLTWGMSPNKWRSKGKTYNRRMSGWAKGSLTGALKTVFLQRGVYHDEVNAAYTSQIDSRTKRLEGTRKGDRFTGVDGVVLQADENAALNILDRFYDTQISRYATKEEVKRILLGRLSGATEHQ

SEQ ID NO: 1589 - protein, 468 aa, unidentified
  REGION 1..468: note = Table 20
MKVTRILRAKRPNKGKVAALREQARRLGLLRSEVWQRFGSRQGVDLSDRQIRDAWLGEGRTFPVSANAWKETLRDAKGDITANMEAAKVKARRCIWRHTQDKTEQKRLFSALKRTGWTRDPYLRRVMRKHWHRGHNHTHNQIIVRSDNYTTFHLGGRAWIKIPGLIKGQRIAIPLDTTGTPTGTLRIILTDEDRIEVHYTIDAEITQDSGERTIGVDKGYSEVLVDSDGEHHGQELGRILTEQSDTFKAKYQRRAKLRARANNTRNPRKREHIRRFNLGRKKLNRQIDKTHARIRDVVFQSVHKVVDKAAVIAAEDLTAPMAGKSFGKNVNRRLASWTKGVIAEALDRVSIRRGSAVVLINPAYTSQIDSRTGCLDGQRRGDRFYCSDGVVLQADQNAARNVLARLSDPDIDRFTSFKQVKAILQARTERLRLGLLNQDSSCSPGQSRVLSTESESPKNHHEQLCLGF

SEQ ID NO: 1590 - protein, 462 aa, unidentified
  REGION 1..462: note = Table 20
MLVTRILYAKNINKGKLKALNEQAQILGKLRSQIWQEYGALKCLNTSDRKIRDLWVKEKREFKVLANAWKETLRDSFNNIKLYLEAAKTSIKKDIFKHYKTKEEQKEAFIQLKKDEWLKDHFLHRKMRKAFKNGKNSVFNQIIVRSDDYKVFELNNQCWISIPSLIKNKRIKIPLNTTMEYKPSGTLRLIIKNKVVEVHSSYEKTDNRACGNEIIGIDKGYSEVFVTSTNEFLGKDLGKILTQYSDKLKVKYQRRNKLLALMKKAQKNNQLEKANRIFKNNLGKIKQNKENHKVKQRLKTLIYNACHQVVDKAKVVVCEDLKENFSKNTSYGKNTNRRLNSWVKGLIADALKNVIACRGSALHLVNPAYTSQCDSFCNNLLLGRRKSNTFYLFNGGTIQADYNAARNILARYFDKEIKRNTPFNAVKEILLKRTDSYSLDYCASKALVANEKLHLSTKCELL

SEQ ID NO: 1591 - protein, 500 aa, unidentified
  REGION 1..500: note = Table 20
MTIIKRAKKQTKKKYEGAVVVTQIALLDNVSHNALEELVDIANRCGQLRSDIWNKYGSVSGWGLNRNIHDKHQLQISLRTIFPLEKYGLTAKLYERTAYKCLDEIATYHDAVKSYVVDEIYRRYDDETERAYLVMMLNTQAWSYVNSCRARWLHRTIRKYFYRGHTRKRNQIVYNGDMYKIVPVGKKSYIELSTLSKGKRLRVQLHGSPEIESEIKVLIRSDHRIEIHYPGKRFITLPENRVPQAGVDRGYTEVFVDSQGQVYGDGLGKIITQATNQQTDLSKKRGKLHALARKLEAQGKHEKAQNIRRNNLGKAKLTRKKRKLDGKLKTLVFTATVELFKRYEKVFYEDLTEPIKDKRGLKGKAAARMSRWYKGIVADAISQVSVRLNAQAIQVNPAYTSQTDSRYGVLLGTRNGDSFHCFDGVVLQADYNAARNIFTRGYDAEIPQYMKFTQVKSILLRRTELFQEQQLRDRAKTLEGYKGEQLSLFDITLSHSESAV

SEQ ID NO: 1592 - protein, 518 aa, unidentified
  REGION 1..518: note = Table 20
MKRKVKNQVTVTRIAILGTNQINRWKFLELDLIASRLGKLRSDIWNEYGSLKAWGISKFDIDKQLRPGKDKYQLPAKLWDSTLYDVIDDIHLVQSACVEKVMKDLGQSFQSFQAKKGVLQLTLESREWLNHPKLCTLVRKYWYRGHTKVCNQIILRAFDTKLDRNNVVWLRFGGLEKGRTLKLPTTLPSTVKCQLRLILSNGRWEIHYTTDIEKAEKKKQGEPLGAGCAQRRCGGEVIGVDRGYTEVYATSSNDSARFLGNDFGKIQTNETDYRTAKQIKRNKLKSVADKAIIRGDSAKADRIKRNNLGKIKWDNREASFKGRIKTIVFTATHSLMSNAIKVAYEDLTEQIKSKKPMKKRMKRNVSSWCKGMVASAIKQVSTRVGCTVVSVNCAYTSQLDSRFGTLTGTRLGDKFTGHDGVVMHSDTNAADNILARMGDVEIPRYMKHTDAKKILLERTQKFQEMLNKPVEVTQQVWDSFFEAIPGIDKPQALEPKRKSTSTVNQRANYQQLTLFDFG

SEQ ID NO: 1593 - protein, 506 aa, unidentified
  REGION 1..506: note = Table 20
MPKRKATITTEYTVTRVAYSIGDINPELLELASTLGKLRSELWNKYGSLKAWGINKNDIIKEIRNTPHLRKIYGAERFNLSSEIWERTVQSVLDDIHAVQEAAKSQVIRKVYQFFKPEQHQVQKGKKLVWEDIPETSFRHELIKALNSSYSEWYQYPLLSRWIRQYYQRGHTHVNNQIVINATSRAMKGRIEHNTRSITTFLIPSKMVDSKCQWLEIKFKTGRVTPRAGRCRLIFNGSNFELHYPHTTKITVTKQSSVVGLDKGFTEGFYSSDGDVYASGLGEIIKTASQERTDKNKKRHKLFALSRINTEKADRILNNNLGRQKADKKDRVKRQKIKQLIRTDVQKIFNNYGTLVVEDLSKHIKGKKKAKVLNRKLNEWSKGELQKALDEISRRKGAKIVLVNPAYTSQVDSSNGTLLGKRFGNQFFTYSGVVFQADKNAATNIKNRASDSEITRFMKKEEVHKILMSRTAKFLEQLGHTFDEAISMGWLDKKHLCQGEASRRRS

SEQ ID NO: 1594 - protein, 459 aa, unidentified
  REGION 1..459: note = Table 20
MSTMKPYTVTQIADAAKNDIVEIQKARELAYRLGDLRGDLWNKFGGVQAWGEKPDGLIRDFKLTNPPESYSLDFKNWDKTASQVLDDIQMTHAAIREQVIRKIYARYPEKAERSALCKALKTLAYQENNVLHRWVRDASGRGHTQVDNHIVLCHNNGAKFNRKNRITEVVFNGLPMEGKNNRYEKITLKFKTGKVNLAGYATIIFHEDGVIRLHYPIKKPATVNASHEIIGVDKGYTEALYGSDKVVYGAGIGKLISQQSDWLKAKMQNRHKLHALYKKTGNEAIRKNNLGRKALDKRTNATQAQLKSIIRRDVRVIFSQFGTVVCEDLSGKFNGKSRGKNTNRKLSAWCKGEIHQALTEIADRTGSTIKIVNPAYTSQVDHLTGTLLGTRKGDCFIRYTGDVVQADYNAAMNILARDNDKDINRVTPYQKVKQILLKRTACFMETMKLGGGVPIEGLA

SEQ ID NO: 1595 - protein, 479 aa, unidentified
  REGION 1..479: note = Table 20
MSKKGNKKTEEIFTQVIPVVACSDLTQVKKIMALCGTPRAITYNQLGSLSGWGADWRSTDKIIRKILLPTDIGLPSKLWEWSVNDTMKAILAQQEAAKTFLIKEIYRKTKNPEERQRLIHLLKNNPTGDNWLHRKFRKQYIKGRTYVRNQIVYQNAGYSCKRINRSSVQLEIAGLVKGKRIKLKLRSRHLIKGQIRVIFKDNEQLFLHCTRKKTIVLPSEKPSKKIGIDKGYTEGFYTSSAIKIAEGLGKLITEKTERIAQTNRNRYRLRNYAQNHQKLAKSKTILKNNLGYQVKSKKLKREKATIKNFIRADLRRTITTPVKLFCEDLTQPIQGKLQAKRINRKLNQWMKGELQASMEKISLETGSNLSVVNPAYTSQVDSLTGTLLGHRQGDRFIRYTGDYIQADLNAAINICIRGQDNKITRWLKASEVETELIARTVRYLVELGVSVTLAVQRGWLLPKFKAKALKQETKYHRQG

SEQ ID NO: 1596 - protein, 545 aa, unidentified
  REGION 1..545: note = Table 20
MSNPQKTKKTKKTASQIKKAANQVQRLLILSGLYLDVWFVIKIEAALKVETTIINPVVECSDIDIINVLIDSLYTVRANTYNVLGSSSFWNHGWMGTQNIVSAKHGKPETILVNGLPMPAKIFEWTVQDTAKNILMQQEAAKIKIISRICKRIPKHTGAELTKQQIAENYVADKQRKKAFDALKSFETIKTIPWLHRYFRMEYKRGRCNQNRQIVYQQQAYTCKRISRYFVKLEVQGLERGKRITLIVKSNRIIKGQIRLIRSENGSLEIHHLETLYNRDYCELINRQPEIGLDRGYTEVFYTSNNQALGTDFGAQLNKKTDRITNIGRNRSKLWSLAYVRYKNNPQKAQRIIENNLGNKTELRRRIKDDAYINTVVNTACKTATKQATTVHVESLIEQIRSNHKLSRRAKNRLEKWEKGTVKDRLTHWSLRNNTNLNWVNGAYTSQIDHRNGTLLGTRNGDNFTTYDRVVFHSDHNAAMNVLHRGLDTEITRFMKYTEVQAVLLRRTALFLSAMGLTLLDAINLGWLDVKHKKCQAFKEILHGL

SEQ ID NO: 1597 - protein, 355 aa, unidentified
  REGION 1..355: note = Table 20
KLENPLLHRLVRKEFKRGHSWVDNQMVYQQVGYKCKRLSPNTYQLEIAGLTSRKRNKIVVKSNRKVKGQIRLIYNNQSQQFEIHFLVDHGRVESVRRPREIGVDKGYTEAFYDSEGKAHGKGLGVLLSKKSDRICAKNRKRGKLWALHRKLEKLDPAKSARILRNNLSRKTENKRYKQDQSEIQSVLGAASKSLVGGRALKVFAEDLTQPIKNKRQSLAMSRKLNSWMIGQMRDSLQKWADWTGSVVTEVQPSYTSQIDSRNGTLLGKRTGDSFTGFDGVVLPADHNAAKNILARGTDFEISRFSSRTEVQAVLLRRTARFLKGLGLSLADAVELGWLNSKHSKTQAFKQLLIEM

SEQ ID NO: 1598 - protein, 503 aa, unidentified
  REGION 1..503: note = Table 20
MEMVERGEVAQIIIAHKDRLVRFGYMKKTIKNYCFNATQSKLNELYEIALRYTSVKNEIFQRYGSISGLNYLSYPRQIRNEWVKTNYANKFGLQARYWKQAVDEVFSNIKSNWSNGFRKIKNNIYKNKNYTEVEKHYAFYLLKASILLYKAITFQSFDLPEIFKDKDIRRDKIHKYLKSRLRKYLRTKSYQNKNRSFQIDRNMYDIHKDNKGRTWIGIMGLTPRKRVRLQMTSSTESTGNLRIVLKGKHIEIHQAEDIQVNPIEGKDKRAIDKGFSEVITSSSGRKYGEQFNQLLKKESDRLSEKNKKRNKIRALTDKYEKKGDIVKSEIIKKNNLGKRKYFYQKEINLNEIKQFINLSLNRFITEERPAVMVTEDLRFTNWNKKLSKNVKRYFSSWLKGYLQERIDYKTMLNGVQQVVVNSAYGSQICHLCGRFGVRNGDKFYCEVHGVLDADHNAALNYLARMSDPDITIYTPYRKVKDILQERLRLSNQDSRYSVIKTGQ

SEQ ID NO: 1599 - protein, 545 aa, unidentified
  REGION 1..545: note = Table 20
MRKVRKRAKKPKKKHICKRRAVEKCVRLETCPIGDAGFAILERMFDSYAHCKQMFLDRLSGIGSVLDVQNFISLRNRIRTEQNRISDHGKETGNKTYCETYGFQGRFWVQALKDASSTVKSMWKNVGAECRAKLRDNDAHRDMPKPERAYCNYVLGAPQVLYCILNQVPYEGKISKRFREILDGIRDVPRKRMDYLHSLLRRLVRDNLPHPQVGQARCMLLDEAMYSIKTEDGADYLYLMTDKRGKLLRLKLHGRFCYNRKGDIQIILDREKRTVSIHKCILARQRVVEKEHPAGIDKGYATLISCMDPEGNSPEYGKNFGKLISSESERINQRNTNKNYFYNKRKDLQEQLDKTRDPKERERLDSLIQKVERDHLGRKKYDRQHKKAVAHMEAAINHHIRTCMEEMKPSEAVLEDLSFVSDKKRSPRKDFNRRMASWQKGYLDERLDYLSRVYGAAVTHVNPAYTSQYCNHCGAKLGARYGFHHEYADCENCGTVNANTNAAGNILDRRNDKKIMLYTPYRRVKRICDRRAEPLNAAVDTAGLW

SEQ ID NO: 1600 - protein, 270 aa, unidentified
  REGION 1..270: note = Table 20
YEIHKPRKKLGMDKGLATLISCSSGQEYGADFSKLVGAEVERLNDRNTNRNEYIQSAKELREEKFALQEKLAKDYSAKTKKRIRHRIGSLERQIARLEEHHLGSKLYHRQHERKQRNMERVMNTSIRQMLVAEDPDVLVKEDLTFTKEKLPKASNRYEAKVRRKLSSWTKGRLDKRIEYLCGSLGIQTIGVNPAYTSQFCPRCGVHFSERKGAHHETAVCPNCGEMNANTAAAVNILQRADDKEITKYMPYKNVKLILEDRYANKQLVMA

SEQ ID NO: 1601 - protein, 539 aa, unidentified
  REGION 1..539: note = Table 20
MERGRIRMQESSKKARSSSVKQTVKKTQPKTVRVYSKKISDEEFARMSDFFERYGRCRHFFLNRFYGIKSMLAVNNWQALRNQVRKWDKPVKGSKGKLETVYNFQTKHWVGALREACANIKSMWSNLANRLKKVIQGNENLSADQRHLLFFILKFKSAWQAVLLHKPIELPEEYTEALTEIEAKLTDKQIKQAHSYLRRITYRYHYRARKSGKLGSSMMCDLNWAFEGNTFSFSSDMPRKQFSVEMTSPWNYPRTGDITVVLDRIKQRLEVHKLISSKRYSNDSKKAIGIDKGLATLLSSSSGNEYGKNFSKLTNTIVDKYGKRNANRQPYMNLRWQLNQQLELLEKANQPLSKTALRKKRKLLGKLKNLEQNNIGRKSYDKSYRSAQETIRSFISCAINRMIEKEHPVVIAKEDLTFVKEKGVKSDNSRFARKMRKRLNSWTKGQLDERIVYLSSKNSIETHDVNPAYTSQYCPICGQHFEERYGSHHELTKCKKCGKMNANIAAAKNILSRLTDEEITLYTPYKRVKEILASRIKEA

SEQ ID NO: 1602 - protein, 262 aa, unidentified
  REGION 1..262: note = Table 20
KRYSNDSKKAIGIDKGLATLLSCSSGNEYGENFSKLANAIVDKYGKRNANRQPYMSLRWQLNQQLEQLEKADKPLSKTVLRKKIKLLGKLKNLEQNNIGRKSYDKSYRSAQETVRSFINCAINRMIETEHPGVIAKEDLTFVKEKGVKSDNSRFARKMRKRLNSWTKGQLDERIEYLSSKNSIETHDVNPAYTSQYCPICGQHFEERYGSHHELTKCKKCGEMNANIAAAKNILSRLTDEEITLYTPYKRVKEILASRIKEA

SEQ ID NO: 1603 - protein, 527 aa, unidentified
  REGION 1..527: note = Table 20
MEREAIIMKRSSKPIKSYSKTVRAYSLKLDEDTYTKLDQLFINYGKCRNMFLNQYCGISHMLDVKQYRKLRDQIKGSKQNKKYVAKYNFLDKHWCYALSDACANINSMWSNLANQIRRVVQANEAIDKDERHLIYYLLSIRELWYYALTNNQAVLLDLSHGLQKHLAELEEAVTPKQRKHAYSYLSRLTRRYKYTPRKHHSLNKSMTYDESMYKFTGDQLEELAISSHVSRKRFSLKLTSPWHYRLNGNLQIILDRDKKRIEIHKVIKVRQKKAYQAGTKLGIDKGLATLVSCSSGREYGKGFSQFTRPEIEQESQYLARRNPYYGYRYQLKKKLNQLKKANIPKQIIKKKQLTRQLNKLNANNIGHKRKDKRHASYHACLESKINHAIKTMIKLETPSLIVKEDLTFTKEKIAKKGSKYERQVRRNLSSWTKGVLNERLEYYCQQYGIDFKDVNPAYTSQYCPNCGRHFIVRFGKHNEKTLCPNCGEMDCNIAASKNILARATDKEITLYTPYKKVKAILDQRIAS

SEQ ID NO: 1604 - protein, 487 aa, unidentified
  REGION 1..487: note = Table 20
MGNGAIKMPRSLTPTKTSLPKTIKAYSVKLDDETFNALDKLFISYGKCRSRFFNELCGINHMTLNFREQRNLIRQKKISAKLVKQYDFLGKHWTYALFETCSNLNSMWSNLRSKLKAVIRDNDRLNEQERHLLFFVLSFRELWQGALKYDKQAVYALPKKYQKSYFKVLDEVKPERQKAVFSYLRRITRRYKPKPRKSGKHNKSMTYDENMYRFTDLSTIRISSNKPRKVYVIKLTSDWHYDQKGNLVLVLDRTKKRLEFHKLIQTRTHALKYQTPIGIDKGESTLLSCSTGNEYGILFGNKLNEEVERLCEVNKKRNRARSKGNATGNKRYLKAKKRHRAYLDSQISHAVYTMLLTEKPSLIVKEDLTFTKTKVKSKDKSKAKIHRYLSSWLKGELNDRIEYLCQKYGIGFEDVNPAYTSQYCPNCGHKFLTRYGKHHSLTLCKNCGEMNANISASKNILKRKDDKEINLYTPYKKVQEILEQRAI

SEQ ID NO: 1605 - protein, 450 aa, unidentified
  REGION 1..450: note = Table 20
MKKTGVITKTVLQYSTNLPDETIGELKKIALDYNKVRNYVYSRYSGINSLNKLIPGYTVLNEMRYCGLRQQLNLPVVYYELAIFDALRDIKSMWSNLKNRIAALVKQNENLTQDDRIYLFTVLNYPSVFNAIVLRKEYEMPKNTVGLQLDVKRLNNLLCRYVRKYKQISKVDKKCVFAVSPNGYKYYGKGLIGFVGRIPRKRIMVELKDNDVHTRQLRVFVEEDHIKIYAPVDVEVKQHTDYINTVYLHIGFGNMLTSSDGNVYGKDFNKLVNTETDRLRIKNIERYKSYKAYSAAVENNSKAKSSRIKANNLGKKKYFLQKKNKYAKMTTFINSEINRMLKEEKPCTVVIAKAVAPKKADNTMSKYSREKLNRSFGGYIRKRLTQKCAENGVAIIEVSPKDISSICSSCGKSGKKQNSFFICGSCGTKTDKYINAALNIKNKYLSKENI

SEQ ID NO: 1606 - protein, 446 aa, unidentified
  REGION 1..446: note = Table 20
MATYTKNVRQYSQKLPPDTMEFLRWLVGAYAKVKKTTYERYGGIGSLGKLTPGYTVLNEMRASGMRQELGMPVVYYELAILDALAAIKGRWGILRDTLKRLAAFHEGFTKEDRTYIYTILKWGSVYEAILQGADYEEPNLVKKLPVDKHRLNNWLRRQTRKRLGRIQVMREACFTISPKAGYSYKNGVMRIAGRQPRRRVEIPLRDGRQFSRQLHVEVKEDYIILMAPVTKEASLPEGWTNEIYVHIGDVNALTLSNGHVYGEGLNKLTDAETERLDSKNRLRNQYRAAGREAIAKGNPDKASVISCHNLGTLKYRRQKERNRARTESFINAALNKMLAEEKPCRIVITHPVKVGKGGKIAKSAKRKLARSFRGFIRDRLQEKCEERSIELVRIPSKGTGLICSACGETGKTAIGNRFQCPHCGYEVASSLNGARNIERKYRLEHG

SEQ ID NO: 1607 - protein, 458 aa, unidentified
  REGION 1..458: note = Table 20
MEALNEKSTPKGTEITKTVWQSTEVLPEETMEFLKGIAADYARVKASVYERYSGIGSLGRLASVYDIMTEMRHSGLREQLELPSVYYELAVRDGVRDIKGMWGMVKNKIRTLITANQNLSSDDRMYLRTVLKLDRVYAAILNREEYPMPEKAAGLNLDTASLNCLNNLLRRLTRKYLVKPEAGRDDSFCVSPGGYTYKNDALCLVSRAPRKRVALPLKDKKTSSRQIRIHIKNDHAEIAIPSEVKRRKHEDYQNIVYIHLGYQNMCTLSSGNVYGEKLGELSTAKTKRLTEKNRKRGKAQVRYRESLALGDKKKAEDIKRNNLGIQKYDRQKRREQARMKTYVNAELNRMLENEKPGKVVITKPVIVNKTKLKYKPSNRNMTQGPQGYVRKRLTQKCQANGIRLEEMNSRGTAAECSNCGREGKRLLEGFTCESCGFQSTIALNGARNLEKKYKELQK

SEQ ID NO: 1608 - protein, 443 aa, unidentified
  REGION 1..443: note = Table 20
MVVTKTICQHSGKLPEETMDFLRGIAADYAKVKTAVYERCSGIGSVERINHIYDIQTEMRNCGLRQQLRLPVAYYEMAIVEAVANIKSMWSKIKDRIREAIRNRDNLTDAECRYIRTVLKLDQVFAAVLQRRAYEMPRNVSEEDLDIGRLNNLIRRLVRRYVAKPKIRSTTQFKVIPAGYKYKNGGLYLVSRVPRRRICLPLKDTQTSTRQIRICIKEDSVDIHIFRDVEIHEDESRKGTIYIYIGYRDALTLSNGHVYGQELNKLVSPETERLSAKNAERSKIRHVMEQSAMAGDYRKAGRMEANNLGRKKYEEQKRRVRERTQNYINAELNRMLAEEKPERIVITRTGTVSRKKSSAKELNRRLTRSFGGYIRRRLEEKCRIHGIELLTISSKDTASICSQCGKQGARTSREFHCGHCGFRTTAARNTARNIEKKAISAGT

SEQ ID NO: 1609 - protein, 488 aa, unidentified
  REGION 1..488: note = Table 20
MSAENIKTETAQQYSADDALTQHGGKIGKSVHQYSKGKISSENMDVLMDIGHGCMVTRNYIYQKYGGIRSLVKVYSGYEVDSEVRAAGFREKIGLPSVYFSASMNRALGDIKIMWAQVRNGINEAVSRNERFSPEDRHYIRFVLKTDVCYWNILNGKTMPLPEKIQPGYEKVIADLGGGRSQRVENLNRYLCRQTRKRLRRQHTDNRLRFTIKKQGYRYGELNGEHGIFLATKINRQRMFIPLTDTNVYDRMLDICLNPQKKSVEIIIPIFVNTQIHEDYINEIGISLGLWDMITTSTRNIYGGSFGKMQQEISRFILEENYREKPENVSDTQNYQTRKKKMDAALKNYVNMEINRMLEQEKPKAVYMAKLPRNPGMHTAARNRDAKQLTKGTGDTHLLRMWKKGFVTERLQWKCQKNGIKLVEVIGKGIGRECSSCGQSGYTDGEKFKCPVCGFEENKKINSAKNALNRGQTGRKLNKKWSGDTPGR

SEQ ID NO: 1610 - protein, 433 aa, unidentified
  REGION 1..433: note = Table 20
MARLREIASDFCRVKNSVYDRYGGIRSIGKLDPGYAVLQEMTASGLRERWGIPSVYFQLAILEALSDLRGYWNRIRGHVRESTFRREGFTEADRHYLNFLLRVDLLFIELLTGEPADLRESYRLQQQELAAPVNRKSLENWLRRQVRKQCRRLHADQADTFAVDSRGYRYLDGAIEFASKEKRKRIRVPLTDTNVYDRQLRVRLHPEDNTLTILVPVKVRQHVHADWKRTVGLAIGLHVMITTHEGHVYGAEIDRYQGEYAAWLREANRIYAKNRVDNPGRKKYRAKKHRFEEALHSYINRELNRLLAEEKPAKICLPKLQGMKPESKSREKNWGVSVWQRGYLMERLLQKCREQSVEATLVPGRAIGMTCSRCGQPGERKDGVFTCTSCGLTLPERQNAAKNAYQRGDGQSDTSEAEETRQNHGSEQATSSG

SEQ ID NO: 1611 - protein, 449 aa, unidentified
  REGION 1..449: note = Table 20
MPSEKVCKTIYQHNKEPIAEADMQKFMEIARDYKKVKNYVYTRFGGIASLSKLYPGYTIQNEMTGSGLRESLGMPSVYFYLAIFDALGDIKSQWTRIKIKILKLINQNQNFSDEDKHYIRFLLKVNNAFEEVLNQKPVELPKVLQKQYEKVAVQADVDRLHRYLCRQVRKYHVKLHTDREDGFSIAERAYRYGEHGIYISIKEKRKRIFVPLTDNNHYKSQLYIKLFPEEGSIEIKVPIKVSVQNHEDYQKQVGVSFGLYTMLTTDEGNYYGEELGRHQIEYADWIREQTRSYSRNRNENAGRKKYYAKKRRLEERLHSYINQELNRFLREEKPQVIYIVKLPKPHARGVNKRINHSMAQWQRGYIRKRIQQKCREQAVELVEVLGKDISRECSECGEKGKKEKGKFVCLQCGYQAEEKVNTARNVKKRGQGDGVVNPKGSYSVKKNRS

SEQ ID NO: 1612 - protein, 443 aa, unidentified
  REGION 1..443: note = Table 20
MEETLYRTLRQYSRGRVPDGDMEKLLEIAMDCRKVKNYVYARYGGIGSLGKLYPGYDIQNEMTRCGLRAQLGMPSVYYHLAAAEALGDIRTQWACTTTKISSLVWKNEHLEAQEKQYLCQMLRRMDVLGGILSGRPAVFTGEPGERYEKLAGQVDTDRMGRYLCRQVRKIHRAESQAESLAGFPISERAYRYADHGIYISTKEKRKRVFIPLTDNNRYKSQMRIMLYPQEGRLEILVPVEKAVRTYGGNGKKTGIALGMHVMLTTDEGSRYGKELWELHSRYADYIRQHAVNCRRSGQENTGRRKYHAKKKRMEEGMHSHINGELNRFLEEIRPGTVYMAVPGVFPAGRDKRHNNSVTLWQRGYIRRRLEMKCRERGVRFVEVSGRNIAVTCSRCGGRGERRDGLFTCKACGYCTDEKANSAGNALWRGLEMERKQGKAGSGE

SEQ ID NO: 1613 - protein, 454 aa, unidentified
  REGION 1..454: note = Table 20
MLKQAKIIKTVRQHSKPLSEETMVFLRGIAQDYAKVKAYIYSRYSGINSLDKLYPGYTVQNEMIASGVRNELNLPYNYFGHAIFDALGNIKSIWSNIKLKIIALIKQNENLNDNERHYIFSILKRDKLLAAILNRRDYELPKSIVSKKLNIKRLNNLICRLVRKYHVKPENKGVADYFHCNNVAYRYGNNGIYFSSRLSNKRVFVPLTDNVAYNKQITVKLSGNKIEIIAPLSVKPKSHSDYNNTVALSLGYVTMFTSSTGNEYGEKLGELLSSRSERIYLKIRERAKHHKIYKKSIESGDSALAQRIKVNNLGDKKTLSQNTRELEKIKSYINTQFNIMLEKEKPSEIIIPARSKQFGVWMQKATKQKLARWMVGYIRKRLDDKCAVNSVKITEVNGSFTGKICSVCGGEGERANQIFKCGECGVKIPYPANAARNLFKKAEDNRQMFLSVPL

SEQ ID NO: 1614 - protein, 483 aa, unidentified
  REGION 1..483: note = Table 20
MAKKKNKPFMKKRVKRTVKQRAMYANQADETIIEKLTERIRNAKNYMFSRLAGIHSYPRLQDGKAVRNEWVKNKELVEQFKLPARFWKITLEDVVSNLKSLWSNTCNKIKEVAKENENLTEDEKNYIRYVCSAPKLFGSILIRESIVRPKSIQKLEVRENYVHSLIHRYARRYRGKTPYTYSSTFQLDADMYKYVQEDGVTYIEISTHIKNNRIRLQCSDQNVYKKNIRVTYDQGVFTLAHMVTSKETKNWKGQNEIGVDKGYKTMLISSSGTHYGEGLNTLLSEETERLHKVNQKRNPYYAMVRTLEEQGDTEKAERIRVNNLGKKKYKKNKHKHEETVKSFINHELNCLIQKERPSIIGIENLAFVSWDEKMPKHIKRKLSRWIKGYIDERLLFKCDVNGIAYEYVNPAYTSQECHKCGCLGNRKTQEKFICQQCGSMHADENASKTVKNRLHDKEITLYTPYKQVKKILEKRKAAKATVQ

SEQ ID NO: 1615 - protein, 460 aa, unidentified
  REGION 1..460: note = Table 20
MIIKTIKQHSYKLDSETFKELSFIANQYKNVRNYVYSRYSGIKSILLLAKNRDIRDEWVKFGFAEQWKLPARYWKLALSEAIGNIKSKWSNIKLKVKIQIKKNLNLSNGDKHYINYILKANELYYKVLNNIEFDILKIFQDKKLNYKYLNSLIKRYTRRYKGKIPYSYRGTTFSVDTGLYSYKDGCINITSTKKGKRLPIKLTDKNVYDRTMIVKLFKEKVEIHCPLKIKARKNNNSENVIGIDKGYKYLFAVSSGKFYGEKLNEFLSIETERLNRVNSNRNRLWALCNSYLEKGNAKKAQNILENNLGKVKYNYNKSKYDSRIKSYINYSLNQLIKEEKPTEIVMEQLDFVNWNNRYPKVVKRKLSRWIKGYIRQRLEYKCNLYSIAYTYINPAYTSKICNVCGSFGERIGDVFTCPKCKEIHADINASKNILNRKYDKDIDLYTNFKKVKEILENRLK

SEQ ID NO: 1616 - protein, 256 aa, unidentified
  REGION 1..256: note = Table 20
MNDIALDAGTTEVYTDQHNRRYGTDFGRILAHVDARVLDKGKKRNQIRYAALNEHFEDKKEKAAWQAKVAKHNLGKKKQTAFRKRSRSAFANEINHAFNEVLDQSPRQVIIEDISHMRGRTKSKKVSRIVSLWMRGVLQERASFKITARGSRLQAVASAYTSQECSNCGFTAKENRTGDCFRCLHCGTVDTADGNAAKVILKRAYDPEFKPWMTKFHIKKILDRRNAQITGSTLGAGCEADELVQSFATVNGQTPA

SEQ ID NO: 1617 - protein, 590 aa, unidentified
  REGION 1..590: note = Table 20
MKRTVRLATLPLNKGKYDELCSVIKRYTDAKRVFVAHLRQTSLWGLLDRSKSFRDYAKARGLYPTSINVHLIDQAAFDAVDTCIRHIESCFARADIKAKTWRRFTDKNERHYAYACLARYSAIGQIMGGGVPEIPTVAIPPDARAKIASYLHRVIRDALGSSWPTVVKSRSMSLDSSLYSVVDNETRTGKTRRYVKVISSTRNKRISLPLSGISQVSGNIRVVLDEEHKRAFVHVSYDVARQDRATGPAVALDWGITEVCTDSSGVHHGNEYGRALTSMTERRNKTGKARNRLHALSKRDAGSRRTKHIARNNLGTKKQQARLRRTKAQLQTISGATIKEVVYGDGNRTRAKKRVPQLPSQRPREIIIEDLSRLQGKARSKNISRLCSSWARNENQERITVHAYVGGSGIKTVNAAYSSQTCPDPGCGYVHHDNRHGDVFHCRNPYWDCNWQGDVDHVAAMNLLNRIKDRQISRFTPYREVKKILEERFLRRLESRGIPTDDAATAQRLRLQAYHDNPSWTWEVVNHRLALVLSLWIGQNTQRRLESEDKRGAYGCICISERVVNMWSDVPPSLPVGRRAMGLALNRWTG

SEQ ID NO: 1618 - protein, 481 aa, unidentified
  REGION 1..481: note = Table 20
MTRTVKWLSGPLNTGKWAAVLAIATAYSLQKDAFLRTLARTVRWADLDNPRAFRKRDKASRVNCWTLPVHLYDRALFDAVETMRRWILAAIAQTHIEGKLFRMFEGRQRRYAFWLLRKFVRIGAVLRGEAPEPQFAIALAERQAVVRLLRRLLRKALGKAPRVHLRRSFALDNTLYRFFTHQGKPYLSIASLVPGQRIVIPLKGFPVPAVTGNVRVVIDPLQHTVAIHVPIPVRVKTLPERREPVVVGLDAGVTEVFADSRGHFYGEGFGLVLDRLSAQTTTQGAERNRLYAAAKTLAASSRPEDRQKAGRIRRYNLGRMKLDARRARGQAEVKRRISEALREVLRSRPDVLVMEDLSRMRGRTKSRHLSRVVSRWMRANLKERAEFLAQAGGSRLETVNAAYTSQECPQCDYVHHNNREGDRFHCQRCHFTGHADTVGAVNVARRYTHPELWERIRVFTPKEDVLKILREIFERQKARCT

SEQ ID NO: 1619 - protein, 546 aa, unidentified
  REGION 1..546: note = Table 20
MKRTIKRYSQGLNSGKWQTVVDVAGAYALQKDLFLVDYGRSAVFAQYGSHREARDELVAAGYKSPCNLQARMWKLALKDAFETVDRQWQAQAEGLRSLVMAQRKESRFTEEQAHYAFWVLKSSQRMAQLVGGRAPAPGHFAIAPGEMRQAVAYLRRVIRRERGANPRVKKARSFTLDAEMYHVFEAGGRQYVKIMTSVPRQRLVIPLTGQGAIRGNLRVVLDEEKRRVEIHRAVDVRPRKAKGKPVAVDLGVTETITDSDGARWGKGQGKILATYSDQICDQGRKRNRLRAIQERHAQKGNRGKVRRLGEYNLGKEKRRRRRRKMRQTLVCQINRAINELQREKKPSLLVHENLRGLRGKFKSKRLSRIVNTWMRGLIKDRLAFKASAGGSRREQVNPSYSSQMCPRCGFVHHKNRQGDRFQCLFCGRGGDSDAVAAWNLLERRDDAAIRLWTPAARVRAILLDRFRRRVESWAFDFPPGQADLVVLAMVEVSATVPGKTQDTPRPVPQVDVAEITMGHSESETAAAATRQRITDLDRFVQVGRNS

SEQ ID NO: 1620 - protein, 485 aa, unidentified
  REGION 1..485: note = Table 20
MRTVKRLSLKLNTGKWEAVERFARAFASDKQTHLDFYQKRGNFHSAAGWRERRDAVKQSDHHHHTPLPVHASDLAIKEAYETELKYWASIAEQIGFRDAAWTEEQKHYANWLLFTGQRFSALIEGKAPINQQINLSLNHRKQVQNYLRRRAREIMKDRPRVRMARSFVLDNSLYKVFETAQRQGISISGLERGDRIHIPLEGLGEIIGNIRVVLLPESRRMEFHITREIKVLKAASEEVMALDVGITEVFADDEGNLYGQKMGEVLREASVKLNDKGRKRNKLHVVRKKYLGQGKKKKARNIRKYNLGGKALRERKRLAKITIENQINRATTEALKKRQPKVVVTEKLNIRGPAKSKEISRRVSYWHRRALKERIEFKASAAGCRREQVNPAYTSQVCPSCGYLDKANRQGDRFQCRKCRHAGHADVIAAINLKARMNDREITLWTPKETVRIILLERYEARLGTPECLAREDQDGDRSGADSRT

SEQ ID NO: 1621 - protein, 286 aa, unidentified
  REGION 1..286: note = Table 20
MSAHWESRGNAEIKGTLRVVVEAGSDRVEVHQTHPLEGVLPELTGVETETAGVDIGITEVFTDEQGNRYGTELGSFLEKTSEQLRTKGQRRNKLHAVRKAAWTTGDREKANRIRKFNLGTKKQREMTRKQRQTAARIINTAIYSLVAVRQMKILGVEKLDFRTPTPSKALSRRVMLLSRSLLNDRLDFVASAKGFRREDTNSAYSSQTCPNCWFPHPANRRGDRFQCTHLQCRHADIADRVGAEHTKRRVNDPEIRTWTPRWRVKELLLARHLAWKKARLEPPERP

SEQ ID NO: 1622 - protein, 542 aa, unidentified
  REGION 1..542: note = Table 20
MRTVKRVSEQLNIGKWQQAEALVRAYADEKQSHLDFYLTGTNFTTALTDRIRRDELVKAKYVSPFGPQGCAWKLALKDAHETVVKWYAVFAEEIRTRIPALKWTESQRHYANWLIYSEPRLATLILVRAPLNPAIKLTVAERKQVQAYIRRTFRKLRGRAPQVRIARSLALDLGMYTVRTDAFRQVIEVAGLTPGKRIAIVLKGQTTIAGNIRLALDPTTRCIHIHTGFNLPEVAALTGDVAAVDAGLTEVFTDEEGNEYGKELGPTLLTASDQLCGKGRKRNKLHSVKNKAIAKGNHAKAARIVRNNLGQQQQQKWQGKLKSTVGRIMNHAINQIVVTRQPRIVVTENLDLRGKTHSKQLSRRVSLWHRSIANERVDFKASVKGFHREQVNPAYSSQLCPMCGSLDRRNRVGDAFQCLKCGQAAPSDRIAATNLKARQNDVEITRSTPPAQVKVILMTRYKARLESRNASLPSEKGAASTDVRLVMATVQGQTLETRATTPVQRRGRTKVRLAGHQTAAPSRPSKNETASGKTARAKCNHF

SEQ ID NO: 1623 - protein, 520 aa, unidentified
  REGION 1..520: note = Table 20
MQQTVRQKSLPLNNEKWARITETAEAYARQKDAFLVEYGHVKYLHYLGEKRKLRDELVSAGFVSPFGLQARQWKLALEDALYTLERQWEAAVVEVKERLYCFEALTDEEKHYAFWLLYRHEKHSRNWKRIQAVFTGEDIVSEEIKLDAGGRARVRKYLKRVFRRVLGKKPRVKKARSFAVDQQMYRVFATGKRQYIAVATLTPGERVVIPLAGVHAVEGNLRVVLLHDENCVEIHLTREPRTYPPGEGEAGIDLGVTEVFTDDTGRKYRPEYGEALQEMSNHILDKSRKRGKLRALRRKFLEQDPPKGRRILKHNLGLIKQTRRNKKYRTRCENEINRAFNEFYKERRPKIIAYEDLAHLRGKVGSRGLSRKVSGWQRSIIKERLGYKNYIYSVTDPGPVNAAYSSQTCPVCGWVDTKNRCGDVFKCRKCNFEADADNVAALNLKLRLHDEKITRYMPYKKVKELLLQRYYQKQHMTDYVILRCIINRFGNLLIFYKELLRICLERRQPFFCLLWRCRNV

SEQ ID NO: 1624 - protein, 255 aa, unidentified
  REGION 1..255: note = Table 20
MVLLPDEQAVEIHMSREPKTYPAGEEEAGIDLGVTEVLTDDSGKKYRPEYGQALQEMSDHVLDKGRKRQKLWALYRKNRERDPGKARRIRRHNLGLVKQHKRHRRYRAWCENEINRAFRAFFRERRPRVIAYEDLSHLRGKARNKGLSRKVSQWQRQAIRGRLEYLCHVYSITDPGPVNAAYTSQTCPCPGCGWVDGKNRNGDLFRCQKCGYEGDADHVAATNVKGRLRDQEITKYTPHKEVKRILLKRYWENHA

SEQ ID NO: 1625 - protein, 271 aa, unidentified
  REGION 1..271: note = Table 20
SSESRKLITTQESPTINNIIGIDLGYSEVFVDNNGNHYGIEFGKHLQTKSDHLKQKNQKRNKLFQLAEKYINQNKLKKARNIQRFNLGKIKYNKLISKQNATSECIINQAINQLISKNPNKIIVTEKLDKLISKNLGKNWNRRLSSWIKGTIRERIEFKALAKGFSHKQVNASYTSQTCPTCGFVDRKNRKQDKFGCLNCGHEGHSDQVAATNIANRYLDPQITIHTPYREVKQILLARFHRQLESVATFCGKTGTVTDRTLEPLATVVNQ

SEQ ID NO: 1626 - protein, 513 aa, unidentified
  REGION 1..513: note = Table 20
MRCVKQRTLKPNTRKQRDIDALINAYSREKESWLRYFDRWKNISFLGKPRLVRDEKIKEKYRSPYGLQARHWKLALTDAIETWDKYWKSLFVIVRSHVARNSHLSEDEKHYAYWLLKGYDQFSQMMQGEYPIPPFSLPVPSLKRGASALRRLLKKHKKNPPQLKRKRSVRFDADCYSSFEHNNRWYVSLMSLIPGKRIVLPLLGQTGISGTVTLVCKDEGLDLHVSCLLKPKKNASSAMEAVDFGYTEVMTDTEGKRYGTVFGKHLTKISEWLHQKGKKRNRLRAIGENKKNKKMRRCNLGRKKQTNVTRRAKATLLKEINTGINQLIRLKQPAILITEDLRHSFTFNKSKKLNRKLSSWLRGELQDRIEFKALAEGFRHEQVNPAYGSQSCPACLFVDSKNRTHDNFTCQYCRYEDHADRVAALNYFNRYGDLEIGRYTPYRQVKTILLERFHRRLELGLSKTVTGRTLDTVAGVHPPPLSIQTASLDGKVVYEPGECILANRAVTQRANRK

SEQ ID NO: 1627 - protein, 498 aa, unidentified
  REGION 1..498: note = Table 20
MRTIRRKSLPLNKGKQLKIIKIIEAYNKEKEIWIQFFINDTSSIKTHRKIRDKYVSQKYNSQYKLQARMWKLALIDASEMMDKYWMSLLPKINELINKNKNLTEVQKHYCFWILMNYERIEKLFKHKYPIPSHFDIDKKAVKKAGNYINRIIRNHKGKFPSIKKSRSFVLDADCYKIFENNGRQYISIMTLDKGKRLVIPLLGNTPIKGNIKVVLYKNYIEMHYTAILKPKKIKNEYIEAVDFGYTEVITDSKNRKYGIEFGKKMSSYSDKLNIKMKQRNKVHALQKKQSQVSKRKNIRKYNLGKIKLDNFSRKNKAGIEQEVNFGLNQFFSKQQPQVLITEDLRHLFSFGKIKSWNRKFSSWVKGFLQDRIGFKALARGSCHEQVNPAYGSQTCIKCGFVWKGNRVLDRFKCGFCGHEDYADRVAAMNYKSRYGDKEITRYTPFREVKTILDERFRRRLETSYEGTVPGRTSDTVSIALRTVIDTSVVQGGFLAVCT

SEQ ID NO: 1628 - protein, 1176 aa, unidentified
  REGION 1..1176: note = Table 20
ARSLGYLVVGINEYYTSKRCPKCENFVGRPKDLRRSYCSKCEKYIHRDSMAAHNMEEQMDVKMEHTQSPLKDSPPPEERHSVNDVVWLSKKLMPIMGDLEEQGFGIFQWEIKDWRTLDKRVVGPEFSVGGYKWQVDNERILLFPQGNNAQELVSVYLDSAESRESPDLQWHACAQFALLMSNPNDPTVYTASQAHHRFTPTDADWGFTKFHELRRLETPLDSRDIPLMEKGHTVITAVVRVYDDSTGVLWHDFVNYDSKAMTGYVGLKNQGATCYMNSLLQSLYFTNYFRKAVFEIPTVDDEPSKSVSLALQRVFYQLATSSASVGTTELTKSFGWNSLESFMQHDVQEFNRVLQDNLEGKMKGTHAEGAIQNLFVGKMKSYIKCINVDYESSRVENFYDIQLNVKGCKTLRDSFANYIDVETLDGDNKYHAEGHGLQDARKGVIFESFPPVLHLQLKRFEYDMERDAMVKINDRHEFPLEIDLAEFVSDSDEKKKAGPDDYKYSLHGVLVHSGDLHGGHYFALLKPEKGEGWFRFDDDRVTRAKLKEVLDENYGGGEPLENLGQMSLAMRQLSRHKRFTNAYMLVYIRNNSMDDILKPLTTNDIPEHLHRRIDEERQAMENKRRERDEQLQCLQARLVTDTDFREHDGFDLFDPFSKAGKTLKVRKQDTFASFKKAVADLYEVPMDHIRIWTLLRRQNDTIRTDAPIPDTELNTPMETIRFNYGLRTQVDIKCYVEFADNLSGSPNGKTAPFQSEAQSGNIMIFTKYFDPFTQTLEGVGKLYVQKNGKVGDIVPILNERKGFPANTPLNLLEEIKPTMIEPMKMKSTFSHCEIQSGDIIIFQKELTPKEKTDLQQQNVRYTVASHFNYLFNRIVIEFKPKKEDDPSLETYTLELSRRSTYDQVAATLAEKLNTDPLKIQFFMASAPSGLPKSSIKRATNLLLQEMLPNNAHQSNGLNVLYYEKLEISIVELESKRSFKITWIGPTLKDETIHELHVLKTDTMNAVVDALLKSKLKLSPEGSHKLRIFAAYNGKHVKDVSFQESISSLHEMLTIYVEEIPIEELEQGDDEYVMHCFHFQGDTARTHSIPFRAIIKNGEPFANTKDRIRARLGMNDKEFAKIKFVYYRPNGIVVPLNDGDVVSDTEYIQGDYIGLDHVDKSGRNNRLGFEKAIFIRG

SEQ ID NO: 1629 - protein, 575 aa, unidentified
  REGION 1..575: note = Table 20
MKTVNSLPLTVTRLFAPIPPETQAELDLLCELYGRTLQKFQMAFCTHELRQKVWNWRAFRDEIVYCLNLPQPKFETLLEDLKAQGKRAQTELLKFLRSQQSSEGPHLQARHWKLCLEEASQGLRTYWQTVKAELKRQWGRFFGRYSNEPKTLIYINWILRETEPQFYMASQGKVPYPQPPKLNPKEKDAEERYRKRLTAFEKLKKDIETVKRYAVAKRVYCAIKKVRKKIRLPHCRLTSNRADFDSSCWRLNSKDQNELRLMSYAEGAKKRQLIALRILGKGALRGTIQLIKKLDVYELRVCREALCKPERTEGEIVGFDTGYTEVAALSNGAFIGQKFGEKLTRYSDYCKEKGQKRNKLWAKAKELESSAKEKDRRKAQNIFKHNLGRKKHNAKYRRAQDSIKQEIDKAINSIVQGKGDGLDGVKVKELVIEKLSAHMGKTRSKNWNRRLSSWARGYIRQCLEQKCKQFGIRLTQVNACHSSRVCPACFYPSKENRVSTDRVKCRQCGYEGHADTCAAKEILRRRSGEIPLYAPPGKVFEMLMVQYKRGLEVPQAPPFSCKTQLNESEGEKKSL

SEQ ID NO: 1630 - protein, 569 aa, unidentified
  REGION 1..569: note = Table 20
MSSLERTLVRQFEMPNETDRVSLDRMCSSYGFVASKFLFAFQTRELRGEVRDFRAFRNKLVAALSKKPVEFNQRLADLRTNGKAAEANLLTLLRELKETSGPHLQVRHWKLALEETSKMALTHWKSVIAEAKKKLAHTLKHFNDQDRHYACWLLCGVNRQFFELLDGRIPVPNPEVSFDRNYCLSYDRPLSSKALRSIAGVVRRTVNKVRRDSVCYPRTQAFHNRIDFDASCYTVRSTEDAQFLELMSLQPGKRISLRLKGRSKIRGTLQLIRDTAGTYSLRVYVPQQCEEKRKTGTVIGIDLGYTEMMATSEQELLGTDLGQYFSAISDKRRKNSEGRNRMHSLFRNLLKKPNKDNLAKAERIRKHNLGRKKQRARYIRDIGVIKTIVNRELNLLFTRKTNPIKQIVVEDLSARMKVHFGKKWNRRLSGWMRGYLQERIRYKAKKHGIEVSEVNPAYSSRECPRCHCTDKKNRYGNSFKCSLCGYHGHADLVASLNILGRLGDKEIRIGMSPSRVKAVLDGRYVGWKSLNHTVSDKISGEARVVDESPRSASSKSELRSNVQVCTASR

SEQ ID NO: 1631 - protein, 567 aa, unidentified
  REGION 1..567: note = Table 20
MKPDFPNYVYLKESRVKELCVNEAPAYHVGTRAVDMEHLDPEDEAVLIELLLRWNKQVNVFVQKFESSEWRLFVIGNGYRKLRDALVAGKNPTSYFGLQGRQWKVALQFASSVQSNRWRLAQTNALKSIKKGSRWVALSKDAQKFVRRMLNSLSIDFFDLMDGKTPNLSDREKGIPDIEKLCAWGRHKVQDCLGKIPEVSPTLIRFDSDSFKLEEEDGRQYLSLMSLTPGKRIKLPILGYVPARKIDGKNKLSTISVIKTHGTWKVEFQYSLKKPDGSLRIKPLLLPDAYRLKDGFAVTRALDFGLTEPLTTHDGIRFGAHESRPDLGKRSNGRTLEIPGLGELIERYAQYLDRKQAERNRFEAMVRDPDTDKKKKKHIKKNNLGSKRYEAEICRLKAAIVCCINRAINNLFARCPANVYVIECLSEVFDLKGISKKVRSKLSKWCRGIIRARLYYKAAKRGIRIVEVAAAYSSQQCPICGHVDRNNRHGDKFHCKACGYIGDSDQVGALNCLKRAESPKYERFMSTEEVRKLCREEYLSYCKAHNIAPLPEARPKPKTKPRSRPRC

SEQ ID NO: 1632 - protein, 745 aa, unidentified
  REGION 1..745: note = Table 20
MIPIKSRSEDKAAPEPSSPKKTASSLKTPGNKGTSSKKKSSDTPTQKQLDEALAFEKAVLEMASLENHEALHFIPSALLGTLDVVNDNPRYVTTTRWVDMEKLDPEVEKTLDDLIERFTRETTKWVNVLDRRELRSYCIGDRYREMRDALVAGTFGPLPGKYAPATGLQARMWKAALQVASSVQSNRWRKAQSEALSELRKRPVWSTLSDAERAYVRALLNELTDSFFYMMNTGNPEVVGSWVKVEEEKPQKPKQKTKAKAKAKAKTKTKTKTKVKEKKFEGKRFDLPDAAREDLCDLIRHLVHEHLGRTPVMSSARTLWLDTGCVDVLEEILESVEKASASSKEEAAENTATAAESKAVDAVNAVKAKASGPRTQYLNIMTTRKGQRVRVPLKGFVPGSLFDGKPREDNTMKLDASTIRIIRTERGFKAVFQHDFKTLDPLPVPPPKTALFEAMNLPATMKLLRIVGLDLGVTEVFTDDDGNHWGGSEDYVVEPGRHRKGMMDARQDEAANGQIKTCTGYMPGLNALMRKFAQYRDEKLRRRNELRDQAKNTKDPVKRRNIEKNNLGSKAFDKKCAAYKAAITQIVNRAINRLFLKNPADVYVLECFGSSFDLSGFSKKTRRYLSSWVRGLIRERICFKCSRRGVKVVEVAAAYSSQACPVCHAVDHRNRSGDHHGCDFCDHEGDSDAVGAYAMLTRAANPKFRRFMTRESVLEVEYGLHLAYCAKNGLEPLPEFKPRVHKRSS

SEQ ID NO: 1633 - protein, 549 aa, unidentified
  REGION 1..549: note = Table 20
MHLDPLRPSEPDPHIIDSDRIEALEVDNSENSVRTIIRLIDVEALGSFEREELDKLRRAFGRERARFFQILRMREHRRNCYGTGYRRIRDAIVKEDRMARNMGVDVQAKHSGLQARHWKMALQSAAIVVSNYWRLAQANARSMIFAKEWTKDLNDVEHFYIQMMLSKLRPEFFELLDGKNPHFERFRMEEIRDLPKLCLRIRRTVRRALGSFPSPGRSVNVWFDQSCYKVQNENGVECVYLTSMTKGKRIRVELKGIGKVGSVIHLLFRDDGKLELHVMEPLKKKPLLNVPVIPEEKYYSRAFDMGLTEVFTDDEGNHYGKNLGELLSQFAETLNRKLTARNRLQSLARNTTSKRKRRNILCFNLGSDRFDALKARMKAQIRCCINHALNEMFKKAPADAYIVEELSANFLQDLKLPKRVKRLLSGWVRGIIGERLAFKAAERQVKLVKVAAGYSSQTCCQCLFTCRENRKGDKFKCMQCGTVYQSDHVGALNLLFRVGRGTWPRKMTKEKAWELSRREYEECCRLRGVEPLDDPHKAQKKVKKTAVAK

SEQ ID NO: 1634 - protein, 562 aa, unidentified
  REGION 1..562: note = Table 20
MLCESFTSWRRLHAVKDCRLKRFKHAPAAQNQVRTIIREIDASALAPEDIRLLDDLLDGYGANVRHIMDLLKTRRYRRFCHGNLYQEFRKTLRAEHRAMQEKLPEEERAAHPLALGGMQGKVWKVSVEYACALYDRYWRGIQVRALQELRRKPFYQALTRAEQYYVACLLKSTGGMFFDMLDGRVPKPPAFPKSIQGSVAHAGALCAKVRATVRKLSRHLPVHGQNRSCVLAPREGYHPLRKSAPGDADGISIITAIPRRTVKVRVKGRGPIKKTIVLVRDGDRFFLHLSVPLKVKPLEKVPSAPAGYSHCTALDMGFTEVFTDDGGRQYGGGLGVLLTRMARELDDHCRKRRALWAAYRKAGPRKRQRLLKFNLGKKRWESRRERARREVENLINRALNHLLASRPSDVYLVEQFAESFDYSGMSREVRRRLSGWMRGVIADRLAFKVAERGARLVYVPANYTSQRCPVCSFVRRDQRSGDRFHCKHCGHKAQADGNAALNLLLAAHEPKIKRGMTCAQVDTVYRTEYEKKCRTEGKTPLPRRFRTSKRSAKGMCQKGNVK

SEQ ID NO: 1635 - protein, 586 aa, unidentified
  REGION 1..586: note = Table 20
MRLNDFAVRSALNYVPEERINQFETSEAIAHHNVIRHVNEASLTAETRRQLNDLIDSFGQEVDNMLAIFEKKSFRRYCTSNGRDVSPRKLRNRLVRERNDAMKADPVSKDAPLESRPLQNKHWKCVVLHAAEIALGYWTSAQARTLIKLREMPFFSTLNNAEKHYVHYLLCRPHNDFFDLLEHKIPAATSSKFKKVRNIARLCSKIRTEVVAQAGSFPRLHGRTYCLFDSRDLFSFRSGSEDVQRVELIGKIAGKRITVDLLGKGAMDRTVRLVRRDGVMTLHTAPKIHHLPLKGLPPKKAGVFFCHSFDMGRTECFVSDSGRSYGDKLGEWLNAYGDWLTVALKARNPYTAKMNCADSYEKRVSIAENNLGKEQWNAQTAHFRAEIEKVINQAINEMIANEPAQVYILEAFSNSWDLSRFPPKVRRMLSGWVRGLIADRIEYKTSVYGIKLVYVTASYSSQRCPDCSYTDPKNRSGDSFHCRACGCTDHADHVGALNLLLAAHDPSFEAFMSKDMVREFYRAEYEEGCRISGTEALPVPQRTARKPKKSGRKTRRNPPAAPVRRNAEIVQNKGNNPVKSNINNNL

SEQ ID NO: 1636 - protein, 527 aa, unidentified
  REGION 1..527: note = Table 20
MMEQEEKSTDPHLIGELEPSASLPAYRVACRCLDESDCERWHGELEALFDAFGRQRQVFLGMLFTRRDRALCLGSDWRKLRDRLVAEKYRSPFGLQARMWKMALQSASGTALAWWSLVQKRARNLIVWKAWFKKAKEAEKHYVRRLLSAPSRDFFALLDGKYPRGLAAEELKQIASRKGLCKAILRAVRLAQGRVPRNSRFSSVWFDSSCYSSAERGKDYVTLSLMTLTRGKRARIRVKGSVPVRGTVRLVRGPDGTIRLHVQYPVKPSSVKPLEVPQAPEGMVFCRALDLGFTEVVTDDGGRAFGKGLGPLLQDYAAWTDRKVAERNRLEAIAKRAGRAKRRRMARCNLGEGRYHRTIELYRTRVRNVVNEALNRMFSESPADVYVMEDLSHRFLFTGKFSMETRRMLSGWVRGVIRKRMLFKSALHGAGIAYVPCAYSSQRCPVCGYTARENRHGDTFECRCCGHRAQADENAARNLLERAGDSAFGRRMRKEEVLALENSRHEAWCRRRRKQPRAEPTSVSGAA

SEQ ID NO: 1637 - protein, 602 aa, unidentified
  REGION 1..602: note = Table 20
KRIESLALENDVPAYVTTVRLLEDVEENTSLKLDRVLRAFGRQVALFTGLFSSREWRRHCDGNGYRTLRDRLVGPVSEYLKAHPQNTKTAGDKSPDTSKVDSFEVEIPGKEPGKPVRIRIFGLPARLWKLALQQAGITVANDWRLAQQRAKERIEKTDWFRKLNEAERHYVYLLLFKLNDDFFDLMDGRTPTFKWHSTFNMKKVRHASGLCVAVRRAVRAEKTQTIRHAERRSVWFDCSCYTVKTEKGKQIVELMTLEKGKRAKIVLRGKKKISGTIKLVKTSTSWTLHTLAKPKLKLLPQTIKEQNGKLVCVAMDMGFTEVYTLDDGSQYGEGFGKAIREEAELLARALEKRSRLLALANNTQDKKKRRHILTCNLGSKKIDRAIARHKLKIRNIVNRALNRIFEEHPAHAYIVEELGRRFELQGFTKATNRALSSWIRGFIEERLCFKAAIHGMKLVKVPSAYGSQRCPYCGCVHSDSQKGDRFKCVDCGREAHADKVACLNLLCRVRDCSFKARMPKEAVLALELKEYRAQCDRRGTEPVKYVPRQSRRPTKTKKSQQLSSLCKPNSALVCTRHAMLINKAERTSKTNHGNTCKTIWNI

SEQ ID NO: 1638 - protein, 471 aa, unidentified
  REGION 1..471: note = Table 20
MKRTVKIKANCSNNESEILLIGTIQRNIKNYVWSRYSGIGSLLKQSGWTIRDELIQKDLLSKKITKIFSRIAIEKSASTIKADWTTTKKKVKNAIKQNENLTEDDKRYLYLCLKHTPTLYNILNYKKVDYSTDYLKDFKIDVHRLNNLLRRYIRRYKTKFHTNKTNIIIASNIYSFDSNNKCLSFTGKKKNSRIETTLIGHVPKLKGTLELVKNQKDNQYYLHVPLDRIIVKKNMTDESEILGLDVGITDLITLSNGSVYGANSAELFYTLSDNLVNKNRSRLFSYKQELEKRIVIEQDLSKKSILEQKLKNLEDNNLGSKKRISKISKYKSRIASHINCELNKMVKEEDIKEIVREDLNWSSKKKNVSRKQRNRFVTWSKGVLLERLSVKLAERGIKETIVNPAYTSQVCCKCNHLGNRKGKEFKCSNCNLSIDADFNASINIKKRKFIKEIDIYTPYKEVKKYYENLPV

SEQ ID NO: 1639 - protein, 231 aa, unidentified
  REGION 1..231: note = Table 20
MDWSAVAGTLVYKNNNLYLNIIVKKDAPKQDRYTEKEVLGIDRGINNILVCSNNQFFNSKKLKAIKGRYQYLKKMLQSKGTPSARRKLQKISSRERRFVTDTNHRLSKVIAESDFKVFAIEKLTRMNHKRLGKRFNRQLGNWSFRQFETFLEYKSEALGKKIMRVNPRYTSQKCSNCHKIHKSNRNGSWYSCNCGFQLHADLNASRNIADIGMSEISRLSVNQPNVMVRSQ

SEQ ID NO: 1640 - protein, 468 aa, unidentified
  REGION 1..468: note = Table 20
MSFGGKGVPAGHVVRTFRAKVMATPGQRRRCLELLEGAGDAWAFCIDRFHERRRNGLGNANSLGQLWPDQKAHGPFGELSAHCAQDVTKAWSAAFFESMRRRSAGQKARLPLRKRHRVPVTWRKGEFYFPPRRQGGRPRVVLLTRRGSANVELRLSHDDPYDQQGIRAVRLVEEAGALFVDLTAFVAVVPAALDEAQAAGVDVGIIHPLALAYRDRALVVSGRALRAEEFLHLADTKDRQRRQSTKRAPVRAGPGKPRQSGSLRWRRLAAGQRRHEARNRRVLKAGVYRAARLASTFVVDEARAKEVAVGDPRGVKDRHAGAVHNRRTHRWALSFTLHTLGDRLEERGVRVVLLDERGTSSVCPLCGSRAIKAGRLLKCTNPPCGKVHHRDVAGAQNVLGRFGHAPKAIAHLEHRRVGSPPRRDRRRHLHDHLRSETRGPVGPARTRATSTAASVVEESLVSVARTPS

SEQ ID NO: 1641 - protein, 190 aa, unidentified
  REGION 1..190: note = Table 20
MAGMVPGRQGRPAPISGGRQPPGGASRDPRLPIPPLATSPGDTPPSYAANHASAQGTVRDKAELAGMGVALVDERGTSSTCPQCSTKVAKPKGRVFACNRCGHGEHRDVVGARNIAARGGGSTSAPALVTHRRAGRHLPGRTRRDPRRVRMDNRSGLWPAVARSEASMSRSSSDSSSGEEPLTAAQRAER

SEQ ID NO: 1642 - protein, 553 aa, unidentified
  REGION 1..553: note = Table 20
MGTRHPCSASSGARGHGVGCGTPCARSQIRADRLARENPVPCLDASPAEPSRLVRCPLTFAGLAAGGFVVPVVLGLVVPRRRDPAAPRVVYRTARVALRVTPGQRRRCFGLLRSAGDVWACVLEVNAWRRRRRDAPLSGFQELCRELAASGPGTFAELDSTGARSVLRRFSDAWFAAAKRRKDGDVSAGFPRRRRGLVPVRWYHGTFALDGRQVRIPTGKGAAPLWVRLAREVPYPLEQVRSITLLCEGGRLFLDVSAEIPIATYPTGTGPNPARIAGVDLGIIHPYAVAGPDGAGLLVSGRAIRAEHRMHLADTKARRRAVARRAPKPGQRGSRRWRKHRRRARMVEGRHRRRVRQAQHEAARSVVSWAVERRIGELRVGDPRGVLDIKAGRRHNLRLRQWQIGRLLQVLTDKATLAGVTLRLVNERGTSSTCPACQRRVPKPRGRTLSCPHCRFSGHRDLVAAATIATRSPGGGPTTPTAVVLSEVLTHRRAGRHLPGAGQSRRDPRRPRTARGSVGPRRPAPPPGGESLAHKARIHNDHRTPGERSWTPH

SEQ ID NO: 1643 - protein, 166 aa, unidentified
  REGION 1..166: note = Table 20
MTSLLAELPSKQELFGGRLPLDHLLSYAAAIDPGLAHRAAVVTTDGNTLLTEGRYSKPDEKFIEEIVDFLSENRILVVTVGDPQGQFEFPIAALRHACWEKGILPVLGSEYCTSRKCPRCHIHQQFEDRIFVCQRCGLTLDRDLAGALNIYQRVFGKRSRLPEGGL

SEQ ID NO: 1644 - protein, 814 aa, unidentified
  REGION 1..814: note = Table 20
MAIRALKLKFTPSKALKKQLVLMSWAARDLTNILVAHARYIREHKGLACEVVPAQGDSCTLQTWDSESKKWIDAPREGNGVQHAIVPCMVPITQKPKKGELNKAKPLIKPHGETAEQRWEVGLGWEILQALYSGKGCLWPRTNTDRIISKGKRKGLTEVVEVTTQQKPKAEYSLSFEYDEKPHTVTLSAKTVGVITRNFDGNFKSFFSNLRRGDPNAKPPYKERNYVPIVFNKDEIRWEGEGLRLGSVSQNKRHQGITIAFPALKKLKGQQFQDAKVTRSLNGEYWLHLTHENNVEKNPELTGIGAIDFGQKRAIVIANQKGETATISGNNICAVKRVRDRRLREIGRLRSRTLRGQARQYLSKNEQDKALEKNRIKPGSGEKYVRSLVAQRRRDGKDGQGRDLEAIGQKQPGTPFRKRSRRQFKILEASRKLSARSRRALDYANHCVTRAAVDWAVENKIGTIYVGELDNIPKGRKKGNRRMKQVKRNSLWEWPTQTKYLADKLVEAGGIEVKKASERFTSQKCPQCGTLNKPSGRRYHCRPNKGGCGWKGDRDQVGAVNFLNTCLERDIGEPGNLVPGRNYILRISPAARKRKNPRTAPAGRKIRSGLPGCVGTPIGRHASGRSSPASSFEPAEETAKGHRASDRNDEDGSDLHAPKTVRTPRCESGIGIYSKSLGLMQVSAGSGDCEKSSPATSGIGDTSSQPSTLKTGAIKADSGITQCADVEVFSSNIAEEQPQTSSHKGKRKPITSQKIRAKSKTLTPSEVCNNCEPPTRKKAESKIRARTKSAQSESAIQLSLDLWGTAPEIDSWNS

SEQ ID NO: 1645 - protein, 621 aa, unidentified
  REGION 1..621: note = Table 20
MTSQHYQTRTLKIEFHPKPQQRQLLYGMMRSSAMIYNLLIDHLAYKQSAYKQAREEYPDQPAWEVDPYVDIRRKGWADELIITLITQQSSIYPRQLVNKPAKQGKDKGKERLVVATEKNAKPDYGIPAQSKVVLTQDFEANIASYFTHRKNGDTNAQLPRRYKGLHTLFFTNQLVKRSGDRLILGAKPYVLKLRVPELLNISIDGDVKITRSRSGRFCLHITRKLPVEPNPELIEVAAVDFGQKRAMVLALKDGTTATISGKNICALKRERDGRYRGINRKRSRVLKGQIRQYLSPDEKATYRELQERDNERQRQGLKRRGSDIKYAFRIIRQRRKDLGLKKRSRREMRLLRSQHKAADYYRVRLTYANHCVTRAAVNWCVENKVGKVYVGDLKTLPKTRKKGKRRIKQVGRNNLWEMPTQVKYLDEKLLLAGGEGTETASEARSSQVCPNCGRRHKPRNRVYYCNPRKGGCGWLGDRDGVGGCNFLSSVLYGACGAIKPAQNRTLRLAPAIRQGLRMPTPDGSAVCEPAEDSAKGYKSSDLQESAVVADSVAPRTDRNPATSGKTQARGGMGVLATSDPSELVTPVVSSQLAKTGVDRPKRRSLKRLPEDHIQLELWESE

SEQ ID NO: 1646 - protein, 392 aa, unidentified
  REGION 1..392: note = Table 20
YSQVRQETARFWNDLMKLHKYIRKRHWRWPNASQLEKHYKKKSYGIHSQTKQALIAKFLSNVSTTRTNRKNGRNARYPYKLKKNFNPIWKKTGIKRQGRLVKLSLGSGNGSIEFTLPKSIVALLENESHSLQQVELGYFEINLTLRETLEDVPSHDFQGHAAIDFGLIHTAVITDGKTALSIVGRALRSVNQGYNKQLARLVKKQSKCTKYSRRWRKLQKRKKLLAKHKKNYLRNFYHHVSNLLVDYCVENEIKTVFYGNIADISRNKKKKMSKRNNQEMSHLSLSTLIRYCREKLNEQHIEFEEVGEHYTSQTCPSCGHRHKVKGRVFHCKQCNFKAFRDEVGAYNILNKSLNNNVIKIGEYKPTGHIKYLRPIVIGNRSRGDDTPLQLAA

SEQ ID NO: 1647 - protein, 447 aa, unidentified
  REGION 1..447: note = Table 20
MNRVRISNRFYMQSTMVQQFQIKLSPSNWVKAREARLETGRLWTRMVKVHRRCRKYHQPWPTQSKYEKHYKGKFDLHSQTVQAIIGKFFSNIETTKTNRKNGLKASYPWRERKYYNPVWKGQSVRLKGKNLTLPMGKGRSPLKIKLPHAVTGRVVQVELGFNTVYLTLSAEIPVQPRLFSRPGAGDLGVCNLIALTDGEETLIISGRGLRSIQQGRAKGIAALDTQIAKCKKGSRRRKKLVKAKWSLRRKADAQVRNLLHHAANQAVAFAVKKELTHVTTGDLGDINRGTKGKKKKQNNQDVGNWPHGQYTRYLNYKLQQVGIGHAKQSEAYTSQTCPACGHKHKPKGRMFRCPKCKFTALRDEVGAYNQPNKTIDNNIIPGRCIPTGKVKYLRPVRLKRVVPRAVDAADTGPTKTIVAVSRSLGLANGSTVYQKAFALATVAVASD

SEQ ID NO: 1648 - protein, 464 aa, unidentified
  REGION 1..464: note = Table 20
MQETTVFTYRVSLSPTEWERASDTRRAAGDLWTRLVKIHRFCRRRHWPWPTEPQLKAHFKRRFPLHSQTVQAIIEKFCATIDGVRTKRKHGDKQARYPWRFRRYFNPIFKGQALKIQGQHLLLPLGRGREPIRVHLPLAMPSGTIAQAELGYDEIYLTVTRTIPDPVPVPSSKAGGLDMGVIHLGVVSDGEEALAISGRGLRSVKQGHAKAQAKLRKKRSRTKPGSRRRKRLNRAQHRASQKVDRITHNALHHTANQIVAFCLATGITVLYAGDLGTLNHKKRHRRSRRTNQEVGALEFGRLDLYLEYKLRRYGIQLIKISEADTSQTCPRCGHLNKMAGRTYRCRACDYRAHRDGVGAVNILNKGMYGAIRPGEFLVPPRITYRRPVPLKRALRRSPAEPRHVAGGISGGESGGSLRGSLDPRRSHSGSPRISALRAGRFKSRCLARSSQGNGPRRFPDARTR

SEQ ID NO: 1649 - protein, 420 aa, unidentified
  REGION 1..420: note = Table 20
MKSNRVIQIRLQVSTTLWQQMTDARLESARLWNKMVKLHLRFRKHNRKWPTQAQFEKHFARKFRLHSQTIQALIGKFFANIDSTCTNRANGDKRARYPYKEKTYFNPVWKGQHIKQDNNYIILPMGIDPHSRKRNLAICVRLPEQIPQGKIVQAELAFGKLLLTIQNEIEVEKPKVEKIAASDLGSIHLAVVTDSTNSLALVGRGLRSINQGKAKALAQISQLQSRCEKYSRRWKKLQATKRKILRKTQNQTHNLLHKAANEIVNYCKEKEVSKLVVGDITEINRNKKKKSSRRLNQEMGLLSLGVFVGYLKYKLAAIGTELESYSESYTTKTCPACGHKHKPKGRQYHCPKCGFIGVRDEVGAINLLNKFLNKGEIKPQSLIPKGNVKYLRPVRLKDFAKRSSPTDIGLPSIHVLCADG

SEQ ID NO: 1650 - protein, 433 aa, unidentified
  REGION 1..433: note = Table 20
MSLTSVSKFNIGQTTPLQTELRRESARLWNDMVKLHKFIRKRRWKWPFRGDFEKHFKSKYRLHSQTNQALIKKFFANIETTSENRKAGDKKARYPYRDRKHFQVVMYKASAIKRKGNRVILSNGLGVKKLIVRIPKDIPIGKITGAELSFRELRLTIKQDIKTIKSAGSNVVAADLGVIHLAAMTDGETSEIIVGRGLRSLIQYRNKKLAEFSRLLSKCKKGSRRSRKLRVSKAKMLFRNDNQQRNLLHHASKQMIDYCVKQQAGMLVVGDCINMSKNARKKKKGSRRSNQMNSNNPLGQLLTYLKYKGKFQGVELDKIGEQYTTQTCPKCGHRHKPSGRNYQCKNPECDFIGVRDLVGSANIKNKFENGRIEKGYLLPPLVAKYRRPVKVPVIRLNCVVHLTDGMLLDNTLDAAQALSSAGGKTPSELFHVA

SEQ ID NO: 1651 - protein, 498 aa, unidentified
  VARIANT 78: note = misc_feature - Xaa can be any naturally occurring amino acid
  REGION 1..498: note = Table 20
MAQAHGSRDALAIFKRIIAGQQERIDVVNDGEMSKISYKTERERPSPSNGRGESDPARLASHAIFYRLSGEEKEETYXSPTLLRRLKAAQMEAARVWNLCTQTHKAARVTHAQWPGQRELEQATKGRFALNAQAVQQIVHAFLANVKTTRTLRREHPEMRMKYPWREKRFYPVKWPAQAVHREEGRVVLPMGKGHPSLMLPLALPENAGACMLVWNRGFELHACLEVPQASEAPGSVQATVDLGEIHLAAVTTNSGKALIVTGRGIRSLKRQRGKQLGQLAKKQRRCQKHSRRWKKLQRTKNKVCRRAERRIRDLRHKATRKVIDFCIKHQVGALFIGNPYGVRHRDCGRHHNGRMAQWEYGRDIDYLTHKSKQARISCSTGSERGTSSRCPRCGHRHKPKGRTWACRQCGFRGHRDLVGSINMHQDAFGVHLKFPRSFTYLRPGSLRTRKRSSRADTPLVSQETCCLEQPTAQPRIADTVSPEIGSPVRVVQKPIPF

SEQ ID NO: 1652 - protein, 472 aa, unidentified
  REGION 1..472: note = Table 20
MSQSVCIIPLRLQDPRYAALRQRLFDGQREAARLWNDCVAWHYEQRAAGGRWPGKAEIHAFSKGRYALHSQVVQRTAYRLLANIDATMERRRREPSARRWLKLPWREKLFQPLSWPAQAVRYDAEAQRMILPMGRGRPSIVLNGLRLDPGHVGAVSIVWGHPGYELHVSAPDERAPEAPWNGRAAIDLGIIHHSTIADDAGHALVVSGRGIRAIKRHRGKKLRQLARRQSRCEKHSRRWKKIQARKDKLRARVKRQDRDLRHKATRLIIDWCIRRGIGEIYIGNPCGIQGGSGRKQNRRTSQWEMGADIRYLSEKAKKAGIRSSDGDERGASSHCPECRRRRKVRGRDWRCPDCGFTGHRDVVGAVNMHRLAFGTKVTFPRRSDVTYLRPGSLRKPRPASSIRLDTGLSGEVFLIRSEAFSKPSLSAPPGRKTSRERKLHAASAVRHWKRNPPSSLGGECHHQSQFSGPISG

SEQ ID NO: 1653 - protein, 416 aa, unidentified
  REGION 1..416: note = Table 20
MRSVSAIKRARKQATPVRLRVLRFRLRLGPTQAARCDFLRREAARVWNRCVELDRAWREAGLKLTAWALEKQLKAATARKAGGDFELAANTTQAVVEAYVEAVERFRRRQGAAERPPHRQKAHFTVAWKAREIQPQGNRVALACGRGRQPLVIPAFGLPWERVRQVQLVYRHGDYWLHVTLAEPAPSQRAGDSAGRAAGGDQGEVHALTLSTGDRHLVLVGRRLRSEWRLWHKVLARLQALQSRCQKGSRRWRKLQAAKERRLGRILRRIEHLECCIARHAVAWCLAHGVSTLYVGDLGGIERRAQGRRHRQRMHFWRRARLLRRLRQLAARHGITVVVIPERGTSRTCPACGAQHKPRGRVFACPNGHTAHRDVVGAVNILALGLWGELLPGRPLPREQETTYLRPDRQKAALAA

SEQ ID NO: 1654 - protein, 415 aa, unidentified
  REGION 1..415: note = Table 20
MPHYKETKKVKTGNLVMTEKILLRLDKDQMRIPGDVRREAARCWNAIVNLHRTIYNRYGIWLSGGQLKEFFKGHFRLHSQSVQALVELYEETCRRTKDLRKDGETSWRYPWRKKYYFTVTWKKTAISFKDNRICLSNGRGREPLEFKLPARIDPAAIRQAQLVWKGACYWLHLSIEKPLPEQVTGCKAAGADPGEVHSLALTDGNECLVISGRLLRSWWRLQNKELGKYQRKLSRLKKGSRRWRRLTRKKRKFLEQMRRRKEHLLHTVTSQATGWCFERGVKTLYVGNPLDVTKKDHGYRHNQRMHQWTFGQMFNLLKYKLPARGIEMVLVGEENTSSTCPSCGTKGTLRGRVFHCPNCSFSCHRDVVGSLNIRSVGIHGEIRAGQEAVLRTTYLRPAVHTTQAVDAFGPGHRAA

SEQ ID NO: 1655 - protein, 510 aa, unidentified
  REGION 1..510: note = Table 20
MERKTNHCVYNINYHIVFCPKYRRKAITGKVEDAVKQIIQEICNTYGYLRALPPTEYLSLPWLKKKYFWGSGLWSRGYYIGTAGNVSTETFANILKPRNIPGGGEIVSKCKNNQSKKSKGIDILVNKFPVYLTPEQTSLARTLQREAAKVWNTTCIVHRTIYIKHHCWLDEGAMKAFVKGKYGVHSQSAQAIVETYFECCERTGKLREQGVTDWRYPHRRKRFFTVTWKPLGINYEGKMLTLSNGRGRESLILNLPKRLSGAVIKLVQLVWHRNLYWLHVTVEKPALKKVQGGVTAAIDPGEVHAVAITDGKKSLVVSGRLLRSLSRLRNKVLRRLQKAISKTKKGSKQHNKLLAAKYRFLNNIERRIEHVIHTISAIVSKWCFEHNVNTVYIGNPEGVRKKDCGKKHNQRMSQWTFGELRRMLEYKLKRHGIKLISVDERGTSGTCPACAEYTKQTGRIYKCGNCGFAGPHRDMVGASGILDKSVNGKFTKGRKLPEKVEYARLKVKTA

SEQ ID NO: 1656 - protein, 420 aa, unidentified
  REGION 1..420: note = Table 20
MSLKKKKKKEASGDILIRKFPMRLAESERKLVDRLRIESARLWNDILDLHWWLYDVYKLWTNASDKKKWFNAKSHNLHSQTIQAIIELHEETCERTKIQRYEGNKNWKYPWKYKRFFSVKYKKSALSLESNGYLKLSNGGKEKPLYVKKPKHIDFGSIKNAEIVWHQNEYWLHLGVELTKKEKVTGKNNAGGDLGIIHAITLSNGKNHLIITGKELRSLHRFRNKTLAKLQKKISKKQKGSNARYKLILRKRRFLEKMERKIEYIEHCISKQVVNWCEENQIKTLFIGTPEGIQRGTKKKRKTRKIQSQQLSNWSFGRLTKLITYKLKLIGTEVLVQEESYTSATCPKCGTYTKQSSRKFNCSCGEKGHRDVVGAINILDKGLNGEITKGRNLPKIENTKYRRVNLVPIAKSKKYKLTVA

SEQ ID NO: 1657 - protein, 393 aa, unidentified
  REGION 1..393: note = Table 20
MAAHVCSRSGAWLGERDLNALSSGGRFRLHSQSIQALVQKLLANVDTARTSREREQATGGKPVTRYPYHEQPYQTVTWKGQAVRVEGSRLVLPNGRKQRDLVLPLPARFHAADIKQVELLWRADHYQLALTVAELPTPDEQPKPQAAGQVAGVDLGEINLAAVCTEDGRALVVSGRLLRHVKQLRNKRHAAYTERQARCKKGSRRWKRLQRQKSRASAKLYRQQRNILHQASRKVAAFAEAHGVGELAIGDVRAISDGVSKGRHANQKIAQWPHGQFRAYVTQKAERRGMRATLHDEAYSSRTCSACGFRHPSAPRGRVFRCSGCGTTLHRDANGAANICSKRVAGCFAAVQVKNTMHRQAAAVRAPTRAPVAGPKHPDPPPGDGMAPEAHAL

SEQ ID NO: 1658 - protein, 382 aa, unidentified
  REGION 1..382: note = Table 20
MVQAHAASRGNEKWLKCEDIEKQFKKKYALHSTCVQGLAQKLKANIATARQLRLLQKQANQPITAKYPYREKKYQTVIWKESALRWRADGRLSLSNQRGTPPLILALPNRYRGADICRAELTWRADHYELCVTIDSGIEIQETQSSGLVAGVDLGEIHIAAVATEKGDTLLVNGRALRSSKQLRNKRHADYTCLLSKCKKGSKRYRKLLKSKARASAKCYRQQRDILHKASRHVVNFCAANTVNVLAVGDVGDIQNSVDLGKKTNQKISQWAHGRFRRYLAYKGASLGIRVEDIPEDYSSRTCSQCKNVKNNAPKGRVYTCSGCGAIIHRDLNGACNICSRAKYGLYGCVQAHTQMYLRPIRRSRAFDTGRKLPTQVGTPRL

SEQ ID NO: 1659 - protein, 423 aa, unidentified
  REGION 1..423: note = Table 20
MSNMAYRKSSTLCTVHLIHLRLTPEQVAHCERLRREAGRCWSDLVTFHRTARAAHEWPSVREVELFGAAQGYALHSQSIQALAQQLETNLKTATRLRQQELAETGQITTQYPYHTPTFQTLVWKSPALQWQADGSLRLSNGKSAAPLLLRLPDAYHDADMRQVALCWQADHYELALTIDTGREPLPPRTEGQGAGVDLGEVYIAALTAESGETLVINGRGLRSEKRRLNKRLGHLSAKQATKQKGSTRWKKLQRQKDKERAHSRRRQRDILHKASRQAVSFAEAHDVRTLAVGDVRDIQDGVNLGRKSNQKISQWSHGKFEHYLTYKAQQVGIAVESIPEDYSTRTCSVCEHVANSPPRGRLYRCRNPKCRVLLHRDANGSANICSRAVYGCYGKVQVTRITYRRRIQFRRRSAVDTRVPSGR

SEQ ID NO: 1660 - protein, 456 aa, unidentified
  REGION 1..456: note = Table 20
MRHRDERGGRFLRLDYSRSQRGGTEIRGAGACDSCGRSCESRLMIRTHILECHLPRSEADALNRESGRVYTDTLVWHYRIYRRTGHWLSQGAAEKLNDSLSPTTLHAHSRDAAQQAFYKACKTAKATRAEGGKYPHKRKFYRTTSWKATGIRLKDGGLLLARARGLEPVAVVLPSDLATMPKTAFVEMRLVYDLIAKRHRWHLVVDDGVETPLRSEGQTLAADLGEIHPAAIANEAGDVVIFTARDLRALNQYRNKRLASLQTRQSRLTKRSRRWKKLQRRKTYLLARNDRQRRDIEHKVTRAITNHAKAEGAKRLVVGDIRDIANGKRLNRNAQQKVSGWSHGRQIAFLVYKLAAEGVALERQSEAYSSKTCPACGHHNKPKGRNYRCARCGFVGHRDAVGAVNQESQAVHGEFGHVQVGSVKYRRAFVRRSSPDTGHVAREVHPTDGSREAVGL

SEQ ID NO: 1661 - protein, 428 aa, unidentified
  REGION 1..428: note = Table 20
MVRIHYFRARIARVLADALNAESGRAYTDALVRHWRVYRRHRHWLSRKAASKLQDAEFGPAALLHSHSLDAAREGFYNACKTARTCRKQGLDNKYPFRCKRFRPTTWKNTAIRKDGEALLLSLARGNEPIRVRLPAGLCSLPADAFREVKLVYNRSGWYEWHVAVEDGREPQDAPGNRVIAVDPGEIHPLCLTDGEETLIVTARELRAVKHWRNKKLAEIQHKQAAKVKGSRAWWRLQRAKNRLLAKTRRQQRDTEHKVSRAAAEWVRECEAGTVVYGDVRDVGDGKRLHRQSQQKVSQWTHGKVRAYFTYKVEEFGIEVELQDEAYTTRSCPGCKHKHKPRGRVYACPVCGLRAHRDAVGAANILSLYLQGEMGHIQPTAPKYRQPFRKACSERSRRERPRRSPEDTGQVAVAGRHLPRCQSVEAPH

SEQ ID NO: 1662 - protein, 423 aa, unidentified
  REGION 1..423: note = Table 20
MSIRTFQFACHLPSDVADDLNAESARIYNAVMIEHWRIYRRHGIWLRQGDAEKLNDCYDSNIPSTLHAHSIDAAQQGFYKACKTTHALRHQGDETVRFPYWRKNYRTTVWKNTGVYEIENGVMQLSLARGLERLRVRLPSHLGWLNKAQTKEVRLVFDVASRRYIWHVVVDDGIEPEPFGEFVAGVDLGEIHPAAITDGREACVVSCRELRALNQYRNKRIASIDAQLTRYRRGSRRWRRLRARKARFLTQCDHKQRDMEHKIAREVISWAQKHRVGLIAIGDVRDIADGKGLGRVSQQKIANWSHGTIRTYIKYKAAEAGIQVNDKVSERYTSQTCPACGQRHKPRGRIFTCPHCGRQFHRDVVGAANILSRYEFHELGRYAAPEPKYRHPVDVRGKRSPADTGELARSGENRVRLEEAAGF

SEQ ID NO: 1663 - protein, 425 aa, unidentified
  REGION 1..425: note = Table 20
MILTWTTPATQDRDVLDALNRASAEVYNRVLVRHWRFYRKHGVWMSTSKAERVDDALGSVDSILHSHSIDAAQQGFYKAIKTARELRKQDPDARFPHKRKRFRSTLFKSSQIKRDAHQVRLALANRQYLFVTLPTMLARQEKAEIKEARLVYNRQSCSYEWNLVVEDGLEAPVIEEGGVMGVDLGEIHPAVCATPHSAAIISCRELRSTVQHRNKCLAEIQSKMSKCKRHSAKWHKYRRAKVKHRARWESKVRDLEHKISRDVVKEAVRQGVSTIVLGDVRNIGDGKRLNAKSQQKVSQWSHGRIRSYITYKAARYGIVLVLVSEAYTSQTCPKCGQKHKPKGRVYRCTNEACGFVGHRDVVGASNIWSKHSHNQVGGMYPPSVRVLHPFDCRKTKSTNTKVSGVCASSTPCERSHVAWKQLPLF

SEQ ID NO: 1664 - protein, 541 aa, unidentified
  REGION 1..541: note = Table 20
MEYRRDEHRLHLVVYHHIWCPKRRKPVLVGDLARDCRALIEAKCNDLGWAIENLAIQPDHAHLFIRVWPKDSAADVLKAVKGVPAHAPRKRYPHLRKTPSLWTRSDFASTAGNVSRETIRRSIEAQKGLEMIRTHILPCTIPRARADELNRASGAIYTGILVAHWRLVRKKGLWLSEASGTRWSDTRTDARMHAHAIDAAQQGFYKACETARGLRQAGIAEAKFPYHRKKFRTTVWKNSGIKRAGDILRLSGGGRTKEEREKRAVKVAIPPPLRDCLRFLEVRLVYDQRARRYTWHVVVENGLKPKPAPGRNVVSVDLGEIHPAVVGDKEHAIVITCRERRHQSQGHAKRLAKIQRAISRKKKDSRRRQRLVRAKARMNAKHRQVLRDIEHKVSREIVKCAAERQAGTIVIGDIRDIADGIDCGAVHNGRMSRWNHGKIRTYVAYKAAAEGIKLPPPVDEAYTTQTCPSCGHRHKPRGRTFRCPSCGLQAHRDIVGQINILSRFLEGDVGKLPAPAEIKHRIPHNLRVMRRCRDTGQGGAL

SEQ ID NO: 1665 - protein, 329 aa, unidentified
  REGION 1..329: note = Table 20
MSSSRTARSPSPRRAPTSCRSTSGEIHPAVVGDKEQAIVVTCRERRSRSQGHAKRLATISRAIARKAKTSRRRRRLIRAKVRMKAKHARILRDIEHKVSHEVVEFAAERQAGTIVIGDIRDIADGIACGTEHNGRMSRLDHGKIRTYIAYKAEAEGIKVELVDEHHTTKTCPGCGQRHKPRGRTYRCPSCRFQAHRDVVGQVNILSRFLEGDVGRIPAPADVKYRIPRNVRVLRRRCGHQPGSNLRSPGERYPAELGPTQEAAGLEPVRSVTPSRRADSVLVRSQAESVRTGGSSSSARSHSAACLRVPRPARPRYSPSGRRPPQCKRS

SEQ ID NO: 1666 - protein, 262 aa, unidentified
  REGION 1..262: note = Table 20
GKSGRLVVRVPKDIEFPGRIMEVRLMYGRLLVVCEVPDESRLAQTLIGVDLGVNTLIAATDGEKAVLVSGREAKATVQYRNKKLASLVSKQSKHQRGSRRHKRLQRRKYKLLDKTRNRIKDITHKATAIVRDEFPHAAVYVGKPFNGAAQKIGRITAQQVSSAGNAKIIQQLDYKTSGAIQVSEHYSSQTCPVCGERQKCRRTYNCKCGYTAPRDVVGAVNILSMGKHGKLVQVSQVPSQIKYRRPAGRRSSGGHPASSSKA

SEQ ID NO: 1667 - protein, 440 aa, unidentified
  REGION 1..440: note = Table 20
MADAIDLARASKARGVKGVRFPWREKRYRPLVFTAHFGWKVKDHGRLVLSLGRSRERLVVPVPEFTDRSGRSVSPDRWGEMKLCWDVSARCWALHVSYRSTDDGLPGASADHRKGGSSQSEARVLTIAVDEGIINPMTLATVSPEGAYQVLVINGRSGRAAKQARNKGVAQLQAKMSRCRPGSRRHRRLGEARRRTKERARRRLRDFNHQVTAKANSFVREQLAAHERTLPDGVRMVVRIVAGDVRGIERNTKKRRRAARSTRQQLTQWERGVQERQLAYKTGVPVEYISEAHSSQTCPYCLSRRKVRGRAYLCANKDCARLLHRDAVGGVNIHTLAVNDGAFASVAPDTDVRVKYLRAQPGWSPDQRERHGFHQRVRKRAGEGRRREARSSARNRAARSDAQSVRAMLPPACSAKRSTTTVPLPHRAPAGLSPVPPEGS

SEQ ID NO: 1668 - protein, 268 aa, unidentified
  REGION 1..268: note = Table 20
MRSPNLTVLKGGTCHSAGKARAINSQRNKAIGKLQHKISKCKNGSPRHRRLVAAKKKVNFKTKLALCDFDHQVSHKAANHVINHNTATLIVGDVRGIEKHSKAKRSMGRHGRQQLFQWSRGRQGRYLQEKTKLELVHQDESYSSQTCLACLRRNRPSGRHYRCKSPICGFSCHRDALGAINILQKAIYAEHSPIGLDTTILVTYLRAEKHWSPDQRKTHQKVQCPKARARSSAQNRALSETSQTSKPKLANSSTSTNSLVPDQSVPVA

SEQ ID NO: 1669 - protein, 485 aa, unidentified
  REGION 1..485: note = Table 20
MRRSRTDIGWRTAVVPVRLEGESYRLAHEICHHAGLMWSRCVDWLRHYWHAEHKDPSNRELRQYAKTAPETILRGLHAHVIQHLVDDVQDAVATYRTNRDRNGDKDARAPYRHHNYRPVEFTKDYGWKLSKDGRTISLSRGIHRNRRLKPILIPTPEITDPKTGLPVPPTEWGSIQLCWDLNRRRWSLHVSVPTGKPAANKGMRPMSMDEGIINPVTCAVETSSSYEILVINGRDARAARQYRDTRIDQLISKRDRCVKGSRRWFKLDLKIRKARAIADGRIRNIAHQTSAKTALFAETLGVTEITAGDVRGIEQSTRKNPAKRKKNGKTQRRRLSQWDRGRIEDHIEHKTGLTVNHIDESYSSQTCPACLTRNRPTGREYRCSNCGFTCHRDAVGALNILQKHQYGQYTPIDMDKPIHVTYLRATPLKGKALGNAPEPGLQDPGRSCRTANPRTNAPTDTHHGKTPATFSNAGLTRSSQTTLRK

SEQ ID NO: 1670 - protein, 426 aa, unidentified
  REGION 1..426: note = Table 20
MKRADGITYRTAVVPVRMRSKDYRKAHETAYRAGLLFTNLAGFRQEFYDREGRDPSRAEALGQVEDPELLRMHAHSKQAVYEALTEAVSAALRNIGEGVEGVRMPHRAKNYRPVAFTRGYGWRITPDGKLALSLGRRDGRILLPVPEVTDARTGNTVPADDWGEIELCWDRDNRTWSLHIPYTTHQPPVLGLQNVMAVDEGIINPMTCAVETAEAYAVTVINGRSARAVKHRRNTAVAALRRKQSKCLKGSRQWRRYDKAVKRAQGKAKTSLRNHNHQVSRKVADLAQEHDTGTITVGDVRGIEKNTRNTKVRRSGRHQRRRLSQWDRGDQERHVAQKTGVGLVHIDESYSTKTCPACLTRNRPSGRNYRCRTCGFTCHRDAVGAINILMRAKHGEYRAIDPDKTIRVTYLRATPLHRAPARSRST

SEQ ID NO: 1671 - protein, 398 aa, unidentified
  REGION 1..398: note = Table 20
MTQQYRTMRLLINCNKSDLKRLQMCNKESAMIWNKCIEANNKLYEENKKLHNRNSFFTLVKDIETEVICSNNKQTVAKRVIDAYKAISKARKAGRVDEKYPYKIKKYFPTEWDYNYLFCDYNKNEISLTVSRFTDANGVARNGKQIRLKFKTSIPQNIKTLKLIYEGERYYACISYLTDVEEKQPSFSNVAAIDLGEIHAITSVSDQQDQLIITGRKIRSIKQFRNKKQAELRSKMDKCTKYSRQWHKYNRAWQYIKSKTRRQLDYHIHKLTRMYTDWAKEKGISLVYCGDVTGIDVGSNKGTNVNQKLSQWEYGLIMELLDYKLRLEGIRFIKVNESYSSQICPSCGFKNKPTNRNYCCSNCEEEYHRDIVGAWNILNMNHKLDFVPSRNTKYLRIS

SEQ ID NO: 1672 - protein, 391 aa, unidentified
  REGION 1..391: note = Table 20
MYKTLVVPVKCSKEDYLYLLNCNKLSAEVWNLCLKINEEYRKQNNGKWIQRNELQKLTKQCVPLHAKGIHHVVHKYLFARDAVLQAKKQGRQDEKCPYKQKKYFVTGWDYQSIKIEGNKILLAKPMGIKPDGKKYKQKPVICYVKNIPNNIVEIELIYRNKLYLAIKYKEKTQYHQIKSDNHAAIDLGEIHSITSIDSRGNAVIITGRKLRSIKYHRNKQQAKIYQRMKKCKQGSKQYWKYRNALRNLKFKYDKKINDAVHKITKLYLDFCIQNNISTVYYGDLDSATRNIKGRVNSYVGQKLKQWNYGEIMRQLENKLSRYGIKLVKVKEKYTSKKCPNCNELNKPVGRNYVCKCGYQQHRDLVGAINILNDNYNTNIKYYKTKKYLRIA

SEQ ID NO: 1673 - protein, 393 aa, unidentified
  REGION 1..393: note = Table 20
MKYNISKEDKEYLFKCNKESARVWNECLRLNNELIKNTKESVDRSYLQTALKGFSEVLPAKAIQLIEKKFLGAIKSIQKARKVGRTDENYPWKIKKNYNTLWDKQMVYVKDNYILLSKSITHDENGKKVVQEKVKIYSKYIPPNICYAEVLYDNGLKLALNYYIESEEIKQIKSDNISAIDLGEIHSITSVDTLGNTAIITGRKIRSYSRFRNKELGKLQKKLSKCTKGSRNYKKYRKAIVKLKSKSNAKINNSLHSATKQYRDYCLDNDIGTVVIGDLSKFNMNLDRHKNRKGQKQRLSQWNHGKLVDMLTYKLSRHGIKISEIGEEYTSQTCPNCGNKYKPTSRNYTCKECGFELHRDVVGAYNILSKYINNGEITKLDLELKPLKYLRTT

SEQ ID NO: 1674 - protein, 385 aa, unidentified
  REGION 1..385: note = Table 20
MKRAIKSRFKCSREDLNRLFACNRISALVWNKILELQREELRSKNELQKALKGLYPINSQSVQAVTDKYYAACLATKSAGDNGLGNKYPWRRKKNFPTTWKADSFKLLGNHLKLSLGMFAGKRQKPIEVKLPPSTIESIKRGKVQQISLIWDGWLKLAIIIEDSKENAPTVQTEVSCGIDLGEIHSIASFSSEGNAIIITGRLLRSVKQYQLKKLAEFSRKLSKCKTNSRQYKKLRRAQRRMLQKTNTQIQDLNHKITRTFVTWAVENNVSKVYVGNPEGVQRKKRRRVVNQKLSRWNFGKHLEYLKYKLEAVGISIEKISEEYSTQTCPVCGRRHKCNSRNYRCSCSYTAHRDIHGARNILSLGLNGRISITTPIKETKYLRTA

SEQ ID NO: 1675 - protein, 393 aa, unidentified
  REGION 1..393: note = Table 20
GMIWNKCLALAKEYRSNHNGAWIPKIELKKALKNTYPFHSQSVQMVANKYIDARESARAARLKGYNNKYPWRYKANFNTQWIDEAFVLDFSNDTLQLSLGIWNHKMQKPILVELPHEIMLKIKEILSKNKDAVSEVELMYDNGLMIGITYDDGKSAKEHPSFSATAGVDLGEIHTISACANNGNSVIITGRKLRSIHRLRNKLIRKIQKAQAKCKKRSRRWKKLQRKKRYILSKSKHQVEYKTHEITKNFVDWCVKNNVAKVYCGDPDAVQRNTSGRKKKNRTGKNKKKIRKRKVAQKLSNWNFGKVMDYLKYKLAAHGIAFEKINEAYSSQTCPVCGQRHKTKDRNYRCKCGYKAHRDVHGAHNILSLGLTGHFEKICDFETRAPKYLRLTA

SEQ ID NO: 1676 - protein, 274 aa, unidentified
  REGION 1..274: note = Table 20
MKEWRPNTGIRVEMAYDSLCFFCTSFSSHFPAVAFPESWRLSFSPSFSSALRHYPTRWAKDGFTVHPDGRIVLKRGIWNGKRQAPLVVRVATLPVGMIKEIELVYDRGLQLTLSYEDGKQEAEPTGSHVCAIDPGEIHSIAAVAQEIKKVTFGDVEGIQRNTSARRKKKSSKARFRSRKQNQRMSQWKFGKLYAYLAYKLEAMGIALSKQDERYTSQTCPVCGRRKKTSGRTYTCGYEQHRDVHGAANQLALVLYGSIQPHPFAIQMPTYLRIA

SEQ ID NO: 1677 - protein, 318 aa, unidentified
  REGION 1..318: note = Table 20
MIRTAKVAFTASRSTIDALFALNRFSAEVWNTCLAEAKVYHQQTGQWIGKTELQKRLKRRFPMHSQSIQAVCHKYLWARDSAHQARKEGHTNVRYPYKQNKYFNTKWAADGFTIHPNGRISLRRGIWEGKRQAPNPPGSHTCAIDPGEIHTLAAVATTGDSLIVTGRKIRSIHRLRNKKLAELQRKMSKCQKYSLQWKRYNRAKQYLLSKSKRKKKRSRCHNQRMSQWQFGKVKKYLTYKLKAKGIMLHKREERYTSQTCPVCGAKKNVRGRMYRCSCGYTQHRDIHGAANLLSKVLYENRIQSLRFEIQKPTYLRIA

SEQ ID NO: 1678 - protein, 589 aa, unidentified
  REGION 1..589: note = Table 20
MLHEKKGPGSDFLGWVDWPIRYDKDEFARIKQAAEKIRNHSDALVVIGIGGSYLGARAAVEALSHAFHNQMNDMTQIYFAGQNISSTYLSHLLDVLEGKDLSINVISKSGTTTEPAIAFRIFRDYMEKKYGKEEARKRIYVTTDRAKGALKKLADQEGYETFVIPDDIGGRYSVLTAVGLLPIAVAGLNIDRMMEGAASAYYKYNHPDLSTNESYQYAAVRNILYRKGKAIELLVNYEPSLHYVSEWWKQLFGESEGKDQKGLFPASVDFTTDLHSMGQYVQEGRRILIETVLQVKKPRIELTIQEDPENIDGLNFLAGKTLDEVNKKAFQGTLFAHVDGGVPNLIVELDEMNEYTFGEMVYFFEKACGISGHLLGVNPFDQPGVEAYKNNIRVAIDPGEIHTIAAVCENGENLIITGRKIRSIHRLRNKKLKELQKLMSRCKKGSKQWKKYNRAKQYVLSKSEAQLKDALHKTTRQFVRWCLENQVKEVVIGDVEGVQRNTKKKRNKKTNQKLSNWSFGKLFDYLKYKLNAEGIEMEKKDESYTSQTCPVCGKRSMGSTLCPPPRDENLASVLHFHGKDPWAMVCPPL

SEQ ID NO: 1679 - protein, 437 aa, unidentified
  REGION 1..437: note = Table 20
MKLTHKFKIPYKKDLYHQLKNKQLESGKCWSDVVRYANDHYFTFKKWISTSELVKMTKNTYDLHSQTVQEIVAKYDENRTSTLTKRRNGDKNAKYPWRSKRFFSIPYKKSAISVKDNIIILKNSNYSNKLSLKNMVEKKKKKGWNETVKKQKDYIEIPNLAIENLSNISYAEIVYKNGSYWFHYVIEVEEEAKVKRFKPAGSDLGEIHSITLATEDKALVISGRAIRSIKQRRAKLLSELSKKISRCKKGSRQQKKYIKAKNRLKSKSDAQIEYLIHKSTKEAINFLVQEKVSDLVVGNPEGIEKNSKKDENKKKKNNKTRRQQLSGWSYGEFKQQLKYKSELKGINIHFVNESYTSQDCPFCGGRHKANGRKFKCSVHNTEIHRDVNGAQNICRKRFAMETKSVDVLYRQPVWYRRYLTVKKRKETSDKSIAWRKA

SEQ ID NO: 1680 - protein, 415 aa, unidentified
  REGION 1..415: note = Table 20
MIKTQHIRLRPSKKECNLLREYQKETAQCWNAIITMAKEYYDQTRKWISKSDLQKQLKGKFKLHSQTIQALTDKFVANRQATAKLRRLELRKIKYPYRKKKYMTIPFKQQAIRTNDNGELILSLSKGIFFNTGYIPDRKIHTAEILFRNGRYTLAVTTEYPEPELKVYGIKAGIDIGEIHPVALCDEDGDGLIISGREIRAIKQWRNKSLAALSKKISYCQKGSRQWRKYKRAISKLISKTENQLRDLYHKVTRKAISWAHAKGICELIIGNPTGVGKNSRRKRKLSRKSAQKISQMEHGRIKQYLRYKAKELGINTCLVSERDTSQDCPVCGHKNRCNGRIYTCSRCGFTTHRDGKAAFMVIRKKYDVPLPEQFQFEHVQAESKYRKSSKGACVVGAGVTQSSLVIAGSLLGTI

SEQ ID NO: 1681 - protein, 418 aa, unidentified
  REGION 1..418: note = Table 20
MIRPRQVRLNLNDKQFSYCQQLSQESAKVWNTAKNFFWRAYRKKGIWLSESDMKRYIASRFSLHSQSTQAVVEKFYDNLKSARSLRKENPDIRYPYKNKKWFCVHWKKKAIKVDGRYIHLSNGKGRQGIVFKLPVELADCQPNCVELIWQNGYWLSVTLEVEGKQQVLGFNGACDRTRVAAIDMGEIHAITITDGEEAEVISGRELRSVKRRRNKRVAQISRLQSRCKKNSRRWRRLQAVKSKVIAECERRTKDLNHKITRLATDWCIEPNVKTVAIGDVTGIAQNTKSEKRFSSCFRKRSRWFAKARQRLNRKSRQKISQWEFYKQRQYLEYKCDEVGIETTLESEHGTSKTCPKCGHKHKPNGRNYNCPACNLKMHRDVVGACNIRTKHLTGVLNGNARFAHRRLALRWSYGTAQF

SEQ ID NO: 1682 - protein, 414 aa, unidentified
  REGION 1..414: note = Table 20
MSRCVMLTIKIPVPAHLNKQASELNAASARLYNKTLSLVRKTHQCKGFWLSQNTTQKYILRWATDIPMHTHSKQAMVQQYFNALKGYFVAGRQNPNAKPPFRTKKYMPTIWKASAIRIKERLLAFSNGRGNKPFVVPLPITIDLSNFNIKLAKLVWDHKNQRYYIHLSTEVVGRSFELGEKVVAVDLGVIHPIAAFDGQEVQIWNGGELNTKIQYRHKRLADIQRALSRTKLGSKRHRKLLRAKKRVLQKLSNQINDILHKITSNFVLWTAERKTSKIIIGDVTGIRKRTRFHAVANQKIHGWLFRKITSLIEYKARLKGIEVEYVNEEYTSQTCPVCGHKHKPSNRDFRCPFCSFEYHRDGVGALNIHKKYLGYGRVVADLAPAVGVRFNPHLRGHGLSPWKLASSQQESHPL

SEQ ID NO: 1683 - protein, 308 aa, unidentified
  REGION 1..308: note = Table 20
MPYKNKKYNKVVFKESAIHLRDNVLTFSNKKGHEAIFLKGVVMKTAPKYAELIYHHSKKRYYLHVVFEVEERKNEKGKGVLAVDLGVIHPMVCFDGRNILIYNGGVLNSKLRYRNKKIADIQQKLSLCQKGSKRFRKLEKAKRKVLRNVRNQIRDVLEKYTSHLIGYCVKKGIGTIVLGDLKGIRDRANHGKVTNQKVHQWVFKKLCKMIERKAQFIDISVQYVKENWTSQICPVCGSKNKPENRNYECSKCGFKYHRDGVGAVNIYKKYTGLDTLVVGVLASPTGVRYKAHLCCPAEWNIHPVGKTD

SEQ ID NO: 1684 - protein, 442 aa, unidentified
  REGION 1..442: note = Table 20
MYLSHWQACEAWLLLGDPMPASDFTGNKSVRCDNPMRFVRAKRLKIESQPIFSQINAASAEVWKECCNLMDWYQYQRGYGHAHWNFYIGEDCEGWMDKNLTKSQPLHSQSIQAVRASYFKSWISYSVLKKTGGVRNLKPPNKRKKYRTTQWKRSAITFVESSFFGKRVRLSMGAGRPKLDIKLPKNFDMSTNHLIATIELVYDYGQWELHFTYYETIELPESGKGVMGVDIGEIHPMVCFDGQDTLIFNGRYIRSLYRLRNKVLAGFNSAISQCQRHSKRWWRLTRRKWKKIRRIDNQIKDCLHKHTRKLLDQCELRGIGTIVVGDLTGIRDNIDYGKKSNQKLHQWPFAKLVNMITYKAKALGIKVKHINEAYTSQTCPKCGNRKKPTNREYSCKCGFTYHRDGVGAINIRQKYLGCLSVPVVADMAPPLGFRLEVPVALA

SEQ ID NO: 1685 - protein, 285 aa, unidentified
  REGION 1..285: note = Table 20
MGKDRVPIIIEVEPHYAQVPATVKIVYDRHTQTYKFHATYAVSVDEEQDSGNVVSVDMGEIHPIVSFDGKDATIYNGRSHRSIVQYRNKFLARINQKLSRCTRGSRRWKQLKATKKRVLAKLARQLKDCRHKITSRFVSTSNKEEVQTIVLGDLTDIRQSINYSKKSNQKLHQWSFSEIASQIQYKAKQIGIKVKTESEKYTSQTCPSCGHRKKPSGRTYKCSECDWEGHRDIVGASNIWTKYQGWLFNPVVGAMASPAGVRFNWHLCRLDSWSPFMGLMSKKSR

SEQ ID NO: 1686 - protein, 396 aa, unidentified
  REGION 1..396: note = Table 20
MPKAAVSYRTITIKLDKTEQLDTLAKECGRVYSKTISYIHKIHRKKGIWLKESQVQKIIKSDKLHSQTTQAVIQKYFASLKSYWENKKTNPEARPPLRRSKYFCIPFKGSAIHLRNGNIELSCGKGNPPVVVSIPEGKVLPHPRMAEIVWDNGYYLRLVVTHETQTISPNGKAVAIDPGEVHPIAVFDGEKGTIYNGRSLRAQKQYREKVKSSFHSKLSRKKKGSHRKGKLLQFKRRRLKKINNRIKDTEHKITRHFVETCRTNSVSTVVYGDTTHIRQGTNYGKKTNQKIHQWAFSRIRFQVEYKLAEYGIRFIPKDERGTSHTCPACGSWVNPNSRKFSCKCGFQSHRDVLGAINILSRYQGGIPVVAAMAPASGVRFNWHLCCSGATLRIPAL

SEQ ID NO: 1687 - protein, 388 aa, unidentified
  REGION 1..388: note = Table 20
MYYVRRLNLSSQKDLCNMLAQESGSLYSQTVKFFWRTIRRKGLWLKPSSLMRLFNSNQMHAHSADASVQQFFHALASWREIRKTIPEARPPRRLRKYCGVKWKSSAIRVKNGKLILSNGKLTEPLIIDWEYDLTPVFVTLRWHGTGYELVFCYKGQVSESNYEPEQPVGIDIGQIHAMATSEGTVLNGRLLRSIRQGRHRSNAIFEKRLLNKKKGSNRCKKLKDARRRLNKKVTNKAKDILHKYTSGLVIYLKNKGYNTLVVGDLTGYRVDNNCGSARNQENHAWLYSQISWYLKYKCERLGLKFVQQEESYTSKTCPGCGNRKSVKGREYKCKCGFVGHRDLVGATNILRKYLGLFGKKEIPVDALMARAFGVRYSPHIRVAHGLSL

SEQ ID NO: 1688 - protein, 400 aa, unidentified
  REGION 1..400: note = Table 20
MTTQKTYNFCFYDQRFFELSKEAGEVYSRSLEEFWKIYDETGVWLSKFDLQKHMRNKLERKLLHSDSFLGAMQQVHANLASWKQAKKVVPDACPPRKPKFLQAILFKKSQIKYKNGFLRLTLGTEKEFLYLKWDINIPLPIYGSVTYSKTRGWKINLCLETEVEQKNLSENKYLSIDLGVKRVATIFDGENTITLSGKKFMGLMHYRNKLNGKTQSRLSHKKKGSNNYKKIQRAKRKTTDRLLNIQKEMLHKYSSFIVNYAIRNDIGNIIIGDNSSTHDSPNMRGKTNQKISQNPEQKLKNYIKYKFESISGRVDIVPEPYTSRKCPHCKNIKKSSPKGRTYKCKKCGFIFDRDGVGAINIYNENVSFGQIISPGRIRSLTEPIGMKFHNEIYFKSYVAA

SEQ ID NO: 1689 - protein, 470 aa, unidentified
  REGION 1..470: note = Table 20
RRVLESSHTQNTAVYPADSQPVTRSGISRPAQPQLEDVRYRGVILFLKGRSVAKPKKMVQRSVRKLALPGSALLDRLCRAAGQLYSAALVKYWRILRQTGNGKNGRKPVFLSQYGMEKLFPNDPDRVLHSHSCDAVVGHFYAAIKSANERKKKGSKEAKYPRKRKHFFKVTWKSTGIRLKAGSLILSTGKGVEDLVIPWNHALPTMVEIGWKKTGGYELRAVYEVQPQAALGTGVAGVDLGELRIASVFDGEKATLYSGRLLKSKSRYRAKVISKLDAKIARTKKGTAHTKPSRRRQKLIKGKRRLVARLENQVSDILHKQTAHLVSTLHAAGVQTVVIGDITDIRDVIKYGRKANQRLHGWSFGRFRQMITYKAAQLGMRAVIVDEAYTSQTCPPCTNRYKPSGRQYQCKACGFVSDRDVVGSMNIRAKYLGSFGTPVVGVMGPPVQGVRYAHGLSRHLNLHSSRIPRL

SEQ ID NO: 1690 - protein, 448 aa, unidentified
  REGION 1..448: note = Table 20
MLFRQSKNEKRRYFVRKLTLPGRLKPRLDELSLASGALYSAVVTAFWRTLRRSAGRSKKGGPRDPRRKAVFLSSGTLQKWFPKDAEGLLHSHTCDAVVDHFVAAMDSARTRKKHDPAARFPRRLKKYFKVTFKSTAVRVRDGQLLLSTGDKKRPVVIPWTFELPVAVEIGWRESGGYELRAMYPDTRGVQVAIGEKVAGLDIGELRIAAVYDGEEVELHSGRLIRARNHYANKQQAKLDVRISNKRKLTKAGTRSSKRLKRLQRARRLMRARIKRQNKDQLRKQARTIVSTLHERRVQTVAVGDLSNIRDSIDFGKKANQKLHLWAFGQFLAELKLQATKFGLSVKVVDESFTSQTCPWTGGRKKPKGRTFVSPCGTHHMDRDGVGAVNIRARYLESLAGKGSAYGRTPTLPWTPVIAGMAPVTRGRRYRVLHAQRSNPQGMEGSTRP

SEQ ID NO: 1691 - protein, 207 aa, unidentified
  REGION 1..207: note = Table 20
MYVDTRPVQTPLGDGVAGIDIGEARIAAVYDGQGVHLHSGRLIRARNHYANKHQAKLDARIARKKNGRPQGQRSSKRLRRLQRARRTLRDRIKRQNRDQLRKQARQVVSTLHESRVQTIAVGDLGDIRNRIDYGLRANQKLHAWMFGQFLTELKAQGRKFGLQVIVIDEAFTSQTCPWTGQRRKPRGRHFVSPCGQHRMDRDGGSAR

SEQ ID NO: 1692 - protein, 403 aa, unidentified
  REGION 1..403: note = Table 20
MYLVRKRKLGRSETLDLFALESGRVYTMAKVWFWRIVRRKGIWLSEGTLQRLLANGQPTLLHSQSAQKSIQCFFEALRTWRRARTRNPDLRPPRKRKKFSKIIWKDQAIKVREGRLVLPNTRGTAPVIIDDWLSAKPVQVELGWDGKQYELRASYKTEPRETSQGFVASVDLGEVHSAVMGTDDVHVILNGRLLRSKRRYRERLKAKLSAKIDRKQKGGKRREKLITSKRRQLKKLDNQIRDIEHKLTTAGIKALHEAGVRKLVFGDLRDVRVGYDKGRGQNQRMHQAPLGRIRSYLVYKGLRLGWQESDFQDEAYSGKDCPRCGQHNNPKGRNYSCASCGFKAHRDVVGQVNILHKYRGVRSSHVIGAMASPIGIRWTPHLRCSSKLVGADHAVSLSRIPRL

SEQ ID NO: 1693 - protein, 394 aa, unidentified
  REGION 1..394: note = Table 20
MSNYTVRKLKIGNTEQMQTLSRAAGELYSRTVVNFWRTVRKQNKWLKPSSMMRWLSNDSENRLHAHSADAVVQSFYASLKSWRERRKTDPDARPPRRRKWFFKVQWKSSAIKVKDGKLRLSNGQGNEPLVIDWAWDTPKLIEMGWDGKQYEIRACYATEEVSIKESGTVAGIDLGEIHLAVAHDGKETIIANGRLLRSKRRYQNKLKAKLSGLIDVKKRGSKRRKRLIRSKQRQLAKLNNQIKDIQHKQTTKLVSTLNNRGVQTVVIGDIRDIRKSVDYGKKANQKIHQMLHGQTRQMLTYKAERLGMKVELQDEHYTSQTCPQCGKRHKPKNRLYKCSCGFQFHRDAVGSINIRRKYLGCMDIPVVGVMASPIGVRFKPHLQCSPVPLLRAEQ

SEQ ID NO: 1694 - protein, 400 aa, unidentified
  REGION 1..400: note = Table 20
MAHRTRKLHIGKSKRLDELSRSSADLWNEICTWYWRWVDRQDHWTSKGQMQKWCVNGHDDFQAHSAQAVNDQFYDAINSWHKNNRKGNPPRNRSKRWNKICWKSEAIKLKDDGVIRLSCGRGNHPVLIDWPVGKEPVFVEIGWNDGYEVRATYEVETEDRTTGNKVAGVDLGEKHLAAVSTGDGAFLLNGGELRALRHYQNQTKAKLQSKIDDKERGSNRWEKLVKTKNQQLDHIDNKITDLLHKLSRKLIEMLLERGVSTVVIGELKGIRDSVDYGSRMNQRLHQWAHAKFAQMVEYKAKGAGMIVKYVNEEYTSQTCPKCQHRHKPSGRTYDCPECGYSAQRDAVGAYNIRKKYVGTEDSSRLPGVMASPSGVRFHPHLSCSSRSRRKTQSKSDRQPV

SEQ ID NO: 1695 - protein, 482 aa, unidentified
  REGION 1..482: note = Table 20
MYLTRKKKLGQSEKLDEIARACGDVWTDTVTWFWRTVSRQGVWLNKSQMMRWMCTRRISTDTKKTAFEHPDMEAFAGKRENPAATLESRYNIAQNTAQNVVKEFYHALDSWRERDNPDANPPFKRKRYYKANWNYTQITLRDDGVLRLSTGRGNEPVLIEWPHPEPKRVEIGWDGEQYEARVQYQVEPDREPKGEKVAGIDLGEVYLATATTGEETWLFNGRHLRSLRRYQNKTKATLQSKIDTKEKGSRRWQRLVISKRKQLSSLRNQIRDVLHKLSRRLVETLYQEGVSTLVVGDVRDIRDGLDYGAKGNQRLHQWAHGAFRHMLTCKAELAGMEVKLEPERDTTKTCPSCGTKNPTRGRKYRCSTCQAAFHRDEVGALNIREKYLDGDGWQDGYLSSPVVAGQGFTAAPSETSNETKAYSSPRGDKTDQPTPFASGEAAAPSTTREAPHERVTTHPTGVRFRPHMDCGDGGSPAISSQG

SEQ ID NO: 1696 - protein, 477 aa, unidentified
  REGION 1..477: note = Table 20
MSNTVRKKHIEETDVVRAHRRAAGEVWTQVAWAWHFLNDEYDYYLPKGDAMALFGTAGYTTRVKEAWQDLPFGTPPEDLERNPFVNNAMRKAGVQQRQQVIRRFYEHVNTFFDEHLPRWKENGKDPDNRPRPPYKASRFARTDWVHTRIEKEGDTLRLKTGRGLDEITVDWPHPEPRSVQLVWDKHAGCPMLCPQYDDQKQDLPDGLIRDRLPKGDEVVGVDLGELYLATIYDGEEGVLFNGGRLQELRSLQNSEKAWFDQRIDRKEKGSNRFWKLVNAKKDRLKEIRDRIDDYLHKMSTRLVEECWDREAATIVIGDLTGILDGLDYGAEMNQRLHQWAFRQFAEKVEYKAERYGLEVVFEPERDTSKTCPQCGDKNPTSTRHYRCTSCGFECHRDMVGAMNIRAKYQDPDEWMSGHLEAVRATATASQEAQDTPTGEQLGLFERARSGRKRVTPSVESPVTVDYEPHMTCVLEDP

SEQ ID NO: 1697 - protein, 427 aa, unidentified
  REGION 1..427: note = Table 20
MQIIRFHIITQKVPAKYYPLLKELRLEAGKIWSDSLNLFFNLLKKNGNTPNNSTRPLGGVNALKSQVQKAIKSSILHSQTTQAIQDRLFGALKSFFKNKKRNPNVKPPKPRKFYNLIWKNQAVRYQNGKLILPLARTTGIRLSIPLRKRKKEWLEELLRNGAEIRQAEIVFKAFEYRLILLVKETVEINPPDRNKVVALDLGEIHPFVSFDGKEVLIWNGRLLRSYKQLRLKLIALKQKLLAKKQKGSRRWKRIKRSFERQIAKVGRKIEDLEHKLTRAFVNYCKAKGIGTVVIGKVKGIREKAKYNKNANQKIHLMWRFGRLLQKLKYKLEGEGIVVVEEDERYTTQLCPVCGNKYKPKDRNYICPKCGFSYHRDGVGAINLFKRFMEKVSGRLILPVGGLTRPQGVSYSLSSSGWVLPTLRNPLL

SEQ ID NO: 1698 - protein, 219 aa, unidentified
  REGION 1..219: note = Table 20
AAYDYNAAMLARATSAGVLDLFVGRELLAQIQYRNKVLAEFQAKLSRLREGSRRFRRLQAAKGRVLEKLDRRIRHMEHALTKALAELDRKEGIAVAVLGDLTGLRRSARAGMKGKKASQKINQMAYDRLGSQQGYKNLMRGIRTIFLPPSSRRHRGHWKCRRCGFSLQADLNGAGNLLKRRFTGDRIDLPAPVPVRVIRHWRWDRRHNRFVHVSSRAGA

SEQ ID NO: 1699 - protein, 454 aa, unidentified
  REGION 1..454: note = Table 20
MAWSDKSHPYRLLLTKQFPLGLETLPIFQPVMQAANRIWNSCAWHSREIFKQEDRWPTEAELKTKFKSFAAWKELHSQSAQSVVEEYFEAVSAYRKHRENGHLEMNPPGFKPKNHLRTVTWKRQGFDVDGSTLVLKLSRGKEPIEVVLPEGWDVVVLPDGTEVKGVPVEVKVKAVIRRRRVENLVLHVTLDLGVVPVYRAGAVSAYDYNSAVVARAVSNGRLDLFVCRELLSLVQYRNKIIAGFQEKISRLKEGSRRWKRCLSAKVRVLKRLDRRIRQMEHALTKLSAELDGAEGVAFAVVGDLTGLRRSARTGMKGKKASQKINQMAYDRLRQEQHYKNLTRGIETDTWTERNTSSTCCLCGARNPAWRRHRGLWVCGRCGLVLQAGLNGAANLLKQYLFGSCTGRALCLQGSAGLALGREAEPVCASISKGRLSGTWSSRDGSDGPLREAPR

SEQ ID NO: 1700 - protein, 467 aa, unidentified
  REGION 1..467: note = Table 20
MKRTFSVRLFPTREQKEILRELQLRCAKLWNKANYILRQHFFKTGQIIPYEELFHLVKNSQEYKSLPSDISQAVLKKLSESWNSFKELKKLQEKGKLPEHIKKVSPPKYYKDRKENKTIPMDVIPILSPRSYSLGDFFFSFTLPKDLKKKYSIKKRLTILATYTIPYKDFKFGRAEIVKKNGKWYVHISVEVEKTQKSLEGKNYASIDLGARNLIVLAIYDKERKLIRVYQFKSKELWKEFKYWDRKIAKYQSKLAKSRHKGKSVKLRKLYERRKKRIMSAIRGMGNKIVELLQRYEVKEVFVGDLTGIRNGKDYGRKVNKLLHNFWIRRQIEQVLKDKLEEAGIGFVPIPEGYTSQTCFNCGSKALRPKRHLVICQKCGKLHSDTNGAISILKLGLKLKDLEWEKIREVHLVWKFRKTNRWVFRYLRVYKKNKDKLLVRGRVNNPPVRVAKSYSPKSSLAPSVRGG

SEQ ID NO: 1701 - protein, 437 aa, unidentified
  REGION 1..437: note = Table 20
MKRIVKVKLYPTKDEKRKLKEIQLRCSYLYNRFNYILRQQYFSFGKVKVTDGILYKLAKGLPEYKALPSDIAQEVLKKLLEDWKSFLKLKKQKEKGELPPHIEKVNPSKYKKDRKRNLTLPMDIYIKTDRSYRLGNYSFEMTVPKDLSRKRLKIRAKYSVSYENIKGFGRAEIFYKAGEWWCYISVNLQNSETKPVGEKTAGIDFGIRNFLTLAVETDKGIEVFQFKSRELIKDYKRWNRKIAKYQSLLNRSGAYTSKRLQKLYVKRDRRLKQSINSMLNRVVEICISRGAKEVYVGNLTGIREDKNFGKLNILLHNFWVRAYVTKRLEEKLTEAGIGLKPIPEYNTSSRCFKCGSSVKRPHQHYVICPKCGKLNADLNGAVNILKRGKKLSSLKIISFYHFKWVRGRVSSWMPVVTGQADKPACSLLLETTKSLSF

SEQ ID NO: 1702 - protein, 236 aa, unidentified
  REGION 1..236: note = Table 20
TLEPARLPRPEKHAALDLGARTIAALAVEGLGRQVLFSGREVWKDFLYWTRIIAEEQARLAKNGRRTSRRLRHLHQMRARRLKHALTALAAEIARTLKRRRVTVLRIEDLTGIRDGMDFGPKNLLVHNFWAFGMIRNLIVQACGRVRIEVRADAPKDSLACAACGGALRRYPRHRVLCKHCDRAWHADANAAAHILGSSKGHGPEAGPGKPLALRWNKHRWISRAESPACRDRKAA

SEQ ID NO: 1703 - protein, 461 aa, unidentified
  REGION 1..461: note = Table 20
MGHKNLKQLDAIAFKPGDESGFRLCYNGSMKHTNVVRVLPDKRQKQVLEIIGDRCAALWNAVQYRCRQAFFKGDSVPSYAALCSEFKEHPAYKALPAHIGQEVIKKARKAWDSYFACLRLYRKGELKEPPHIPRYWKDRRTGRRIFRVIPVKAPTSYSLDARCLSLTLPQDLRKGQGDRLVLRTKGVLRFHGRPKTLELKYDPVKTRWYAHQVVEVPEPVRKARPEKHAAIDLGARVLVALAVEGLNRQLLFSAREVIKDFLYWTNQIAGEQSRLNRAGRKTSRRLKRLYQLRARRLRHAFVALAAEIVRILKRLRVTTLFLEDLTGIREAMDFGPKNLLVHNFWAFRMLRNLIEAACTRTGIRVVPVEPRGTSCRCAVCGSSVRRPVRHKAVCEKCGRVWHADANAALNIILQGSSKEHGAEATPLKPLALRWDRHRWVSRFESAAGTPSGATSGSRMAA

SEQ ID NO: 1704 - protein, 423 aa, unidentified
  REGION 1..423: note = Table 20
MKRTNIIRLVPDKRQNELLMVIGDRVSRLWNAANFLCRQNLVKGKAVPSYAKLCSILKTDENYRFLPSDIAQEVLKKLSKAWTSYFRLVKLQKSGKPMDRPGLPRYRKDRKTGKRPFDFIPIKSLRTYSLSGGIFSITLPSDLRNGRLCIGCKGILRYRGILKTCELKYDRARTRWYAHITVEISKPRRKQKPVKYASGDIGAKRAIAVVIEGSKIAHVFSARELWKDYKYWTRRIAREQSRLSAQGLKTSRQLKRLYRMRKLRVEHGLEALARKVALILKREKVTHFAVGYPKGCREEMQFGKNNALVHNFWSFDRVLNILEKHCTRRDIELKRVDEQATSDVCNMCGKEVKRPVRSVVVCPEHGRYHADVNAAINILLKNTPGYGDGVKATPAWVTHEWNKHLWLPRARSLRYVSQVLQAV

SEQ ID NO: 1705 - protein, 432 aa, unidentified
  REGION 1..432: note = Table 20
MRTNILRLIPDKATERTLRLMGDRVSALWNAANYVRRQAFVAHAAMPGYAKLCEDFKEHEAYRALPTHMGQEVLKKLIEAWESCFALREKWQSGALKDKPGLPRYRKHKDGTRPNDWIPVKSTAAYAVGPRHVALTLPADLRKKGRLQIPCRGLRRYVGPMKSADLLFDAGRGRWYIKYRVERDDNRPKPWVREAALDLGVRVAVSLSINGVGPSFNFLGRDLLKDWDYWGRKLSEHMSELSHRPKNQQSSKKLRRMFSQRGKRWEHAWEALSARIVAQLRNHKVGHLYIGWPKDIRRDKNYGKKWNGRIHNFWGFDKASKILERHCARAGIQTSRVLEGKSSSTCPECHSENVVRKPRHVLACRDCGFKAHSDQSGSRNLLRTQNPAAQFPNIPGPSRDRAEAAPKPETHRWHYHRWADASNPLSNERLAA

SEQ ID NO: 1706 - protein, 314 aa, unidentified
  REGION 1..314: note = Table 20
MPGYLKDRDTKQTVVRGFYVRNDCYRLDRKHSTITIIGKNMKLRYATDRVREGKTGRLDVIYDRLKDAWYAFIPVDVVVAPAKQAVVSGKPEKVGSVDLRICNLVAFYAEGERPVVYSGRAVLSDYVYRTKKIAEMQSRLSEKQHTSRKMGLFYRTRTRRFKHATRAMLKDLFERMKQIGITKVAVGDLSGIRDGNNLGAHTNQKLHNFWSHAQTIQWIQHLCEDYGMDFAQVSERGTSKTCCVCGQGHNGRVHRGLHVCEENRVMMNADVCGAANIWNVAVKGELLPSTTRLPSSSRVMANPLVLRWDYAHWK

SEQ ID NO: 1707 - protein, 420 aa, unidentified
  REGION 1..420: note = Table 20
MSEATARLWNRANYQRRQAVFHHTKRPSYAFQCECFKDDPDFKLLGTCKAQALLHKLDEAWKATYSLLKLKKSGGLPQNIKKIGLPHYWKDRKTNKLEPRGIFVRNDGCWLDDHVVSISNEIKIAYTSGALWIGKQGRLEIQRHNNNRWYAHQPIELPKRKILESSEPRRITAPIDLGVCNLITARIKYQSVIYSGRALLSDWTYYTKKIAAIQSRLNRINNRHTSKKLKTLFGKRKQHFKHAMNAMLRDLFERLEEAGVTELVIGDLTQIREAANYSRKVNQKIHNYWSFKQITSRIEELGEEYEIKITPVSEAYSSQRCSLCEGHPIHPNARIYRGLYYCPVKHSYINADVNGSRNIADASPHREKKELAVAGSMAEPLLLRWDRCGWKSKSSMIIQDRENTIEAQTTKIPILVEIQE

SEQ ID NO: 1708 - protein, 420 aa, unidentified
  REGION 1..420: note = Table 20
MGSENILNVLRTSTVLLKPTDTQSLSEYAEQSAILWNIANYERRKAFYEHMKMPSYALQCRELKHTEPFKKLGTCKAQALLSKLNEAWQSFHALLRLKKKGKLPPHIRKIRPPKYWKRNGKREAKAFYVRNDGWRMNEKEISISRNRIPYQCGELWVGKWGRLEVIKDEINRRWYAHIPVEVDWQPPSRSQTDAKKASLDLGICNLATLYIEGERPIIYSGRAVLSDWIYHTKEIADKQSKLPRKRHASKRIRLQFRRRQRRLKHAINAMLRSIFSHLEQGNVSELYIGDLNGIREEANHGKRGNQKLHLFWAYDKIVKRILELGEEYGIIVKKVSERDTSRTCCLCGKQHNGRIERGLMICREKHKSINADVNGAVNILNVAVKRSPPVLSTDSYEGKTSGSGLMAQPLPLRWNYHEWS

SEQ ID NO: 1709 - protein, 474 aa, unidentified
  REGION 1..474: note = Table 20
MPLRSDYRYRSITLKIVGPEGYRRDLIFLSDRCTAVYNELNYLRRRFFFKGKLDAVAVSRSELTFRRIYREYGPILGTQTVVAIGEKNTEAWRSYFKQIKEVKSNKRRTICQPPRYWKGPLGREPRFVFLASQIRRFEYDPLEHRGVIEILGLGDVVDNLPNVGFKRGRGRGVRLEFVGWFPWHPNRVKEPKRADKIILNGDDGKEFFGRSEIVYSWADNAHYLTLNMKVNKGESWLVSRLTPNGRVRPIPRTGNNCENAAAVDIGRRIFAAVYFSDGKKPVLVRWGDAWSRWSYWRKIKAPKEQRRLNKNGANFSHRLKQYYVKAHRAIMDAIRHLVSKLVQILLSREVTLLVIEDLKGLRQKLHGELAYWAYKRIIREIKRKCEEYGIEVIEASPAYTSVTCPMCRSKCKRNGGLVICSKCGKTMNADIVRAYNLLTRATDDPPEPELEYLTGSNCTTVLPSNHKPPITPNR

SEQ ID NO: 1710 - protein, 433 aa, unidentified
  REGION 1..433: note = Table 20
MQRRKIVFKRTIVIKLKPTANQEAFLREWSENCAVLWNMINYKRRREFFEKGRVDLSEDKDLYDAFKRLVGSATAQQIMRKNSEAWKSFLALKKKLREGKLPKNIGRVSPPRYWKDRATGTRNGIIIVRRDLYSLSSKRLFIRAAPRALLKKFGLKSPVRIRWSGRPRWSGKFGRLEIVYDVVSGKWYAHISVEVVKYVDDPPHQPNFASIDLGVKNLAAAYCSSGDAEVYKGSTLLADFFHLKRVLSAYQSALNKSGFKISKRLKRIFRRYKRRFRHAVKAMVKDILEKAKDRDVRVIYIGYPKHIRDHVNGGRKSNSLVHNFWSFKFILDWFRVKAVEYGVKIVFVGEAYTSITCPKCGYSSPFNRKHRGLFKCVKCGFVANADLVGAFNIAKLNGAESILKGHERLSSPTPLVWDRHMWKPYRRNDNPKS

SEQ ID NO: 1711 - protein, 394 aa, unidentified
  REGION 1..394: note = Table 20
MVSMKRTNRFNIEWNDTEEARDLALGCSTLWNKLTHKRRQSFFDEDDEFDWSSDELYDDFKGWIGSATAQQIIRKNNSAWKSFFSLLDEWKDNKEEVDRPSPVGYWKDRDEDEKELKILVRNDCYSIEDGVVKLPFGVKGEVVGQPHWDGKQGRLEIIYDRLEDCWRAYQSVEVEPRHQPSGQKTAYVDLGVIYPVTAYIEGEETTVAYNGRPLLSKWWLYNKQIEKIQSTLKEENDKYSSERLERLFRKRKRVFKDKIRKIIHDFVERCYQAGVDTIIAGDLNGIRDNVDYNKKSNSMIHNYWSHKYLVNRLRWTVENYGMELKMIDERGTSSKCPRCGSEEKVRRGRLYKCKECGIEAHRDAVGALNIGLAEGLDVPSEVINRAMTRPEVVS

SEQ ID NO: 1712 - protein, 420 aa, unidentified
  REGION 1..420: note = Table 20
MDRTNVFRLKPTKQQEQMLIKLCRLSVALWNSINYKRRQSLIKGSFTWDVSDVIGRFSDVLGKSITWRIVKKNNSTWKAYFALRKKNKGSKVGLPRYWKSRDKNASWDTILRTEIGRNNYEIVWGTNHRKSYLIINWPPGEQLKIRINGNPRWSGYFGRIEIVYDGVTKRWYCYQFVASDHVPELKKNSTKKCYVDLGVVNIITSWIEDSSKIIAYSGRPLLGDWWYWTRRIARYQSALNKHGITTSRKLRLLYRKREKRFKQTINTIVHRFVKYCHENGVSEIIVGDIHNIREDIKTRSKKINALLFNFWEYNYIINRLKVTAENFGIDIRFIDEKGTSSYCIRCGSRNIIRKGRLVKCNSCGLEAHRDVVGVLNIAMRYSNKRPRKLIAHPFVISILPRPFLPKKRVDDNIIKLGTTN

SEQ ID NO: 1713 - protein, 425 aa, unidentified
  REGION 1..425: note = Table 20
MLMKVRRVNKFRLRPTKKQEKVLFSLCEMSAVLWNRVNYKRRQSFFAGEIDWNTEEEYNEFKRILGSATTQQIIRKNDEAWRSFLKLLRLKQQDKLPKHVHKVSPPRYWKNRRTGKKKLMTIIRNDCYRIEEVRGKKWLILPKGLKIRITGCVKWRGKQGRLEIHYDDLTGRWYALQSVEVEVEEVRSTKRAYADLGVINIITACIEGERQPIAFSGKPLLADWWYWSKKIARCQSHLKQVNNKNTSKRLKRLYRKRKRRFRHNINTIVYRFVRLCHAKSVGEIVIGDITHIRDNNDNGSKVNSMIHNFWSFGYIMERLRTTAENFGIKVKPVDEAYTSSECPWCHSKNVKKHKRLFKCLNCGVKAHRDVVGVLNIALLHGEGFNGVLAHPLLLRVDDAPESKSSMWVRMSVRPSEARITPLLVR

SEQ ID NO: 1714 - protein, 424 aa, unidentified
  REGION 1..424: note = Table 20
MKRVNTFEVVPQTENDRECLLRLLDASASLWNELTYERRQNYFDDGDVWDTSEYRGQYNGVVGSATVQQVTRKNSEAWRSFFALKENGEYANPPSYWGNEEDGRELRTYIRCNQYTIEWGKRSRLEIPVGQELKDKYGLGYHERLRLEVRGNPKWDGKQGRLELEYDELSDTFRAFQPVTVPDSRLDSPLASEKAALDVGANNLVACSTTTRSQYLYDGRELFGRFRETTDEIARLQSKLREGRHSSKRIRRLYRQRTKRRDHAQNALVCDLVERLYDEGVATVYVGDLTDVLETHWSVRVNEKTHNFWAFKKFIHRLACVCEEYGISLEVESEAWTSQTCPECGDHEETVRNEDTLTCPCGFEGHADLTASETFLREHSDCEIRPMARPVRFEWDDHDWSGKPHPHESPKEARTNPQVASVSR

SEQ ID NO: 1715 - protein, 473 aa, unidentified
  REGION 1..473: note = Table 20
MDVRTNQVVASFPSATAKRVYCEFAAASDACYNSINYQRQHAYFTDGESVWDAPVRDLRDEYVPVIGSGTFDQLERKNAGMWESFFELLDNHGPEDQSDAEKPSVPGYWGSRSEGYPLRTIIRNDLYEFEWTTEGATVQFTIGQALKEKYDYGYFERLRLDVQGMPRWIGNDGTLELCYDEDHETVRVNHTVRQPVLRTSGHSHTRTGHANRLAHSSDAQFAAIDLGANNTITAVTSAGEAVVCNARPEFDRFRSLSEHIATLQSQLPESVYSSTQIQRTYARRRDRRDHHRNAIVRLVAEWLSKAGTEYIVVGDLTDVLSTHWSARVNEKTHAFWSHGRLIDRLEVTFEEVGLAWSEESEAGSSSTCPACRSENIERAGDVFDCLDCSFRGHSDVAGATNLLIENTDVSTSDLGLMAQHADHDAGRAWRGDLTVTHLKWDDHAWTPTQSVEREHTYRSTNEASANPQVHPTR

SEQ ID NO: 1716 - protein, 466 aa, unidentified
  REGION 1..466: note = Table 20
MSDRPQRTNTYTADPVSDRYRECLFEWLAAHAPLWNQITYRRRQQYFAEDGDIWDVEYTDLYAQYAPVLGKATCQQLARKNSEAWRSHFELLSQYHDELYPSVTEKPSPPGYWGSRDDGYELYGLVRNDLYTFDWDDHRSTLEFGVGSVLEDRYGFEHNERITLEVRGKPHWRGDDSRLELIYDEHADQLRVQHPVRIQSDDLREQRQAAFTHTLDSENTTQSAAIDVGANNTLAVVTEDGDTAVYHARPEFERFQTQSTRIATLQSQLPEGQWTSTRIKRIYADRSRKRDHSRDAAVKHAAEWLLDRNVETVYVGDLTDVLATHWSADVNEKTHAFWSHGELTNRITLTLGDVGITVTEVDEYDTSSQCPACASETVTRDGDSFWCNDCGLEAHSDIVGAWNILQSEVGPMARPAALSAERDRDAPTDGAYWQWNDHDWIPADFGEQSRSLDQPSVSKPASSQPG

SEQ ID NO: 1717 - protein, 483 aa, unidentified
  REGION 1..483: note = Table 20
MRRVNTFDVCPHSRRDKLALIELLDASTACWNQVQYARRQAFLNRKESEGNATVSQLKQAVKKTATQEEYRQKYIQQLSSSIPQQLVQKNWQTWDGFFELLKKYRNPEDDSVTDRPGLPGYWKEDGVRTLHTLLRNDTYTLSLGKRSRLRIPLGKELKEKYGIGYHEKLTLEVRGRPHWEGKQGRLELVYDRETESFTAHQSVGDDTHTPSRRTSTHSHLLATTDGEDVVAAVDIGANTLAACTTSRGDHCLFHGRPCFEDFHAYTREISRLQAMLPDGRYSSKRIREVYRKRSVKRDHAMDALIQHLAEWLAEHNVTELIVGDLSDVLKTHWSARVNEKNHLFWAHGRFRRRLHEVVEAEYGIMVHEKSEANTSSRCPHCGAENVHRSGDLLQCRTCGVEAHADVAGSMNFLVTETAVEYRDLNQGGSMARPAASGQNRLGDAVACFEWDDHCWRQRDHSTKEEPANHTRQGKFPSGDPGTA

SEQ ID NO: 1718 - protein, 473 aa, unidentified
  REGION 1..473: note = Table 20
MAATNEEKRTRTNTFALAPKAEWKKVCLIELLDSAAALVNIVTYHRRQAYFDDDQTRSDVWNAKTKTEIRNRFQPVLGRAITDKMLDKCDEQWDAFFEQLDDYYDGEREDKPGVPGYWKDDGKRVLKACIRNDAYTVEWGEHSRIELALGSELKEKYGIPLNKRIRVPIKGDPQYDGHGGRLELVYDRSTESFTARQPVTFLHDTTRATDSSDEGCVAAVDVGANNFVAVTTTQGHQRVFHARPLFDCFHHYTERISELQSQLPEQTDRSRLVEKLYAKRTRQRNHAQDALVRHLAGLFSGWGVEAVYIGKLDDVRERHWSATVNEKTDLFWAHGRFRRRMQTVLEGECGVSVEEKSEAGTSSQCPRCDEGTHVSRTGDVFQCGGCGFEGHSDVVGSENFLQSVVDGDIDFTGERPMARPVDSGQNGPERGHRKVPRLEWDDHCWRQRGHATKEGPTNRSTREGNLASESGTA

SEQ ID NO: 1719 - protein, 419 aa, unidentified
  REGION 1..419: note = Table 20
MLTRTCKVRLAVDEETERKLFRLGDIFAKCWNEVNYLRRQQFFNEVGVDFRLTEKIVYYKYKSVLKVNAQQVARKNTEAWKSFFKNLKLKKEGKLPSFIIPKPLGYKKNREKNERQPFLLIRCDRYEIKDGYIYLKDFKLKLRYKGRIHLRGKQGRLEIHYDEVRRRWYAHIPFKVEEKIVRNDWRKVPLTPLGNKRAGIDLGVNNLFAVFVEDGTTFLISGRPLKAEAFYWRKKIAEAQSKGDTDKARKYYVIWRSRWEHYVRSNLRDLFEKLYLSGVSKVKVGYPKYIAKEPNKNAKVSFKITNLWSYRKIHQWIRDLCEEYGIEYIPVEEQYTSKICPLCGKVHENGRKYRGLFVCPVKKKAMNADLVGAFNILHKGESPQGDSPNGRKTAPLTLLPALTGALALQGWEEIRCTTS

SEQ ID NO: 1720 - protein, 384 aa, unidentified
  REGION 1..384: note = Table 20
MAGMVGKLKKNKKGSDPMPAIPVPKRTITVELIPTKEQEELKDLGDLCSKLWNQVNYERKRQFFNGEHGVDIKGTYNKWYNEYKDMIGTITAQQVLNKNNEAWRSFFSLLRAKKKLLLPFTKKVNPPGYWKDRKERKLIIVLRKDQYKIDEEKQEIELRHLGKFKDLAIRYNGEIYYRGEHGRLEIIYNPVLHKWYAHITLKASEKLNRKTGKWIKVPLTPKGNLVGGIDIGINNLFAVYVSDGTQMLIKTRVLKSISYYFMKLISMKQKLKNVAEEYGITVEFVNESYTSTTCPIHGKGCGERVYRGLFKCTTSNKVYNADLVGAFNMSIIPSPNDGGVEGTTTRGIGISWGKTTPLVYMWTRGSGLVASYDSMRVKRMDQNL

SEQ ID NO: 1721 - protein, 464 aa, unidentified
  REGION 1..464: note = Table 20
MPRKRTNKKGLKRTVIVEIIVDKRIHDVLLSIANILAMAYNEINYMRRRLFFDKKLTPEAMRQTYNEVYRKYADEYKTADGHCLLGSDTLQAVLNLSDDNWRAFFMLLKEKEVLPSWFEVNPPGYSKSGKRRIPFIRLKSRQWELSGDTIIIKGVPAFGLRAVLKIKGGVHWSGERGELMLRYDIDGKKWYAYMQFYGTEKLYSDGWRTVPLPLPGSGIAGIDLGVNNLFAVYSITSDGRHVSALFNGRPLKSIWFYWKHKISMLQSLLSGLRTSRRFRLMHRKAKMQMKNYIDRQIRKLYRWLREHGIGTVLVGLPHDIVHREGNEFTERIWMYGYTLKRLKEVAEEEGIEIRFIPESYTSSTCPLHGRDCGKRILRGLFKCTKLGKVFNADLTAAYNILARGISITPSPRKRDRGNGLKTQPEAESKKCGSKPPRSGGNSRPLRRGGGQFVESIYHHKQLRF

SEQ ID NO: 1722 - protein, 417 aa, unidentified
  REGION 1..417: note = Table 20
MRRTSVVRLLPNKGEEGKLKLLCSLSARLWNEVNYERRRQFFSKKGVDMRGTYKTYYEKYKVLIGSATAQQVLNKNDEAWRSFFASLRKKKTGGLPRHITKVDPPGYMKDGGRRKLWAVLRNDQYKIEGDKLILKGLGAIGRLEVEYRGEIHLRGEQGRLEIINVDGAWYAHISFEAEEKAVRGAWREVPGTPRGGLRAGVDVGINNLLAVYVEDGRTALYSGRPLKAIAFYYRRKIADYQSTLNGSRTSKRLRRLYRKWLRKARHFINTQVRRAIEWLYEGGVSTIYVGYPKEIARNNGNFYTVNLWHYGYLLKRVVEVAEEYGINAVLVPEEGTSKRCPIHGEGCGIRIKRGLFKCTKSGIVFNADLVGAYNIMAKSIAPSPAGDRGNGPDTRPGAEPDGNVAPNLPALAGTLAL

SEQ ID NO: 1723 - protein, 267 aa, unidentified
  REGION 1..267: note = Table 20
IHLKGKQGRMEIIYDSVKRKWHAHVSYTVEEKLTNGEWVKVPREPQSNLTAGIDLGVNNLMAIYISNGEGFLVNGRPLKSIAFYWQKRIAEYQSKLNKSGCKTSKKLKRMHQKAKLQAKHYINTAVRQTVEMLYEMGVAKIIVGYPEGISRNSDRGKKQNFILSHVWRFNYVIKRLTEVAEEYGIQVLIVNEAFTSQTCPLCGQRHANGRVFRGLFECRREGVVMNADLVGAFNILKKVVKTITPSLSALAGGRGNWPKTRPEGSKT

SEQ ID NO: 1724 - protein, 510 aa, unidentified
  REGION 1..510: note = Table 20
MAAEKAEKPAKAPPRARGGGGAKSRASRRKKRDNRPVRAPAPPGPSGGEESGPVTDEMCAPVETGGVRAVVLRLKLNPEVERELEALADATAKMYNEVNFILRKLFFTRNYTDEKVSRIIRVFYRAYSRGLCGRPRLGSYIADGVKEQLQQDWQRFFGLLKAKKEGKLPGWMKPRPPGYKKDRLLGKREKVLFVEGRGYRVVNEGGRRGKLIVSVAGKWISLAYRGKLRWRGKQGTLVVKEVNGRWYAYIPVNVGVPAPRERKYSYMYINGERDRIQLQQPRGGEKAFIDLGVNNVIAAVTTTGRALLYRGGPIKAEYEYWSREAKTFQSLRDKCKNHGLPWHRWHLFYARAVEKRTRRMQNLKRNTVKHLVRLLWEEGVDTIYVGLPYDIIHEKGNKWNSNVWGYRKIITWLAEVASEHGMKVFVVDESKTSITCSHCGYEDKEARVHRGLYKCPRCGLEIHADINACLNIAHKAGYTPPTPTRIETYTPTHQGVVAAKRGEKSTSRKQ

SEQ ID NO: 1725 - protein, 459 aa, unidentified
  REGION 1..459: note = Table 20
DGYRTNIVRLRVYPEDLKELVYAALRYDECIEFLNDLRRELYEAELLNSRGFAWTRQEAHLAFGEYLKGNVHLVARLNEYAWRGFMALKKLEEEGRLPRGIRVRMPGRGRRFGRCLRLFVDSSYYRVLSRVVAEELGMEVGENCSGVMVLNAPVKMAVGYHGVIRWSGAQSYRVVKIKDPSRVYAYIHVKVLEPSELEVAIYKGRRVVFGERYGLRSYDPLGSFRAWVDLGVRNLIAAVIEDGTALLYRTGILRSMYNYYRRRKRELMRLIEWLSKTTPNSPWIERYEEELEDLRERTFRKLRLVRRRAVRHFVNECWKLGVSRIYVGYPSWMNVDHPLSSIIMAYSETAWDIARVGEEYGIRVYAVDERGSSRRCSLCDEAHANGRIHTGLWRCPKTGLEINADLNSARNLAGRVSGVKPPLNGRLLSFIVTLEGVWPANQRRGPKPGNPPSHSPDEG

SEQ ID NO: 1726 - protein, 337 aa, unidentified
  REGION 1..337: note = Table 20
MEGQTPREEGTKVLVRNDRYYLEPINGGEGYLVLKDWNLRIKYAGRIKWAGKQGTLVIRFEDGRWFAYVPVSVGEKPARSNPRGYVKGIYEKIQIEKPKGGNKAFIDVGLNNLFAVVFNHSDTAILIKGSTIKAEYYYWKREVGTYQAIRDWLRNRGFKTWRKYHAYYLHAEYKQHERLRHYYRTAIRFLAKTLWQMSIDEVFVGYPYMVNKSNSNEYNVNIWWFNKIVNWLGDVLEEYGIRLNMVNEYGTSRQCSICSMKHENGRVMRGLYICPVTGIKINADLNAARNIAKRVGYEVPIPKKILSYIVTTNGVKPLTPMEGVTIETPKINPTSPR

SEQ ID NO: 1727 - protein, 355 aa, unidentified
  REGION 1..355: note = Table 20
MIGLDFWLENNGDKDKQLSLQNTEKNNVKDKEGKVCAIDIGLVNYLTAVISDGTVIYVKAKQYMHIYNKYKRKLAQINRTISDILKHSVIIRPPRKFNLRRLKNETRITHILISFYSTKFREKMSKRIVRRMMLKIVKVIRYFRSQNKQYLRIRKYIYAPEIKGGVKIFPKKTIYSKSTLKPTIVLTKLEREREKLYKKRDLTLRQIRRTVVNGLFRLLKEMGVKEVVVGYPYKINKNIPNETNVNLFQYRKLLFDMALVGYRMGINVILREEYGTSKTCSICGEQHEKGRIMRGLYKCEKTGKVINADLNGAINIFKEQYGYTVEVKKRMTFIATINKFYPKKSIKKKQQTSPL

SEQ ID NO: 1728 - protein, 376 aa, unidentified
  REGION 1..376: note = Table 20
MDFRGTWGKYYGKYKGLLGVNAQAVLQKNNEAWNSFFSLLKLKKGNKLPPYMNHVSSPGYWKDEATGRRRLILVIRQDRYVVDEQRRVIILKDFNLEVKFTGGLRWFGKQGRLEMHYDEARNAWYASIPVEVGVEEAKTGRRSKFIVHGERKVIQLESPKGNKAASIDLGINNLASVVVDDGTWLLYKGVRAKEDYFYFQRKIAEIQSLRDTLKDKLLSDAVEELNHEMRRLHGKLARRLLHLYRNFASHLLKQLHELGVSTIYLGYPFNIAQERGNKFTVNMWSYRKLMEAIELKAQEYGIKVYEVVEYNTSKYCAYHNVEVKRKPRGVAHCPMGHKLHSDLNGALNIMKRAIGKIPLVIKKPLSFIVGHNQVAP

SEQ ID NO: 1729 - protein, 318 aa, unidentified
  REGION 1..318: note = Table 20
PRPPGYRKRGGERVPIVIVRADNYRVDVERKVIRLGYWNVDILFTGKLRWLSKPGAKRGRMEIIYDAVKKRWYAHISVKVVLERRHSGHGFMGIDLGREVLVAAVTSDGTALLYKGNVLKSDYFYYERKIAEIDKALSGLEEADEAVLREERRRLFEKRGRRRDQTFANTAAHLKNEALRRDIGIVFIGYPWNISQDKPGKGNTNAWSQRKQLMRLATTLENAGIAVFAVSEDGTSRECAYHGCEVVRSPRGLVTCPHGHTLHTDINAALNIMARGLEALGIKAELPKRIRALSFLAMPGGVTITPAKRRGNRWRAAR

SEQ ID NO: 1730 - protein, 438 aa, unidentified
  REGION 1..438: note = Table 20
MEEIVNVLNRGAPGLKHTEKTEIVPLNVWTEGKLEAEVARADIVRIEAEGEMAKVLAQLAKICRDFVNEEFQRRSKIYEETGEIDVSIMPAYRNPSYFSFRRILGSRNFDEALRFVSEQYRNFSKLLEMKRRGELPEYIDPKPPRDFKPLALFVRFDNYEIDSEQRTIKLGYYGEVLSYKGNLRWFARGRQGRLMIKYNEAKKRWYAHIASYVTLRRDNVVGYKCGVDLGQRFLAVVATENGYVLMYKGSKLAWDYLYFKEKISQSDRLYSIGEIDLDFNVERKRIHNYKMKVHREEAFKNLASHLIRTLKQLGIAEIYVGYPHNITKDKPYEYNVSFWSYWKLMERIAITAENYGIAVYALDESGTSKHCAYHGIEGQRSPRGLLHCPMGHTIHSDVNAALNILKKAGGKLPTMFKTQSFIVTPRGIKPVESRAGGC

SEQ ID NO: 1731 - protein, 428 aa, unidentified
  REGION 1..428: note = Table 20
MLLNVWAENLNCAEAVVWRVDTVRLLPMPEQVELLLRFAKATRALINMEHERRRQLYERTGMIDVSVKGAYWNQDYAQLKEILGSKNFDEALCLAAESWRSFKELLKLKEQGRLPAWLDPKPPKRLKRLLIAVKHDNYKVLESEGAIWLKYYNVKLKFKGDLRWWRQRIQQGRLIIVYDDVKGAWYAHIASEVKLKRGARAPLKCGIDLGQERLAAAVTESGVALLYRGTVLKSEYHFLKMEVSELDKRARFADFDVEVWLEKRKWLFRRYRVRKRELIKNMAAHLAKTLRELGVTDVYVGYPRNISHDKPVERNNSWPYWQTIEEIARAAENYGIAVYLVPEENTSKVCARHGCEVVREPRGLVRCPYGHVMHADLNAAMNILKRGGGKVPERVKVFSFTPTPEGVIERRKRRESRAKPDSPASRAG

SEQ ID NO: 1732 - protein, 524 aa, unidentified
  REGION 1..524: note = Table 20
MKRTNVVKLVVDKNIHEKLKELAIITAKCWDEVNWLRMQQFKKGERIDFIKTEKEIYKKYKHVLKVNAQQVARKNAEDWRGFFSLIKEKKEGKLPKWFKPRPPGYWRDKSGKYKLRIIIRNDRYDVNEENRVIYLKDFKLVLRFKGKLKWHGKQGRLEMIYDEARRGWYAHIPVEVESIAEAEGSLRASVDLGVINLATVYVEDGTWYIFKGGSVLSQYEYYSKKISSIQKVLARHRQNRSRKLKMLYDKRSRFLKHALNSMVRKIIEELKEKGVGEVIIGYPKEIVRSHGNKLTVNFWNYSYVIKRFEEIGEELGIKISKVDESYTSRTCSLCGEAHKSGRVKRGLFKCPRIGKVINADLNGAINILHIPESLRSGSGGQLLVRDRGNGLKTQPMVYRWMNGAGWVNPTSYEVMKMKAVNHKPMICPKGTLILQGREEVSEKLFWQDQYLKEFEGRVIEIRGKEVILDRTAFYARSGGQPGDTGEINGIKVVDTYYDDKGNIVHLLEKEPNFKVGDIVKGKIN

SEQ ID NO: 1733 - protein, 426 aa, unidentified
  REGION 1..426: note = Table 20
MKKVSYFTYKANRTNQIILYHLCYASRKLWNVGNYEKRNWSKEQGVPFPNWYEQKKRLKTHFWYKQLPAQSAQEVLKVLQEAWVSFFKLKESNGIDNPQPPRFKHQNFNVRFLNNSFKLVENNTKIRLPIPKAQKAFLKETYGLEESYLYIPIPKHIEIEKIKLIEVKPISRKEYTIYLIQEYKDVPLKQKNSTKFLSIDLGIANAMTCYDYQGKAHIISGRQWLSVERYFHKQIAHFQAIGFAQQCAKGIQYPKPSRRVLQLYQKKRKQVHHMLHCMTRKVIDIALQQGVETIVIGDITGIREQAKFNKKTNQKLHGFPYAKIIQMIRYKAQEQGIDVRLLTEEYTSQACSVCQMFPCEENAKPSNRIHRGLYVCNDCHTTINADVNGAINISKKYLKEIKALSQSVVVLDTPTVYTFNGQQFVA

SEQ ID NO: 1734 - protein, 433 aa, unidentified
  REGION 1..433: note = Table 20
MKLAKYFIHKPNQTQQVVLGCLAYASARLYNIGNYQRKNWSKDSDEDYPDWYKQKKQLKTNFWYKNLPSQTAQETLKILADNWDSFYQSMEDYQDNPDKYNGKPNSPNYKPKDSKFNFRYLNNGFKIIDGKLRLSIPKQLKEYLKKEYSITNKFLWIRVPNELLSSNRDILNSTTRIEFKPLSDDTYKVILTYKVDTPTIKEDNGNYLSIDLGINNLMTCYSNQNQESFIIDGGQYLAINRYFDKKIKHYQSILNDQGKKTSKRIQNLYKKRRKQLFHLIHSATKKVVNYCVENNISRVIVGDIKNIRDDADLGKQNNQKLHKLPFDIIYHQLEYKLNLQGITLIKKSEKYTSQCSPYSKKVTKKYANKSNRVKRGLYIDKDNNQAFNADSIGAFNILRKYLQQRRKGPDITLQVKGLSNPVKYNWNNHQFAA

SEQ ID NO: 1735 - protein, 245 aa, unidentified
  REGION 1..245: note = Table 20
GICRLIVVYEIADIDTLPDNGKYLSIDLGLHNLMTCYDNSGKSFIAGRKYLSIAHRFDKEISRVQSQWAKVQAARGIKYPKPSGHLLKLYRDKRHAIKDYLHKITRYIADYCRSNGINMVVIGDITGIRRDNDLGHKTNQKLHSLPFAQIYTMLEYKLKMYGIRLIRQEESYSSQCAPTSECVSETFAAKKNRVKRGLYIDDKHLYNADAVGAYNILRKYSAVLGTTIAMPVSGLDNTMIIKVAV

SEQ ID NO: 1736 - protein, 481 aa, unidentified
  REGION 1..481: note = Table 20
MLLTYQFETNIDEKASIILGHLCYAAGKLFNVGNYERKNYKELGFDKMPDWYDQKKRLKDSFWYKSLPSQTSQDVLARLNESWKSYMTLHYKWNKKKEKNLLKENDGEPQSPYYKKDGYHMNIKYLNGQFKVIDNMIRLSIPKKLKEHLLEKYQIDVSYYYIKMKRQFDVIKQIEFSYVNKNRYKVYVIYEKPSEDQKKDNKHYISIDIGTKNLLTVYDNKGSSFIVSGQSLLNTNYYFSKKIAYYQSKFDICYPNHKKGETTKRIKKLYQTKNKRINLILHRSTKMIVDYSLNNNISKVIIGDLSGLLNVKPLFTNNDEKHRYNQNVRAICFNKIYSLLTYKLQLKGIELIKVNEAYTSSCLPNSKNVSEECANKKYRVKRGLIKCHGYIFNADAVGAYNIMRVYKQTSGKKFEMPLKGLSNPTREYIPVTDQFFNEDYINWNGKSGTVGISGRNYPKGYELVNLINQYITKMLGNSIAE

SEQ ID NO: 1737 - protein, 460 aa, unidentified
  REGION 1..460: note = Table 20
MLLTRKVVLKVNETQAIILGHLTMAASKLFNIGNFERKEYKNLGFEKEPNWYEQKKKLKDNLWYKSLPSQTAQDVLANLDEAWKSFKNLKFKFDHGKRLSGEPKSPYFKGHNSHTNITYLKNSFKLEGNKIRFMIPKLLKQFLNKKYQIIDNFFYVKIKKHIDGIIKEITFSYLNKNEYEMLINYETYAKPIKKDNGRHISIDLGITNLATIYDNKGYSFIISGNSYLSTLHRYNKLISYYQSIFDRVNKLDEKGEKTSSRIRKLYQKKNKVINYIMHTLTRNIVDYCLTNNISRVIIGDIKGIDDKETKLIGYKKAEFNQKLHSLPFNKIYSLLDYKLKKQGIILIKQEESFTSQCSPLCKEVNKDNAHKENRIQRGLFKDGNNVFNADSVGAFNILRKYYQLNKINKYLNWKCLSNPTKISISVTSNENEVGVKGRDYPHIIAAVAALNEKPGNSIAG

SEQ ID NO: 1738 - protein, 279 aa, unidentified
  REGION 1..279: note = Table 20
KLIWREEGYIDVMLTYEQSLGNNQLDKDKFISIDIGVNNFISAVSNKENVRSFIVNGKPLKAFNQWVNKLSAKLQREGKEKEHKLLWRYRNKRINQFFASITNLLVSLALKENIGTIVISKGLMEEYQKKSVKGEKFNQTFRVIPFGKFIQMLKYKCDIGGIDLKITDDERYTSKTSSISGDMEKKEFNGKRVKRGLFKDHKTGKVYNADLNGALNIAIKGLGEGIREQFLKLSNWIDKLSRPIKLNLFGKYSASVIKDIADSNSLSGDRRRTFSETFC

SEQ ID NO: 1739 - protein, 327 aa, unidentified
  REGION 1..327: note = Table 20
MFSVHGCRVVLKLLDDELTVEMSRERDVSSVRLVYYLGQFYIDVVYEKEQRAPLLVGNHAAACDLNLDNLMVIVSTNPIVPSIIVDGRGIKSFNQWFNKNKSELQSKHDIILNEIKELRDKGKEIPDELLAKERELRGRLRALWAYRKRRLDDWFHKITRWLTEFLYRTGHDVFVIGTGVLEAKRNCSERLNKKVTEKFVPMPYRRLIQLLEYKCEERGIRVIEVPNEEYTSKTCCINDDIRRIQRSERPKFSGRRIARGIYRTIYNKTIEINADVNAAFNILRIYANIQPAELFEPNVLKWKLCRPIRVCFTDDVNELIERILNHR

SEQ ID NO: 1740 - protein, 341 aa, unidentified
  REGION 1..341: note = Table 20
SDKGSKSEKVELLLPNWFDYQVKEVKLVYDMNWIEVQVVYEYEKELRVDCNGSYHAGVDIGLDNLLSVVSDNPDVRSFIVSGRELKSYNRWFNKKKAEVRSHMDLVRNMINGERDEERKKDLEKHYLWLKKYFWNLHKARDRKLNTWMHQITRRVADLLYETGHRKIYIGKEGIDKNGISLGKVVNQNYVSIPHRRLVNMLRYKCEELGIEVEEVDERYTSKSSPISDDVVEIQSRRRNGEEVEFSGKREKRGLYKDSVLGKVFNADLVGAMNILKVGAKLRELMLSMKTLLIKLCNPIRFKLLDLIYKSNPESLLIGVGIGDSMPVITQEALALMGGVSV

SEQ ID NO: 1741 - protein, 532 aa, unidentified
  REGION 1..532: note = Table 20
MFSNRVLSIRISGKDRKEKVRKLLFDLAHFKNFWIILIRKYKELYGYYPTDQSILYGLIADREYSSKKEEKLTKFKEVRENILKDEELTKLLLALKEQKKKVDNNYLLQQVIRSVVKSFNDYRKAYREYQRNPKKFKGTPKPPKPKKLKFLMNFSVELNVNTFERLEDSVLIRLRINNKEFLKVKLPKEFHHEVKSIRLKLFGTDVYADVVYKVETLELRTTGEYTAGIDLGLNNLIALVSTNSNLKSIIVSGKEIKAFNQWFNKEKAKLQSEIDTIRNKLLKVEEDEKAQNLKRLLTEKFIILKELSAYRKRRIGNDFHKISRKVVDILKATDHKKLYIGKGAAESKDGINIGKKNNQHFVSIPFRKLIELIKYKAEELGIEVEEIGEAFTSKTSPFADIFEVRKIGKKYLKAKEKEDKTLLRKILNQLKSLRKAVRRFRGLLKDKVSGAFFNADLVGAYNIVRVGESSLRLIENQRVLITKLCNPIKFRLIEFLYKVSPESLLRGIGSSSSLRAGLSLFDYQLCNNLTTF

SEQ ID NO: 1742 - protein, 487 aa, unidentified
  REGION 1..487: note = Table 20
MSKATSITVNKIILPIRIRNAEIKNSIRKLILDTYQFRNLLIMLIKRYYKLYNKSLLNPSVLYGLISMKYSGKYKKEFDKAMENIQKDEKLKEILNALNKQKEVIGNTNVMHNMIRQVVQDFTNYFSALKVYNKNPQKFTSMPKPPKTKKLKELINSSITITGSIIKRDNDNMLVNLRNKEKLSIKLPKDFSYKITSARLKVFASDVYADIVYDKPEQIMQPKGDYIAGINLGVDELISVVSNNPIIRSFIVSGKEIKAYIQWSNKHKSLIQSQIDHLKKQVANTNNKEELQILKQQLKDLEMQLKLLSAHRKRRIDTDFHKITKRLVDILYETGHKTIYVARVSGQQYISIPFERLVALLKYKAQRYGMEVIEVDRKYTTRTSPFADIIKIQKEDNLSLCNGEKEKNIFKDYTVNKIMHADLVGALNIMRVGSKTLKFDFYDNTKLFFIKLCNPIRFKLVDFIYKAKPELLYVNTISKKVLETEKQ

SEQ ID NO: 1743 - protein, 480 aa, unidentified
  REGION 1..480: note = Table 20
MNKSIAGNKNIRTYKMRIKDKKFKSKVIDYIYKYRHFENMYIILLNQDYKQNIGDFRLLTNYEIMRALFRGTTPKKLKEKLTYIRNKYKNHQIMNDLINLSKELKIHNIVEIIKRVKSQYKGFFTRVKNGDYKAKPPKSKKLSKLTNYTIPLDSYKGFSLKRKNQIGINLNNKMIRTYINHKELEKVVGNLKNIKAVHLNFSNSELYLLFIYEKEEKEIKEKPYKSAGIDIGINNLLSIYVDDKDAPSLIIDGKKFKTYNANFNRFIAKLNREIMTTKDKNRKRYLEKYRTYIYEKRNRYFYDQFHKISKRVLEYLEKHDVTEIILSDNLNNIKNNGKCKLNKAIKQNFIQIPFGKLIRYIEYKAKEYGIEVKYVDESYTSKVSSLTEDIKIMQKLLQYNLDLTNALNGKRVKRGLFKDKVVNKIVNADLNGARNICILGSKKAQQKYKAGGENRWLNFKLCNPIKVESDFELCRIIKSA

SEQ ID NO: 1744 - protein, 502 aa, unidentified
  REGION 1..502: note = Table 20
MLRTSKIRITDQEFKEFAIEKVYLTRHFENMLLILLEQDYKQEIGDRKLISNPYVMRAVIRDTKGGQYADKVSYIKDKYQDHGLMQDLIKVGKQLKKDNLVMTMRKVRKDFKSFYTKVKNGDNSANPPKPKKLSKMNSYTLLIDNDKGMSLAYLKKGQNKLGITLDHDEGRKYLYIDHQAVRDIVGDLDNIQSVNLQYSNGELYLLITYHQEVETNNDRPHKLAGLDIGVDNLAAIYIEDEASPSLIVAGKKYKTYNSKFNRQIAQISNSIDTCKLESRKNYLRKYKSYLFEKRNRFFYDQFHKVSKRLLEYLDQHDVTELVISDNLNHLKNNGNCKLQKKTKQNFIQIPFGKLLDYLKYKAKEYGIKVTVVNEAYTSKSNSFTNEVHKVKSLQQKIDSLKAQQKQIESDIKYQQYQCLIDAYQDLLDKYNYQGKRVKRGLYLDYINDLAMHSDINGARNIAKLSSNYQKKDCNNLKKLCNPIKVENDYQFCQLLKQDKQAA

SEQ ID NO: 1745 - protein, 485 aa, unidentified
  REGION 1..485: note = Table 20
MLKSMKIRIKDNRSKLFLEEKIFQTKHFENILLILIKQDRIQNEGKNFNLLLDYEVMRAIITNTEGTKKKSEKINYMKDFYKNNKTMDDLIAVGQELKIHNLTEQIKDIKKNYKAYFTKLKNGDKTARQPKPKKLKKCSHITLFTDGNKSHSFSKKDKIGINVNRKMKYIYVKHEPILKVVGSFDNVRNINLNYSNGFVYLLINYKRESKSLENKNTKSAGLDIGINNLASIYINDNESDSLIIDGSRYKSYNSNFNRFISKINNEIDFWNNYVNDENKNELNFGLDVLNDIKYLCKFRSFIYEKRSNFFFSEFHKISKRICEFLYLNNVSTLVLSSSLAKLKNNGKCNLNKETKQNFIQIPFMMLIKNLKEKAPKYGINVVDVNESYTSKTSSLSADINLVKQKSLNNEELTIDDFKGSRVERGLFKDIILNKLINADLNGAKNIVNIGKKNIFKKEIKYKKLCNPLKFKNENKLSMYIKYVEI

SEQ ID NO: 1746 - protein, 388 aa, unidentified
  REGION 1..388: note = Table 20
WETFFTQIGEYKANPAAFAAKYGSPHPPQPPKAKKLQRLNNASLPLEGSKFSIKSAKVGKKRVEVLGLTVWKKQILVPLKHKGMITKVGIKNINNAKLSYSNGFLFVDFTYIKTQGEAAENTEENKEVEPKPIKKRKTKRAGLDIGLNNLFSLFVDDRDSKSVIYSGRELKSRNAKFNRFNAKLNESIANEVTEWREKTRTRKDGDGNAFSEVIKYPVSHSQRGEELKKYKSYLIEKRNLYFDTEFHKITANLVKHLVKQGVTDLVLSKNLSFAKTEGDIMLGKKVMQNFMQIPFGRMLNKLEEKCVSVGIAVHFIDEAWTSKTSCISGNVNNVQRKAAKSRQSVLTTDLNGSRVKRGMFKDKTINKVFNADLNGAVNHIKVGFKRAK

SEQ ID NO: 1747 - protein, 537 aa, unidentified
  REGION 1..537: note = Table 20
MTKNNKTDDVFGTFEIRINNNKDKAYLFKYIYAYKHIQNILTILVTYLFKDNNPDYKYFLDYRVVRACISDTKGSKEVVDKISYIKYKYKENQLYKNLLQVGSNLKTHNIVMIIRRYKKDFSNYFRNLKDYQTNPSKYTGEPSLPRARKLSTLDNYAIPLDNSKAWIIKNDMLGINLNDKMRYFYLGKIIKNGKILNKEIQSISIKMRLKEIYISFSYKVEKQEYYSNNNESLSYDTTNAGIDIGLNNLISLFIDDKQSKSIIVSGAKYKHYNSKFNRLIAKINQSIDEEVIEYKTIIKPVLPTKEEPKEGAYDTSVYIPIKWTKRGHRLKRYVSFLYRKRNDFFETEFHKISKRVIEYLKLNNVKKLVLSKSLASLMNNGKCNLRKSVKQNFIQIPFIKLIHYIEEKAIKNGIEVIFIDEAYTSKTSCISGDVLEVQTKSKTCKKLSTANEFKGTRAKRGLFKDIVLNKIWNADLNGAVNHIKLAFSNSSFQWLDKHLFKLCNPYKIKSASDFLLFLNRNNDVGKVWLSNTMQTIK

SEQ ID NO: 1748 - protein, 524 aa, unidentified
  REGION 1..524: note = Table 20
MAIGVDKIHITNLDDVKFIQRHMVQYMNFVNLFKIIFNHEIKLAQASQELDELKKYKVTNLLQDISVVRAVFCNQTGGQKAEDVAFLKEYFLSKNDPYFLAFQELYQTYGNEKNIYYALKIVISNIKNQFKAKTYNFPKAKKISKINHFAFTLDASKYVIHRENKKLEIKLGKTTDHRRIYVNYKNLQEHTLDNLTSIQLCYIHGHIELRFNYQTDEVKRKFKKVKTKDKVVAGMDLGLNNTFTLTVHDKDTPSIAFDGHELIKYSCDFNYNIVKARELIRTKCIVNHKNRKKDEKIIYNSNHKHFNKILHDHFYWRDHYYDDVFQKMSVRVLEYCVLNKVTHLVVSKNLLEVKNKGKLTFGKTTSQKFYQIPFGKLIKHLEEKCKRYGIVIEPIDEAYTSKTSPLVDMQEILERAKILKEENEKNQTSKKIPSIVYGGRREGRYYYLNGKGKKCKGIYDADCVGAYNHVRVKYGSGVPVHEMEAYKLKKPIVIKSTEAFMELIRDCGSGRESWILNLKNSNVL

SEQ ID NO: 1749 - protein, 530 aa, unidentified
  REGION 1..530: note = Table 20
MEELRTFTIQLNEKICTEGFYKESMDYLFTCRQFENLLLILLKENYERFKEGKDTNDFRYLTNAFLMQNVLFDYDGKAKNEKKYITEKYSQYPIFQELLKSAKAVGHNNAPSLISRVKNTYTSYFELLKAYEKKELTEKPNPPQPKKLSKIVNYAIDLNNAHSVSLCRLENMSVFGINLNSEMKYIIINPEITDGLNLTKKKIKSAKLVYSNGYLYLQTGYYKEINETTSLTKKDAGLDIGIKNIISCFVDDNKTPSLVINGGDLQSYNNKFNNELSALQTELTTKEVKEWGASKTGTKYPKTYTENGIKIKEEISVMFEERKKYFKDQFHKISKGMLEYLHINKVTDLYISNTLAELKNNGKCKLKTRVKRDFIQIPFLSLFEIFKYKAKEYNISLHFVDEAYTSKTSCITANINKVQEKNLADNHAPSKPVPLNWVEGEEGDIYKGKRTERGLFKDTILNKVWNADLNGAVNILKIGVKKSYEWLKNALWKLSSPIKCSVCELHNTCTIASTGLRYRTQRNQSLIMSI

SEQ ID NO: 1750 - protein, 558 aa, unidentified
  REGION 1..558: note = Table 20
MNANKLPLNSELRIFTIRIKNKKFVKTLTDYIYKYRHFENILLILIKENYELFLQGKTENDFKYLTSKITLRNALLNYNSKNSKDSNYLNEKYKDHKLWQALKETVKTIKQHNFTYCIERVKANYKTYFTNLKAYNKNSSAYTGMPKPPKAKKLSKLLNYSIDLDKYCSLSFKKLNQNLIGINLADKMLYIHHSKSDIESIVGNLKNINSAKLVFDRSQISLQVSYIKKIKPLKLLKPVKEAGLDIGLNNLASLFVNDETTPSLIVDGKPYKHYNTKFNRLLGKLQESLKDHVLEWSISKTGTKYPAKYDKKGYQILKFISYLHSKRNRFFFDKFHKVSKRILEYCQMHDVTDLYISKNLAQLKNNGDCNLRKAQKQNFIQIPFIKLLKDIEYKAKYYGINVHIIDEAYSSKTSSVSGNVVYIQKQAQALGHDTIKQLAKTDLANAFSGKRAKRGLFIDTTIKKVFNADLNGAVNHIKIAKDINTSYLKRKLFKLCNPIKLKSDCDFCRLMQNSVSGKAIGTDLLQRQVSNAHGSKYGKLNSGSSYGNSLYQSLIGLE

SEQ ID NO: 1751 - protein, 246 aa, unidentified
  REGION 1..246: note = Table 20
NNCKGVRIVPYSDRYIFEIIYEKKSENLGLDKNRIVGIDLGVTNLVTMSNNFDRTSLIIKGGIAKSINQYYNKKLADYKSKAKKINKKEITNRILRLHRKRNNKIDDIFHKISRTTINYCIKNNIGTIIIGYNEGWKQNCNIGTKNNQNFIQLPFLKLIRKIEYKAELVGIEVKLETEEYTSQTCSNCGCESMNNRKHRGLYVCSDCGLVMNADINASRNIIKKGFPESYRIGDRGGLNPPLCITV

SEQ ID NO: 1752 - protein, 398 aa, unidentified
  REGION 1..398: note = Table 20
MVKRVVRIQLPSTKLFEELTFLAKNLYNSATYLVRQTFFETGKILRYYSIWNKMREKEDYKKLGKRAGSQTPQQLLRMVEATWEGYKAAKKDWRINPEKYLGKPKIPGYLPRNGRFIVVWSKIQVRIREGKVRVVERLMKEGFPAISTEKLPVTETNHAIIRLKPFFDKFMLELVYEKELPVIKVKDEQKVLGLDLGVNNLVATSDGLLIKGGIAKSINQFFNKQKAKIQAQLSKQGHWTSEKKQQLMRWRHDKLHDLFHKASNAIIQHCLENNISSLVIGRNKNWKQNIHLGRRNNQNFTSIPLHKLIQMLQYKAEEQGIEVLFVTEEYTSQTCSCCGFCLRSNRKYRGLFVCKKCKLVINADVNAARNIAKKAFPESPLGIGDSGCVAQPTKLIAL

SEQ ID NO: 1753 - protein, 439 aa, unidentified
  REGION 1..439: note = Table 20
MLKRTYRFVIDRHDKPYQKLKYCTRVCKDIYNQSLFILRRELEENNNLISKFDLPKVIREIKNLEGELNYRKIPAKSSEKVVQLASETVKSYFKALKDWKKNPSKYRGKPKFPNFLPKNGYQVMSLYGSSLSIKGNVIQFGKKTFGQPVQISIPEKEYLKYRHLWYKDIQRSITNRSDLSNRLIKMVRIIPTSSADYFSVEIVYDKAQLLAPVDQEKAVGIDLGIDNLITMVPNFKQEILIVNGRPLKAINQWFNKKNAEVSSRINKAGHRNTREKRDLYTKRRHKVYDYMHKGSRVVIDWCVKHKVSKIVIGVNKGWKQNVNIGKVNNQKFVSIPFRTLISNLEYKAEEYGIEVVTVTESYTSKCSALDLEPIQKHETYLGRRVHRGLFRTAEGVELNADVNGALNILRKEIGDQFIVDAKGSGSNYLIDNPIRINLN

SEQ ID NO: 1754 - protein, 406 aa, unidentified
  REGION 1..406: note = Table 20
MNKSYTLQVIKSKHPYYNECMEICVKSKQLYNVGLYQLRQALIHEGKFLSYKDVYVGMKQNENWVSLPRKVSNQVWKQVTTNWSSWFKALKSYKKAYDAFTGRPKMPKYNKSFNTVTYEKCALGTRGLAKGQIRLSKTNLILDISSLKGEIVEAKIIQKKNKFLIKVTYTEEMRNNDLDYKKIAGIDLGVNNLITVATNQADLSHVMVNGRGLKSINQYWNKKVSKLKSKLTKGVKSSKRIRSLTEKRNAKIDDSLHKASSKVVNWLIDNQVGTLIIGKNKQWKNRIKIGKRNNQNFVQIPHARLIDLISYKFEQQNGIVLTNEESYTSKASALDLDTLPKRQLKNKPSFSGRRIKRGLYQTAKGLLFNADVNGALNIIRKVAKNSIDDLVEDAQFIHRCVTPKFI

SEQ ID NO: 1755 - protein, 445 aa, unidentified
  REGION 1..445: note = Table 20
MQEEAIRVETHQIKEGTSFYGWAVQECSLNTSLYNRTLYILRQAFSGKHENIPEYTDIIRKEKFISVFDLITRMRKLNDKDFRSLLKDNEAAQTVKKCAESFSTWFRSLNSYKKNPQKFTGKPRMPRYKKEANGDKLFSVAFSYNDAKIQKDGTINIRKDFKLPIKTKLTSLQELRLVPKQGCIEIQIFYKTKISPVDLDYNKAVGIDIGIDNLMAVTSNEGSISHLVNGRPLKSINQYYNKTYAEIVSKLAERDMNTSKKLRRLTRKRNNKTKDYMHKASRSVVDLMVENKIGNCFIGHNDGWKQEVNIGKRNNQNFVSIPHSQLIWMLSYKASEAGINVETHNESHTSKCSFLDDEDICHYDEYMGKRKKRGLFVSSVGCMLNADINGAANILRRGLGKTFSPHKSMFNPIKIDIEKKHPMSVSDQGVEGGASPIVLMVTSTH

SEQ ID NO: 1756 - protein, 442 aa, unidentified
  REGION 1..442: note = Table 20
MQRIETHIIKSNKPIYKELVEMCQHSKNLYNYTLYIYRQAFTDKHENIEEYKDLIRNERFISSYDIVNKMKELNQIDFRSVRSNVNQQVVYQVDTIWKAWFKALKSYQKTPSKFKGKPKMPKYLDKNGLNILIFTTAAAKLKNGKINLTKHLKLPITTKIEKFQQVRIVPRNGYIKVEIVYNKEIKDENLNSEKAIGIDIGINNLCTITSNDGKICNIINGCPLKSINQFYNKSLARIKSINDKKNIKTSKRIKRLNFKRQCKIDDYLHKASRKVVEIMSRNKIKYCFIGHNDGWKQECNMGRFNNQKFIQIPFNRLIEMIKYKAEEIGGVVLTINESHTSKCSFLDSEEVKHHDEYVGCRKSRGLFKSKLKDKVVNADVNGSLNILKRGIGFEFAFNKNFYNPQTIQMQPLSLSNKINGRGYSGIASSKKLLLKKNSIRNN

SEQ ID NO: 1757 - protein, 410 aa, unidentified
  REGION 1..410: note = Table 20
MVQVERQFIKGTPEIEEICFKAARLFNRCNFLMRQEHFAGRRVFGISQLWEMLSKEQVFQQLHNTKTAMQTIRRCLTDWSNFFKSLKVWNKDKTKFLRCPKPPGYKKKMGQVIFFNETIKRKPLKQGLLVPTNLLFSIKSKHCNDFKQVIITPKTFGFVIEVSFEAPKEPKKLKQPGTCAIDLGVNNLCAMTSDQHDPVLIRGGIPKSINQWFNKNRSKKRSRKRYWRLENFFHHTSKFIIENCQANGIGTIIIGRNQGWKQKTKFRRKSKTSQNFQSIPFFKLIEKIQFKAEQQGIKVVFTEEAWTSQASFIDSDPIPVFDKDQPKPQMSGTRFKGLFKTDSGAVLNADVNGSLNIARKVIPKIVEDDRWSRSVSATPVVVNPLKWFHLEKGSMESGLMARTSECFATF

SEQ ID NO: 1758 - protein, 409 aa, unidentified
  REGION 1..409: note = Table 20
MLLTEQHVLKGKHWQEADQLCFASKNLFNRGLYSVRQHFFETDKFLNYNSLDKQLQKEESYRALPAKVAQGVLRQIDRGFRSFFGTLQKFNAEPHLFAGRPKIPKYKEKQKGRNCLIYSNQAISKKALEKGMIKLSKTSIQVKTKAKQVQEVRLVPKPTGEIILEVVFVRGPQDLHLNKNNRLSIDLGVNNLCAMTSDKPEFQPILVKGGAAKSINQWFNKKKAEMQSLLEEGRKSSKSIHRLIRKRNRKIKHLFHQVSKFVVESCKANDIGTIVIGRNKQWKQKLNIGKSNNQNFTALPFFQLIQQISYKAELAGIEVIEVNEAYTSKCSALDLESVEHHENYLGRRIKRGLFKTAEGILVNSDVNGSLNILRKAFPKAFADGTEAVEQNSQEWRSFVVQPKSAIFAA

SEQ ID NO: 1759 - protein, 422 aa, unidentified
  VARIANT 414..415: note = misc_feature - Xaa can be any naturally occurring amino acid
  REGION 1..422: note = Table 20
  VARIANT 412: note = misc_feature - Xaa can be any naturally occurring amino acid
MQLVKTHPIYKNDKYWQGCDLICFRAKSLYNLCTYYLRQSFFKTGKILSSGKLYSLVFSSRAYQEMAVTHRGLSVIRQVLQMWKNYIRSWQDWQANPSKYVDPPKIPNYKHKIKGRFPIVVYNVYQGCPTMDQPSLVQGMCQLFEGLFEGDVNDSIGKARKLVEAMIIPRNNGSYLLKFIYEVQEPTTRSTRVIAGIDLGVNNLVALTTNSSTIRPLLVNGKPLKSLNRLFNRKLDLIGSYQSESQPSQRLGGITTKHHNRLDNYLHQTSSIVINYLKSNGIKTLVVGKNDEWEKETRMGTSKRHNFMPIPHSRLIDILEHKCRLAQIELITVNEAYTSKCSAWDFEPIAKHQKYLGERLHRGLFRSANGQVVNADLNSSLNIIRMYSSEALTAERIGSCGVQPLKVNPLAXVXXLARVKQI

SEQ ID NO: 1760 - protein, 399 aa, unidentified
  REGION 1..399: note = Table 20
MRQVEKHVIKKSNQWWQEIDDLAFKSKNLFNLANYEYRQYYFAEGKTMGLPSLYHKVKNADAYRALPTKVSKQIIKNLTEVWTGYVNAHNDWEKNPHKYLGEPRIPKYKDKTKGRNLVIYPDESIYKKTLKDGICHLSMSNIKIQTQVKVIDQVRIVPTNSAYVVEIIYEKPELEQSQSSDLAGIDLGISNLIALTSNQPGFTPLLINGRKLKSINQFFNKRKAQLQSQLKGNQKTSKRLKGLTDKRNRVVDNFIHVTSRLVVDILKACEIGILVIGKNDGWKHNVAIGKKNNQQFVQIPHAKLIEKITYKAQLEGIKVITINESYTSKTSALDLEQPVKQTTYKGKRVKRGLFKTASGIVWNADINGSCQIVRKYAPDAFKQEELVRLAVNPLLVNPV

SEQ ID NO: 1761 - protein, 405 aa, unidentified
  REGION 1..405: note = Table 20
MLLVERHIIKHNHIRFREIDQMSFFSKNLFNCAVYLCRQAFFSSQPIPTFNQIYHSLKNTDDYKALPSKVAQLVFKQVDKCFKSYQEAKKEYQLNPGKFLGEPKLPKYKHKEKGRNILTFNNQAVSKKALKKGLISPSGLSISIKTKLTQIEEVRIIPKNNVYIIEAVYERKETTIEVNNKIAAIDIGLNNLATVTSNCSDFQPFIVCGKAIKSCNQFYNKVKASLQSQLPKNQKTSRKIEALTLKRNKKVDYYLHTASRFIINQLVIQNITHLIIGKNENWKQNINLGSKTNQNFTSIPHARFIQQLEYKAKLVGIKVQIVEESYTSKCSFLDFEPIKKHEQYLGKRLNRGLFRSNSGKLYSADLNGSLNILRKVVGDSIFDRNSVERLVVSPVRCKPYQARNI

SEQ ID NO: 1762 - protein, 246 aa, unidentified
  REGION 1..246: note = Table 20
MNHYILEVVYNVLVISENKLDKTKVAGVDLGLSNLAAITSNIEDFQPIIVNGNPLKSINQYFNKVKAKFQSIVKKGSTKKIQKLSTKRNLKVDDYLHKASRFVVNHLIAHGIGTLVIGKNDTWKQDLNIGKRNNQNFTQIPHERFVHQLKYKAELAGMKVILTEEFYTSKASFLDLDIIPTYKKGIQHTFSGKRIQRGLYKSKSGKLINADVSGSYNIIKKAIPNAFSNGIEGVVVHPVRLNLQTS

SEQ ID NO: 1763 - protein, 415 aa, unidentified
  REGION 1..415: note = Table 20
MVQVERHIVGRSDSRYARIDHVCWLSKNLYNAGLYAIKQEFLRSGKWIRWIELNKQFLSENNVDYRALSAWSSNNILHRLDQNLKGYFSSIKAWKRDNKKFTGCPRFPRYKDKTKGRFAFVYASHTVRLLDGMLYFPKKEGFSPLRTRVTGGIHEVRFIPRHGYYVIEVVYEVPDAEELPDSGRYLSIDLGLDNLATCYDSNGFSFIVNGRSLKSINQYYNKRRGELQSSLQKQHGLKHSRRLDRLTLRRNNKVDDYLHKASRLIVNYCRDHGINRIVVGYNPGWKDYINLGSVTNQNFVCLPHGRFVEMLRYKSKVLGIGFVDVNESHTSVCSSLDREAVCHHDVYVGKRIRRGLFRSGIGLLINADVNGSVNILRKVFGDDVAMQCLVNRGRVVCPVRVCADRVVGGLVLNCI

SEQ ID NO: 1764 - protein, 407 aa, unidentified
  REGION 1..407: note = Table 20
MLLNEQHVFKRGSAAFEEFEKLCRNANNLYNATMYYVRQNFFEGEILSYEDINKQFIMEKQIDYYSMPTKISQQIQRNVSSAWKSYFNAIKDYEKNPSKYYGKPKIPGYREKGGFYVVPFTKQSISFNNKNVPSGFLKLSGTSILIKIHVKNVQAARLIPLDRNHIKVEILYKKDCEKLKKGEKTASIDLGVNNLVTVIYPNSKPEIINGRPVKSINQFYNKKLSALFSRKFKSKRKEINLINKRFNKVNDYLHKASRHIVNQLVFNDVSKLVIGYNAGWKQDTKISKSGNQNFQSIPFYKFINMLKYKCELLGITVIINEESYTSKCSFFDNEKICKHEHYKGRRIKRGLFKTSKGKLINADVNGALNILKKYLEKVVRNREQILNSLDLIEVCSTPTVFTVKFGA

SEQ ID NO: 1765 - protein, 426 aa, unidentified
  REGION 1..426: note = Table 20
MRSMNQKSRKRKAETITLTEKHLFRKDDPAFRELDDLTFRSKNLYNSTLYAMRQYFFEHRCFPGYRKVNADFTHENQPDYRALPAKVAKHVQMMADEACRSFLTLNALHREGKLQDRPKLPGYMDKTKGRQVLHYEKGAISRPWLQKGIIHLSGTELYIPTGADPAKVQFVRIVPAGGAFAVEVGYREELPELKEGPSRIAALDLGVNNLAVCCSNVSGPVLIDGKYLKSINQRSNKAIAKAKAEARKKNGQNMTVRIRAMYLRRNNRILDYMHKATRYLVNHFVSSQIDTVVIGHSKGWKQDTDMGKRTNQNFCQIPFNMFISMLCYKCRMAGIRAVCTEESYTSKCSFLDDEECRKHKEYMGRRVHRGLFRSHDGTVINADLNGSLNILKKEMQKMDAWNDTLYRQCVEHNLKTDLVRYKVPRS

SEQ ID NO: 1766 - protein, 451 aa, unidentified
  REGION 1..451: note = Table 20
MSKSDKQVKQPKVPKIKYFLAKRPKSDFVGPMQELVGPTKPRIKKEYQIERHIIKHTHPKFSVLDEVTFLSKNLYNATLYAVRQQFFADGSFLEYAKVNKQFTHDRQADYIALPAKVAKHTQQLVDQAYRSFFGLLKTKQQHPKINAKLPKYLDKTKGRQVVHYEKGALSFKKPGFIKLSGLNFYIKTKLIKKQVAFVRLVPKGNHITVEIGYEHEIPKPKDKAGRIAGLDVGLNNLATLTSNVATPMIVNGRPLKSINQFYNKHKAVEDSKLDTGQKTSKARKQQLGLVRKNKIADYLHKSSRHVVNYLVANNIDTLVIGKNIGWKQDINIGKRNNQNFVAIPFTNFIKQVMYKAHNVGVEVIYQEESYTSKCSFFDNEAIQKHDNYAGCRVHRGLFKTASGKKVNADVNGSLNIIKKHLITQEAWNDQLRLDLVEASSTPNIPKFTPDC

SEQ ID NO: 1767 - protein, 409 aa, unidentified
  REGION 1..409: note = Table 20
MSYTVQKIFINPNHALYEALDKYAFLSKNLYNSVLYRHRQDYKEGKKKVIWNLLVNEFRAINQPDFRALPSNMAALIVKSVDSEYNTFFGSLKTGLKANLPRYKHKTEGRYKLIFNIHLISKTYLKKGYLKLTTSDSIKEELKFKLPKNTDINNIKEVTITKFNDGYMINIICKVDDEIKVKEGNNTAAIDLGLSNLVACVSNNKMKPFLISGRPVNSINHYWNKKVSNLRSKLDTSKDEREKNAIKSKINKLNRKRNFKINDYFHKSSTKLINHLDSNQIDSLIVGYNQGWKQDINLGKKNNQKFCNLPFYKFLNMLKYKCERKGISFKTQEESYTSKCSFLDNEEVCKHDSYLGKRVKRGLFKSSKGIEINADINGALNILTKAIGKFTYRPIQVCGLPSTIKVGFK

SEQ ID NO: 1768 - protein, 400 aa, unidentified
  REGION 1..400: note = Table 20
MHLVEITVIKSSNRQLYKACDELCFKSKNLYNSILYIQKQNYQEGKSYINENDMTKFLREQKNPDFYALPSKPAEYVVKQVDKAHESCFSKSKSKKEGKHNQKVGLPRYKDPVKGRNVTTFNIKRLRKQTYRKEGLIHLSKTTIKFKSKIPFEQIHEVKVVPKNGYYELHVVYNVEAPKPVDSEDYAAIDLGLNNLATVVTTVSSPFIINGRTLKSINHDWNKRIAKHQSKLRKGARSSKRIKNMTNKRNRRVNDYLHKASRALVNELRKLCISKVVIGHNNGWKQNVKLGKKTNQNFVQIPHSRFIQMITYKCHLEGVEVVVAEESFTSKCSFLDNESVEKHDVYMGKRVKRGLFMSSTGTLINADVNGACNIMKKHLGIEPSALDLVQVCSTPKVLKF

SEQ ID NO: 1769 - protein, 419 aa, unidentified
  REGION 1..419: note = Table 20
MRLVQKHIITQNNEHYEDLMVMMHRSKNLYNAALYNVRQYYFKSKDDTTVKYKYLNFYANWRSLSSTQNPDYKALPNHIAQQVIRQVDNNFSGFFTLLKNKSKGMYNSPVNIPKYLKTDGVNQIVIDTWARKKLQEGYLQIPTTKLLIKVGKDVAKLNIKQIRLIPCNGYITIEFIYEVPDVQTKQDNKRYMSIDLGINNLCACTSNVVSSFIINGKNIKTINQFYNKQVSKYKSICEKVNKCKTSKRIQRLNFKRKNKIEDYFHKTSSYIVNQLVSNEINTLVIGHNNLWKQDTNIGKVNNQNFVQIPFNRLIQMLNYKCQLAGINCVIQEESYTSKASFIDNDEIPVYKEGKKAEYNFGGKRVNRGLYCTSSGIRINADINGSLNILKKCLKVNSDDLFTDPRDFRGFVYNPKVITL

SEQ ID NO: 1770 - protein, 409 aa, unidentified
  REGION 1..409: note = Table 20
MILVEQQIIKSNDQRFSSLMEMCHWSKDLYNAALYNIRQHYFESKNDSTIKYKFLSYVENWRRLKNTEEFKKLQSHTSQEVLKQVDRDFKSFFALVCKKNKGEYTNRCRIPKYKDKDGFNVLIYEGSDLNKKQVEQGIIKIPKSKVVIKTKQTDIKQVRIIPSGNHLVVEVLYEVEEPALLEDNGRYAAIDLGIDNLCSVSSNCCNSFIINGKPVKSINQYYNKKKAKLQKRVKKCQNRNKSKRLNKLTEKRNRKVKDYFHKASRYIVNQLVSNQINTLIMGYNKGWKQEVNIGRRNNQKFVGIPFMMLRDMLSYKCKLVGINVIVTEESYTSKCSFIDNEEIKKKEVYDGKRTKRGLYKSKDGRLINSDINGSYNIMRKGLVKASLDGKVTYPECRGFVYNPDKFNLR

SEQ ID NO: 1771 - protein, 414 aa, unidentified
  REGION 1..414: note = Table 20
MDIVRRVETHQITKNHKLFSFCDRKCFESKNLYNRVNYILRQRFTDQKGFNKDEFNANYYNLITEFRKCEAAEPLASNFFEGILENLANNWKSFFKSIKDYKENKNKYKGNPNLPGYAQTGEIGRKTAINRKLNRRKDGRFKFAGEPVYFKPQTDKKIKQARIVPKPHGGDVEYYNLEIVYEKEIPELKEKRENIVGIDLGKDRLATVVNNIGENPFAINGKPINSINAYFNKKRAKYMSYVDNRGTSNKIKKLTRKRNNKIKYFFHNVSRYIVDWCDENDIDTLVIGKNKNWKAESNMGKKNNQNWVSIPHNMLVKQIEYKCEDIGIEVLRQEESYTSKASFLDNDKIPVYKSGEKNSYKFSGKRIKRGLYKTSDGTIIHADLNGAYNIVRKKLGNVFNKKIYLHPEIININN

SEQ ID NO: 1772 - protein, 392 aa, unidentified
  REGION 1..392: note = Table 20
MKRDHPKFKIIDEMCFRAKNLYNEANYVIRQEFILNGEYISYNKMNFEFKTHENYKLCFSQPANCTLRLLDKNWKSYFRAIEDWKEHPNKYLGMPKFPKYLPKDGRFPWMIPNNQLVYDYEKSSIYIRNRLLNDFDWKCRCFGRPIQVRFIPKGTCYVMEIVYEIEVPDQPSESNHIAAIDIGVDNLITMSNNIGKRPIIVNGKILKSINQQYNKQRAKLQSEMMKINKKNWSKRLDSLTFKRFCRVKNYMHNTSAFVMKWCKENNIDTLVVGKNDTWKQGKKNMQNFTFIPYEMLLEQLKYKCENAGIKYVEVNEAYTSGTSYLDDEVPTKENYNKKRRITRGLFQAEDMLINADVNGSLQIMRKVFPDSYTGYGIEVDLTPIIINVVKAA

SEQ ID NO: 1773 - protein, 403 aa, unidentified
  REGION 1..403: note = Table 20
MKVERTERYIIKKSHKMWKACDKLCFKSKNLYNYANYIQRQRFINSEKIYKYKDLTFELKHLEPFKDLGSNSGQHTLKMLCRDWKSFLVSIKDYSKNPNKYLGRPKLPKYKKKDGRHICVLTNMQSQIKDGYLFFAFKYLKPFNNMFKVNFKGKHMQTRIIPRGNVYILEIVYEKEVKELKEETNRILGIDLGVDNLATCVNNIGIKPIVINGKVLKAINQYYNKKLATLRSDLKKRHNKDWSNKIDRLQRKRDNKVDYYLHCSSKKIIDHCIENNIDTIIIGLNKTWKQESKLVKKANQNFISIPYDKFISQITYKTQDVGIKVMTTEESYTSGCSFLDDEEIGKETYNKNRRVYRGLFVSNKGIKINADCNGAYNIIRKVVPNAFVDGIEGVDLHPIRVNI

SEQ ID NO: 1774 - protein, 411 aa, unidentified
  REGION 1..411: note = Table 20
MSELITATRVEKHVIKSSCSYFSMLMDFCHKSKNLYNHANYIIRNKFTKENILVSYGELDKILKKDYDYPDYQSMPTAQTAQQTLRLLCKNWKSFFTSIKDWKKHKDKYLGRPKLPKYLKKDGQYILILTNQNCKLQNGKIKFPKTFCGFEITPEFIKNDNAVSFQQVRFLPRRNRIVVEVVYTVAVLEEKPDNNRYIGIDIGVDNLATVCNNISDNAFIINGKPLKSMNKYYNKKISHYREVAKRMNNNDYSLRMHKLTVKRNSKIEDYLHKASRYIVDYCRENNINTIVVGNNKEWKQHADMGRKNNQTFVQIPFTRFIDMIRYKAEEYGVAVIETEESYTSGTSFIDNEEPVKENYNKSRRIHRGLFRSNENKLINADLNGAYQILKKVFPIKWDIGCVLHPVVVNLG

SEQ ID NO: 1775 - protein, 405 aa, unidentified
  REGION 1..405: note = Table 20
MMANRVERHMICATHPYYPMIDEYCFRSKNLYNFANYQVRQTFFQHGTYLSYNKLDKLLKTEGMDTDYRAMPMAQCAQQTLRMLHQNWQSFFKSMKDWTKNKDKYTGRPKPPKYLKKDGRYVLVLTNQSCKVVDEHITFPACFQGFQLKTTIKGKLQQVRFIPKHRHIIVEVVYKIPIPPQKQDHNRYISIDLGLDNFATIVNNVGKQPIVINGKGLKSANQYYNKQMSHYRKVAKQMNGLDWTKRMSKMTEKRNRIVENFMHQASAFVIKHALSLDCDTIVVGMNKDWKREVHLGKRTNQSFVHIPYQTFLHQLQYKAVQHGIRVIVTEESYTSKCSFLDMEEMKKQKQYKGKRIKRGLFQSENGTLIHADVNGAYNIMRKVFPKAFANGIAGVGLHPIRVHVA

SEQ ID NO: 1776 - protein, 429 aa, unidentified
  REGION 1..429: note = Table 20
MILTSQTIIKTSSEFFDMFDEFCFKAKNLYNTVLYKLRQDYFANNLPVRQAGARNNYYDMDKRLKQESSLDYAQMPMAASAQWTVKSVFQNWQSFWNALTAYNDNPKRFSGRPKMPYYLHKTKGRAVINLTNQSVKVKAGVLHFPKSFKGFSIPLNNGISTIKHVRIVPKNRHFVVEIIYEIGDVPLKEDNLRYLGIDLGLDNFATVVSNEGSSPVLINGKGLKSLNKYWNKRISHLREVETAMNGYEISTKTGKATVSNQTKQQTILTNKRNNQVKDFCHKASKMIVDLALKRGCNTIIIGKNDGWKQESNMSKKVNQSFVQIPHAAFINMLEYKCQKYGLNFVKTEESYTSKTSWLDNELPIRHENYLGKRINRGLFRSAPCPSGRRVGKLINADVNGALQIVKKVFPNAKGYGIWACGQPLPVVVV

SEQ ID NO: 1777 - protein, 467 aa, unidentified
  REGION 1..467: note = Table 20
MYRTRQYRISKNHILYDYCRDICRSSAILYNRANFILRQYSSAVDSMALFKPLFPNQMMVYRLVRDSLWGTKYLGDSKWLSYNALDHMLKVTRDKAYYALPSQANQQILKLLLRDYKSFFEAVKVYGRNPGAFTGRPKMPGYMSQGSFKTAVLTNQICRIKDGYLKFPGTKDRLSLGQLPEEVCLKEVRIKPSGNSFVLDVVLSVPDKGIMPMSDKDILSDLSVVSDLKGLRVMAIDPGTDNIAAVANTFGARPFVIKGGVIKSINQLYNKEMKRLSSCAMTCNNRYRTRKMNALTEKRNRRIKDQFHKVSRQLADYARDNHVDVVVMGHNTYQKQEIGIGHVNNQNFVQIPMLIFADMLRYKLAEYGIKFVLTEESYTSKADFLAKDYIPVHKKNSPESYSFSGKRIQRGLYRHYDGTITNADINGAANILRKVFPKVSQWDRGIVDMPCSAGCIEHRAGSCRHAA

SEQ ID NO: 1778 - protein, 542 aa, unidentified
  REGION 1..542: note = Table 20
MYHVECIDIHKNDPLFPYLDRASLCANNMYNVSNFYIRNLMTGLKKDPSLRTENERAVIATVPGSISGINEKLREKYELKIRNIRRAGNLSLQEQEEKAAAVKHLQFRAPDAEKWFASYSLLDAVFRYTDNADYRSFHVHVIQNAIKACCGAWKGYFESRKGSAPASGHTGMPKIPGYRRSGGRSTAVFSSMACRIKHGILFFPYCSENDGSGTKQKDRTRCSIRVAGLPHAGKDKLIEVRAVPYFGFCQLQIVTDDGIREEDLLPDEKDIIGEDGEPKGVMMLDPGLNNFAATADNKGNAPIVIKGGAVKACNQWYNKRMAFLRSEQMKGHDPKTYHPPVTRQMKRISRKRDAFLRDAFYKYAHYICRLMMERDLSYLIIGYNRGQKQCIGLGKTTNQAFVQVPFERFRRILRTVCVKYGIRVILQEESYTSKACFGSRDGIPTYGQEEESAAAVSFSGKRIGRGLYLEDSGKVMNADICGAANTGRKYDERIFPAGMDCGYLYGVVKAVTYRDILQESHKYNKSNPGQTGQRASVCPVCA

SEQ ID NO: 1779 - protein, 455 aa, unidentified
  REGION 1..455: note = Table 20
MSYLLITRKTPGFSALTHRAKNLYNIASFYIRNAYSASIKSNADRFPHEIQVLEELNGVVDELNVIRQKHHSTPIHIIDHEHRFVSMQHLDGFFKLRDQIDYRALPAQANQNVLHMLYRDWKSFFVALADYKAHPDKYEAIPHIPRYADKDGYKPLIFTNQICKLRKDKHGWYVKFPKAVLQAGCVRDRYDLGKLDLHEQKLKEVRLIPHGDNINLEIVCEIEIKEPTIAIHEATRVAGIDIGVDNLAAIAFTSGHRPVLIKGNEIKAVNQFYNKQIAHYRSQLRTGKKDSKGIHHTKRMNRISEKRNRRVKDILHKASRKIIDLCEKEGIEVIVVGNNAGWKKRIHMGKKNNQTFVQIPFRTLIEMIKYKGEAAGIRVVVCEESYTSKASSIDEDQIPVYGKDVTHTFTGKRIKRGLYRSKNGILMNADVNGASNIIRKVYPCMPKRERFVEVL

SEQ ID NO: 1780 - protein, 500 aa, unidentified
  REGION 1..500: note = Table 20
MYSAYKIQIHSNHELFEYCDSLCFKAKNLYNITNYYVRQVYTALKVEKKNENQLQVLMDIETYLPIMNEIRQKHYEKEMVKPKKVDKNGKEIEPKLKLFKMPTKDHSFIGYSFVDALFKVMKQIDYTSMPSQSNQQTMKKVFDDWKSFFEASKKYKINPSCFSGKPKIPKYKSKTGRTTCYLTNQITAIKEGNVLKLPGTSFQLKLGKVALSEGKLQQIRIVPSYGQYVVEVVFKAEQQEMAIVRTAEQINKFIFEPKRVMGIDLGVDNLATIVDNLGLKPLLIKGTWLKSINQYYNKLRANYMSIIRNGKSPKEGVFTTNRLVALDRKRNNRVMDFLHKASVKVVTIALERDIDTIIIGKNSGWKLDVNMRKSAKQTFIQIPYTTFIDMIRYKAERKGIQVIIRDESYTSKSCFLTKDPIPTFGEEHQTIFSGQRVKRAFYKIIGSKIQIHADVNGAFNIVRKHVFGAFEGLDRKHFLQSPKKIIIVKTKKKAKLKASA

SEQ ID NO: 1781 - protein, 478 aa, unidentified
  REGION 1..478: note = Table 20
MEHRTQQILIKNGHRMFGYCQMMCQNSKNMQNTTNFYIRQVYTSLTQDKKLQPLQEEVLGNINQYFEAMNNNQLLAYEKNVVKEMAKEKQKEVKCNLFEKPCKEHPHVDYNFLDSLFKLMNQHDYRSLPVQSSQSAMKQVFDNWKSFFESNKDYKVHPEKYKGKPRIPGYCRAKEKEVKITNQDCVIKEGKYLKFPKTKERLNIGKLGCLDGKLQEVRIIPRYGHYVIELVMKTKNEVEITKKTEKLMSIDMGIDNLAAITTNTGMEPLIIKGTPVKSINQYYNKEKAHYLGILRQGMNPKEGQFTSKRLEKLHEKRFLMIKDYFHKASYHIEVLALQEKVDVIVIGQNKDWKKEMNMGKRNNQSFAHIPHSMFIEMIKYKAEQHGIKVLVVEESYTSKASFVDGDFIPTYEKGSNGKHHFNGKRIKRGLYKTKHGFLVNADVNGSANILKKTYLKLNETDDFNIEAVRVWNPKSIIA

SEQ ID NO: 1782 - protein, 435 aa, unidentified
  REGION 1..435: note = Table 20
MLLVKQYEIRKTSNPEVYAMLDNFCFLSKNLYNLTNYYIRQGYFITRKLASGEILDSKEKAFLKNLNEAVKKYNSSSKRKIRYFDSTHKVPCDAYFLDRVLKGKNYSEMPSATAAQQCIQAVCREWKGYFESIRAKKLKGIPRPPKYKDKKNGRYPITLTANACKIRDGYICFPKTFKGFEIKTELQSLQQVRIRTTKTKAIIEVIYNVEEKEMKPDNNRVIGIDIGIDNFVTIVNNIGDNAILIDGKGLKSINTYYNKRKAKYQRIAKLCNQRYQTNRIERLTGKRNSKVKDFIHKVSRYIVNYALQNDINTVIIGYNEEWKQNIDLGKIVNQKFVSIPYYMLLQQLKYKCKQEGITLIVTEESYTSGTSYLDNELPTKSNYNKNRRACRGLFKSNKGIEINADINAAFQIIKKVNPNYLQGNEVITGKRMYLL

SEQ ID NO: 1783 - protein, 444 aa, unidentified
  REGION 1..444: note = Table 20
MILSEEHRIKKHNNKKLLHEIDDYCYKVKNLSNSVNYLIKQCYRIHKKIVNGKALEDWEKELIQEINKALEKYNAGRSESKQLRYINADNGYIADAYFLSWYLKGTEVYKDVPYSTCSQICIQEKCREWKSFYRAKAEYGKDPKKFKEHPHVPGYLDPKKGRGSLVITSQIFKVDEAGNVTMPKFLSGIHIRARHRNIRQIRIKMFKDSILISLMYEKEEKQISGTKIMGIDLGVNNLIAAAWDSEDRPVIINGKPLKSINQYYNKARAHMQKEAKVYNGKNRTKRLNNLTAKRNRKIKDYMHKASRKLVNLAVSSNVGLIVIGANQGWKQKVHMGNVTNQNFVSIPYKTLINMIEYKARLEGIEVKTVRESYTSGTSYLDGEKPDPTHYDKTRRIERGLFRSNSGILINADVNAAYQMMKLGDTRAIPINTRRTDNQDKSSLN

SEQ ID NO: 1784 - protein, 433 aa, unidentified
  REGION 1..433: note = Table 20
MLEYRVHTVRVGAEHPAWPELDRMALAARRLRNAINYDRRQMFFADLEFNENIDRKDRKTTAEWKALPSKVAREVSRGLDADWRSVRVLRRTKGRRAQPPKYLQGRSRYQLRFSIDALRAQPAKRGMLGVAGMKLDLCPLPVSWDRIKEVRILPSGREFDVEIVWVKTVAEPVESPDWSRVAGADLGIDNLITVACDDAAVRPLIVDGRSIKSRNRFANVRSDLYAALLPNLEGGTRQQRDSTRREALWRHRNSVVKAELHTASKRVVDYCRAHHVTTLVIGWNPNWKTQSTTQSTMGRVGNRRFRSIPHRVLVNQITYKARRYGITVLETEESYTSKTSVLAGELPVKHHEYAAQRINRGRLKVLATGQILNADVNGACQIARKCKPEAFSWANGVAGEVGLSRPLEVVTGGGRPGVRTHLGVKCIEGDTSS

SEQ ID NO: 1785 - protein, 380 aa, unidentified
  REGION 1..380: note = Table 20
MSITANNLYNHANFILRQNFFNNKTNKGYRKFLNYNTIHRILKNMNEENYIKLPRQTSQQVLRDLINNWSSFRKSEKDYFKNPNKYRNRPKPPKYKAKGGKGTIKFTNQQCRIHKKDGLIHLPTPLQDITIKPYKAKNIRELVCIPKSDYFEVLVCYKEENSNKTLNDNENIASIDLGLDNLITMVSIVDKPIIINGKGLKSKNKYFNKKIRYYQSLLQNNSYSSKRILKYWEKRHNIILDYFHKATNEVVKYCVKNDISKVVIGYNKQQKYKSKLKNFVQIPIFSLIPILRYKLEEQGIGLIETEESYTSKTSFIDNEKPIKHNVYKGKRVKRGLFKTEEGRILNADVNGAFQIMKKVFPDVEIPRDNGFVYNPFLINC

SEQ ID NO: 1786 - protein, 442 aa, unidentified
  REGION 1..442: note = Table 20
MAKKNKQVPRNDLQYEQLASEYLIKATPKLDEYSLVAHNLYNRALFDLRQGFFKKKYIKGYSQLDQIFKERYQKRELMLYHSLGYVQSAQQTLREVTTVWQSFFKALKAYKVNPSKFSGKPRLPRYLRDKRHTFFVTNQNAKVKDGYLIVPKLDLKLKLAPNIEKIGRVAFKPVANGYKVIVPYKANKEIKYLPDNGKYIGIDPGIDNAFACASNTGNRPLLINGRGIKSVNQYYNKKRAELRQLQARYHQLERIINTKQGKKVVYQDTQAMKKITAWRNDKIRQFAHKASKRIVDYALSCEANTIVIGKNKSWKRSSNIGKRNNQNFVGIPHQVMIDMIKYKANLAGITVIQTNESYTSQTSSLDHEQPCWENGNKSRKRQGKSPVNRRIKRGLFKANDDRLINADINGALQIIRKVFSNFQVNDEIAGVVLRPVKWSPKF

SEQ ID NO: 1787 - protein, 447 aa, unidentified
  REGION 1..447: note = Table 20
MVRKQKSKKATIQAFRDIRDKKTEIQYEYLVEKHVIRANDSRYLTLAKYAHLANNIYNQALYRFRQSLFKGKWLSYGALDRSFKQSYQQKDCMLYRSMKSVHLAQQILKLVMQNMTVWNKAVKAYQKNPGKFTGRPKLPKYKNKGGKSIVIVDNQTAKLRPNGIVEIPVMNNLKIKLQHQDTTKIQQVRIVPKNNQFVVEIVYKTNKVIAYKKDNGRYLTIDPGLDNAFTLASNVKEFQPVIVNGRPLKAINQYYNKQRAKLTKLYDFNKQSRNTKRLNNLDFYRNKKVLGFAHEASKRIVEIALNHELNTIVIGKNKGQKHFINLGKINNQNFIGIPHQKMVEMIEYKANLAGIVVIQANEAYTSQTSFLDNEEPINQNGDKARKRKGLSPTKRRIKRGLFRSNKGFLINADVNGALQILRKVVPNAFADGIDGIGLVPVKLNLNF

SEQ ID NO: 1788 - protein, 403 aa, unidentified
  REGION 1..403: note = Table 20
MEEKNVTYRTRVHYIVPSQELINEARLSNNIYNQALYILRQAFTNEEKLPSKFDLVKTLRHKEYECEEYNNFSKMVSCNAEAIIHLAAQNFKAFLMALKAFKKNKSGFTGAPRIPSYNKKEQEFMVIIRDTQCTVKDGMMRFPGKLNLDKIYVGDLDIAHVRIFPGKKKYKVEVVYKIESLPKKTKGNIAGIDLGLDNLATVAINKRGIRPLLINGRPLKSMNLYFNNKRDKVQSKLKKCNDKYMSHKLETLYRKRNNRFNTYMHKASKKIIDYCLEHNVKQIIIGHNKLQKQESKLKNFVAIPTFRLIELIKYKAEYQGIEVVETEESYTSITSYLDKEEPIKDNANKARRQHRGLFVSNKGKKINADVNSAYQIMKKVIGDKVIKPIGKGVVFIPRKVTIA

SEQ ID NO: 1789 - protein, 251 aa, unidentified
  REGION 1..251: note = Table 20
GSHAHVVSSGRFEVVMGRQDARIDRLKSVLMTPELRALQAKMDEAKQRGERLSRGDQMVLRKGMKALYADPAYLEAQRRRAQWLNDFLHKLSNNLVRNCATRGVQVIVIGQNKGWKNGGDMGTTQNRRLRTIPHARLIELIRYKAEQQGIVVVTTEESYTSKTSFVNNEPLRKHSGKKKSKAAAEKSAPTKVEPEQTSPAHEPLGRRLKDERNTFVNAHQTGRLARVHADVNAAFNIAACSSGWPITQASP

SEQ ID NO: 1790 - protein, 366 aa, unidentified
  REGION 1..366: note = Table 20
ANFHYRQFFFHLDEFINYYDLQIILKDHEAYNILPAQTSQQILRLVIKNWKSYWKEIKDYSQDKSKYLGRPKMPNYKRKNGQSIVIFTNQNCWIKHGYIQFPKSVNLPPIKTRIKQHQQIRILPRGSYYIIEIIYNQQEQTLHLDKSRIISIDLGINNLLTTANNIRKRPLIVKGNVLKAINQWYNKIRAINRSFVVPSHPETMKMNVQTKKHNNKIKDYFHKASHMLINYSKLHNIGTIIIGYNKEWKQKSNMGRKNNQTFVSIPHLKLIQKIQYKAQLAGIDVVLVDEAYTSKCSALDNEPIEKHETYMGKRISRGLFQSSKGIKINADVNAAMNILRKVVPTAFDGKGIEAMVLSPRIAKICS

SEQ ID NO: 1791 - protein, 540 aa, unidentified
  REGION 1..540: note = Table 20
MATKSNRKKLLDSVAGSGFSRRGVIHEKEKKKLAVISHNTRKNKSKKVKKSLIKVTKRSLKKFLKLLDTVSGFFFLPVKRYRKTEQIQIRIIKKKYKKYKDPLSKICHHAKNLYNKANFEIRQRLFLHRKADGSLNKRYLPKYVFLYHLLKNEMVYKELPAQTAQQILKVVRQTWKGYFEAHEDYKERHDKYQGEPRIPGYKKKKDGEWLVVFTNQQCRVKNGCLIFPKRVNIPPIRTRIRGKINQVRILPRGNVYVCEIISEKNPKILGLDRKRVLGIDLGLNNTVTCVNNVGLKSGIIKGGVIKSINQFYNKLKARYQSIKDKQGIEGETKRLQKLRLKRNNRINNFFHQITRKLVNYCILGNFGKIVVGYNPGWKDKLNLGKRNNQNFVQVPFKKLIDLLKYKGRLVGIKVVMVEEWYTSKTSALDLEPIKKRKNYLGKRVHRGLFLTKNKVKINADVNAALNILRKNVGNEFIKHKKGLSCWLQPKIWRTYENLNLKKGKSNQLVVDSGVVNSPCPQSPKKRNEGMNSISGNYSAC

SEQ ID NO: 1792 - protein, 425 aa, unidentified
  REGION 1..425: note = Table 20
MKLVYKFRTLRTEHLDVLCSISKKLYNQANWYIRQDFFHLENWLRYNDLDFIMKKYSQYKLLKAQTSQQILKVLDKNWKSFFNAIKEWKKDRKRFNGRPRPPKYKKGCNNILIFTNQNSKIKQDKIVLTMSHLFKELFPEFENPIEIKIPTYKNKRFGEYQQIRILPRKGFYEIEIIYKKEIETSKLDTTRYLSIDFGLNNLITTAENMNTKPIIISGRILKSINRQWNKQKARFFSIKDKQELKWTDRLDKITIRRNSIVKDYLHKTAQFIVGYCLEKQIGHICLGKLDNIKQNIRMGKRNNQNFLNIPIQKLKQMITYKARLVGIKVHDVNESYTSKCSSLDLEPIQKHQHYVGKRIKRGIFKGSNYILNADVNGALNILRKVVGDGFIQDLSDRGYWFQPVRIRDMFQTSYKQFLLESVSIS

SEQ ID NO: 1793 - protein, 407 aa, unidentified
  REGION 1..407: note = Table 20
MKVLRTEQIWIKGNENIKELCHLSKNIYNEANYVIRQEFFKTKRWIRYNELYKLLKRSENYRKLPAQTAQQILKIVDRNWKSFFNAMNAWKEHPEKFNEMPRPPKYKKKNGIFMLIFTNQQVKIKEEQLIFPKVVGLRLHTRIKEGIKEVRIIPKGVGYVVEIVYEKEVDVVERDKSRIAGIDLGVRNLVTIANNIGEEPIVVKGGVVKSINQFFNKEMARLQHIYAKQGIKKSKRMERLSVKRERKLRDFFHKASKFVAEWCASHNIGRLVIGYNKEWKQGVNLGKKNNQNFVQIPFLMLIQQIKYKAEERGIEVLLVEEDHTSKCSFLDGEPMEHREYIGKRERGLFRSGKRIINADVNAAYNIIRKAIPKAFEADGIEGVGLHPVRWTKYEIAQSILGHSTRNA

SEQ ID NO: 1794 - protein, 417 aa, unidentified
  REGION 1..417: note = Table 20
MKIIRTEQIFILDNGIISYMCYKSKNLFNQANYILRNQFFNKERLSSYKELVNEFSMPSEIDEYNNFQKLPAQTAQWTIKKVKESWSSFFRALKAYKKHPELFNGIPRPPKYKYKDGEFMLIFTNQQCSIVDGILKFPKIMNLELKTRLENVDLREVRIIPLGTGYNVEIVYSKEISDFNEVSANRILGIDVGVRNTITIGNSISEKGIAVKGGVLKSINQYFNKKLSRLKSINDKQRKNHENTKRINKLYMNRNRKIKDVMHKLSDAVIKYAINNKIDTIVIGHNNRWKQSAEMGKKNNQNFVQISFNTLINQIYYKGQEHGINVIIQEESYTSKCSFLDNESIEKHDNYLGKRISRGIFKSLNGTLIHADLNASYNIIKKAIPEAFANGIEGIGLYPGSLSIPKFIDMITSKGVC

SEQ ID NO: 1795 - protein, 370 aa, unidentified
  REGION 1..370: note = Table 20
MLVTRTQQVALKGDHFSYWCHTAKNVYNKANYLVRQEFFGSGTYLSHYDVYHLIKHDDEYRELPAQTANEVLRLLHQAWRSFFASIRSYGADPSRFLNRPRPPRSLDKGGETVLHFPHNHLSHRERSILLPKKVGRYRIRHRLPDGADVRMVRVVPLGGRYVAEIVFQRELPDPASTHSGPILGIDVGLENIITVADSIGSTPWIVKGGALKSANQYYNKELARLRSLCERAGTRTTKRIKRLTARRNRIVKNALHHLSRRVVAYTKRVGAQAIVIGRNECWNQGIRLGKRTNQSFVQIPYHVLIGQIRYKAEELGIEVVLTEERYTSRCSFLDGEEMRPHVEYAGRRVRRGLFISKKGTVINADVNAAY

SEQ ID NO: 1796 - protein, 418 aa, unidentified
  REGION 1..418: note = Table 20
MMATTTRTEVMEVGMNKALSQLCHQVKNLYNKANFIIKQKLKNKLFTSYNDLDRILKFEECYKLLPAHTAQHTLKLLVRNWKSYYNAVREWKNCSGRFLGFPRSPNYKPSKGEYIAIISNQQARIVNGLLVLPKKVEFSLKTRLHAGHKLREVRIIPRGVGYSVEIVYHKQIPKTKKKDQKRKGAVDLGLTNLVTFVDNIGSRPIIVKDEGKGVKSITQYYLKKISKLQEQYSQQQRKILNQKNRLNYGRAYYLAREKWRRKMKDAFHKLSKFLVNLWVRRGLHTVVIGYNPQWKQQVRLRRKTTQLFVFIPFYRFIKLLQYKADEQGIMVEMIDESHTSKCSFLDNESIIHHSSYLGKRVKRGLYLSAQGKYINADVNAAYNILVKSDPQALPKRSVGGVGGYVIYPLRMSFKAMTL

SEQ ID NO: 1797 - protein, 400 aa, unidentified
  REGION 1..400: note = Table 20
MRVKRTERIKVRPSFTLMQLARQSKNLYNYGNYIIKQQLNKNSYMTSEYELVNMVRYHPCYTEFIAHSAQQTIKFLVKNWKAYFKAKKEYAKQPAKFLSEPKAPKYKDKQGFHTIYFTANQIRLKEEGWVYFPNRVGVKIKTRLNQGTKVNHVRLLPRGTCFILEIIYEQELEIRKPSSLPPKRILAIDLGVNNLVTCVSNVLPPFLIRGRKLKAINQWYNKERSHLQSVYDLQGLKDYGQRMKKIIDKRYYQVENYLHQASRIVIDQCLNHHIDTIVVGYNKKWKHRSKIGKRNNQNFVAIPFLNLIRKLQYKVEEVGITIILTDESYTSKCSFLDDEPLRKHSNYLGRRKTRGQFKSNNGILLNADCNAAGNIGRKVFPLVFTSGTVDAVSHPYCWTV

SEQ ID NO: 1798 - protein, 397 aa, unidentified
  REGION 1..397: note = Table 20
MQRVERHIIKPNDKRFNSIKEICHKSKNLYNYANYIIRQDFIANESIPKEYDLTTKLAKEKQADYISLPAQSSQQTIKLLYKNYKSFFKALKSYQKNKSKFTSNPKLPKYKAKNGVSIVVFTNQQAKIKQGKSLNKIHFPKSTNLKPFITKIDNQTSTLKQVRFIPKSTCFIVEVVYECLAKATNLIENSFLSIDLGLNNFVTSIDNQSKQPFIINGRAIKSVNQFFNKLRAKYTQTLKLSNNKFHSKKLANLALKRDCKINDFMHKSSDFIIKHCVEHKIANIVIGKNKEWKQEIDLGKKTNQNFVSIPYNSFIEKMAYKCENYGIKLHLTEESHTSKCDHLANEPLGHRENYLGKFINADLNGAIGIARKVFPNAVQTLRDRGTAFVPIKISIGF

SEQ ID NO: 1799 - protein, 412 aa, unidentified
  REGION 1..412: note = Table 20
MIMKLKRVERHQIRNDEAADRICFKSKNLYNRANYVVRQRFIETSKEKESGKREHSEWIRYNELDRICKKDNWPEYRDLPAQTAQQTLRLLEKNWKSFFKSVSEWKKNPDKFKARPNLPGYKNKEKGRSIAVFTNQQVKLKNGFIRFPKSSCLNPVKTKVRNGLQQVRIIPGHACHTVEVVYQKEVQLREDLNQSKYLSIDLGVNNLSAIVSNDPEIKPLLISGRPLKSVNQFFNKEKARLMSYIGDKGTSGRIEKLTRKRNNKINDFMHKTSKMIIDFALEHKIATIVIGKNDGWKQGIGIGKRNNQNFVQIPFNKLIEQLEYKSEEVGIAVKRQDESHTSKVDHFAGETIEHHDKYLGKRIKRGLFKSSTGKIINADINGSVGILKKAFPNAFADGIEAIGLAPVKVIPS

SEQ ID NO: 1800 - protein, 401 aa, unidentified
  REGION 1..401: note = Table 20
MQLVERHILTDKSCYDLCVKAKLLYNQSLYYWRQSIFGNIQYFSEYELTGLLAEYNDENYKSLPAQTSQQIIKLLFKNIKSWQRARKEYEKNPSKFLGRPKLPRYKKETSIVVFTNQQLKLKDGFIHFPKIANLKPLKTKVSNVVQIRIVPNSDHFTVEVVYEKQEKPLQEYNGNWMGIDLGLNNLATCTTKQTGTIYNGRPLKAINSFYNKRKSKLQSVLPKGIFSTNRIQRLTKRRNNKVNNYIHQVSNKIIKQAKNENITKIIIGNNKNWKQEVNLGKKTNRSFASIPHSTLIEKIQYKGLMEGIEVLVTQESYTSKCSALDLEPICKHENYVGKRKKRGLFITATGKLINADCNGALNIARLGLSVTGDEIKISESVMSAALAPKRINVLIHKTNSN

SEQ ID NO: 1801 - protein, 412 aa, unidentified
  REGION 1..412: note = Table 20
MVRTEKIILNDKRLRVMLQESTSIYNQSLYFLRQSYFKTKKEQKIKTPNYYELYNLVKNEKCFKESNLDYVAKQSIIKQASTNWTSFIKSTLAYKKNKDKFKAKPKIPRYFKNGKLNLLTYDIRRISKKIKCHDKSYEIKFLKSDVSVKIPKYIDKASINCFRILSYYDKFKIEVIYEKAQNNLSLNKQNVIGIDIGLNNLCAITTNNQNKSWIIKGGVLKSINQFYNKEIAKIKSELKLKNNRYTSRKLEGFNKRREQKINVIFHNISRKIVNLCINENIGKIVIGHNNNWKQNCKMRKNISQNFIQIPFNKLILMLSYKANENNIDVIIINESYTSKCDHLAFEEMKHQESYLGKRIKRGLFKSSIGKNLNADINGAIGILIKAKEISDVQIMNLRNRGDVVSPMQIKIV

SEQ ID NO: 1802 - protein, 304 aa, unidentified
  REGION 1..304: note = Table 20
LLLDKIGKIDKDKYYYFNKNKMIEKNNSNIKNISNLKIPLFNRIKEKKIRQIEVKINHFRKLLVNITFEREYSSVRDDNIRPVSIDLGLKYLFSIYDYNNTPSLVDSRYLNYINHKYNDLIDNLKSYNKIKYGVDKSKLQERLEKNRKNKINNIFNKTSDWICNRYSNENTLIVGYNKEWKTKVNLGCNTNRKFYQIPYRILLDKIKMKWERAGKQYFEVNEAYTSKCDSLALENIGSKKNYLGKRERRGLFRSSTGKLIHADINASINIMRKYYKRENIDFSLQNTNKVNNCYKVGLYHLSRI

SEQ ID NO: 1803 - protein, 395 aa, unidentified
  REGION 1..395: note = Table 20
MRLVERHIIKDNRFEDVCLKSGLLYNYVLFNVRQGIFSGDYINEYEFSTKLCKENQVDFRNLPSVVSQQVVAQVFSVTKSWMKSKKEYEKNPSKFLSRPKLPKYKRGKKQNMVVFTTSACRLKSDGYIHFVKNIISPIKTRIGDNKLCQVRIIPQATCYVVEVIYEKKEQDLNLNKDNVLSIDLGLNNLCSCISDVGIKPFIVNGKIIKSFNQWYNKKRARLMSYIGDKGTSRRLRQLNNYRNFWIDDHIHKISRYIVNHCIDNNIGSLVVGLNKGWKNGVNLGKRINQKFVEIPFSKLVEKISYKCKLVGIDFQVHEESYTSKVDHLAFEKLGKHDVYLGKRKKRGLFQSSIGKLINADINGTIGIGRKVFGDSYVSRIIGSGLAFNPVRVNIL

SEQ ID NO: 1804 - protein, 307 aa, unidentified
  REGION 1..307: note = Table 20
MPQMPHYRKRGGMFNLYYTNQSCSIKDGRIKLAKDLFVDIPQWEKYSSRIVKFNQVRMLPNRHNIKVEIVYDYDVQHTDVDTDKCAAIDLGLDNLATMVTEEGCVIFSGKYLKSYNQYFNKTLSHLQSIKDKQGIKRSTRRIIRMYDKRDRYFEDAFQKVSRQIVDMLVEKKIGRLIVGYNAGWKQESGMGKRNNQKFVQMPFARLTSYLRYKCEMVGIDFVEHEENYTSKCDALALEPIGKHEEYLGRRTKRGLFCSSIGKLINADQNGALNIMRKVVGDSYVSRIVNSGHSLCPVRYSNPFVRIV

SEQ ID NO: 1805 - protein, 432 aa, unidentified
  REGION 1..432: note = Table 20
MKSQFKVATELHDDMMIDLFRSIHSYEQKLMDGLTKHFTMAYRNPLSKSPMKYIISDVTKKFQTYFHNVKQEPSCKPPNLNVYELNTLISKNFRFDTNSDKQLTPEALTYVENLKDNAFIKPPLCLKPNKKSAQLVFNKSYFTIFKQTIYFSNEADVFHNPLPFKVPLPFHLTFRDIHQIRISLELNQFKVYFLYNINLEHKSSEVDNNNFLAIDIGLKNFCTMVNNVNNQAIIIDGKPIKAYYHNFNYKVRNYKKKLKRLHQDTSTKKLANLYNKRKAFTTNYLHQVSSYIIKYCKKNNIKKIIFGYNKGMKEQLYKTTSKKGIFFQIPYSKLVNYLSYKCKLNHIEFIIQEESYTSKCDSLALEPLNFKKDYKGERVTRGLYKSSTGKLINADVNAAINIARKAIGKSLDPWVKELASSGVMSMPLRISV

SEQ ID NO: 1806 - protein, 245 aa, unidentified
  REGION 1..245: note = Table 20
MRSDLDADKYLSIDFGMNNLCACISEDSCFLINGRPLKSINQIYNKKSSELKERRPKIDKKYQDKRVNRIKLESLSLNRELRINSYLHNCTTYIVNFCIEHKIGTIVLGRNKNWKNSISLSKTVNQNFVGIPFYKLMNMLAYKCIRLGINFVLQEEAYTSKCDALAFESIEKHESYNGSRIKRGLFKSSVGKLINADINGALNILRKFLNSSKGTSEFSVLQKIIGSGLVFRPVRITGNGIEAKL

SEQ ID NO: 1807 - protein, 443 aa, unidentified
  REGION 1..443: note = Table 20
MRSERVLIKPNHDDYSSCKQIARLSKQVFNQALYYKRQAFFRSEFLSFSNLDQLMKIHHKSLYDSLPNAGSQAVIKKLSGDFDNFWKALNDWKAHPEKYTEKPQIPKYKKQGQLKTFLLPAKPISVKESHILLPKKMNISPVISRFAEDKKANSSCDIFKEIRIVPHGSCFWIEIVYDETQSKNHFKKNVKLNPDNKLAIDIGINVLMAVTSNQANFKPVLINGKPIKSINQYFNKQKAKLMSQSKKRKINRLSIKRYNQIRDYFHKCSNYILQLCLKHDVGEVIIGKNKNWKQAVNIGKVNNQKFVSIPHFQLIGQLKYKLEAYGILVREREESYTSKADSLACDKLPAYKKGASHIFSGKRVKRGLYRSSTGKTIHADVNGSLNILRKASNDDFIEGLIRSGCVFQPSYWTPNGSVVKKSKPLDCFSDGADFKLHLNGIAI

SEQ ID NO: 1808 - protein, 298 aa, unidentified
  REGION 1..298: note = Table 20
MANQQFNEKKDRSVLQEVRIIPRNGIYVVHLAYKEANRYDARTVGLDSARILGIDLGVTNFATMTAVGPDTENLYPLIAKGGRLKALNQYWNKQCAELKSRKKYGHLGAKANRRAFRIKDYLHKLSHFVIEYCLNHGIGRICIGRNKDWKQEVNTGKRNNQSFVQIPHAQFVGYLRYKAESVGIEVIEVEEAYTSKASALDLDPIPEYGKGKEVKFQGKRVKRGLYRTLSGRLLNADVNGSINVIRKLFDKEVRDALLGEPAVGGRLFRPKVLDANSGTFRIRESQCSIETARRSPRL

SEQ ID NO: 1809 - protein, 442 aa, unidentified
  REGION 1..442: note = Table 20
MPQRVERIIINRNHPNWAACARLCSLAKKLGNCASYILRHRLFDKKAPYTRAELDRALREQYPQDYRAMPSAASAQRQGQIVAKQFKSFAKASAEYKKHPEKFLGKPKLPGYRNKYRTFCVGRNGYKIENHRLIITGGDTVGFNPIIVRSCSNQSFNAKATGSLAGDLRIIPKGNSFVVELTYQIKENERTVSLNRQEAVCIDLGVNNFAAIVSTKPGTRPILVKGGFLKMLNQSYNKRAAQLRSKGHLKHLASVSFKRQRRIDDALHKISRTIIDFCVQQEVGRIVIGKNKFWKQLSNMGRRNNQNFVNLPHSKLIEQLIYKSQEYGIEVSVVSESYTSKASALDFDDIPDYEKGVKKTFSGKRIKRGLYLTKQGKQINADTNSAANIGRKELGDEWLKTLLGLDEGVFVNTPTVLRTPYGMRRSLEAGACSGEAADFSLR

SEQ ID NO: 1810 - protein, 453 aa, unidentified
  REGION 1..453: note = Table 20
MIAVYQTKRERPVELIRAERIVIKPGHVNHAACKRYCGAARRVYNAALYQMRQALFSEAPISASQADKVLKQTQRETYQLLPSAGAQRTTQVLGDNWKGWLAAKKDYEQHPHKYQSRPKLPNYARAAKTYVVGRNGHKIEQGRLFLASGKDFGFQPLKVTCCQNQPYNSKASETIVNDVRIVPLGTAFVVELVYRETVEPPSKLNPDNAFGIDLGIDNLVTIVSTQQDYAPVLVKGRAIKSINAKYNKLKAQLASNDKHGHISTKSRKRYSQISDYFHKVSHWLIAECLRTDTGRVVIGLNANWKRSVNIGRVNNQKFCAIPHRRLLDMIQYKAERHGIEVVIREESYTSKASCLDLDSIPDYQAVKEGKVVPLFSGRRVKRGLYKTGSGVLLNSDVNGAANILRKEIGDHWLMSQIEAGQGVMGTPVAVKHIDLLLEAGLRPRETMSNREAA

SEQ ID NO: 1811 - protein, 414 aa, unidentified
  REGION 1..414: note = Table 20
MYLTQKNQIRGLSKKQYLALKTLCRLSKNLYNVGLYSVRQFFFTERGYLRYESNYHGVKSNDNYRLLNTDVAQQTLKVVDRSFKSFFKLIEKAKLGAYQFNQISLPKYLPKEGYFPLIMPRVKIKNGFFRVPMSREFKAEHGEIWIPFPDRLQGKKLKEVRLKPKHHARWFEVEFIIEQPAEPQDLETGQGISIDLGLNNLATCTMTTGASFVVDGKRLKSINQWYNKINSKLQSTKDKLGIKALTNRQSRLLKTRNNQVRDYLNKAARLIINQCIANKIGVLIVGVNPGWKQEINIGKRNNQNFVQIPHYNLRQKLQALCQRYGIQYREQEESYTSKASSLDGDQIPVYNADNPAKHTFSGKRVKRGLYRSKDGHLINADCNGAWNIGRKSKHDGFTGVSRGCLAQPAKLYVL

SEQ ID NO: 1812 - protein, 418 aa, unidentified
  REGION 1..418: note = Table 20
MKKTLRQNLRGLDKKDYEILRSLCHLSKNMYNETLYEMRQYFFDNGEYLNYYNAWERLKNDSWNYERLPSQVAQQTMKNVDKAFQSFFKLVEKGREGKYDSDKVSPPNYLDKDGFYLLDFPNQMFQIRDDHLRIGVPKKFREEFGYDQKEIRIPFTYEEVRDKDIKRLQILPKGDAEYFEYRLVYEEEKEPIETDDDTFLSIDLGVDNLATCVDHSGRSFIIDGRKLKSINRWYNKEIARLRGIKDKQGIEGDTKRIKKLFRDRRNKIHDYLNKAVYRIVEYCKDKKIGTVLVGDGKGWKQEVNIGDKNNQNFVQIPFNTFKQKLKHKCEYYEIGFELVNESHTSKCSFLDGEPVEHHEEYIGTRVERGLFKASDDTLINADVNGALNIAKKAGMLETVSGVESSGVVATPRRIRVVS

SEQ ID NO: 1813 - protein, 433 aa, unidentified
  REGION 1..433: note = Table 20
MLRVQKNRVRGLTKKEFSILRSLCHYSKNLYNVTLYTVRQYYFLNGTFLKYESAYHYVKDNENYNMLLTASGQQTMKVVDRTMKSFFGILRQRKEGNYNRPASLPHYLDKDGLFVVLFPETGFRIRNGKVYIGLSKKFREENHVDQRDIVLDVPKNIRGKHVKEVRLIPKYGGLYYDLEYVYNDRQENIALDKSKYLSIDLGLDNFATLVDSTGSAVIIDGKGLKSINQWYNKENARLQSIKDKQKIKGITKRQSRLLYRRNNKIKEGLNQAVNIVVKRCLDNGIGNVVVGELRDIKQKINHGHVNNQKFVQIPYGTFKLKLKSKCEQYGIEYHEVDEAYTSRTDALAFDEIKLQPYGESRRIERGLYRSITGNVINADVNGALNILRKVSGDSPVRGIVGRGLVNRPRRVRLYSRPPPNQIANATAAASPVL

SEQ ID NO: 1814 - protein, 422 aa, unidentified
  REGION 1..422: note = Table 20
MKAKQIFLTQSNFLRHLTKSEYNMLREMCRYSNNLYNYAVYEVRQYFFKTNKYFPYKKYYPICKFNENYRLLQAGVAQQTLKVVERSFKSFFALLKLKREGRYTEKVRLPKYRKKGDMFNLVLSTNAITIHNGILTVPMSRTFSKQHDKAKIKIVVPDRLKDKEIKEVRIIPLYKGTHFKIQYSYKAEPETKNLNKDNSIAIDIGVDNLASCVTNTGTSFIMDGRKIKSINRYWNKRKAKLQSIANRQGFHMTKQIYSLTRKRNSRIDDYMKKTARYIINHCITNDIGTVICGYNKNFKRNINLGTKNNQQFTQISFNKLFSAIKNLCGRYDITYIEQEESYTSKASFWDLDEIPVFDEKKKTDYQFSGKRIHRGLYSTKNGTIVNADINGACNILRKSKQNFKYEELCRGLLASPLRIKIN

SEQ ID NO: 1815 - protein, 440 aa, unidentified
  REGION 1..440: note = Table 20
MFATQKNRIKHLTKEQYALLQNLCRYAKNLYNVALYNIRQHYFVTGKLLSYAKNCALCKTNENFKMLQAGVSQQIIRVATQSFKSFLGLKRLAAKGQYPAEKVRIPRYLKKDGYFQLVLSTNAITINAGYLQLPLSNVFKKDHPEARDIRFPFPERLDKTSIREVRINPAHKAHFFEVEYIYRDKPVVLPSLDSNRILGIDLGVDNLAACASTTGHVLLIDGKQLKAANQWYNKERARLQSIKDLHNIKSETHKLAALAVSRENFITDYLRKAAKHIVEFSISLEIGTVVVGVNKEQKQGVNIGHVNNQNFVQIPLWKFRRVLKNICDKYGITYIEVEESYTSKASFLDKDFLPEYDPANKNEYTFSGRRVKRGLYRTKNGCTIHADINGAANIIRKYRLDGDFSVLDKGIFLNPYRVQVLNTPRKKPPVVQKKKSKAAA

SEQ ID NO: 1816 - protein, 422 aa, unidentified
  REGION 1..422: note = Table 20
MRYKAIKTKLYLSQNEKKFLLFLMHEAKHLYNQALYHVRQHYFEYGTYLSYVDNYKLLKDSIHYRTLSTSLGQSVIKKVDEAMKAFFGSVKSKKSKKVKLPRYLKKDGFFSLVDRMVYKPNDHEYILPRGHFIKKISKDFEDISKQLSKHALSLLEIETLSLKIDTPKCISNKRIKEITIKEKYDGKYIEVIHVYEDDDETNEHNTKKEVMGIDFGYNNLAMCAVTSGNHLLVDGLRLKSMNQRYWKRISKLASLRENQHVLTKRMISLMEKRNHQMSYGIYKAAKLIIEHAKKEHVKEIIIGYNEGFKDAKTSKKNNQWFKSIPIARLRDRIITLAEANDISYQAINEAYTSVASFIDQDAFNQKEYSGRRIKRGLYESKKGTLINADLNASLNMIRKCKPDALGTGFKGWNTPKRTYLFG

SEQ ID NO: 1817 - protein, 407 aa, unidentified
  REGION 1..407: note = Table 20
MKHLNKEEYLILKELCHTAKNLYNQAVYNIRQHYFDEEKYLSYIENNKLLKSSENYKTLNSNMAQQILKEVDGAFKSFFRLLKLKSKGEYKEKVKLPNYLPKNSFTTLVVGFVRLNENSFILPYSQIYKKNHKPIKINIPPLLLDKNIKEIRIIPKFNARFFEIQYTYQVEREQRNLDKNNVLAIDLGVNNLATCVTNRGKSFIVDGKKLKSINQWFNKYNAKLQSIKDKQDYGKALTLKQKSIWNKRNNRVNDYLSKSARIIINYCLANSIGTLVCGYNNDFQRNSDIGKRNNQNFVNIPFSKLQSKLKYLCELYGIDFVLQEESYTSKGSFFDMDIIPEYKKGNTEEYSFSGRRVKRGIYKTSKGYVLNADVNGALNILRKSKVVDLEVLYSRGEVDTPVRIRVS

SEQ ID NO: 1818 - protein, 480 aa, unidentified
  REGION 1..480: note = Table 20
MSFKSKEQKELDKEKNKNTYVSTVVQHLKLSNLGYAVISDILEHANSLYNTLTYNLRQGFFVYNTLNFQSIAYDLQTDFKENYHYKMLQSQAAQSVCHKVAENFKSFKQLLDKHYVDGSKKPNLPGYRISGGMFEVTYPGQTIKIEVEHGIRFAIISTGIQFRKQRKEDVVGTKLNEYIKLRVPDSVDTTTLVELTITSKHRQIYAHWVCRKKNVHVRSKFVTTLDKSNVLGIDIGLNNFVTCIPNTGEQGFIINGRPLKAINQFYNKTVSKLKKGKDVNFWSGSLASSTQTRNNQVRDFIKKSARTIINKCLESGIGKIIFGWNEGIKNEIDNGRVNNQNFVQVPFTALRDTLKYLCERYGIDFIVVEESYTSKMSFFDGDELPVFGKETEAQKKLKPSGRRTRRGEYKTATGIVINADAQGASNILRKAKIDTSKITYKVCQVLKTINIWIGKKLPSRKGTVASLSSSTAIGLTEPSQ

SEQ ID NO: 1819 - protein, 397 aa, unidentified
  REGION 1..397: note = Table 20
MLFKTGKYVKKYELDKLLKSNVHFKAMRSACAQQTLHSVIESFKSYKALSKLFKSGQLKDKPRVPRYRKKGGLAVVTYPARWVKLVDDQLKFPLGKQVKAWFGIDHFFLPMPSNLDFKSIKEFRFVPRNGCLYLEFVYKQPDVSSVVDEGNHALGIDPGLNNWLTCVSSIGKSFIVDGRKVKSQNQWYNKQVAKIKKDKPQDYWDNRLAAITEKRNRQMRDNINKTARLVINWCLRHNVSTVVFGWNQRHKDSINIGKRNNQNFVQIPTARLKSRIQQLCDQYGIRFVETEESYTSKASFLDNDFLPTLGEKPEGWKSAGKRVRRGLYQSAKKELINADCNGAANILRKVATQLGISLAEVGKASLNVPQRYGMNSLSKSYRKRRAEAVSTRVATSA

SEQ ID NO: 1820 - protein, 377 aa, unidentified
  REGION 1..377: note = Table 20
HYKAMAAQSAQQTLKTVGESIDSYNALVKAYYRGEVDKPKLPRYRTKGGLAAVTFPKQALSYKDGYFKPSISRETKPELITDIKLELPEFIDSDWVKEVTVRPCLGEFWINWVIDDGKQPVEVNPNLNYTQAWGFDHGGANWLTGVSTKGQSLIINGKLLRSMNQGYSRLVAKYKHGRQNYWDSNLDRIQRKRNNQMRDAVNKAARFIVNRCLSDGIGNLVIGWNEGMKNGSSMGKRNNQNFAPIPTGRLITRLKQLCPEYGIVLSVTEEANTSAASFLDGDSLPKHGEKPVRWSSSGKRVQRGLYRSAKGFLINADCNGAANIIRKVATQLNINLVEVGSGSLALPQRYEVITGLSKSYRQQALPPTALASVATTA

SEQ ID NO: 1821 - protein, 435 aa, unidentified
  REGION 1..435: note = Table 20
MLCDDVVYLTKSILVRGLSKKQYDVLVDISLKLNNLRNCAVETTYLIKKSDDKHYKKINYKSIISDVKSEFNEYSLVQTHLANAAIKKHVDSFNGYVTLLNKKIDNEFNRDVHSPKKHYNRLHNIIIPKESITSSKKKLREGYIELPLSRQYKKELVDVNVRPRIKIPEDIRDKKIIQVEIIPIDNGRMFKANFTYQAEKEPLGLDKDNVMGIDLGVNNFATVVTTEETPFIVDGKFLKNQIAFKCKKVAHYQSILNKTGLKKSRRIKKINTKFKQIQNNYLNHVTKTIINACKDQDIGTIILGYNKNFQYKSNIGKKQNQIFTHIAFKKFKEKLENKCKIHDLTLIIQEESYTSKSSFLDNDILPVYDSNNGQEKEYEFKGKRIKRGLYKTFGGKLLNADVNAAANIIRKSKQKFNFERLYKWVQYAPSKIKPL

SEQ ID NO: 1822 - protein, 432 aa, unidentified
  REGION 1..432: note = Table 20
MGFKTLKYHYKASNSEIAMLKLLTRISKNLYNASLYYLRHYYFEHKTIPSYYDTNKELKMNENFHIINTYQSICTIRCAHNNMLKFIKNHGSLPKYLPKNGFYPLYTDQVRPIIHNGHNCIKLPLSNDMRTNKVFYNVYQDKLINDSIEEYSNKESMNIFFRIPKLLDGKEIHQVRIVPDKRGEYYSIEFSYKDIDYELKNIDDNIMGIDLGVTNLASCVMYNNESFIIDGKLLISKIQYTSKRIAKAQSILPSGVYTSKRIDSLRRKNNDFINDYLNKAVKELLNKAKENNISQIIVGWNKGIKTGGIKNESLKGKRRAKTNQKFILVPISKFKNKLILKSLEYGINIVEINESYTSASSFYDNDEIKKDKPRSGKRIKRGLYKRKDGKVINADINAALNIMKKYKRNSNDTIKYLMSRGLTIPYRVHVNM

SEQ ID NO: 1823 - protein, 382 aa, unidentified
  REGION 1..382: note = Table 20
MLILYGSAKIHLKHPTPDMKRNLVCLLQLSRDLYNASIMEISDSYKRFHALPSYDELTENLKSRKEYQAIGRKYSAVIIEALSNCKKYFRITQYRTDKSKQLLDKKNLNKIKPPCKSKIIFPVLLKNPEIENGFLLLPATNQTPVLKIRLPSAYAHHQIMRIHLHTSCNFRNWELIIEYPLQVIENPNLNVHKVLGIDLGVSNFCTCVTNAGDSFIVDGRRLKSIIQGYCKYEKKFHSHGKGTVRQASLQRKTAYRIRDYLNKSVKYIINYCINQHVHKIVVGWGIHFQTFELGHQNNQIFSYFPYAVFVKALKTKCHQNGILFLKTDESFTSQASAIDLDQIPAYVTPTEQRFSGHRRYRGLYITKDKIKINADINGAFNI

SEQ ID NO: 1824 - protein, 420 aa, unidentified
  REGION 1..420: note = Table 20
MAYRTLKFHVKGLSDNEKSIIKALASASTKAYNEALKLIENEYNKVKTLPKHTDILKKLNESNQLKNLGYGFEAVVKVPLTNYRTYITRQVKIETSKANPSWKQIDENINSPKPIKYSYLYSEKFRRVDDSLQFPIPYNLFQRYGAFKIKLPERYQNLSIKSVSIQFDRDLSYVEMMLKYEETGQSSYVQNGDYHALAIDLGVSNMVTCVTSQGDSFIIDGRHLKSIIQGYEKYTAIAKRKNQSKSKLAKIRKRKQNQVDDYLNKSVHYIIQYCLKHHIGNIIIGYNPNFKKGLNLGKENNQLFFQMPYAKFMEKLAHQCNKHGIEFTKTYEYYTSKASFLDGDDFPNYLTREKQNFSGRRRYRGLYIASDGRKINADVNGALNILSKCKAISHEKLMLLRTRGVAQPVRVNPLKCAGCN

SEQ ID NO: 1825 - protein, 421 aa, unidentified
  REGION 1..421: note = Table 20
MKKALKTKIRGLDKSQFKRLRELTHHAKNLYNQTLWTLRQAYEATGLYFPYPKMDKAMKQVFNLEGSINYKLLKSKISQQILRRLDKNFKSFFQLNQDFHLNPNKYKGQPKPPRFKHKLYDNLIYDYQAFSVTDNMVVLEKGLSFSLPKPLKGKTIKQVEIIPKLRYFEAILVYEDNHAKVAIQKSDKVMAIDLGLNNLATCVTNGTTKPFIVDGRRLKSINHHYNKRYSKLQSHLKKTRDLKWSNRLQRLTNRRNARIADYLHKATRFVTDICVQKGISRVVVGDVTQSLSHINLGKKTNQNFVNLSLGQFIEKLRYKLELHDITLIVQDESYTSKASFVDGDEMPKKYQPKKTHTFSGKRVKRGLYQTQNGMAINADANGAYNILRKSNPKFTFEKLLKKVNKGILDWLHPYTRLKICH

SEQ ID NO: 1826 - protein, 409 aa, unidentified
  REGION 1..409: note = Table 20
MKKTIKIRLRHLTKKQYRHLKELCNASKNLYNQALYTVRQEYQETEKYLSYNALDKIMKTLPNLEGNINYKLMKAGVSQQILRRLDKSYKSFFQLQKAGYKESRPPKYLKSKYHNLIFDNQRFQIKDGKAVLDKVVSITIPNQAIDKRIVQVEIIPQFHAFYACFVYEDDIEYLQIEENENVMGIDLGLNNLASCATSQGDFFLINGRPLKSINHYYNKQKADIQSELEKRNHSKQSVKLQNLTDKRNNKINDYLHKSSRMIVNQCLDNDISKIVIGEAAKSMSGINLGKRNNQNFINIPLGRFIDMITYKAGIHGIKTIVINESYTSKASFIDNDVLPKGYEPDKKHTFSGKRVKRGLYRTAKGILLNADINGALNIIRKVVPNFNFHRLIDGIEGRFTPHCKLLTCQ

SEQ ID NO: 1827 - protein, 422 aa, unidentified
  REGION 1..422: note = Table 20
MKTYVEKVDLPKDKLIVLKAMCNESRRLYNSSLFQVRRHYKENDKAYLSYPKVDKLMRETQPHIYRRLPSQVAQNTERKLHQAYNSFFELLKLKNQGKYDAKVRQPKYKKDRRLFSIYFGTRTFFREGGKIRLTISKFHRNIFGIRFLYIPFPRHLESHDLKEVEIVPKGYGRFEAHFKYDSPVYGPIQKITRKGSLSIDLGISNLASCVSTKGDAFLVKGLKLKSINRFWNKRTANLESSKAKERHKILKMMLENDIAQITFKRNRQVKDFLHKASYQIVEYAVREKLESIVVGKNIGWKDSINIGKKNNQTFVQIPHAKLIDYISYKAKKHGIKVVEQEESYTSKCDSLVLEGIQKHSQYLGKRTRRGLYRSSTGVVLNADMNGAINILRKAKKSKRESELLAEITCMGRVFRPWHLAVS

SEQ ID NO: 1828 - protein, 424 aa, unidentified
  REGION 1..424: note = Table 20
MKDVPYLTTTNRLHTGRTQYSILQEMCHTSKNLYNYTLYTVRQYFFENKKFLNYEKAYHIVKNNENYKLLPSQVAQQVMRSVNEDFEAFFGLVKKKRTEIYKPKTNLPHYLPKNGVREITFTPAHFTILHKHVRLTLPKHIKKKYNLKFLYFPIPPHIRDYPVKEVQIQPYHSWFKIAFKYIDTKKYKLVKKDTAIMAIDLGIDNLCTIVSEKFSQPTIIDGRGIKSYNRLFNKKLAKKKSTAMNCSGQHMTKSIARLYEKRNNYMRDKIHKISCTIVSEAVKNNINTICIGYNEGWKTKCNMSKVVNQKFVSIPYKKLIKYITYKAKKYGIEVMTQEESYTSKCDALAFEEIRKHEAYKGKRVSRGIFLSSTGKLINADVNGALNILRKCKGDFSVQGIVNRGCVFQPKRSLEDQTSFEAPTS

SEQ ID NO: 1829 - protein, 466 aa, unidentified
  REGION 1..466: note = Table 20
MYVQENRCIVVQPKLTKEQEIVIGNLCYNAGKVWNIVNYHLINGNLKFNVYDIYNKLKDNFFVRNIHSRSAQILMGQLVEGWMTYFDYLKNPENYSSPVRRPGFMDKKRPHHTIIYDKTGFKVLGSKIRLSIPKQLKAYLRGEYGFDKKYLWIDTGIDLTQYDVRNIQITPLKYSGRIFYQMGIIYSVEQEQTQQPEKERLMSIDFNTSNFAVIVIEDHPTSYIIDGRGLMSLLRKYLKKISRLQSRRDNLKEGLPHHKLNERIAKLWKRVRNLLRDFSHRVSNLIVELARRQVTRIVIGNVHTSKNKESKLPDLVNQMFSLLPHGKVVKHLQYKFGNVIEISEEYTSGVDSVKHEHPSKEHYEPRKRVKRGLFKSVIGIINADVNSARNILKKYLYEIGQTNHVLRDTASGLKQIIRLRVFHRLRGSSESAVLGQIGVVRGCVPLGMVRNLTVQTHPEAPCASEG

SEQ ID NO: 1830 - protein, 365 aa, unidentified
  REGION 1..365: note = Table 20
PVKPPKYNKKSLPHRPVIYDKTGFKIEENTIKLSLSKELKQFLKKKHNIDISYLTIYTGLDLSKLNILNIQITPYKAYGNITYRLNIVYEKEVEEPKPQTDRVLAIDYGVSNFATIVIEKEKTSYIIDGKGIQSLLREYLKKLAKWQKKRDNLLNKGLLTNRVDKILHRIQKRINNLIRDYAHKVSNLIVGLARKYNISTIIIGKLQESKNKESKLSSIIEQMLSLLPHGRVSKQIEYKAREYGIKTVLIDESYTSGVDSLKEQTVSKENYTPEARKYGGLFKSIIGLINADVNGARNILRKFKKRFHDYITGLKQTIRIRVFGKLKSSPKSAKMYEQIGVARCGDHLSGIRLAQYKQSPCKALD

SEQ ID NO: 1831 - protein, 422 aa, unidentified
  REGION 1..422: note = Table 20
MKLTFKYSLKDISNKQKEILDELMWHTTKVYNMVLYEIKEGQVKVEENKSLNIASNPIYMYERKNNWHGKYLHSHILQEVVINVVENYKSYKALEKKYKENLKSLKGKPRFPRFKNKSIQAILFTKYAIRRKGQKLMLSLSKEMKAKFKVKSLDIVIPRKLNTLVNLESIKQIRVTIKNKEYVMEIIYEKECEEMKKENTNIMGIDLGINNIVACTNKDNNKSMLVNGKDLKCKNRYYNNEIERLRQIQMCMLKDSKKYKETKRIKKLYEQRKNYIETYMHKASKMVIEYAIENKCNTIVIGDIKGIKQKMNYNKNFVQIPLQNLVQKIEYKAKLKGIKVEKINERYTSGVSSLDNEPIEKEYYNKKRRISRGIFVTQKGKKINADINGSLNILRKYIDSKTKLEMVMNNGREQSPIKKRVA

SEQ ID NO: 1832 - protein, 414 aa, unidentified
  REGION 1..414: note = Table 20
MKLSFKFKPAINHKNLNIIRTLSYHTSKLYNIVNYSINKGENKPVYTKLDEQFRNNWHCDFLHSHNRQHCLKLLAQNWKSYFKSLNDYKNNPSKYNGMPKPPKYKYLDSNPNEIIFTNYAIRIKNGNLLLSLSKKIKSMYKVDNLKFELSDKVQSFVNMDSIQQIKIKRGSVSNRWYLIVVYNKECKNNNGKNVMSIDPGLDNLAAITFKDSNKNYLINGKPLKSKNAYYNKEIARLSSIRMKQIGSEKFKNTNRIKALRINRRNYIVDYLHKASRQIINIALDENVGTIVIGDIKNIKQNSTIKSFVQIPVQRFVNMIEYKAKLEGINVVKINESYTSGCSAVDLEEINKSNYNKSRRVYRGLFKGKKTSINSDINGSLNILRKYLKDKCIPELIHGARDNGVVNPPKRISVT

SEQ ID NO: 1833 - protein, 395 aa, unidentified
  REGION 1..395: note = Table 20
MKLVYKWIPRWSAQQLALLEDLAFHTTKLYNIANHLCREEGFRSYVRLEKELKSNWHREYLHSHTYQHCLKLVEQNGKSYFAATKDFKKNPQKYRGTPQPPGYKHVARRKNEIIFTNLAIRVQENVLKLSLSKKMQERHQVDCFSIVMDPDNLPIDVSALQQIRLQWRNRIRTWEMVMIYKKAEQELPATFTNLMSIDLGVNNLAAVTFLEGDDSYLINGRPLKSKNSYYNKEIARLTSIAMKQTGKREDFVRTHRIRSLQGKRNRYVQNFLHQASRKIVDLALKHHVQIPYARFVDLITYKAKLLGITVVKQNEAYTSGCSALDEEKISKKAYASKRRIHRGLFVSNSGFKINADVNGSLNILRKYLGGKGSPALIQSARDNGCLKHPKRILVA

SEQ ID NO: 1834 - protein, 413 aa, unidentified
  REGION 1..413: note = Table 20
MVNIMQVTRVLTINLTRKLTKEQWVILNHLTYSASKLWNVANYQIIQGNIKLSELEKKLKDNFWYKNLHSQSAQAVLQKLKIVWVNFFKQHTKRPRFQPKDGHFLVKWKKDGFKIIGNMLRLSLSKQTRKYLKERHGIESKYLWVGLPKALPLDVVQIKEIEIVPHDIYGQRFYVLHIIYKKEVNPVKLKEEKVMAIDLGVKNLATVVIEGEKQPLIFDGKILISKLRWFAKKTARIKSIIAEQGLKNCKRLARLVVKERNYVKDYIHKISRWIVDLAKEKEVSRIVIGDLTRNFTEIDIGRKNNEKFHRIPFGKIIHMIIYKAEEYRISVMKIDESYTSQKCSVCGVIKKSNRKYRGLYVCSNCGTVINADVNGARNILFSVVPNPIRDRDSGLGNPWRVSLSSALLKKPLL

SEQ ID NO: 1835 - protein, 297 aa, unidentified
  REGION 1..297: note = Table 20
LWNTSNYEILENKISIYELKAKLKDNLWYKNLHSQSAQAVTEKLQTVWKNCFKKYIKHPKYRPKDGHLTVIWKKIGIRLITLAIDLGVSSLITATDGGYSIIIDGRTLVSKMRLFAKERTSLQSILSKQKLKTSRRLHSLYGKERNFANDYLHKASKKVVDHCLKHRIGTIAIGTMHKGITNMNIGTQLHRIPFGRFVKQIKYKAEEYGIEVTLVNESYTSQTCRICGNVDKSSRKHRGLYVCKKCGSVINADVNGALNILKRVSLNLTNEIGVGVLANPARIRIVNQASCKEILAF

SEQ ID NO: 1836 - protein, 243 aa, unidentified
  REGION 1..243: note = Table 20
MPRYKGDYFEIEFVYKIDIDIPEFDYTQYLSIDLGLDNFATAVTTRETAFIIEGRGIKSYNRWWNKKKAKLQSQYDKQDIKWGNKMTHIGVKRYNVMRNFIAHSVNKIIKHCVEHKIGNIVIGDWEDMKRGLKMRKKTAQQFQQIPYSKFKMNLQSKGELFGINVEFVDEAYSSQTCSGCGLIRKANRIKRGLYCCKNCKLQLNADINGAINIMRKVAPNSLSKWSSGDIISPNRLKLVNFSV

SEQ ID NO: 1837 - protein, 403 aa, unidentified
  REGION 1..403: note = Table 20
MKQTIKYKLNPNKEQEKHLHNLSSIATKLYNTDNYIRRATWKKCGKIPSWYSQKKKVLKNNVWYKLLPSQTAQEVCHNLQGNYNSWFKLRKKDEKARPPKFRRKEMLSPISFYQQFKIIEDKLKLSMSLKYRKEHNIKSLELNFNKWKTEKGIPKFCQVLFNKGSWYANIVYEVPEPNISLNKNIMAIDLGIINTAVTCDNKGNSNIYSGKQILSIQHYFNSRIARVQGKFTKQFPKRKWSKTLQKLTDKKTRQINQSLHTISKGIVNQAKKNNIKTIVAGDLTDIRKDNNFGKRNNQKLHSWSFSKLIQQIEYKSILSGIRFVRVSEENTSKTCSICGTMRKSNRIKRGLYRCKICSNYINSDVNGAKNILKKYLQFFSNEDRSIGNVAMPLVSRIENVIPR

SEQ ID NO: 1838 - protein, 411 aa, unidentified
  REGION 1..411: note = Table 20
MRLTNQVRIETDEEILDKLGYATNKLWNTANYLTRQKYEKDKTFLWYFDYCKQLKNNFWYKQLPSQTAQAILQKLDGSYRSWLKLRKSNEKAHIPGFRKKNSIFIIPVKYQQLQYIKEDSLLRMPLSKRFREENKIQNKFLFLKLLFPLKWNGKIKYVELFKRNNKWLASITVEITEPKRTESSKSMSIDLGIKNLATCFTPGKSIIYKGSEVLAVQRYFNKEIAKTDKTLSTQEKDRSKKLTILHSKKKKQTKHAIHSLSKSIIAFAKENNIGKILLGDIRNIRKDKHFNKNSSQKLHSWLFGQLTQQLEYKAELAGIQILKVSERGTSRTCSGCGIIRKANRKYRGLYVCNNCNLKINADINGAINIYKMYQGINEPVVAAMAQPVVVQLWNKHNWMRQNSSKGRNLAL

SEQ ID NO: 1839 - protein, 414 aa, unidentified
  REGION 1..414: note = Table 20
MKLTQVITINPNKKTEEALVNLSKIANGLYNSALYENNKRYKAEKKFSFYEDMCKNLKDNTLYGLLASQSAQAVLQKAEGSIKSFLALHKKGANAEFPHYHKKDTEWILPYKSQQIKLKKNKITLPMSLAYRKERGISYISFRIPKLRYEGRLAYLEIFRSEGKWKVSLVFDVQDAESLTPRENLYIDIGVKNLAAIYDGKNTTLYKGGIVLAENQYKDKKVAEVQKILATQNKRTSKEKRRLSRQARRRIKQRIHAMTSKIVNTAKSEGKGIVIGDLNGIRNSMHFRKKTNQANHQWIFGQITSQLEYKSKLNGVLFGKVSEKDTSKICALCGNKEHGRIHRGMYRCKLYNVVFNADADGALNIMKKYLRIPLSKGSGIGVVAALAQPAVLQWNEHEWRNEAMVPNATTAMIS

SEQ ID NO: 1840 - protein, 490 aa, unidentified
  REGION 1..490: note = Table 20
MTALGMNSLSDQDLTRKSVYNPFKLQNPRRKAHGFSCGMKAKKREHVLWFFRVFCIIKIEDRKEQGAMARKKNSGNHTPMQTITSRAKIVYLADQDALLLGLLGFFATKLWNTANHHRRVVWGETGKIPNFVEQCRDLKTNRWYKLIPSQSAQEILGELDDSYRSWFSHRKNGDLSARPPRFRKKEPLSTITFKQKAFEILPGNHVKVRLPKTYARREMVLEYHLPPDTTLGKVQQVKLSCDPTSGDWYVHIVHKVPIKYRETGQVMSLDLGIVNTVAGLITDGFSFLVPGGELLALDRYFQKEKAKCTKSTSRKCIRINAKWGRQRSHYLHALTKWLVDLAVAHNVSTILVGELKGIRADKDWGDAGNQKLHTWPFSKIISLLTYKAALAGIRVIKVSEKSTSTTCPVCSRRTKKARVYRGLFVHCGLALNADLVGAYNILQRYLRETGQAWPDPVGVVGALARPAVNLFVWRKTTPLGRGQGTFRRAA

SEQ ID NO: 1841 - protein, 414 aa, unidentified
  REGION 1..414: note = Table 20
MNEDRQTLTEVFKIVDLNDQDALALGLLGYSATKLYNTANWDRKEAWKETGKIPACSKQKRELKTNRWYRALHSQTAQAVLEELDRGYKSWYALRKEHKKSRPPGFRRKDSLSTLTFKQRAFDVTQSHVRISIPKKVYGKNSLYLKYGARPGVKIVNPKTLQLTERKGEWSAHVTYEVPVLYSRQECVMAGDLGEKYLIATVCTDGSAALYPGGELRSLDRYFSKVSAKCRHPWSKRNVSFKQKWSRKRNYLLHCISKAVVSDAKARGVSHIVMGYPKDIRDDMQWGRVANRRMHAWPFKKLIAMLTYKAALSGIQVVLIDERGTSSKCSVCGYRDRSGRTTRGWWRCPRCKVAMQADINGAANILNEYLLQEGRTVPPIWSSGRLARPAVNRFVWGDPRPDDHEAGTAHALVV

SEQ ID NO: 1842 - protein, 457 aa, unidentified
  REGION 1..457: note = Table 20
MQRAVTASISIESGQDALQRGFYNARRLWNELWWCTFGYNERLRWRRGDSWEQYKRRRPTRTWPGKFAVQKIMADFGPYRDLSDRCSSYTIADFDIAMKSWWSNLKRNPDARPPRAVKEDRTLTFEVGRNAKPLGDWRYRLTVLGGAIAERHVVVRVHVRPGVKMANVHLIRVTPTLKRGRYQVSLITTKPAAARAGDGVAALDLGIVNLGALAFEHDDILYVGRHLLDVQRLANKRAAACKPAGYTGTEARLPASRRSKTYKAKATNTRALAVHVFTTDVIRQCVARGVGVLAVGALTGIRTDKDFGSAGNQKFHAWTQGRIREQLRWKGEEHGVEVIEISEAYTSQTCSGCGCVRKSNRVERGLYVCAECGLAINADVNGARNMLRRATGIAKSEKIGVGGDLSTPPSLRPEREQAQEPAKRTANRQLSVMHFDLRSMTLKEAGHAERSAVCNAT

SEQ ID NO: 1843 - protein, 442 aa, unidentified
  REGION 1..442: note = Table 20
MSTQTLTYVCKIKNHDLVADALDRMGLACSKLWNVALYHTRQVWDETGKIPSAYDTQKAVQEHYWYKQLPTHTAQAVIQELWQAYKSWFGHRRNGNGRARPPKYRKQNGQVPPSTITFKCSGFRLEGTTLRLSRGKAVAVETGERFLFLELAIPPGADVSDPRQVRLVPRGGEWEAHLVCEVPVAKEAPGKGVAAIDMGIINLATIVYSDGTTELYSGRGLLSQEYYFAKEIARCKPANWQPGSRKKAASKRERGLHRKRTHRRQQLLHAVTRRIVDTCVEKRIGTIVLGDLSGIRQQSNGEARNQGKAGNLKLHAWPFDAFAQMLRYKAKLAGITTVQLSERNTSRTCSVCGCVDANSRVHRGLYVCPECGAVVNADVNGAVNILHKYLRSLDPLDEAGVPVRVGDLPTIWPEPSVNRYDWGKPSPIVHVVGSAPAASVCH

SEQ ID NO: 1844 - protein, 419 aa, unidentified
  REGION 1..419: note = Table 20
MKVLRTEKCKIENYSQVVDRIDELSISVCKLWNVARYKCEREWRKTGKIPSESKLKSKLKEHRRYRELHSQTAQNVIEELWNAFKSWFEKRKNDSKARPPGYRRKNGRYPKASVTFKKSAICHDKKNKRLKLSNGRENSSLLVEYKSRPEVDLDRIQVVRLAWNGDRWQIHITHRKEIEPQSPGAQVCAIDLGVNNFATIVYDDGTSELYPENKLKEDEYYFLKKIAKCNKSNSNKARRLHKKRGRRREHFLHALSKEIMGRCEEKKVGRIIVGNLKSIRENETKNNNNYNLKLGQWPYEKFVQLLTYKAEKTGIEVVKMDESHTSQKCPRCGVIDRKNRVERGLYKCSNCGFTIHADVNGALNLLQKVTALSGSNGSVAEPVVNLFAVRSGISPSGCEEGKFHQAEQLQTLNSQPHTP

SEQ ID NO: 1845 - protein, 408 aa, unidentified
  REGION 1..408: note = Table 20
MANLTVTRTYVGSITNHSQVCDELDSLGIAASKLWNVARWTAERIRAETGETPGAGPLKSYLKNHERYRDLNAQSSQRVIEELAEAYRSWFQTREQNPAASPPGYRKYGETHPRSTVTFKQIGFTHDPEHNRVRLSKGSNLKSHFSDFILCEYETRPDVDLSDVDRIQQVRAVWTHGQWELHFVCKVELSVESTGDSYAGVALGGGNLAAVALPDEYILYPGNSINEDLHYFAQNTQQESPSSVNTSTPDAQGRCKLSRRKTHYYHTLTRSIIDKCASQDVGTLAVTWPQASEYSDPLSHSFERLYQYLRYKAEEYGIDVVKQDFKNITHHCSRCGAGPGPEPDTNGLYICKECGLVGNRECNRAETSRQYLTPNPHTRDRSNGCVAQPSVHLFHERRGVFTPQQSVS

SEQ ID NO: 1846 - protein, 501 aa, unidentified
  REGION 1..501: note = Table 20
MFEPPLSSATQDVVQLLVVVLIHPDVFAGAQSAHEAVVDAAEQLLFLVRDADNRYAADRRRLSRILHFHSGRLLLINLAYNRLSVANQVTRTYVASIHNHQQVCEDLDSLGFAASKLWNVARWTCDRIWDETGTIPDHGALKAYLKNNEHYADLNAQSSQAILEELAEAFDSWYTLRGNGDKKANPPGYRKHGDDHPRSTVTFKEDGFKHDPDHDRIRLSKGRNLKDGRQDFILCEYAVDPDVTVQNVQQVRAVWTGTDWELHIVCNVERDDPDPPGDRVAGIDLGICNFAAVAVGDDALLYPGGALKEDDYYFQKQRAKCDDSSSRKAQRLDRKRGERRTHFFHAVSKDIVAECAARNVGTIVVGDLTGIRENTDWGDHGNLDLHGWAFDNFTQMLEYKAAEYGISVERVDERGTSKSCGSCGTIDDSQRVERGLYVCDECGLVANADVNGAENIRQKVLPSLACDGGDRDNGWMAQPAVRLFDTSTGRIAPQEQVTCEP

SEQ ID NO: 1847 - protein, 228 aa, unidentified
  REGION 1..228: note = Table 20
TAGIDLGISNYLAIDYEDGPSELYPGNVLKEDKHYFTREEYQTEGENGPSKRARKARQKLSRRKDHFLHTLSKHIVQRCVEEGVEKIAVGDLSDIREDENGDSRNWGASENKKLHGWEFDRFTNLLEYKAEEYGILVDRVDEENTSKTCSCCGQIRDSNRVERGLYVCPSCETTMNADVNGAVNIRRKITQSPPTGDMSNGWLAQPGVFLFDRESGSFSTREQGACKP

SEQ ID NO: 1848 - protein, 451 aa, unidentified
  REGION 1..451: note = Table 20
METTQRTLVTKPRNQMQVKRQVDPHAWDASKLWNVGLYQLFEWLDNSNLPSGDLDHALKRKLKTHERYNGLHSQSSQQVLEGLATAFNNWLESDDDRDNPPSYRKQWYHDSEGRLVHEEHPRSTVTWKSTAIRHDEQNHRLRLSKGDNHKSSPGAWEYILVHYEKPEHYDLGEISEVRAVWNDGSYEIHIVHEVEIASESPGDGVAGIDLGICVPAAVAYPDEAAIYPGNTLHEDRHYFTREEYQTEGGNGPSNRAQRARETLSRRTTDFRHKLSHEIAETCAEKGVGRVIIGDLSGVEDDDWGRHGNKMLHNWGFSELSSLIEYKCRERGIEVELKDERGTSSECSRCGHEEDSCRVERGLWKCSSCGTVIHGDVNGADNIRQKAISVTPPLAEVVDSANGCVAQPVVYLFNRTRGFQPRHSEGSCKPKHSNSASESPNNATPEAGSPPL

SEQ ID NO: 1849 - protein, 584 aa, unidentified
  VARIANT 382: note = misc_feature - Xaa can be any naturally occurring amino acid
  REGION 1..584: note = Table 20
  VARIANT 91: note = misc_feature - Xaa can be any naturally occurring amino acid
  VARIANT 459: note = misc_feature - Xaa can be any naturally occurring amino acid
MRAVTQCHVPPTSTGLESLDRHGWSASKLWNVANYHSRKVWEETGEIPDHEELKDELKTHPKYKGLHSQSSQRVLEELAEAFNSWYSSDDXKYKGLHSQSSQRVLEELAEAFNSWYSSDDDRDNPPGYRKENYYDDEGRRVHEEHPRSTVTWKQNGIRHDTKNNRVRLSKGANHKEHPRATWKQNGIRHDTKNNRVRLSKGANHKEHPRAWEYILVEYETRPGVEVENLQQIRAVYDQSKERWELHLVCKGEIETPDAPGNETAGIDLGKERWELHLVCKGEIETPDAPGNETAGIDLGISNFAAVAYSTEDADLYPGNRLKQDGYYFPKEIANCDDSGGDRATRLHHKWSERRTHFFHSLAKHIVERCVEKGVGRINVGDXRRTHFFHSLAKHIVERCVEKGVGRINVGDLEGVRDDENGESKNWGTDGNLDLHGWAFDRFTSILEYKAKVEGIEVVXGNLDLHGWAFDRFTSILEYKAKVEGIEVVEVSERDTSKTCCVCGREDDSQRVERGLYVCETCEAAFNADVNGAENIRLDSNASNSESAPSLGEDRSTGWVAQPGVYLHDLSRGFQPRTAVVDSKP

SEQ ID NO: 1850 - protein, 437 aa, unidentified
  REGION 1..437: note = Table 20
MYLTHKAKIQTDSKTAEVLNNLCYSATKVYNTVLYNLRKPYEGWKKMRDDCEDIDYPFTEEAPKTSLDKTALQTKYKDNHWAKNLHSQSTQYVIKEVVDSYKSFFALRRNGNTEAMPPGFRPKHSLSPVTFIQSAFKIIERNGRFYLRVSCGTKREDHIKSITLPILLQQGIDPTTAKVVKLTYDTVTGNYYAHLVCKVDVPATQTSFLSNVVAIDLGLNNIVTAVTTDGDSMIISGREIKATKRYWQKVRSLVKPPSQEKRRMSRRYKQIQRKESRQVTHRLHIISKSFVQFCEEKQIDTIVIGDLTGIRDNISYGRRNNQQLHNWNFRKVADFIEYKAKRLGIETVTISEKYTSQTCSACEIRKKSNRKTRGLYVCGCGHRQNADVNGARNILTKYLRHRSSGTVAVPVATLVYSRTDAHCLRTINQHPVGKRSA

SEQ ID NO: 1851 - protein, 412 aa, unidentified
  REGION 1..412: note = Table 20
MPYLTIKARLRGVPERFDILRDAMLFATKVYNGLIFHLRQEYQQHGKVCYSASHLNRIARGLPRHKELYSDVVDTTRQAVGWAFGSFFQKHKRDKKARPPGFRKKTRLSPLRYSHPNNGSIKVIHKRGMTYLRISLGTTRKDGVCRLVFRLHTRPNVDLSKLKNVQITYDTHTRDFQARLVVKVDVPDKPGEATVGVDIGEDWLIAADFCDGAQYLVCGRELKATRRYWQKVRAKVKPPSQDQPKMSRRYRQIARKEARQITHALYIASRRFVDVCADKGVGLIILGDLTGIRHRIAYGKRMNQRLHAWPYAKLRTMIEYKAALLGIKVKVVSEKYTSQTCPQCNIRKKSNRKHRGWYSCRCGFEGQADLVGAFNIHRQVSGVPSSGRSARPVVLVFDHHTVHEAASSREAA

SEQ ID NO: 1852 - protein, 423 aa, unidentified
  REGION 1..423: note = Table 20
MPLLTLKAQVHADPETERILRDAMFCATKVYNGLMWHLRQELKEKGKVDLRRSTLNRTLKTLPRAKGYYSLSVQLTRDEVIQAYRSFFALKKNGGTEHHAPRFRPKSTLSPLKYVQSGFKLEGDRLTLSLGKGREDGVRQVSFRIHHRPGVEYERVREVSIIYDKGSGQFEARLVVEVKARGNHGQGRVAVDLGETVLLAAAFEDGTVLLYSGRFIKAARRYWQKVRARVKPPSQENPRMSRRFRQIARKESRQVGHLLHLATSHFIRECVQRGVKEIVIGNLTGIREGMDYGPRVNQRLHAWPYRKILHMLRYKAALVGITVRNDVEERGTSRTCHACGQVRKANRVHRGLYRCSCGWTAQADVNAALNIYERAFHVSPVKGSSGRVARPVVLSFRLGWHTVRHGRSPYLGEPKRKECLRAS

SEQ ID NO: 1853 - protein, 198 aa, unidentified
  REGION 1..198: note = Table 20
MEVKARGNHGQGRVAVDLGETVLLAAAFEDGTVLLYSGRFIKAARRYWQKVRARVKPPSQENPRMSRRFRQIARKESRQVGHLLHLATSHFIRECVQRGVKEIVIGNLTGIREGMDYGPRVNQRLHAWPYRKILHMLRYKAALVGITVRNDVEERGTSRTCHACGQVRKANRVHRGLYRCSCGWTAQADVNAALNIYE

SEQ ID NO: 1854 - protein, 448 aa, unidentified
  REGION 1..448: note = Table 20
MFQFTPFYAFNALFKMSYPSIYRWDTADIKLYITKAILIYKMYLTTRVKIAEGGEEREALREAGNICTKIWNKANYYCREQWEQTGKIPSYYELQRVFKDDFWCRKLHSHTAQAVLHKLAESYQSWYKLKKTDPKAHPPGFRKKNSISTIAFTNFAVRVEDHRLRLTLTKGKHIWLDYQVQPGVEITQGNIVRVEITNGYSNIVYRVEEPEPKKKGQVMAIDLGIINTATTVKEDGEAKIYSGKGVLSIQRYFNKEIAKLQSIVMNQSGGKKKWSRQLSELSRKRRRQIKHALHALTRSIVEDCVKSNVKEVVIGDLRNIRKGKRWNKKSSQKLHAWGFKQFTELLRYKLALEGIRLVTVNEKSTSKMCSRCGYVDRYNRKKRGWFKCRKCGYEENADINAAINILKKYLHQTGRPVEGSSGVVNAPRVIRWDGNIPSEPDARQFIGG

SEQ ID NO: 1855 - protein, 405 aa, unidentified
  REGION 1..405: note = Table 20
MKLTLKVKLYVTQDQHIVLDRMAFASTKLWNIANWERRQVWEGTGKIPNYYEQEAVLKNNPWHKRLPHHSAQAVLQKLDHSYRSWFKLRKTDQTARPPGFRPKESLSIITFKESAFRVEGDKIRLTIPQKVKEELYYIESFLILPFQSYKSLEGKPKLIEVMYSGEAWFAHIVQEVQAPELLPDTNAMGIDLGIVNMAACVTEEGKAEIIDGGQIASVWRYFNKQIGKIQKRVMGRGKRWSEGLTEISKKRSIQTKHILHAATNRILEYAINENINTIVIGDLKNILKKKNGDSRNFGIANQKLHSWNFNQFTQMLSYKAQRAGISVKKVSERNSSRTCSVCGIVDKKSRMHRGLYRCRHCGTELNADVNGARNILKTYLESVSRPVVAELAQPSVRKWNSQKFC

SEQ ID NO: 1856 - protein, 422 aa, unidentified
  REGION 1..422: note = Table 20
MPRYECRIGRIDTDITTYWILARMGWIATKLYNTALWHSRKQWEETGKIPSGYDLQKVVLASNYHSYVPAHTYQHTAHQVGNAYRSWFKLRKKDKNARPPFFRPKEQLSTTMFDAFKVKDNNTIFLTLSKSLKEEIGYPYKWLCLRLRWNTPFPKDGKITQIEMVSRDGYFELHAKILLPEPNWRTEGQIMAVDLGMRNPIVSRDEQDNVDMFKGGEVLSNLRYWNKEKSRVQAEVMGRTKNKKKYSKSLGKMSKHGSAQVKHAIHSMTSTFADLCNQRDVKEVVVGDLKGIKKEENGMGKNWRDKSSQGWQQFPIRTLVTQLGYKLARYGIRLVEMDERGTSRGRCSICGCEDKGKLRRVHRGMFLCGNCNTTQNADVNGAGNILVRYLHQTKKFVEGSSGSLADPMVWRWDNHQWKTVVG

SEQ ID NO: 1857 - protein, 371 aa, unidentified
  REGION 1..371: note = Table 20
MIRKRYSDPYTPLTDKGGIDMANIEKGVYYRAYNIKLKLTDIQRKTLDGLCEDYRQYVNGLIKSAVENRPSPERADFPDSVIRSAQKDAQRHVTALLSGRFIKGKGRYIFHPYYSYLPEGSQDLMISQRGGLVGIVKRRPSLLMLTACIPRHYPADGKPYRVVVYTRDGDYFVHVEMSVRADVSQEVGVMGIDIGKKVPAVCVTGDGAVKFIGSGRERRDRSRRVSTAPALDRDAAVKRLENWLTEADRKDARECVAFAIKNKVGTIYMEDLKRLQAGTDQKFWSYLRLMRFICEAAAPHGIVVRIVEPAYTSQTCPVCGARNKADDRAYTCRSCGYSCHRDLIGARNILKSGLSGRSEVSRYAIKVAKKW

SEQ ID NO: 1858 - protein, 327 aa, unidentified
  REGION 1..327: note = Table 20
MYRTYTFPIYPNKHQALILDKMFDQLHELIKHRVKLYKEIPVQKGVNANLVPYHSLQYVDNTAKLIIKHKQFGLENDSDFYIKLKKHMYFKMVNFKITTSLSIKSKEGIVYNIPYRMTDYVKTKLNGDCMVSIKIFKKNKKYVASVLIKIKPTVVQEGIRAGLDIGVKVPAVLYSENQKIRFYKGGKYRRYLFSKQVSLLRNQNLANVRKIKVSRRLRDLDHKISSRIIKDLKKMKVNQLNLEDLKHIQTKNTKQLYSSWSYERLQKYIIYKCESNGISVKKVNPHFTSRECPVCSLHNVALRRIYSCECGFKQHRDVVGAMNIMSK

SEQ ID NO: 1859 - protein, 343 aa, unidentified
  REGION 1..343: note = Table 20
MYLTTIFRILPKAEELKALESLIYNFDVEVNKVLLKYLGQDSIVDVRFLEIKNTVPWDSKIEVIKQASLNFKLIKKNEHKLIKLNNLFCVWTPRNFRFLNNQETQLLIQNRGRSSCILDINSNDYLRNVIDSHRLFSLKIKKRGRKWIGLLTYYQEPKENTFKNTMGVDLGIKVPAVAVTSTGKVRFFGNGRQIKFIHRQQRKKLKQNKDKGNKKNYSWKNKLKAIDHKISREIIDFAIQEQVKVIKLENLNRLQKRNSKVKGVPTWSYSRLLSYIKYKARKEGIIIKLIDERYTSKRCPSCKTINNVYDRNYFCFHCGYKNHRDIVGALNILNANLSQKTCL

SEQ ID NO: 1860 - protein, 340 aa, unidentified
  REGION 1..340: note = Table 20
MYLTSKIILHPTPQQEITLKSLISIYKNEVNECLGKFISNKKIIWIPYSTLNRHLPWESKKEVIKEASKIFRDGLRRKSDSQNTHFKGDYCKWHCDSFTLDSKLNLQVGQQSRLIVEFYADDYQKQLLSSGYLTSLKIEKTNKKWYCYIKILKPDPQPYGEHVMGIDLGIKVPAVAATSTGKIRFFGNGRQVRYICTSQTSRLSKLMRNKNYGLIRKMDHKWGNRLLSIDHQISKSIIDFALRENIRMILLEDLNFIQKKSDSGKKISSWSYMRLKSFLEYKANKNGIKIQIINPYNTSKRCPNCSRINISTSRGYKCSCGYKNHRDVVGAINICNYNLS

SEQ ID NO: 1861 - protein, 368 aa, unidentified
  REGION 1..368: note = Table 20
MRNIISVGIITQGGDIIYLTSRILLKTDENTSQILTIMAKAYQNEVNNLLQLYIQNKHPVYVSYGDFCTFIPFWSRAMVVQDAKDIFKHVQKFNNPKLKLKAPQCCWHQPNFRITNNELEIQVGGRFGIGDTLKLPIMAEPYQQRYLKMELGKLTIHPYKQWWAAEFNVKVPEKPRSLSTKRMGIDLGIKVPAVAYTDDGKIRFFGNGREARFRRNAFYAKLTELQKKEDYRRIKELNHGLYRWEITQCHILSSQLIQFALEQNVGVLCVEQLHGIGKREVKHSRDKRDLNQWSYYRLIDNLRYKARREGLRVVFVNPRNTSKRCPQCGRLNTPDKRFYHCVCGFRCHRDLVGAMNIVHAPESGPVAG

SEQ ID NO: 1862 - protein, 376 aa, unidentified
  REGION 1..376: note = Table 20
MFYELHIGFFNFFYDFLGFSEFFTYVYKCKEVNLMYLTIKTNLKITPWAMDVIQRYGIIYHKEFERLIHLYQQAGKIIFIGYREINSEIAFHSKEQLIRLAQTFYEIRKKHATAQYHRLFVLSARSFQLKDDEVLMEFGRGFMKYPLRCTILLNDHQKQMLRQHEVLRMDVCKENKYYVVRFILKTESILSQHTQENEISMGIDLGMKCPAVCYTSDGKIKFVGNGRQMKYEFRRINLRYRKLQKSNNPVKLKNYGHKLHNYKKHIDHCISKDIVMYAKQQNVTVIRLEKLLNLQQKFHRHDMICWSYQRLANYIEYKANLEGIRVEYVNPYLTTKRCPKCGKINNVKGRDYICNCGFHKHRDLVGAMNILHAPKA

SEQ ID NO: 1863 - protein, 343 aa, unidentified
  REGION 1..343: note = Table 20
MYLTIKVPIKASKEEKQILQAYSKCFRDEVERIASRYQTLKQVVFIPYKWISSSIAFHSKTQVLHYAKILYEEQKLDHKAIYHNSFSSMAKSLVISKNHITFHFGQHFKVSQLRLSMMLHKQQSERLLQGELVKADVKEIYNDFFAYLLISIPQTIHNTMQNTDRKMGVDIGMRCPAVCYTCDGVIRFIGNGREIRFHTRQINKRASEFIKRTKGSRKQIKHRLNDYKRYIDHCLSHDIVDFAVEQKIQVIYLERLYHLQHKFSKHEQICWSYSRLQQYISYKAALAGIQIRYVNPRLTSKRCPSCGKINNVKGRSYRCRCGFHHHRDVVGAMNILHAPEILI

SEQ ID NO: 1864 - protein, 342 aa, unidentified
  REGION 1..342: note = Table 20
MYLTIKAQLFPDDAVGQELLRYERCFKREIFKICMVFKSKNSVFEYRYKNISNDISWTCKSIVLSKAKEMYTANKQGKLLKMNFSSIWNVQSFEIDHEKKRLGLILGRNQFQRKIFMHIYWSDYLEKRLHQGEILSLMLSRKNESWVAYFQMKFDIKWNLSDKVMGVDIGIKVPAVICTSDMKIRFIGNGKMLRYYQRSYRSKYKKLQHRKEFRKMTLMNHKLHHILNDIDHKISSRIIEFALHEDIGIIKLEKLTYMNRTFDIRITSDIYLWSYKRLQDMICYKANLNGIRIVYVNPKNTSKNCPDCGSLNYPKDRQYRCNVCGYHNHRDIVGAINILRAL

SEQ ID NO: 1865 - protein, 340 aa, unidentified
  REGION 1..340: note = Table 20
MYITIKLSLDLNEHLKHCLTWYETIYHKEIKRIADIFIKENHSYEYLYKNISNHISFHSKHLVLDFAKKEYEYRCGCKNSRKIRCSSCWSNSSYRLNGDLLQLELGLLEHKRFIDLPMYHNEQPLMQLARGKMMNLELMHIQENWYAFINVDIPIIFSTSRKTMGIDIGMKVPAVAALDNQHYRFFGNGRQRQFYLRKYKRHIQEMQRRKQFKKLRQFRHKLHNVLADQDHKISKDIISYALENDVGMIYLEKLTSIHDRFNVRQVSNAYLWSYQRLQQFITYKAQLAGIEVRYVNPYNTSKKCPKCGRINKPKDRTYQCKCGYHGHRDVVAAINILHAL

SEQ ID NO: 1866 - protein, 1799 aa, unidentified
  REGION 1..1799: note = Table 20
MTVFRLQDLLEQDEKAIAATSTLMGMGIAKLDCQGVESLSNGQLEALFSAIPQDWDFDKFGDIIDPDTVSESLAQQLVDWIDRRLGREKHQASIHPQEKKAEAKSDTLDIFNLRDEVISDYRRYLESFLKIRDRQVREFVTSELDQGQLWKDPLIQINPAYKRSADIDTLVSEGILHPDCRSYFPNFNFYHHQESAFRCARQNQPYVLTTGTGSGKSLSYVVPIIDDLLRNPNLKDVRAILVYPMNALINSQEEEFKKFLSRVPNCHIRVEKYTGQESLQRKTEIQNNPPHILLTNYVMLELMLTRVHEDKLVASPNLKFLVLDELHTYRGRQGADVAIVIRKLRQRRQLAIHSSSSRSDLRASSQFAVNMNNCELLCIGTSATMSTKGDRTSRRQTVANVASKLFGTEVKAENVIDETLEKAIARPYPDPTELRSCLEAGLPPVKEQTLEAFQRHPLSAWIEMNFGLAQEGDRLVRRTPISLNEGARQLSQLTQIPIETCVDTLKKMLIWGSKTKGLPFRLHQFISQGGSVYATLEDKDKRFLTLEGQYKTTGDRLLYPLAFCRECGQDYYVVRYDSQNNQVTPLLPTALDSDVDVEDIEEGYLTLDEPDLWDERDTDRLPDNWFRETVRSGRVAKREYASFIPRKLHIYPNGVVATSLIDRNATQCWFIPKPFLTCLNCGIVYDKKTREYRKLSRLSSEGRSTATTLLSLSAVNHLKSCSAVDAKAAKILSFTDNRQDASLQAGHFNDFVQTSFLRASLNAALQASRQLTHKELVAAVVRQMGLSQEAYAQQPADFGYGKKRNEEAFEHLIEYRLYEDLRRGWRIVQPNLEQCGLLAIAYEGLENICRDITPWQKHPNSILLRATPEERFKVAKILLDQLRKELALDAELLQPEKIKELKREVIQALRDPWKFDANELLHQAKWATLSSSSDRDKGTIKLTLQSKIGRFLRSDRAWSWLTEPLGEPEYDRLIQSLVRVLTDCGYLKQNGMQVQLRIDSMVWKAQKVDKIPTDPLTTKRLSGSEEAYQEANQFFQTVYDRNARAIETMEGREHTGQVNNQNRQERENEFREGRLAALFCSPTMELGIDISDLCAVHLRNVPPSPANYAQRSGRAGRGGQPALVITYASAGSGHDQYFYKRPEQMVAGVVVPPKLELANPDLIKSQIYSLWLSHTGADLGESMNQILDLDKEGYPLKDDLRATLTRSPQILENCLRDAQTILSDPFCLEDLKRTAWYSEDWLKSVLKNAVNAFDRACDRWRRLYSDATRQLEQARDAIDRAARGAATMEEREKAKTLQREAQRQIDLLVGHNDRNRSTSEFEFYPYRYFASEGFLPGFNFPRLPVRTYIPAGEGGEFLSRPRIVAIREFAPANIVYYEGNKFQIAKTRVSVKGIDYQRVSLCHNCGYFHDGERSHRDTCENCGKKITAAPNGNPAILTRLLEMETAIARRRERITCDEEERLKYGYRVTTHFRYDERKQEEATVTAASGMPLLRLSYGETAKIWRINQGWRHSKERGFKLDTATGIWGDNQNSQTPEHLHTDVHLMVSDTCNILVVEVEALNLPETNVEDFLATFQFALERAIQAVYKLETNELASERLGEGKYLLFWEAAEGGAGVLAQILTDPQAFQKLAREALEICHFEQPKDSCIQACYECLLSYQNQSDHPRLNRSLISKFLEQLRTSTLHRESEEHYQRLLQQTDPNSEFERVVLEEIYKRGIKLPDSAQELLPQANCKPDFLYKTAKIALFCDGSVHDSSERRERDRTERENLAWNFGYEVISLRYDEDWHSKLEQLKTWLD

SEQ ID NO: 1867 - protein, 822 aa, unidentified
  REGION 1..822: note = Table 20
MMQLTASPRQVSRYEPARTLVRRLLPLPGETRTDYLQRVELLKTAFREFNTDVANLCRWLMAMRPKDVSMVVCTEEAWRALVWPKSIWPEMDKASLEAWHRMTLDALLGLPAEAEEVVPPACRAVLHELPALTAHQQATTTGPALFARLRLASHGYRGAVMKAACDWIASRYLRTRERMVQNHQAWYAEKAAWEQAHPALTPEVREQFNAIFSELGVREKRPRICHWSRLEDLQNNCLHAGQEVALKKRHADICARTIRSFSDIEGIEEKRTFQRHLFGQKPNDKNPMGKPGYLELRAREERRLRQRPASKVRVPPQFAAMRNEELHREAHRATLEKLFQRRERDREQFDKLLRGYLQAVGLSPKVLFLDLKGEPPHCSHAGEECVFNQHTDLCIRYRELVAAQPSDLRALEEEYRTWRSRYLAPPRGPQFVLPSATDAPLPRIFGKGFFEVDLKRGRARLRVEQPGRPYQWLEFAMPPWPKGYSPDADSVEVTSAHLHFIGTRPRLGFRFDTKFAAGRITLSQDDIDYLRSHVYPRPYQDSDFLLAVRQLLESSGAMSLHPPLRVLAVDLGSGMTAIASFEGNRCLRSSRLRVVKDLATLTNERPPKPAKGEKPIRIDMGLRAGHLDRHLQDFVPKVQTLAEQRLARHCSGELLRSDMREETAHMRWMIRDWVRLNVRQILAEVEASQADLIVFESLRGARVPGRHELDAAQKSRLAFFPFGQIRRKVTEKAIEHGTRVVTVPYFQSSRFCSACHSPQEIQNKWKSNKQQGRFECERKSCGYKGDSDENAARVLGHVFWGTLPLPEDPHWQDVRLAANAPT

SEQ ID NO: 1868 - protein, 767 aa, unidentified
  REGION 1..767: note = Table 20
MTRYRESRTLVRKLRRLPGESRDEFKRKVGLLRRHFEQFNVDVSDLCQWLMSLRPNSPKSGAEAQPFWDSFLEPAGAADSRDDSRADHLRRAMFQVVVGWKPEGHLDEYGLNEALLASIRYAKERLLTPTAQKLFVRLQKLNDAHVLVLLKAAADWIVSRYQRGYENWTRGHAEWEKEKTEWESRHPELTPEVREKFNDVFRKLEIRLKRPRVCSWERLQDRKLSCDFAGERIGQRMHAPLCKSYSKFLSLKDPNQRSIENYFVENAQKYLRIRNRHPRRARKELIAELLEKNSQARWFEQAWIRYLKTVGVNEDTIVRQYHGRLPHCEKFDGECPWNNHTDLCRQYQSLLNSQHQSVRDLEPLYREWRRDYLSGPRIPSFRYPSSRDLPMPKIFGSGFFAPDFDHARLRLRLDNMAEGEYLELGFDPWPADYNRQPEDIEITSVHVTFVGTHARVGFRFETPHTVSRFRVSQDEIDLLRSRKYPRRAQDQAFLDEARTLLLGSLDRPESPIRILAVDLGETGAGAALLQGKEFQCVEPLKIIKVGRGKDTLTTEKPKKDQSRGLGLSKEHVGRHLEVFAEEAKKIAQARAKRQPTNAPAPETLRGHDLRLLSRHVRWMIRDWVRLNAQQIIEVAERRRADLIVFESLRGFKAPGYDKPELDKKRRMAFFAYGAVRRKVTEKAVERGMRVVTVPYFYSSQTCSECGTRQQDQQRLRKNKKKRRFICEHQGCRWSEPDGINSDENAARVLGRVFWGEIILPDKVDTTT

SEQ ID NO: 1869 - protein, 831 aa, unidentified
  REGION 1..831: note = Table 20
MGSTRYNCSRTLVRRACRVPGEDRASFREKLRRLKTLYLQFNVDTAELCQWLMRLRKRYGDQSKPASFGVLCDFFLDPETCGLESDEKQYDRWRRDVFDHVAGFRSIDRLSDDPLPRPIPDQLAAAMQAAVDDSITTQTTSSTCLFQRLEGLDKRHRLVLLKSAAEWMVARYQRGMENWVRQHAEWEDEKEAWEKAHPELTPEIRERFTGIFSRLKVSGDESGTGTSEHAEPVKTGVRRKNPRICRYERLRKHIDNCCYAGDSGHSPLCWKFAEFQRDRLLQNKQFNKKAFKKNASKLASICHERRTRPSKLFLSPKAADLILPDTKPGSRPTTLKSFKADWQAYLKFMGINEETAVAEGRLPHCLSIGKKHEESTCLHNKHTDLCNQYSRLLNAEFAKEISRDADGFTKLEGTYRDWRRYYLAGPSKPSFRYPSSKSLPMPKVFGSGFFELDMDRSVVRLRLDDAASEEWMEIGFDPWPRQYSPSRDQVADRVSSIHVNFASPTRVRLGFHFRVEHRPSRFGCTQDELDLLRSRTYPREAQDKAFLAAARKRLLDSWTGEDPDSHLRLLAVDMGTGGAHVMVFEGRKHGSDEPLRINKGDRLYDTFPDKKPKDKGGKDKNNKNQPAAVVEVKGLRKEHVGRHLAAIAEQSARNAAYRQEKLGDQTSVPHASDSRALKIHIARMVKDWARLNASQIIKAAEKHNCDLIVFESLRSKPKADYNKLSDRYERQKAERVIYAFGRVRQKVKEKAVERGMRVVTVPYFKSSQHCSTCGRVMEDSGAFQKNKKRKKFICDHKDCQAYDKPIDSDANAARVLGRVFWGEITLPDPAP

SEQ ID NO: 1870 - protein, 815 aa, unidentified
  REGION 1..815: note = Table 20
MASPHIETPTRTRYKESRTLVRRLCRLSGESPEEYRRKVMLLREHFERFNTDTAGICQWIMGLRKRAGDEAHPESFGTLGDFLLEPALSGVEADEKERDGWRLSVFDDVAGFRRADSIAGRSIPDDLRRAMDDAAERGPHRDPGNRAAARLFDRLRTLDRAHRLVLLKSAAEWVVARYKRGVENWIRQRAAWEQERDEWERDHPDLTPEVRERFTGVFRNLLDPERDERQGIRAKAPRICPWDRLRQNVDNCCYGQKGHGPLCWKYAEFVRARKQANTAFNDKRFWEDAEKFVRFCHEQRISQPTKQFSNPNLPRVLFNDLPERERGHAVTRLKKNWIAYLNAMGMNDTTVVQHGRLPHCRRIGGQVFEKSECLWNPHTELCDRYRRAVAQLPDALLALESEYREWRRFYLAGPRKPTFAYPSARDLPMPKVFGEGFHEIDLDRPVVRLRLEGAPGGEWVEFGFIPWPRGYKPSKREVNITSVHIHFVGARPRAGFRFGAPHKPSRFSCSQDELQLLRSRKFPRRAQDQQFIDAARQRLLETFNGDPERDMRILAVDLGEKGAHAAVYRGRTHERDVALRIVKINVLYDAPPATLVPNPNDPKHNQRPATLEFSDKQDPRGLRKEHLARHLARLAERSVEIAERRRREGEPAPKPAAHDQRSLQRHVAWMIRDWARHNAARVIDAAEEHRCDLIVFESMRGQRPPAYNQLGDEAERKKRSAAMHAYGRVRAKVTEKAVERGMRVVTAPFHNSSRVCSACGARQENIGLFNKNKAKRTFICEKCKQEMNSDANAARVLARVFWGAITLPAPEPGSP

SEQ ID NO: 1871 - protein, 764 aa, unidentified
  REGION 1..764: note = Table 20
MSATRYREERTLVRGLRRLDGQSRLEFKSNVRKLRRHFEQFNLDVSEICQWVMSFRPDGKRGKETEPFWSFFLEPEQFIDDEKLVDRTRLAAFKSAAGLGNAEKALSNVPDEVVSSTDHVKRIPPTQTATNLFKRVAGYDDRHIVVLLKASADLIVARYLMPFENWKRRREEWLKEKEAWEKKHPQLTEDAISKFNRIFKDLGVDRKNPRVCTWEQLQKGNTGCLYNGERFRIKNHAQLCVKYLKFRANSEANKYFEENVRTYLAIRQKNPHLHNNRKKLMELLLKKEPQAHKFSKTWWADYLQALGITEGTVARKGNGDLPHCPQKNDDKEPCPYNEHTEKCKLYKARLSSEPRLQELDSLYREWRKDFLSGPKKPSFTYPSKRRLSIPKIFGKDYYGVDYKHSILRLRMDTMAADEFIPFGFHPWPPEYDIQPGNAEISSVQIHFIGSRARVGFRFKVEHKQSRFAVSQDDIADLRSRKYPRWRQDNAFLREARKLLLESFSGDPEKELKILCVDTGQVGNAIALFNGRQFQKSEKLKTLKLDKLIFPDEKSGSGSNKKPYSGLTKDHIGRHLEAWAAEASQISQKRSPGKKPASGTDTRDQPQLGPNDMRRFSLHIRWMIRDWARLVASRVIKKAEENDVDLIVFESQRGFPLPGYDKVAKYDSDKKRRLAFYAHGRVRHKVTEKAVERGMRVVTTPYFYSSQTCSECGRKQGNHRLWRTNKGNGSFICEYDGCNNRMDCDENAAKVLGRVFWGDIVLPDQ

SEQ ID NO: 1872 - protein, 733 aa, unidentified
  REGION 1..733: note = Table 20
MEFKSKVFRLRGYFKQFNTDVSEICQWLMGLRPGGKRGNSGTDAFWKFFLEPDTFLAGQEKEEGDLHRRLVFDFVAGIIKSPLLSEILLSDELSGAIQALYLLVPTPTATKLFERLKTLDAGHRQVLLKAAAEWVVSRYQRGYENRERQKAEWGKEKVDWENKHLELGAEIRTAFTDIFKKLGIREKRARVCSWERLKANKDNCEYAGVRISKKNHNGFCQRYRDFINTADRSKKKFFPKNAADYLKLRVQYPKDSKKAWEKFLGNNPNGRWFPDAWETYLKVMNIKEATIIKKNSGLPHCTQFGDDDECSHNKHTEKCKLYQAELDQRPDLQPLEGLYREWRREFLAAPAKPTFQYPSQNVLPIPKIFGKGYFRTDFASSSLELRLDEMKEGEFIHIGIVPWPKGYQPQPEKMEVTSVHISFSGTRGRAGFHFNVAHEKSRFGVSQDAIDELRSRAYPRKAQDRQFLENARKLLIESFDGELEKNLRMFVVDLGTNSAAAASFAGKEFKKSFPLKVVKIEKLYDATPEPTKSEKKGETDKNTAQKGTGLRLPHVAKHLEVWFKKAAEIGEKKRELGVHDLRRLALHLRWMIRDWVRLNASQIIMKAEEEKSDLIVFESLRGFRAPGYDKLEDEKKRRLAFFSYGAIRRKVVEKAVERGMRVVTVPYFKSSQFCSKCGKEHPDLKELKKDKRARKFKCPFCKTEVNCDENAARVLGKVFWGEIQLPDEVGEKH

SEQ ID NO: 1873 - protein, 767 aa, unidentified
  REGION 1..767: note = Table 20
MAQASSTPAVSPRPRPRYREERTLVRKLLPRPGQSKQEFRENVKKLRKAFLQFNADVSGVCQWAIQFRPRYGKPAEPTETFWKFFLEPETSLPPNDSRSPEFRRLQAFEAAAGINGAAALDDPAFTNELRDSILAVASRPKTKEAQRLFSRLKDYQPAHRMILAKVAAEWIESRYRRAHQNWERNYEEWKKEKQEWEQNHPELTPEIREAFNQIFQQLEVKEKRVRICPAARLLQNKDNCQYAGKNKHSVLCNQFNEFKKNHLQGKAIKFFYKDAEKYLRCGLQSLKPNVQGPFREDWNKYLRYMNLKEETLRGKNGGRLPHCKNLGQECEFNPHTALCKQYQQQLSSRPDLVQHDELYRKWRREYWREPRKPVFRYPSVKRHSIAKIFGENYFQADFKNSVVGLRLDSMPAGQYLEFAFAPWPRNYRPQPGETEISSVHLHFVGTRPRIGFRFRVPHKRSRFDCTQEELDELRSRTFPRKAQDQKFLEAARKRLLETFPGNAEQELRLLAVDLGTDSARAAFFIGKTFQQAFPLKIVKIEKLYEQWPNQKQAGDRRDASSKQPRPGLSRDHVGRHLQKMRAQASEIAQKRQELTGTPAPETTTDQAAKKATLQPFDLRGLTVHTARMIRDWARLNARQIIQLAEENQVDLIVLESLRGFRPPGYENLDQEKKRRVAFFAHGRIRRKVTEKAVERGMRVVTVPYLASSKVCAECRKKQKDNKQWEKNKKRGLFKCEGCGSQAQVDENAARVLGRVFWGEIELPTAIP

SEQ ID NO: 1874 - protein, 445 aa, unidentified
  REGION 1..445: note = Table 20
MYRSYSFRIGLTRSQARHISKIRDSQRFVYNWAVERLLTNPTLTTYDLSREFTKVRRSVSWLQTVERIYQNTAIHQARTAADVSNKYGNGELSFRARKRDNTKAVSCDVQPRFVDNRHASLPGLGVVELCEEQPYQFPHNWLYGSRSFRLVCVTPKSWGHVKSCDHIYRLHITYDVPVPERRAKTGVVAGIDRGITNPTVVCKTDHNTSNITSYDTATAFRTNRTWNDETRRTISHRNKHSNSTCKIKRKREKYNRGNANDREYAEWLLAKKICEGVDVIYVEQLNLEAMSRRGGRHKKGLNRGMRFIRHYAILRKIHTIAERLGIRVVEVSPKYTSQECSICGYTSKENRNGETFKCLRCNHMVNADGNASVNIIQRGTGMKVLAGEGMALERREMGRTRKPPVCAVPDARRRRENQACNRPKTSSAMKHLGMYAYVTRAYPGI

SEQ ID NO: 1875 - protein, 267 aa, unidentified
  REGION 1..267: note = Table 20
MVETAKTILESWEMRSFKIVDVTRYVNKDTKPSDHMFELHITVQVPAEPHRAIGVVRGIDVGGKHLAVTVDTNAVHNTRHIDILREIDALKRLRDHKKKGGLKWCIINYQIDRKANNIATNTINQTVSRIASGVDAVAVESLSIKGMTAHGGNYKRRMNRTMRESRLGEFLRKLAQRCERAGILLYGVVAKHTNQTCHTVDAKSRISRDEFIYTRVFHADVNAAWNILYRVAGNVILRRSGRRATNQRLRCFVLYTKAVIKESGTQM

SEQ ID NO: 1876 - protein, 479 aa, unidentified
  REGION 1..479: note = Table 20
MQTKKNIIYRTHKYRLKTNSNITSYVENLEAENRMWVELGVMARNLNVPFTAGSSPDPYPRSILRCVTVAKDMMAEWENVSPKSISMIRGAILAGIEMKDCKHLKDGKIYPIFFLGAPKQIKHNMIWFTKSNVQFSIVRGRLPDGTTIASHKIVDITNDADRRRGHRQFELHLTIQEYIPDRKITGLTAGVDMGKLTAYVALSDGTTRVLRLYDTEINKHIRKLQSERDRCTHNSNKWNRINNRIRRQRKVLYNWQLNEYRHFCKKLCVDCDLIKFENLNLINITRKGGGRIKGKNRTLKESKAGEVRDWCVKKAPEYNTEIREVRPHNTSKKCHICQSKNTERYGGFKTWHNDKIIYENWSHDRKFKCKNCGNLTHADYNGAFNIMYGHDNNYNNNYDYTKPNSRRAQKASRLCIKSGSDLRDRINLRNRTPPPVVNDWQVVKTALPKRESAPTKHTLNGVDNTQHQRKLSLNEHVFT

SEQ ID NO: 1877 - protein, 439 aa, unidentified
  REGION 1..439: note = Table 20
MKYKGEKYVIRTLRYRLKTSTRLTRYFDSMYSESHIWLNAGIEARIAGLSFIDTTKIATICQTIPQAWVHGAIREGHKMEGRSHVKYGRKTYPLYSAVPLGKRSKGDVVYFPRCSMPFKLQKGRLPDTSQTYKLVDVTNNTDKERQLELHVTIREHVPYSVAAGIHAGIDMGGKHTLIVGKSDGTIDMLTLREKDTLRNIARIQKKMSHCKLHSHKWRSLHAQLQSVYKKMGNKQEDKLRKFSKKLMRQCDKIIMEGMNLRTMTTKGKGQKNKNRMMRQGKCGEARSWLSQRALQYNTEYTEIDPKGTSQQCCMCGSTNTWRDGSRFRCYDCGVLMHADINAAFNILFTFYTVQWSKRAQAVYTLQNKAGMVLRGKIHLGTCTLPPSVNDVMAGTGCPKVGHQSPTNKERLNGAPLNGGSPPTPVVTQAGKMMGHVPTF

SEQ ID NO: 1878 - protein, 645 aa, unidentified
  REGION 1..645: note = Table 20
MAYGHGNSDSEKRMVSLGVGQLTDAKFHALVQLRDQYLEAANAMMTAVFVSEPLAGVPDKKTLDQALLAIQKDRQGLNKAYVEKARMAVKDHAHEAHGRYLRRLVGKLCHCADEIEGYQGSGRRYYHIDESLQDKISHAELSALQCNAEGWERALTLYRQVVVQGSGDGLSEAQAAVIHHLHEAVQSRYLPPVYGKDEAFTCQLHLDYRVVRGLKDGKVLDPLNKAAALLLHDQTNRCYQHFLEVSHPTPRQPPIRIPIHLTEKRLRRLGIEGLKTAFKSFVLEIGTSRIEVKGVVERVRPAYTAAQTTANASPVKLADDDFIALAKALNECDTLMGRDFGYANTIALTVLKRERALSADDLRELMVIRHLPRARAKAAMKEWFSSREGRDIEVVTQQCYSGRNFLKAIHGHCQYIDRLSSQIDCLYNKIDALKWILVTTLALNPEEWIPQKGLAFPDAFVKSLHQRFFHLLDKVTHLKAKRRQRYRRIAGLKKSWFGYLSNQEIALAKEHNAAMIREDLTVMAVEKTAPDYKGRRFNKMINNGSKGQYIQRASDKLLWNGIPELAMPTPYTSQACLYHQQLGKRQGERFTCPRCEKSRHSDLNAAMNIAGMLLTQWLGNSEKRSSFGRAISSENLVHEKPLPTA

SEQ ID NO: 1879 - protein, 477 aa, unidentified
  REGION 1..477: note = Table 20
MLINFVIAKTGKYLKLEQLWREHGIIEGFKQFISQHVKKAKFPTKLNISTYANKVNSLCKKHIKQTNVNNLAAVYQPTIRLDENCYTIKSVFDEASKRYQHHLTLVNLDGCKRFTGITLSGYHHIANFSKMGYSKSLIMSFDYDIKDGLCKPVFYLHLGFDVKPNKVNAKSDQQETKNTTRKPNILAADWGTTELFTFSNGDVFYPNNGVFYKKCADKQLELQRVLSSLELKRRENKRPIEYGIYQLVANTNPSNYLAIKAKSNQDFKKLTRQIQQHQLSQAKDLADYLIDNQADVLVYENADTNLMKQDGPVRTRSRHFKRSLNLMTLHDFIEQVSDKTKLYHPRFTAVAINPAYSSQTCPACGFVDSRSRNGDVFCCVACGHVPQPTASCQVIPPKDGAQASQSDYAAAVNLLNRYMCVDALLGINNHTPKQKVKVKLLQLYEAIKHLDTSYDSVLLDQSIRVKVKTHLDSQMLT

SEQ ID NO: 1880 - protein, 665 aa, unidentified
  REGION 1..665: note = Table 20
MKTVQNIIKPEEIRLTFPLNLDIVQSNGKIKTVPQQKIDDMIESFKDSANSAIEIITKKIYPRLIILDNPKKGYCPLCYPPNTKKKKKSELIYRLKDFEIGHYNFNGKEYSCIKFVKGKKSLPFCDCIKKNNTAFYRLRKFLLPSETHDTPFDMTIAGRKLNGKYKIARSKSVFNLSKSNYLGGYPGNGYRAHIFDSCLQKACEAIKSQNEINKKIQEKIEKIDYKIIYQKKFIMNQLDLKIKKEREWNSSLKIYSIKRIKKFITDNELKIKRLTKKISKEVVYKKSVVRLYESDYKLLQDPVSQKYSIEIKDIYTDKMMLPINFLGQDNTKYMERLKPYLNMSKKCETEISRIEPYKNMKIKNRWKWKQSPVYKLHYIFKQEKKKIEFTKEMMPLGIDLGIANLQTMSLWDNAKNKPVKIKFYNGRPIRRKRQQMTKIRKIISKRNTAKIRSYLLNKGYAFNKNPQNYIEVIKKMGNTPEQKYMNNQMHNHTTEIIKKCCLWKAEYKKDIVIVIEDLLDIRENINMESGNLKVLGKCNRYSKNTKNLKTKRFWKRKNNFITNINKWTYAQWLNNLKYKAELNGIPLVILPKRFIRMSSTKCNKCNHIDENNRKGRRFLCLNCKYKSDADYNASVNIAKSYYEWLIWKEEKKEEKKKKNDNKKSL

SEQ ID NO: 1881 - protein, 480 aa, unidentified
  REGION 1..480: note = Table 20
MQPDKLEREQAIKITVKGVISPRDEGIRTLLQEYKVYKKVLISRISESIKTVIKDKNIRVYSLQKYLLQKKIIEYLKNLPYHPMPYGNQSYWIEERDGKFLIHIKTKNGESVCYLQVPNKYRTLMKKASGKVCPHMNEGKCEFTICPFKTSKMCNKINPYRGEMKLIEDKKYGWINCHITLRLPKPEPYEPKGWIGVDVGWNYLAVSAYVSNEGKISHVTFHGKEWKTRIIQLKYLLKMFQRTGKSTKVWRHRLRNVTNYTVGVIAKEIVRKAKKLKAGVAVEKLTFQAHTKRWLIPRYKLRCAIKNLCERKGIPFVEVSAKNTSIKCNKCGYIDEKNRNGKIFKCLKCKYTCNADFNAAVNIAKKAIEKYKKEKLKAAGKTAIPASYTDAGKDPHAKMTHPQKDVDGVAGRGMLRAPKAPMTNDQPIDDPYKREGNPSIIEDHTQRKAIKTTKQQKLTKYLHLQKQQKITKNRSRKTIE

SEQ ID NO: 1882 - protein, 346 aa, unidentified
  REGION 1..346: note = Table 20
KEELERIHYVVTCPIHLTRELLKEYNEFKKVLTKEAAEKVRKIIKRKDIRIFAQQKWQVSQKIERYLKRLPYHPMPFHRQSCWLEKKAVKTRKKEEEIYILHIKTKEGDTSNEIFVPYKWRSLIDQALGENNDNLGQVEIVERQDGTARAHITLRFPKPQPYEPKSWLGVDTGWNKLAVSIIYKNGSWVSPSVHNRNHKVNYKEKIKYLRYLYKKYQRTNKAEKWNNRLQNTIKYVVGCVAKEIVSKAKKHEAGVAMENLNFQSVTKGFLIPRYKLMVAVKTLCEREGVPFVLVPAKNTSITCPKCGYISKRSRNGERFKCVACSYEADADIVGAMNIAKKASGSS

SEQ ID NO: 1883 - protein, 329 aa, unidentified
  REGION 1..329: note = Table 20
MDKLTRPRLRLWQLKYWAFLTGVASTGTKADLEAALHHSPRLQVSEKRGFNARKIVSVDMGIRNLAYCVIQRPAGEAGKALAVKTWKRMDLLNASARAHAASLKEEASGISTAQVGQKDASMLDKTAFLPSSMSRTAYSITRELLGHEPDDILIERQRFRSGSAATILEWTIRVNMLESMIWACLETLRSISGTVLFPDIHSISPKRVAAFWIAGKDVPLHPPLDMFQNAGTAELLKLAATGREKIEKGDKVEIVRSWIRGESDVHLTFENDAAKIAEAFTVPKRNSKAAQLLAGGKLDDLADCLLQAVAHLRWRENRTRIHEMLESGT

SEQ ID NO: 1884 - protein, 697 aa, unidentified
  REGION 1..697: note = Table 20
MEYRTITAKDNLDSVFAGTDEELNLLKQTILDNHYLRFLGSTAVYHYAMDFLHGHTDWAVDKQYPQLDAHVLSSFFKEFAQGFRRQNRSPISSRFINIHEEIVGVAEKIQFGRGRDFQFIHQNVWHDYELAATNHLSSNLMKVLKRVVVHFLHCDASVLDRYSVKKLSTYLISQISLGLYIVNEDQEDGYDLSPDLLACLKKHKNVLDGDMHLFHEFISPYIDDVRRIREQLRLRDDYNAAYNVVRRVKVYDKLWYVYLPLFFRCNQYLEQQDLKFCSLLPIPSKSVCFFKLYSSGLQVLYPGKSFEDLFQIPHQQYGQLHGISTDSHTVQFLFECGHQALAPVVVQCRRVVLNPGHELRDAERRRLELQVQNIYVDEDEDEDEDEDEDEDEDDDDLHNEEADVDAADGQAQDQRRYSCQQIWYDFPNISLEGKKKAAVDPGLNNYVSIFRPADFQQNQYWDAIEFDYAEKHVISKQRFNELGITEELARKIAEHTQQAQQLRAGLKSYDFDRFQMMLQERYRLFDDELSYYSQEHVLELRLQRIFARRRAYLDVVKKILGVQVLHTSARDQFAVYYGDFVHSTRSLKGQFALQRLVQILNEYAMVFIVPELMTSRLCYECARSGDESFVRRKKDSSECPRCGKQYHADLLGGANIYSLSEQLQRSGGLVPPMNMPTKFIPIAREYGHRIQLARCAD

SEQ ID NO: 1885 - protein, 494 aa, unidentified
  REGION 1..494: note = Table 20
MTRKSTPTYTIEFPLRIPIWQQDRLEKKLKIARLVYNSCLGEALKRHKAVKANKNYRILINEPKSKIRDKQLSELRLTFGFSEYGMHHFVKSVQQKFKENIGSLEAQKIATRAFEAVEKLHFGKAKRVHFKSFRDDISVENKSNSTGLRYVDGNILWGDKPTKKNPKPKNWICAPITPKANDEYAHIALLDKTKYVRILKREVRGKVRYYSQLILEGYPPKKSNRKVADDETKRVGIDIGTSTIAISSDSKVELRELAPECNTEERELRRIQRKMDRSKRSTNPNNFHENGTIRKGRLTWTYSNQYKKLRQKRKELFRKTTIKRKLAHEILANDILHLGSDIRVETMRFQSLQRRAKNTTRNKKNGKINHKKRFGKSIANRAPAMLLAIIDRKLGYQGRTIKKIDTYATKASQFNHRTNEYNKKQLSERWNHFGEISIQRDLYSAFLIGNTNETLNSVDVDLCNAQWDNFVKLHNREVAQLKKSSSKTLRWFVA

SEQ ID NO: 1886 - protein, 493 aa, unidentified
  REGION 1..493: note = Table 20
MAKSKTLSYILTLKLKTEKYQEDILNKRLEISRNIYNSCLGEVLKRYKHTRELKDYRKEYKNIIKMSKDKERSKKFNELNKKYDLTEYSLHTYVKPIQKYFKDNVDSFTAQKIATRVFNSFQKLMFHQAKRVYFKRYGELNSVEGKSNKTGIRFQDNWLIWNGLKIPVIIKTNDIYVQMSLENRVKYCRIIRRIVKGKIKFYVQLILEGIPPMKINKTTGEIKNKIGKGNVGIDIGTRTIAVSSENDVKLLELAPEIDNIENQKRILNRKLDRQRRANNPNKYNEDGTINRNNKDKWIKSNRYIKTQNKLKEIQRKQAEIRKQSHYRLINRLLLLGNRFLVETMNYKGLQARAKETTINERTSKINKKKRFGKSLANKAPSMFLTMLDNKLKWNNTQLFKIDTKKCKASQYNHFTDEYCKKELKDRWNEDIQIQRDMYSAFLIMNVVGKTLDKIDRDLCIETYDNFRRLHDKEIERLKELKKKGYKLISSMGI

SEQ ID NO: 1887 - protein, 508 aa, unidentified
  REGION 1..508: note = Table 20
MAKKEAKQRFILNLNLKTEKFEEKILDKRFEIGRKIYNSILGKALNRYNEMSKTIKWRNNQSELSNIYKSKCDKKELNKLCAPCFYIKNEMLKEFRLTEYSLHEDVKSMQHTFKDNMDSFTAQKVASRVWKALETNLFSKGEQVHFKGQNNPVNSLEGKSNGTGIRYDMVTNTFKWIGLEIETMLNINNQYEIDALKNRICFCRVKRKFVRGKYKYILQIVLDGVVPVKLNKETGEIKNYIGSGNCGIDIGTQTVAYVSNYHVKLYELAPRVQNIENKKRRIQRFLDRSKRSTNPNNFNEDGMIKKGAKLEWKYSKKYVKAKYRLKDIYRKQKDIREQDHNVMTNEIVKKCNVVYVEQMNFKGLQKRVKNTTINEKTGKINKKKRYGKSLANKSPSKFLEILYNKLKVKGGKYIEINTRQVKASQYNHLDQEYKKKKLSQRWNYFEYNGKQIKVQRDIYSAYLIKNVSEDLCSIHLDNCSKGFDKFLELHNREIVRLQGLENLSSVGV

SEQ ID NO: 1888 - protein, 498 aa, unidentified
  REGION 1..498: note = Table 20
MSNFCITIPLKTETYQEHILEKRFEIGRKIYNSLIVITQKRYREMTKTKEYKYIMKQYKRIHEGHPKAGVTKKDLANRLKEMQREYRLSEYDFHKDVKELQHCFRENIDSNTSQKIATNLWKAYSKVMFSDGKEIHFKKYGEFTSLEGKSNTSGIRLVNETLIWNGLIIPVIINHSNSYENECFQNPHYKICYNRTLQKEIRGKYKYYLQVVFKGTPPVKYNPTTGEVKNPKRDGVVGIDLGTQTIAYCSNKEVGLIELADKVPNLEKKKRIISRKMDRSRRAMNPNNYNEDGTTKTGARKWKNSNRYLRLRSELRELSRKQAAIRKLQHETLANHLLTLGTTIYVETMHYKGLQKRAKKTTVNEKTGKFNRKKRFGKSLGEKAPAMFVEILNRKLNYIDKEVLKVNNYTTKASQYNHVNQTYKKKKLSQRWNKIEHNNEVIIVQRDLYSSYLLMNMNEDLKTMNQEKCEMNFERFLIKHNQEVERLKGKKNLSSIGI

SEQ ID NO: 1889 - protein, 502 aa, unidentified
  REGION 1..502: note = Table 20
MKRSTTPSFIITLPLLLEPWQEHRLDTDFAVSCKIYNSLRCEVMNRYNQMVKTKRYRYWLKPYRKEKKGSELRKQAKEQLESMRKEFRLSKYDVEKDIKKYQHYYSKNLHSAVAQKLVEQLWKSFDKLLFGNGQTVHFKRCDDFTSIEGKSNETGIVYANGYVGYNKMRLKVLANTRDPYVEQALRCRVKFCRLCRSFIRGKWKYSVQLILEGQPPVKVTDTGEIKHSIGTGRVGLDIGPQTLAVAAANTVRLVELADKIQNIENQLRVINRAMDRSRRATNPSFFNEDGTIIKRKPNEKRIWNTSTRYKKLAAERKDLYRKQAAIRKQQHFELANYIVSLGDEVYIEDMNFSALARRAKKTTVSEKTGKCRSKKRFGKSLANKAPAMFVSILEQKLNSTGGHLYKVKTKEMKASQYKHDTQTYKKSKLSERTKEVAGQTVQRDLYSAFLLMNSNPTLDKPDQNLCEKNFSTFLELHTAEVQRLKTLSHLPSSVGIKSIKTA

SEQ ID NO: 1890 - protein, 525 aa, unidentified
  REGION 1..525: note = Table 20
MTKNNNNTDTCVLTLPLRVEKWQEDCLLKRFEAARRIYNSLLNFELKKLRQLERTVEYRQIQSVISSAYRSNTKDSPECKDAFKRREKLISANGISEYGFKSDVKFFYKHFDGLIGSNVAVHCIAVQLWAAFDKYLRGSGKEIHFKRLGDISSLKGYSVKGKSGGCEIIFRGQYIEWTRKKKKLLLPLKIDPDNEYEREMLSRRVKYVRIIKKPGKNRLRWYAQLTLEGKPALKYSAETGKPIHSVGKGNVGIDIGPQTVAYASDKEVALLELADRVTNIEHQKKKLQRKLDRSRRATNPDNYKPDGTIKRGVKLTRNKSKRYLKLQSKLAYIQHRQAEIRKLQHTCLANHMLTLGDRFFVEKMNWPGLAHRAKETSISEKTGRYKRKKRFGKSLANKAPAMFISILKRKCETLGLPGVVEVDTYSLKASQYNHLSDTYEKKSLSERWNYMPISDGSDSSKTKRIQRDLYSAFLLQHTIPQPCSFDKKALRIDYPNFVTMHDAEIHRLESLPKTITSMGVRRSHS

SEQ ID NO: 1891 - protein, 515 aa, unidentified
  REGION 1..515: note = Table 20
MYFVKKANQPSFILELKLSALVWQQQILKTRFELARRLYNTTLSYALKQVQCMKESKRYRKQLYVYREIKAKMKRTTNKNLIPFYQKELDTYTQNLNEIRQSFELSEFGLHAYMKKHQHNYKKHIDSNTAQKIASKVWQSIEDVLFKGSKAHFKKYGTMTSVEGKTNKSGIRFRDNNIHWNGLEIPVRIRKNDLFAEEVLSCHKIKYSRIVKKAIRGKDAYYVQLIMEGIPPSKRVNSTGAFRHPKMPHGRVGIDMGTSTVAVASDKEVWIQPLAPKVPQLDKEKRRLLRKLDRSRRSNHSDNFNADGTVKKGIKLTWERSNHYMKTLYQLKEVYRKQSAYVKAEHGKIANRILSCGDEVYVEKMNFRALTKRAKETKINVKGKYQRKKRFGKSIGSYAPALLITIIDRKLKYQHTEVHRVNTNTFKASQYNHITDSYKKKKLHQRWTTIGNHLVQRDLYSAFLLMNSETNLQQTNRESCNQTFHPFLALHNQQIEALKKMKEQLPSSIGIKKVS

SEQ ID NO: 1892 - protein, 454 aa, unidentified
  REGION 1..454: note = Table 20
VAMKKYAYFKSIDDEKKIKQVKEELSRINREFGLSKDQFEVYAKQLKNKRCYDVEVDANTIQKEAEKAWKSISSLIFEGSKKVKFEKYAQHMSVEGKKNTQGIRFIKAGEKYKRKMLDKHLLVWNGLEIPVKIRSNDYYAQMALDDKICFCRIVRKVIRNKDMYFLQLVLEGVPPVKLKKDGTFRHKQGKGAVGVDIGVSTVAVVSDTKATLIPLNNQNIKEIDKEISRLQRKLERSRRCMNPKNYNEDGTVKKGVRLKWIYSFNYIKTLYRLRSLYTLKQSKRKQYHGKLTNKFLTEGDIVYVENMNFNALKARSKNTTINEKTGRYNRKSRFGKSIQNFAPYAFLEAYKRKLGYIDKELNKINTKTFKASQLNHTTGLYTKKKLNQRWNCIYNIKIQRDLYSAFLLQNSNDDLNTSNIDKCKNKFLNFTVLHSNEIDRIKNLKTKNLSSFGF

SEQ ID NO: 1893 - protein, 476 aa, unidentified
  REGION 1..476: note = Table 20
MAKKGPRYVVELFLKTEIFQVHILEKRFEIGRHIYNACKRKMLDNIQQMRKDETYQFWLKQEKSKTRTKKLIEIREAYDISKTGAERIVNHMGKHFLSKKPKNEKHKQKVHLDSHVVQKIALNVWESIEDYLFNPKTKKVRFKKFGEFNTLESKTNKSGIRYKNGFVEWNGLKIKAEMPKPGKDSYLEAALHDEIAYCRIVRKIIRGRTKFYLQLVMKGIPPQKRKPVEGKVGLDNGISTVATVSDKSVNVQEFCKGLDELDRERRILLRRMDRSRRATNPNKFNDNGTFKKGNKDKWIRSKRYWKTLYELKEICRKIAAVRKMMHNKLANEILSEGNEVYAEWMNYKGLHKTRLGKRMGIKAPAAFLEILDRKLKYQGRQLIYVNTWTVKASQYCPIGDVYAKKPLSLRFHALPCGRKIQRDIFSAWLIKNVNETLDKVDRQKCLNEFHTFYEMYQSFEEKMRSLGEKHISSIGF

SEQ ID NO: 1894 - protein, 498 aa, unidentified
  REGION 1..498: note = Table 20
MATYSLELKLNTKKASDCWYLENYFREVAKISNTVRRFAMRRIERLKRDKNYRDLLAQYIKLIKQDKEKEKETVGKELSVVVWSYGLTKFYLQKSALDLRKNLRYVHSTVYQKICDQVWKGVEKVLYADGKRMHFKKWDDFLSFEGKSNTTGIIYQDGKVYINCTPKRPNGGIILSVKLPNNKNNDHWNYETRCLCDPTKYCRIVRKKFSSGWCYYVQLIQEGIPPQKHVRGTGRIGIDIGTSTVATVSETACHLDVLGDSMETKEKEIRRLQRKMDRSRRATNPQNYKEDGRVKKEKKRWAYSHHYQKMRDQLKTMRRKRTASLKQWQEIYANRLLEEGDEVYVEDMSFKALKKRKKKTEKKENGRYKSKKRFGKSIGNHAPAQFLTIVKQKLDQTGGKYHEVNTRKFKASQYDHVTDTYTRKKLTKRHHWADRDWVQRDLYSAFLLMNSNKSLEHADRDLCLLHYPSFKILHDQCIEEIIASDKHIPASFGFHRAA

SEQ ID NO: 1895 - protein, 440 aa, unidentified
  REGION 1..440: note = Table 20
MTFVVQLRLHTSAHDEAVLNTRFNLAKHIQNVLVKEARKCLHDLEQDHEYWHTLSLYRRETDKLKKKEIGAQLKLLRESHGVSKSHLEQYVKVQQHMFKQNIDSQACQKIAARVFQGVEKYLYGNGKKLNYVKEVTTICGKQNCTGIRYVKETLVWNGLKIKVNIPADNEYIIEALAYGNPKYCAVKRRMFNNGWHWYLLLTIDGIPPKKNRIISQGKVGIDIGVSTVAVCSDTALILEKLAPDVSRYNRKIASIQRYMDRSKHHSNPQYYDQAGRIKKGKKHWIYSNGYRKANRQLKSTYASKALYIQNCHEQLANRILELGDEVVVEHMNFKGLQKKAKKTERKSTPIMIKGKPVYPYKRKKRYGKSLNDRAPASLISIIDRKLHYEEKEIHKVNPMKYRASQYHHDTNEYVKHKLHERWKTIEGHQVQRDLYSGFLL

SEQ ID NO: 1896 - protein, 366 aa, unidentified
  REGION 1..366: note = Table 20
MTLVEKVLFSDGKHLHFKKEEDFDCIGGKSNTNGAKFDKESLSVVWNGLYLACRKPRNGKEAWYVHQSLKDDISYCEIQRKMFNNGWHYYAIIVLKGEAPKKHRQEQKACSAGRTGIDIGVSTIAVVSEQEVILQELAPRMNEFNRKIERILRKMDRSRRASNPGKYNGDGTINRKDRTKWVFSNHYRKLKRELRTAYRQKSAYIKQSHRELCAILIQNSNEFYVEKMNFRGLQKRAKKGTRKKRFGRSLNNRCPALFVSLLKEKAAQYGLSVMEVDTVSFRASQYDHITDTYAKSRLKERWKKIGSCMVQRDLYSAFLLKNSDRQGKHADRMLCDRSFKEFTAMHDKTIRKMKKDGISRKCCFGF

SEQ ID NO: 1897 - protein, 542 aa, unidentified
  REGION 1..542: note = Table 20
MNDICKSFSTVSIREPCYNIYVEYVVKKGDFDMYTVRFQLELSGSEKRFLSKSFFYANQMHNQLVRYATNRLNALFHDKEYVGARKAYGESEFSKKKGSELSASEKKKKKELSNIMCIKQKEYNLTKTSLCKFVSKEQKKYKNYINSHQAQAEAEAVYKGVEKVLFEDGQHLHYRRYNSFDCIKQKCAVTGVRLLRWDTICFMKHYFKVRIPKNEYIQNILSSVDLKEDVVYSFLKRIEFNSGFKYYVVITLRGDAPKRIKLSKDGGHRTGVDFGTSTIATVSNNEVHLEELALESAKYEKEIRHKQNLVDASMRKHNPENYNKNGTVKKGKHKWKTTRRCRRLKRQIRVLYRKQSAYIKTSHHTFINRVVQNTSEFILEPMNFKALQKKSKKTKRQDKAVSIKQKDGSSKMVRKYKRKKRYGHSIKNRSPGLMQADLKSKATQYGIPYYEIDIHQYRASQLHHDTGEYIKPTLSERFKTIEGHRVQRDLYSAFLICHTDDTLTAPNFKACHFDFPHFAKMQDTLISNKKKCGQTMKHCFGF

SEQ ID NO: 1898 - protein, 481 aa, unidentified
  REGION 1..481: note = Table 20
MGKLHNVVVKECKKRLRMLSRDPGYRALKKAYAKTDGASRREAGAAMNALVKSYGLTENSLHAFIRPWQARNRHLVSSHQAQEEASRVYAGVEKVLYGKGKDVHFKKAQDILTIASKSWNGLQYYDPLHTGYYKKSVRPVYPEEIFYLNTHFRVVINWNDPYVMESLDHPVRYAQIERKMFPSGWRYYVVLYLEGDAPVRHTSTDAVAGLDPGVSTVAAVFEEACILEELAPDCKGYNRKITRLSRQIERSVRMYNPDNYDEDGRVKKGRHRWKITGTCRRRKRLLKTVFRQKAAYTKQSHEELADRLVERANVFITEEMDFRALQKRSKRPPERQDSTSVIVKKDGTRQSVRKFKKKKRFGSSIRDRAPAMFLAILKRKCLLQGGDVITADTKAVKASQYDHVTDSYKKVPLSCRMKTVGGHRVQRDLYSGFLLKHVSKDNRTIDRAGCNSGFEAFLQSQKQCINDIRTSGAGYPACFGF

SEQ ID NO: 1899 - protein, 521 aa, unidentified
  REGION 1..521: note = Table 20
MAVHTLRLKLKVNSEISYNLEKHFNCVNRCHNVLVRRSIQLLHKLDNSKKYQLMKKAYFFFDSQNKLCASKDYFLPKVINEMNEYRNEIGLTEYALQDYIKKFQHDNAHLISSQQAQVEATRVFKGVEEILFGDGKKLHYKKKSEQHTIGCKSNRNGVIYDKDTRSITLTSRKKKFQMTIPCKIPKRKKDLEYFNESINHKIKYCYLERKMFNNGWHYYVIIYLDGNAPKKLKNVNTHATVGIDPGVSTVATVSEYDVMLTELAPKVIGYDKKIEKVLKHMDRSRRMMNPNKYNADGTFKRGNKDRWRNSNSYNKSWRKLRCLYRKKSEYIKQSHEIMANKIIMNGTNIIAEEMNFSALAKRGKKTERKEEAQEIVQKDGTVKMVHKYKKKRRFGSSINKRAPSLFLTILENKSKQYGGTFRTVNTKAYKASQYDHIKDEYIKVSLSKREKYVGEVTIQRDLYSAYLIANADYSAVDDKGRSIKPDRDKCIERFDEFVEMHDKCISMMKEQGITMKQCFGF

SEQ ID NO: 1900 - protein, 504 aa, unidentified
  REGION 1..504: note = Table 20
MHTVQLLLKPTTYERAEIERRFHAVSHIHNVCVKRMRKQIVLLLKDEEYRNWRTEYGSLSKIEKPSKAEKERKKALASDMNTRRTELGLNRSELEKYIKVCGARYKKLLSSQQVQAEAANVWKGVEDFLFSNGKQLHFKKFRDFRTIGGKSNINGICYDTETRQIQWLGLQMQCYLPKKASDREYVLQSLDHKISYCMIKRQMFSNGWRYHIILVLKDDAPQKLEHGFGDMGIDPGVSTMACTADTGCVLEELAPETDRYDRQIQEILRKMDRSRRKSNPDKYNPDGTVKKNDHSRWKNSKNYIRLLRRLQILYRKRSQYILTSHRTLCNRLIQMADRIRVERMTYKALQKRSKKTEHQDKISEVKKKDGSVVMIRKFKKKKRFGRSINRRAPSLFLTELERKITTAGGTYEEVKTETFKASQYDHSTDECTKIPLKQRTKVIDGHEVQRDLYSGFLIKNADDSLEHPDREKCKEEFLKFIEMHDELIKDMKRSGVSMKQCFGF

SEQ ID NO: 1901 - protein, 522 aa, unidentified
  REGION 1..522: note = Table 20
MHTVQILLNTKACSQAMEKRFRAMTHIHNVCVKHGNKLLSRLEHDKAYQDAMEKRLETSKKLDGLQQKVPSTRKEERELEKQVTAMEKEIKSINQVLNTIRTDMELSKSGFESWLKKCGSRFSHLVSSQQVQAEAGRVWAGVEKVLFGNGTKLHYKKECELSTITGKSNTNGAKFHPETMTVEWTGLTLSCKLPNRISEQHYIAEALQGTIAYCTISRKMFPSGWRYYALVCVRSDAPVNGRTSGKGPMGIDPGTSTMAAVSNEAVFLEELAPRVPEYNRQIRDLQYRMDISKRMTNPRKYHEDGTINQKNHDRWIFSKGYKRMRQKLRAIYRKKTAYIKQDHEERANRFLAHADTIYVEHMDYRALQKRAKDTARKEDASPVKQKDGTVRLIRKFKKKKRFGRSLNNRAPASFLTILKRKAGLLGVAVLEIQTRTYKASQYNHVTGECVKALLSEREKEIGGHTVQRDLYSAFLIQNPSDDLAIPNQQACKERFQNFLQLQERLIQTMKSTGQSMPQCFGF

SEQ ID NO: 1902 - protein, 494 aa, unidentified
  REGION 1..494: note = Table 20
MAKWNTKSYVVEFNLATTENDDAILETRFRIVHHITNVLVKHAIHCIKNLERDKTYKMIMNNYSKTKKFSKEEKDVLSSLRLKYGLSEYQFHDYAKTQSKMYNLGSAIVQKIATRTWSSVYSYLFKNGEMIHFKKYRDIKSYENKCNGANITFKNNTIYNNGLKMPIKYKKNDVLINNALKDIENNYTKVKYCRIIRRWHKNKYVYKCQLILEGIPPKKKNIPTLIDKTVGIDIGTSTIAVVSDNNCIFKELAENITLIDREKRRLQRHRDRQNRANNPNNFNIDGTVKKGCKYWYRSNAMIKTDNKIKTLCLKRSNQLKQSHILLANEILKLGSNIIVEDMQWSALAKKSKKTEISNKTGKYKKKKRFGKTIANHAPSMLISIINTKLSYIDKQVNKVDCFKTCATKFNHVTGEFMDTDLNTRFVNINGNEIQRDLHSAFNLKYIIISKDKYDYDINAMNENFDSFISKHNELLDSLKNQKQLGHKFPSCMGI

SEQ ID NO: 1903 - protein, 488 aa, unidentified
  REGION 1..488: note = Table 20
MDKRRFALTLRLMTTEDDEAILAKRFRIASHIYNVMVKEARKRLHKLRKDKDYQEIMKHLSVSKGKYRKGDKTKLRELNRLYGLSEYNFHFYIDRGQKQYSQNIDSQARQKIATNVWRATEKVLYSSGQIIRFHKERNLNSISGKSNATGIRYRSEHLLWNGLDIPIRIRRNDSYARECLEHDICYCRVIRKWHKHKYRYYIQIVFKGIPPQKHVIKDDNIQTGIDIGPSTIAVVSNKGIIFTELASDIDSIDADIQRLNRKLDRQRRNNNPDNYNKDGTIKRQTKSFKRNWKWSSQMKKINDRIRHLYAKRANKLKQSHFKLANEILELGTDIYIEDMNMQGLAKRSKKIEISENTGRYKRKKRFGKSVGNHAPAMLINILNNKLSYMDKQLCKVNTYETRLSQLNHLTGEYEKHDLSYRWKVIGKYNVQRDLYSAFLLSHMKTQKEVDIDACYDDFDNFMIKHNAKIDELRKQKHDGYIFPSCMGL

SEQ ID NO: 1904 - protein, 515 aa, unidentified
  REGION 1..515: note = Table 20
MIKATSKKNKPNSTLKDNMVLELELVTSGSDIKALDKRFKIAANIYNTLIRVFKKRVNRLHHSKEYKETCDLHKDDPNRKRRFKELREEYELSKGDIEKYATDLTKRFTFQKVGTTKFQTPRVHIHSQIAQNLAYRALQAIEQMMFHRADELTFHNLESLGTLEGKSNTTGIRFIDRKVKWAGLEMKIRVKKNDTYARQMLTNKVKYCRIVRKTIRGKVRFYVQLVLEGTPPLKLDKEGNFKHMIGTGTVGIDIGVSQVAVTSENGMIHEELAPGVFQLEQKKKRLLRAMDRSRKANNPENFNEDGTVKKGKKKWVNSKHYEKLRFRHKDICRKQKVYRIQAHNRMANQILALGDDVKVEEMNFAGLKKRSKKTEKSKKTGRNKRKKRFGKSIGHRAPASLLLIIDRKLGYIDKDLKCINTKKVAASQYNHVSNQRVKKALSVRVHIVDGKLVQRDLYSSFVLMFVNNDLETINQVGMIQFFEEYLKIQDDIMKKNSEIATPKCMGVKEFVKKVS

SEQ ID NO: 1905 - protein, 578 aa, unidentified
  REGION 1..578: note = Table 20
MKRRKEAMQEKIPDLKQFRKESNRHVLVLEAQVSEQDKYKLIHLSNNVLRTAGNDLTGVMKKNYDQLVRTKRYRHLQSLYGKAKKAGRDKEMKAVGAEMKQMQEEYHVTWEFCRQSMIKINKQYHLNSIFALTQAEDVWKGVEACLYREGKTLHFRKYGDYPEIRAKQAVRGIIVRLDGGSLSFRIGDITLFPIINKPGHTKTRRGHDTGVKEVHDLFAEEEIAAVCHYLENPETADRAALELFRKKGELMDTYRPCYASLCFKEIRGRVRVFIHLTIEGLPKPKRRKDGSRRHQLGRGVVGCDIGPQTIACTSKKEVILKNLAERGMSIKKREQKEAAIQRKMARSRRAMNPENYREDGTIRKGKKTWKKSRRYRKLQKQYRNLSRIAAENRHFAINEDANHIRELGNVFVTEPGNAKKMQKRAKKTERQEELSEVKQKDGTVKMIHKYKRKKRHGRSIQNRCPGYFQAQVKAKFERSGGVYIEVPFDYRASQYDHTCGSYIKKLLSQRMYCLSDGTRVQRDWYSSFLLFCIGHSLDKISRYKCKTYFEAMYRMYLALEQYIIENHIRVMNSGIKAA

SEQ ID NO: 1906 - protein, 423 aa, unidentified
  REGION 1..423: note = Table 20
MNEHNFTKFDVEKVFSDSSLSKSVTNEVMLTHGINSDIMQELSHRAWSAWEKKLYGQGKFIRLDNEVNLFKSRSHKGNVTGFEYSLTDMTLSMNATKPKKHTMFTIPFIVNRKSEYEAYALGCEVRNIAITRQQIRGKNKYYVQFTFAGVPYNKGRKMGTGIVGIDPGPSKIAIVSDSEIRITKLAPSVKKDERAVCRLQRKLDRSRRATNPDNYNDDGTIKRGIKLKFEKSNSYKRTQAKLADMQRKLAAKRKIDHNILANEIITMGNEFRVEKNSFKSMQVRSKETKKNDKGKNLSNKRWGDSLSNHAPSELLTILKNKVCQYADGEYVDIPSSVACTAFDFTNGEFTKHELEERTITTSDGFVHDRDALAAFNMRFVHKKRIEGKKKLEKNKEYFDLQAMTEAYKQFCTLEENIKIRKQI

SEQ ID NO: 1907 - protein, 508 aa, unidentified
  REGION 1..508: note = Table 20
MRASTPSFVVSVKVHLPEQIENHLEKSFNITNSAYNEVLGLSLRRLKAMRANPRYQELLEARQSLVESAQRLKKSKGLAWQLKLYDKALSDLRLGYGLSEFSLSKHLTNRRNEPNSPYKHLSASELQVVAKDVYQTLEKVIFYKVKPDRVKFRSKFNLNASFRNKINNMGTRIVPSEKTGVAYTLFIHKASTFVDISTKTFNEYQQMSLLRAEKIKYVQIVRKTIRGKRMYYLQIACEGYPLAKTTKGEHTVGIDPGVSTVAYASSDEVALVDLVPENVTTREKLIKSLDRRIERSRRVNNPGCYNPNGTVKRGVRFKRPTNKAKRLIRRRQKAYRSLTEERRKLQGELINRIVSQASTIRMEDLNVKGFQKRSKDIRINPKTNRPYSKKRFGKAILKAAPSYFREALKTRANTLGITFEIINPQKVKPSQYNHLTESFEKKTLSTRIFDLSDEWTGVQRDLYSAFLIGHIENGQYDQNISKEFPNFYKKMKEFLAKQKPSRLDWYLK

SEQ ID NO: 1908 - protein, 533 aa, unidentified
  REGION 1..533: note = Table 20
MKSRTPSFVIELGLKIGEDQESALETYFSDARQLFNAVLGTAKKRVRAMKSTEAWKLTAAMPKGKDRNNRFKEIQKSALLSEYALHDVVKEHRAKGGFTKRIGINEAQKIATRVWQGIERWLLHQGGEPRFKSAKRGLHSVEGKSNKTGLRWKAKTWTLEVLDLVIKAEAPDAWQKEALLSATDPSGFKRVKYCRLVRRMIRGRMRYFVQLIVEGVPPVKHVYAPKDLKVAVDPGPRTMTFYSPEWQQKILVSAGTVSQEKEIARLLRAMDRSRRDTNRECYNADGTVKAAGKKIVWKESKTYKATKAKLADLYRRQAETRRCLHGEVINQVFGRAGTVIVEKSSYKAFQRAGYGKSLGKSGIAGLITRMTSKAESAGCCVVEVSPRKLRPSQHDPETGTYRKKALWERSHQLGDTDWYMDRDLAAAMNLYFADPATDSYDLKAEQSALARLKQVSGNAGSIVQYKPANRQDEAVLRRNRRIELMKPVPVERLRFKCSCGAGDARADKASKTLAVTGKPAPCQETPRFQARVV

SEQ ID NO: 1909 - protein, 526 aa, unidentified
  REGION 1..526: note = Table 20
MQRKEKSSVHIVEFPLIATPSDIKEIEVRFSFLRQLYNAALAELFKRNIKLNDDAEFQALLTQYRDRKSAKDEKALKPLSKQLSEKTKEYGLTEASIQSFTTANKNACCFSNHLDAHTTQAIATRAFKAFSEWKFKGKGKPRFKSWVRGIHSAEGKAKSCLMIVIGDDNKPTRFKWKGLEIPVKLSKKDNQGYEAAALELIGKGEWKFCRILSRTVRGKIKVYLQVLLSGESYQKQSHLDRIKQNKGKRTGVDMAPSGFAAVSESDAILSPLGAEIQQIKSQIARLQRQNSRRLRLANPANYSAKTKRKGRKSLTVFKVKKGARNWIKTNAYLNTQAEIKELHRQMVARRKQEHDRLANDIISLGNIVMAETLSYKAWQKRFGRSVGAFAPGQFVSTLRRKAENAGGRMVDINTWKAKLSQYDHVLDEYHKKKLSERVHYLGGELPVQRDLYSAFLAMCVCEKEHIVSLTTAQAAWSGVRHSLDAAVIRVNQTAISRSLPTSFGLRELIPYLQSERLAVKATEPLL

SEQ ID NO: 1910 - protein, 536 aa, unidentified
  REGION 1..536: note = Table 20
MPKDTTPTYIHQFPLRTCPWQVRKLMIRMNALRDCYNGIMGEGFKRLNKLRKDPKHQQCIKEYKALMTELKPLERKHNALISIQQDKATSASLKALEKQMRPLLTQKKSLQRRFSELDKKHGFTQYALQPFATAMKNKSYMKHHLDGDTVQVISDRVFQALNAYRYGQKGRPRFKSSQKGLRSISGKANRCLRFTDKGKFSWNGLVLDVIYDTKDKHLVQQHALNSEKKYVRLIHRQHKGKNTFYMQLVLKGEPLKKANYPIGQGKTVGLDLGVSTLAAVSKDKALLTPFVMELDNLQQDIQRLQRKASRKLRLLNPDNYNEQGALIKGRKTWQKSNHYHKLQEEIRSLYETMRHKRTHLHYQLVKNVLAMGNHLHIEKNNYKAWQKGLYGKTIGFRAPSQFETLLTRKALQTGGQVTFIDARKAKLSQYNHVSDTYTKKTLNDRIQVLDDNTIVQRDLYSAALAYSFDFKKNQVDRIRLEKEWKSLDTGFKWALATLYDQYTNSRNKDLFPSCLRHKDVLELERIAHESLFDTSQ

SEQ ID NO: 1911 - protein, 449 aa, unidentified
  REGION 1..449: note = Table 20
MADGTLVLPVRLPTAPSNQPILDHCLGDASRWHKIDLVRRQDPHVTGGWRYEAHLIVLTQQYVSPSAVARRARVAIETIDRVAGIDVNVSNITVVSHENGRAMHLTRVERDETQKQRDRSRARRERRRERNLDRSRRSMNRAQYRLSKRQEKRARRHAEARRAPVNVIPMGPRNARVDGLPLQSYRRDQLSASYHHLRAAQVAEAASTTQARHDRARQTAANVVGTHGYRLIVENCSIAAWSRSWGRAVAAFSPGMLITAIDREAQAVAAIAGTSGGVQRAATRTTAMSQHCPCGERVAKSLADRVHVCPNCQLRGDRDAVSAVLASFVSLERGVPSSARVDYDASADALAEIRRAVDPSYSGWQDTLSESTDLSARDGSFITWSTSTPDCVLVARRIVGTVACPNLNETGYRRTTSERARWRTNLFQASTSGQLLAETASNVIFSPLV

SEQ ID NO: 1912 - protein, 596 aa, unidentified
  REGION 1..596: note = Table 20
MFAATFQLRRALQAQARSRVDALWAASRLRERDLAGARARFELTRAALEAAAYRHVEAAGWLRHHVTNAIAMHLADEVWQTCDRHLFPDRSGKRAGRPRTGTWWDHRRIPGRARSHTKPRTWETFRLVGGLDAHASAYPPRQPDSALSQPRVMPTPPRPLKGWWEYDGPLAIVFTGLPAGDLVLPVRLPQGAGQWARLHHFLADPTLWHKIDLVRVEDHRACGGWRYYAHLMILGSGWTSPAVAANRKGAPRDRVAGVDGNVSNLAVVSMPASPSTDGGLASDHVAVTPEQRAAVEKARLAARRRQRALDRSRRSSNQAQYTLSVRQARRARRRREAGLPERAATTPAGTRVSDAAGHPKRAYRRDMLSTTYRRVRAQHAQDSRAMSQAKQHRARDIARTIVTRHGSHLTVEHTDMRVWARRWGRGIAMFSPGQLVAALHGEARAAGGRMLRAGTRQTALSQRCPCGHRQRKPLSQREHNCPHCGLIGDRDLVSAAMAACVRLTDPDDPRTAYLDETSVAALRQRVAGQQEALTRSTAPTPTTAAGTAATPAVASAGQRPPAPGRATPDETRPTTGGTTRHTHPTPRNARPQRVRS

SEQ ID NO: 1913 - protein, 679 aa, unidentified
  REGION 1..679: note = Table 20
METGLAVGGGTVAPARKFRGKTKAGKNWKREGDVSVIALELDLSGDPAMRGRLEKQWSAAFQLERAIKSDARDRIQAFDEWKSGWWYQRLPKSRRGPACRARQAELGLSQDALEKAAAAHIEKSKHLRDHVTKAQALHHASAVWATTSRHLYPDKNGDYFGAPKVGSWWDFTRMVGRARSHTKPRVWETFRLMGTLQGHLNRFATAPVQGLTVPQVRELAPSLLGQSLFDQPGAMPAPETPTNKQGGWWLYQGPLVVVFTGLPGGDMRLPVRLPSGAGDFDHLAHFLADPTVWHKLDLVRVRDRRAPGGWRHYAHLTVLKSGYQAPSTKLRRQTTPWTRVAGIDANVSNLAVASQPRSLSTNADSYSLAVTIVAPTQAEERQAVDSARQIAHASAHLDRSRRASNPDQYAPSKAQEKRAKRRDAKGLEPRKIDVPKGKRDSNSRGVPNRAYRNDQLTRGYRKTRADKAALQASGAQRKTAVAKRVAADLVAEHGNQWLTEDVSMATWQQTWGKRMAVTTPGRVMAALAHEIEATNGTLTKFGTAKTWLSQRCVCGHREKKPLSQRWHSCPECALEADRDVLSAALATTITVPNPDKPGSGSVDETKLGVLKRRISAQQEGRVRSTITLGIPGGDGSRQYGTAAGRDNSTGQPRNRQPRKGTPRRRRKSRATDGTPRADL

SEQ ID NO: 1914 - protein, 499 aa, unidentified
  REGION 1..499: note = Table 20
MSKSKTASFIHNFPLITSYKNRKELEARFNAAQQLKNVVLQEALKRADRYLQDETVKEAKRLYSKAHRTKDKNEKQQLKEKAIPLFNAARKKYQLEKYSLDSIGGQHRSNAPHLYTHIDSQTTKSICQRVMKSINGYLLGKNGRPHFAYKESIQSIESPTNGQGIIVNLEKGIVNWNACRKHLGHKSSNLILHVKFDNRNNRAADVEAHALAHRVKYCRILKKQHGRFTNYTLQVVFEGTPYERSELKEKQQQRLDCYGVDMNMHHIDLASNNDAISLPYCRSAVAHVEMEKEVKRLQRKMSRTLFLNNLDCYTTREKTKGRQTITTHQRKKGIKFPNISHNYLKLKCRKANLQRKLAAGRTDSHGYTVNQLLKVCGDLKIEKVWYRAWQCSRYGRAIGLNAPATLEAKLVRRAEQFDNNVMFVDPFKTALSQYCHRCGNKTQKKLSNRVHTCCDLNLDRDLYTALLVANTDFIGGEWLVDNDMVEQAIIEHPEKYKRK

SEQ ID NO: 1915 - protein, 480 aa, unidentified
  REGION 1..480: note = Table 20
MNSRFNAAQQLYNACLTDALKRVDLMLLDDDYKTARSLSRKAYTYTKDSEEQKATKQEAAKLYTTLREKYGLQKYSLNPVAAKHRKAAPHIYQHIDSQSAKAIAARVMKSIDKYLLNYGKKNKKGRSLYRPHFKRFGMVNSIESLNHQQGILFDPETSTVNWNACRANVAAKHSALTFHVMYASKEGKSLYEQHALQHRIKFCRILRKTYGRNTAFVLQVCFEGTPYKRPELLDNSKSKTPKGIDVNSHSIAIASAREAKLHPLPIACKGVAMLQAELSAIERKMSRSRMASNPECFEIGSKRKGRKTVEVNRPLKGKRMKNFSNNYKKLSNRKARLSRKLAAGRKTNQGELANLILSDSSYLKIEKVWYKGWQKSRLGKAIGKHGHGALERLIKRRCAELDIGFEYIDPWKTALSQYCHVCQNRTKKVIYERHTCCNQGWDRDKYSALLALFCSFDGASWHIDNEGVEAALKSNPESFK

SEQ ID NO: 1916 - protein, 530 aa, unidentified
  REGION 1..530: note = Table 20
MTSEQAFHILRFMSNRRSSSPVYTVEFGLQVAPAERRVLVSRFEAARHAYNAALSECHKRRRLLVESRSYTAAVAMRRGPARTKCLRKLQRRYGLTEYEMDRWSTKKLSGTWIANHLHAQARRSLATRALTAVLKHHYGVTGRPRYKGPNQLDCIAGEDPDAGIRVRGARLEWRPLSLRLLCRNGGASADQLTSEIRQIRVLRRRIRGKTRFFAQLIVAGIPPNTQLPGTQLIGIDPGLSYMAISTTTSGTIVDISDTRDRRVKIAGLSRAIQRKRKAARVGMSSGLERRPSKRQRKLQTQLADLHRRLVSERRSRHGRIANALLTLGIRLRIERNSFRAFQRRYGRTMGAAAPSSFIRHLVRKAENAGGQVVFLPASLRLSQTCHSCGLVLRKDLGTRLHECACGIGPVQRDIYSAWLAIMTKPDPKGSTWSLDADQARRAWSGAGLRLPAASRVLSVERFVDWTRAEVASGDDPSFASPSPGTERLAGAARAMHDEARNDVGARPRVRESRAGRRQMRRETARPLVTA

SEQ ID NO: 1917 - protein, 289 aa, unidentified
  REGION 1..289: note = Table 20
MLHGLDRPVKYARIVRRMGKDGWRYFVQLVLGGDSFRKLPVPGSEAIGGMDPGPRQIAWYDGEEAGIDSLISPALKEHRRELRKLHRKADRQRRAANPENYLPDGRVKPGPKIWRKTKALLRTEARIREIERKEKSERKRYLHELANRFIARTAFWKVEKPDVKAWQKSRYGRSIKRSGLGTFVRILTRKAERAGGWVFPIEPRKAKLSRTCICGRVEPKPLSQRVHRCPECGAEMHRDLFSAFLAAFVDRDHALHAGEAQKAWPDAGPRLLAAWRAAGRSDSIRAESL

SEQ ID NO: 1918 - protein, 869 aa, unidentified
  REGION 1..869: note = Table 20
MDTAATTAPAAGRRAWAWARTLGGLGMLAGLLCWVGAGPFLDGLRLIDAPALAAALAIGVLTTVCCAWRWSLVAGGLGVRLPLRTAVAHCYRAVFLNATLPGGILGDVHRAVRHGRDSGDVGRGIRAVVWERTAGQVVLAAVAMVVLAAFPSPVRPYLPAVAAALAAIGLGVFLLARALPVAGPSRFARAVGAAVADVRAGLLARRTWCGVLLASALAVAGHLATFVLAARTAGSTAPLSLLVPLTLLALLAMGVPANVAGFGPREGVAAWAFGAAGLSAAEGVSTAMVYGALVLVASLPGAAVLVARRVRVPAVHRRIEMWWALARPLGAGSARVVVRRGGVALHVRPGSRSGLWLRRSVVIDPGLGDRGCAGRCGVSVRLGMMCGVGRGRKRPKGAPTFVATFRIAFSPSQRRRVGARFNAGTALYNAALREALDRVGRMRSDSRWEKARSLPKGDPERGRLFAEARAAAGFDRSALASFGSRLRVGWLREGVAAQEAQALAERAFAAVELWAYGSRGRPRFKSMRRGIRSMSSKDRNGAIRIAATGRQLQWGRGFVAPLVIDPANPVHSHALDAVDAERVLSVRVVRRVIKGRQYYEAQLVCDGQPAQRDQVADGMVGVDLGPSTVAVVSDTRVFLEQLCAGLDANHAEVRRVQRKLDRQHRRGSPGCFDGAGRHRVGHCAWVRSGQAGATAARLAETHRRQAEHLRSLQSNLVNRVLGQGSTVHVERLSKIAWQKRFGRQVGFRAPGMFETLLRREAANAGGAVVLINPYRARLSQACVCGAMVKKPLRQRVHTCVCGVAEQRDVWSAFLARHSSGQAPDLVAASQELRRRHDVGGAPGSGGRNLRVPAARRLVPAAAGRAGGAV

SEQ ID NO: 1919 - protein, 600 aa, unidentified
  REGION 1..600: note = Table 20
MTGLLGAGLPSIFGYEDEVGVQRRHAVPVAAVGRGVSGHLYRCAVATAKTSRIAPTPTAAPVRKPRTRKRAKDASTHVRSWPLRPDASQGREIGIRFFTGVRVYNAVLGEFIDRSRAVKADPAWHEARELPHRSPAERQTRRAAFRAVEQAHGFTLDAAQSFASSLRKSWVREHLPAQETQNLGARAFDAVRQWHVGTKGKPRFKSSRRGLHSLAAKDGHGALRPNIDEAGALVGLQWGAGFVIPIAPPAASGRRSREQRAELGEIEALIAASKVRSTRIVRTVINGRDTYRMQLVCDGRPTRRHRVGDGLVSFDLGPSQIAVAVQHSDGSWSGWVEPLADAIRLDTTRLRREQRHLDRQHRAGSPACFTPDGTHTWVGCGWQRSHAAQQTATRVGELHRRLAAHRATLHGALTSRLLGHGTQIACEHLDYVSWQKNFPRSVRDRAPGLLVEMMRRKAESAGGRPLYEYNPHTTALSQTCLCGTKKKKPLSQRTHRCECGVTEDRDLFSAYLGLHVHSAADGVDRLDLPAARQGWGRRHDVDESPKSSRSASARKRRGRRHPPSRRSVARIKARRKAKTVMRQSRSAQTSTTDQPTAIAA

SEQ ID NO: 1920 - protein, 562 aa, unidentified
  REGION 1..562: note = Table 20
MSKPRTTQATKRKRHPRKRVRNTPTHVINQALRPTLAHLATVDKRLDAGRRAYNACLHESLARCKAMRADPAFNAAKALPKGPPKSEESTAKNKAFNEVARAHGFSADAMRSYGSSLRKAWVRDHVGAQEVQRLATRAFDAVNRWNLGKGGKPRFKNASRGLRSLECSDKFGDIQPILKNGHLVAVRWSKTVIPVEALSEHPTSRHDREVAAERARLESLIAAQGLIQTRIVYTMVRGRPTLRAQFVVDGRPPVRHKTGASTISCDVGPSVISVVAADADGNPIPEAIGHRVLAEGIEDIQAELRRLQRQLERQHRAGSPECFDKKGRHKLTCVWWKNRSKAAQDTIHKIAEVHRRIAATRTTSHGKLVNELLGLGVNVRAEALNYAAWQKMYPRSVRDRAVGEVMALLFHRAENAGGQAYHYATHTTALSQTCVCGHREKKPLSQRWHRCSNCGREAQRDLFSAFLGLYVSPVVGADSASKDLLDLEGARAAYAAFAPYLQEAGGLPRSSATPKHRGRGRCSKRSAARITARHKRSSRGATEVLGSDLVPEHATIATPVAT

SEQ ID NO: 1921 - protein, 472 aa, unidentified
  REGION 1..472: note = Table 20
MMVYKSHNKTPSFIATIRLLVNSVQEKEILVISECARQIYNSCLAEALKRLNQVRRTNLYKETVKLSKTNKKDKKLRTNNFKYLNKKFNFTDLSIEAYATKTRNASKYINKHLGSPICQKIGLRAFYTAQKLSFKKIKKVYFKSKAQFITLEGKSNSAALRYKEGYVFIGNLKLKCLFKKNDKGLKYALKHRIKYCRLICKRIRGKNQFYVQLTLEGIPYQKYEVGKGEAGIDIGPSSIAFVHEQYAFLKEFCDNIVYLDKEKKRLQRMQERRRRRMNPNNYRDDGTCKTGKLTWNYSNRYIKTREEIAELERVYAAKRKQLHEIDANLILSYCNKVLLERLSYKAFQKRYGRSVGRKAPSKFVAILKRKLEAQGGTVQEVSTYKTKLSQTCQCGTVKKKPLSQRWHICECGVISQRDLYSAFLLKCVTESGDLCFDEVNKKWPSIEPILIQAIERLKETKEYNKILSSFGI

SEQ ID NO: 1922 - protein, 545 aa, unidentified
  REGION 1..545: note = Table 20
MPKKCQGQRKQKEQQEKRPATPTFLLELPLVVNAGQASRLRAHLEAARQLYNAILSQGQKRLRCMRADPAWHVARTLPRTQKAERAAAFSALRKTYGFTEAALHEAVKGLRVGWIAEHIEAVLAQTLASRAYRALNRVCLGKAKRVRFKSRGRGFSNIENKRNDTSLRFVLQAPEAGNAGFVLWNGDQLPALIDWKDEVVTHGLRHRIKYVRLIRRPASSPRAAGADAQGDRYVVQLALEGKPHHKPKHTIGTGTVGGDWGPSTLALVPQEGEASLEVFCAELAPEARAIRRLQRQMDRQRRAANPEHYDEKGRIKKQGNKKLQWKQSRRYQATRRRKATRERKLAAHRKSLHGRKVHEVMKLGTTIIIEKISYKAWQKQFGKSVGLRAPGMFVELLRRTVASTGGTLVEVPTRTTALSQWCHGCGRRVKKPLSQRWHQCACGVGPAQRDLYSAFLAAYLDPADPTPSCARYQGYWDGAEARLRAAHERTRQRAKEGQSLPQSLGISRAGARLPKSPGEPPQERAGLTKGDWLEAWNEPLEPPLL

SEQ ID NO: 1923 - protein, 509 aa, unidentified
  REGION 1..509: note = Table 20
MIEIPLKVSDKDAGVLASRFEAGRQLYNACLGEAMRRQKLVKQSKKYQEARTLKKGKARTSAFKEANQAYGYSEYDLHSYCTTIRNSWIGEHIDSNTAQKLATRAFNASCRVAFGQAKKVRFKGKNQLDSLEGKTNKTGIRWVNETLIWGDLQFKPHLTTYDPVMIHGLNSRVKYVRLLRRRIGSKSKTFYYAQLVCEGKPYLKPKNSISQGTVGVDIGPSTIAIVGDESAKLTLFASELKFNQKRIRQLQSQMERSKRANNLSNYNPNFIDKRGRKNKGTIKKGRHRWNNSQSYQRLRNTKANLERKLAAHRKSLHGKLVKEILGLGNNIKLEKLSYKSFQKNYGKSVGKRAPGEFVSHLKRKAESAGALVTEFSTKTTKLSQTCHQCGSVKKKNLSDRIHQCDCGILCQRDLYSAFLAKFVDEKELLQANQAQNAWLGSEPILYAAWRQATQTNLRSEGRVSSSFGKFPESERVATKVLNVDAKNLDVVPIRESQVEASSHFEPPSL

SEQ ID NO: 1924 - protein, 449 aa, unidentified
  REGION 1..449: note = Table 20
MARSTTPSFITQLPLKVDSKLEKQLNAKFQAARQLYNACLREALIRMELVRNSEPYKQAKRLNRDKQQKQRKHLFKEARKQARFSDYELQSFATLVAKSSKWISVQVDSNTQQKLATRAFKAVERILFGMAKLVRFKVTSRFKSVEGKSNKQGLRWLKDNLVWCGLTLPPIIDWNNPVITHGLNSPVKYCRILWRNLNGKKRWFVQLINEGLPYQKPTNYVTQGIVGLDINISNVAFVADAFARLLPFAQKVPTYEREIKALQRKMQRSQRMHNYGNFEPDFYKKVGNRIVRKKGNVKKGKKQWIKTRNYCRIQVKKAELERRKAAYSKSQNRKLVNEILRHGNQIKTENVSIKGWQKRYGKAISLKSPGFFQSELKRKAENAGGYFLTFSTQNTALSQTHLDGTRIKKSLSQRVHRDVTGFVMHRDLFAAFLSRCVYRTHLVSLHFPV

SEQ ID NO: 1925 - protein, 534 aa, unidentified
  REGION 1..534: note = Table 20
MPKAKTPSFIFELPLQVNPQQHKVLDKRFNAARMLYNACLCECLKRAKKLKDSDIYKQAKKMPAKVTVKGKQKVNSERKALFKQAREEVGFNEYNLHGFSKIIRANSHFSDHIDSFTEQKIMTRAYDATNKYVLRSDGKGRPRFKGINQLDSVEGKSNESGIRFIKGKVVWSKLELEPLYDTKDKHEVQAWALRCKTKYVRLLRREIKGEYRYFAQLIQEGRPLIKEKNKIGKGTVGLDLGPSLIAGVGEEDAFIEEFCTGINTIHQTVKKAQRKIERSRRKTNPDKYEPDFVKINSNGNKIKKKGKVKKGANKFVKSGRYLKEKVSLTETNRKLAAYRKTLQGKLVNEVLMMGNDIRLEKISYRAWQRLFGKSVGHHAPGMFVSILKRKAESAGGSVTEVPVLHRLSQTCICGSVEKKSLNKRWHSCKNCNAYAQRDLFSAFLARFADVKRLNIPQAQKAWVAQESVLSRAMFKLKETAKGRTRKLPSCFGLKEMDVQRLSGLHDKAESNHFEALQLFSSRTKAVKREMVSCQ

SEQ ID NO: 1926 - protein, 485 aa, unidentified
  REGION 1..485: note = Table 20
MSRSKTLSFITEIPLRVAPGDERAMRKRLEAARQVYNACLGESLKRLELLRQSKLYQVAGKLPKGPHGSPQAKERATAFREADVALGFREYDLHAYATQFNHCWIGDHLDANTIQTVASRAFGAVKEHALGKRGKPRFKGEDQFDSVEGKTNKQGIRWRDDRVEWLGLTLPAIIDANDPVIAHGLNSPIKYVRLVRRNIKGRNRFYVQLVNEGFPYQKPKNKLGQGDVGLDIGPSTIAVVSEDVAFLTRFCDELERLQGEIRRLQRKVDRQRRANNPENYNPDGTIKAGPKRWRKSNRQKQTEAKLAELCRREAAYRKSLHGALLNIILRMGDHFNLEKLSYRAFQRAYGKSVSVRAPGMFVERLRRKSESAGGVTNEFPTSLRLSQLCHGCGTVDKKSLSERWHHCDCGVAAQRDLYSAFLAVCVEGDRLDIAKAEELWPRVEPLLVQAMSSLEQQLASGREFPASFGFSRRQSQSPANQRECS

SEQ ID NO: 1927 - protein, 412 aa, unidentified
  REGION 1..412: note = Table 20
KLANRAFKAVYSYAIGLRGKPRFKGFNRLSSIEGKNNASGIRWKDGYVHWSGLRLSTYPIGKDKHGLATYALSCKTKYVRLIKRIIKSKDVWYVQLVQAGKPFIKEKNISSDDIVGLDIGPSTIAAVNSEHAQLQAFCGEVKNYDSQIKALQRKINRSMRANNPTNYEETKYIKNSNGKTVRKHGKPKSKQRWHYSNNCKTLKSEVAELHRKMAAARNTSQGNLANQILRMGNIIKTEKLSYKGFQKLYGRSILKRSPATFIGKLCYKAENAGGMVEPFSTYKTALSQTCVCGHKQKKPLKQRWHNCSNCGATAQRDLFSANLARYVEKDSLDMTQAQRAWAGVDILLRKAVSKLKETANGQSKSLSSFGLNQRQSGSPEKEKSIINEALDVVGISRELKKVNDLVLRTPCL

SEQ ID NO: 1928 - protein, 462 aa, unidentified
  REGION 1..462: note = Table 20
MSDSFIYELPLFTNPYDEKVLNIRFNMGCYLYNAILKEGLKRLILMKQSKLWKRAKKLPLKSQERNKEFKALFEKYNFSDYSLQSFAIKTKNRCEIKDHLDTHVCQKIATRVYLALKEYSKNKRGKPRFKRKGWMSSLEGKEKKAGIIFKEDHIYWKKLKLSIIFNYKDPYLAYALNFPIKYLRIVRKNIKGKYRYFIQFVLKGKPMPKKIAKGKVGLDIGPSTIASFSPSKAILTSFCEELKPLSISKKNILRKMDRSRRITNKDNYDEKKRVKSNVHVWVMSNRYKKQRFKLAEAHRKLKEYRKRLHGRLSNELLKLGNIFKTEKISYKRWQKIFGKSINFRAPSMFIKQLKRKAENAGGRMEEFSTQKTCLSQVCHNCSTKHKKPLWQRWHECSCKIPRVQRDLYSAYLSYHVEDNHLNIREAKRAFPGAHLLLEQAILRIDQTAIGRSRLASFGLSQS

SEQ ID NO: 1929 - protein, 487 aa, unidentified
  REGION 1..487: note = Table 20
MSKKAGPSFVLELPLVVNPHESRVLAARFEAGRQLYNAVLGESLRRLDLMRQSRAWAAARKMPKGAPKSPEQKARAAEFSLIAQTMGFTDYDIQSYATRCKNACWIGDHLDAHTTQKIGTRAFKAAQRYQFRTGGRPRFKPKWKTLESMEGKSNATGLRWREDHIEWNGLSLKAIYDRKDKHGVQTFALQNPVKYCRLMRRTLRGKTRWFVQLVIAGTPKWKDKNPVRAGKSSIDIGPSTIAAVSETGAFLEKFCANVPDLQKAIRRIQRAMDRSRRASNPDNYDKDGTVKKPAPGKRLQWIFTNGYLRLRARLREWHRVLAAYRRTEHGELANRVVAMGNTVMAEKLSYKAFQRMFGKSVRDRAPGGFMGHLRRKAESAGGEVIEFPTRTTKLSQSCQCGAVVKKPLSKRRHECSCGVQAQRDLYSAYLGLHVRQYTKDENQVWRLDTETAREDWCAAEPLLGKAMSDVVQAAKGGPLPASFGIRT

SEQ ID NO: 1930 - protein, 529 aa, unidentified
  REGION 1..529: note = Table 20
MRKKADKLHQPSTPSFVATFEVETNSAGFGQLEKMLNAYRQVYNATLGELVRRLKRARKSPEWEAARKLPKGSEERKAAFAEVRKKYGLSVGEAQKVAQRLVEGHFVRLTNSRIVQQVAKRAWRAIEKVMVGKAKRVRFKRRDDFQSFETNANDTGIRVVMGTGTVCVGKLTFEFKADETNPYHVHALKHRVKYARIVKRVINGRSRWFVQMILEGKPYRDPEKHTTQNGERVGLDFGPSLIAVSTTTDSFQIPLSQELDRRQAEIRRLQRRLDRSQRATNPHNYQPNGTVKKGRKQWKQSSRYRRTKQQLKDLERRKTAQRKSLHGRLANRIVRLGNQIHTEKVSYRGWQKQFGRSIQHHAPSAFEGILTRTAETLGGGTRLINTAQTALSQTCLCGNRKKKTLSERTHWCDTCGFTAPRDQFSAYLALYTFWTDGKWVVNLNEARSGIHRHRTLASGLKPNSRPGAVGPELVDVSQTRQRELGFQTGPPPTGRASRARPGKGNLEPSASSRNGSGCPEQEESPSSTA

SEQ ID NO: 1931 - protein, 533 aa, unidentified
  REGION 1..533: note = Table 20
MKKAKSPSFVHSFEILPAKDEGFKNLFKTEDHGRRLYNAVLGKLRSRLKRVKSSKAWADARLIPKGSKARGLAFRTILEAEELTEYGAYDLATLLAKGSPDFKLWLGSHVIQKIGKRAYQAIERLMHGKAKRIRFKRRNDSFSFEGQNNATFLRFLFDDEGRPYVRLGKIDYSVRYNADNHYDSHALGSRVKYVRIIQKRIKKKFRIFAQLVLEGLPYQDLAKKVKHEEKLKLHFGEALQTKLDNTWDDVVSIDYGPSKIAIATARVAYEVNLRAPFEKLSQKAKASQRAMSRSLRLGNPEAFKDGGKLKKGVKLKRSKNYEKLRLIHAEEERKVSETRKSFQGNLSNEILCLGTTIKIENISYRAMQRNFGKSIGKAAPASLKGILSRKASALGGSEELINTYDTKLSQTCICGAMKKKSLSERWHSCPCGFSMQRDELSARLGVFTINSQVVAGRKKKISSRIDMKAARLHIVSEGTFAKVEQALANGQGLSDGLSPEGGAAKPLETSIKNPIRKDLEPIGIHARWEAVFS

SEQ ID NO: 1932 - protein, 486 aa, unidentified
  REGION 1..486: note = Table 20
MKNSREYRDTLLFNKSDPKRKADFAQLRIEYGLTEFAAVSLASKLRTGSVDFDLFVPSKVAQEIGKRAFRAVERKMFGKAKRCRFKSKGQDFSLRGSSNKESPQIKVVGETVLLVFRKKEYLLKMDWRNPWHRHALGCRIKNSQVFKRSIGGRVRWFVQICLEGEAYRDTEKERKHKVRLAARFGEDFRGQNVSVDFGPKKIAISNGIVSYERLIVSDWLKGLIAESKVIQRRMSRSLRLNNKKAFQDGVLKKGTRLSRTEKYRKLSRKKQDIERRIAAFRKCIQGHLSHEIMQLGSVVKLEDISYKALQKRYGKSVGESAPASLKASLFRTAEKLGGRGELINTFQTRLSQTCLCGEVRKKELRERTHACRVCGLVLPRDILSAFLGCFTHNQVQKKGRKEIINSSLDLAAARSAAVGHKTLSFPGSLAAGTPSENLKGDCKRGNREVASSLERSGKRQSRFQQEPRSPQDQGSAERPNAENLHS

SEQ ID NO: 1933 - protein, 218 aa, unidentified
  REGION 1..218: note = Table 20
MNSENAEGDETIKEIEEVEETEETPEEEEEVEEEEQFVLPGEIVGITEEFKAGDGTYTVRGDILASRMGTVQINKKRREVSVKPASTIPPVVKKGDTVAGMIINLRDSMALMKIAAIKGHGEREINDPGVAAIHISNIRESYVKNIADEFGLGDIIKAKVIDVENMRLSTAEKELGVMSAMCPKCGTVMQKDDKRLKCPNCGNVEKRNLASGYGTGEI

SEQ ID NO: 1934 - protein, 191 aa, unidentified
  REGION 1..191: note = Table 20
MMKEENLAFPGDELAILEEFIPVSGVYSDENGKLRSTLIGKVVKDIINKNLKVIPFKKKYDFPRLKSVVIGYVNSVKSDIALITILYDGNLKPISAPLAGFLHVSQVDEEGKNISDYVLPGDLVKAKIISSENPFQLSFKHSSLGVILASCSKCGAIMQKLENGKLKCPKCGNIENRKLSSDYINLKDHSG

SEQ ID NO: 1935 - protein, 625 aa, unidentified
  REGION 1..625: note = Table 20
MESKAATLKFPFKRITQNLSVDHRQNLSDYCENLWRLIPEGGALLKIYLYAFLENPDIDAVCPDLCVITIKNIFLSCGVQTDKVRNGDITPSSHWIESELHRTFGPSNGIFNPVDTNSWQSYLRLIYFLQQYFNANGLPMFNLCPEFKLVPFHVTLSKTMALRTKTFGTKGKQSRANFESIFDMSILGEKITFDEFYTDLYSTSIPYHRQSSDYKSKLRSSQPVPAQTITPVQSTSKHRFAEADIAPGIEISPAQVEAAPQDFLTFEPVSSKRKARSDQPTSVEKRPRTSLSQKYQQGEDCPGDEDDLEDERILEYNDEHEDAYDEAAELDDAHDALYEEPDDDEDAIGQFGDQTRGRDYSWLNNPTFPQINIADQDTVYVGVDVGVVFMGVSSLVRATAKANALEVLESTERNDIQSVMLKSTDFRARIRAELSQTDRELAEDVYAEPRYCFDLEMAKRKSSNAAIVTNERMPLYLDQSVQKAKYSKFLARRSILREYAARLVGLESFDHTKKENIIVFWGTGGMKRFHNRYLPGRKCHPASKELLHYVQMIATVYVTHEKGTSVHCSNCEQRVVRRRTADQDIVTCAHCHLVINGDVNAAVNILKIGLIMATNRGRFPMQFTL

SEQ ID NO: 1936 - protein, 483 aa, unidentified
  REGION 1..483: note = Table 20
MFNKLPEYKLAHFHIPLSKTVGKMSQIFGGNRMDNMHKLRSKFYFGDIIMGDHIMKEFKADLYSVSIPAPSEVLDPAQDERFTIEWHPAVTTEVQRDKTPFVPFSLVASSSKAVLPPVATSSRSLSTDQKSSLTLQQTAASKSGTKRKSLKQLYARSKSSIQQSSCPGGHCPDDTLLKEYSDEDDEDVDIYDHQEEDLQLEVEEEADEPEVDQPRQNYQWLNDNNFTQLDIQDKSLKFIGVDPGVINMATSVGIRATDEHNALQNLVASSPQDLESVMLVTDDYYHELHGRSRPYDRERAKDRWAQPRYCFTLEDCLLKSKDAAAKTNQRMPSHLDLSTQKSKFTILKVEGRLMMDKAVQLLGLANFSHQQKDKTIIFWGTGGTSRYGRRYLRGHHFHPPIQKLLACLRQLGRIIVTHEKGTSKHCYHDLQPVKRRRSGKLDEVTCHHCNQTINGDVLGGANILRVGLTMSTNGGNFPMEQTR

SEQ ID NO: 1937 - protein, 398 aa, unidentified
  REGION 1..398: note = Table 20
MARRHQQSVRVRVNRTQDRQLLALSYLVRLGYNFAHDNRVKLWDAEQRFQSNRDLEARLAEVPTLAARAKNETLAELIKSDEGLLVCREEVSVGVERCRDAYNRYSKSHSTKARTPKRKPKVEHPSIQFKASDCVLGVGFIEVPIVGVLRSRIKDFDFGGLSGEFTAKAVVIQRIEEGRWDVSVSYEISKAQITKKGSGVIGIDINTSNTCAVYYLADDGTGEGMVFDLPDTSAADRDIRYYRRLLDEGNITYGSRRHRELLRLLERAKGRRANIIKEHHLVIVRFVVSLGAKHIFFEDMDLRDGFKDYHGWKKVAVNNLRRALTDRGRAADNGATVKTVNPAYTTMTCSSCGHIKEMAKQDRVYECPKCGLVMDRDLNSAKNIAVRGKTSMVGTTRR

SEQ ID NO: 1938 - protein, 260 aa, unidentified
  REGION 1..260: note = Table 20
MAGEGEEKQLRNHRPSLKTPPSFCNYPNWKSKLRENCFRRVREDRSRLLWKLRLPDVKSQSSNDKDLINSSLQGIVSDELRKIKGSSLDESSVPTCCSATDDMIWEYDGLQTAYAGDCEEILLEMQRIFYEDLGRGEIRKEPENLITTWEDEEDEYLAREVYDHMQLKSDQVTQEVWCPICKQGNLQENSHHIYCSCCKFELKRDHEVDLNLLKLRLGEAHIEHLVKGCRLKPEFCVETKFQLTAIYIKCVGCDTFDIVL

SEQ ID NO: 1939 - protein, 400 aa, unidentified
  REGION 1..400: note = Table 20
MKKEVFAAFRFRVKVRKEEARKTYEVMKRYRENIKKIKVLVKLLTKQGHSEEEALRIAVQRYKMKNLIIRNREKLVEAYIKSKCYRADSLILFNRYGYKYTCYIGLKENKVFLRIGGEINTWLPIKRSIFKAVKKREEWGWKPVFVILKFLCFTRKNGLFEVTLIFKVSSKKISLSGVKSALNENKLSVISVDLNAVHGTYFGVFRVKDNELKEVKVMKVNVDWCLLERHVERRAELQGKLREKGLSSREFRELRQLERRISNLVQYPKRRGLSILRELIRGEQSLGRVVVVVLENISEKDVQKMCNHGSEINRTIKWFMSGWQKRVKFLARIEGVFFMIVNKEYSSKKCPVCGKVMKYIDNRWLYCSQCGKSYHRDLVALRNLAIRALEKIKKHNTSLP

SEQ ID NO: 1940 - protein, 351 aa, unidentified
  REGION 1..351: note = Table 20
MIARRSLVVELPSVDCDIVRLQALTNLAYRYGELKICPEDLPRTACTMLYRRNFDLEFGTRPKKWFARQWLPMTVLRIQNGARRGDSGAPLLLDLDGGVMRLRYVCHGEAPIPRWVYDRLEEGGDITFAMLGLKDGVPAVMLVAERSVEPYEPESLLPVDVNSWKHGIVWALIKGGRIASEGRERPNLRFIDNLHRKSVGLEELHGRLVRLGVNDDNLDAEAQRAKSKLYRYLRDYPQWLAGKIVRKALKHRSKVVIDNVLKESWRDLLEEGLPRKEAKIHMAGVRRFIKILETQLRWHGVPYEFKRLPSRVCPDCEVEMEKLPGRRMKCPSCGLEEDRDKIPILWALKLA

SEQ ID NO: 1941 - protein, 357 aa, unidentified
  REGION 1..357: note = Table 20
MLAHRTLLIKRPLRTFTNEEREALVKVLTRADALGNLWARGFEVWPIGLDSRFADKFNYFKSELRLVNVKRWLARVHAIFNVGVRLDNERDMGQGVFIDLTRNALRLRWVIKRRAIVISLTESEAKYIRDRLSEGGKPKLARAWVDDEHLFIAITFERDAEQITPSNYRLVIDVNSWKNGIVYAIVKDSTRNLERLYNHVTKLERKYGALRRLGLHKTPYGRRLWREIKATKRRLYAYLRDYAQKAVSILVKQALNLRAKVIIDDIIEESRRELMEEKPLNGLAKVYMLYLRRFVKLLTNQLRWYGIPYEFKRLPSTTCPICGSELTQLPGRIMICSKCGFKADRDLVPILWAIKQP

SEQ ID NO: 1942 - protein, 275 aa, unidentified
  REGION 1..275: note = Table 20
HAPVVLDFRSNVIRLRQVCKNEPRYVVIIPMPKWVVGRISEGGDIKFAMIGLKDNEPYLALVAEREVESHVPSGYRLVVDVNAWSNGVVYGIINPNNRIAEYSPLRPNLRLIDTWYYRAEGLHKKLGRLRRLGLDSTPEARRLAREVKALRRKIYAYLRDFAQKKAHELVMKAIRLRAEVLIDDMTEESRRELLEEKLPSGLRKIYLAETRRFVKLLVTQLQWYGVPYEFRRLYSKKCPRCGHSLTQVKGRVMVCGNCGFKAPRDMVPMYWALKV

SEQ ID NO: 1943 - protein, 296 aa, unidentified
  REGION 1..296: note = Table 20
MPSHCTASHRGGSPYTRPARPPTLGEDAVRWILARVREGARLVLAAVWAGPSRGSRAARLCVALIFRREVAPIEARRLLAADLNALHNGIAWAVVERDRVLRRGALRPHLRRLEKLQREIARLDSLCARRGGPHCDTARGAKSRLWRLLGEWTKEAAKFVVRLALQYRAAIVVDTPESESMQELKQSGSYPADRKALLNFGRLRRLIEGLAAWHGATCIEARLYSTLCPQCGTKMTELQNRQVRCPRCGMEARRDEVPAMWAQRRLDGLIGPANPRRGPAPRLVSGDSGPRSAAGS

SEQ ID NO: 1944 - protein, 477 aa, unidentified
  REGION 1..477: note = Table 20
MTPAGVNTLLATATALVAAEVNNMAGTRLSTSAPWVCLVKLLACPHAPFITNRDFSHSTYKAMYAYRTLRIEIPWKLIEERPDVLDLVTRMYLAVGEYVKRLLKELTGQEEPKLTTEELDRLLTPEKRELACKIIEETFPRYGLGRALVRYSKFLWRDVAFYRAIPLDVQLRAENERDVSTAVFVDLKSGVVRVRKLGIPPFAVELKKSDISWIRRRLEEGARLKLAFLGVEKRNGEKPTYGRLYVALVFAREVTPVEPRGIVVVDVNRLDHGIMVGVVKDGKIVKRKRLPDERAVRKLRKLHEEISRLEERAAKEADPARRGQLEDKVNRLKSKRYRKIRDVVARIAKEIIELARQNNAAVVVDTIEEKTYSARKQSGESGDRKHLYDGLGQLRKRLQALAQWYGLPYMEVRLYSTKCPRCGAKMVEERKRIMRCPSCGFSDTRDNIPLLWAKRRYWEILQKIKQPVFSPIKLLTS

SEQ ID NO: 1945 - protein, 380 aa, unidentified
  REGION 1..380: note = Table 20
MGSPHSNSKLAVEGYRVLKFEAELPEELREFIERVYQPRASMRYWQRLLGLDSEELESMWKQVPWSYRDAFDKVVAPSTPKRRSYLRFPLFSWTLRRQGADLQEGELVVRVYGKAYRIPLPERGLGWLQSQEDVCRESGGRLTRYVAIKGDGEINIILHCFHSLGVEELLENLEVIAVVDINSSHGFYLLAYDLRSGGFRIRRFKVPEVNWRRIKELQRAAAKSRKPGAWATARCALKKAYRRRRAALLKAVAEAAKELRGKRAIVFVDVPFDDSLRNNGLQRTLRSFARRLENLLGFHGVLAIERTLPSKRCPLCGAKLEEVRKRSETRVMRCTCCGREFERDTVPALHALKLFLDEAEVEELAGKLAKRYGLQRPQSS

SEQ ID NO: 1946 - protein, 388 aa, unidentified
  REGION 1..388: note = Table 20
MFWCSRCNIEPDPNVVKLARSLSWNFYASLLDSRSPLYHFKYVPSNVKKSFVRNVIKTTCEVLWDCSQRKRYRAVTIDLVRNIVEVRGFSRIIMLPLSRSVRRWILDVLRSSGFKASFHAQLSLERRLNGDPHALRITVIASRRVDPAKLRIDLPLRMGRWIVLAVDVNSTHGVKCLYALIDLDREYVKLLQDPRFKPPGHVYRRKYASKIKSLLKRLQNTCTITVSRLKLYRFLYRMTLRRISRLNRQWCLDTMHIIVKRLLKYARKHKARPIVLLDVPDYESLHGDSKLQGTLLRFVELLENRLTWYEIPTIRVIACSTRCPICRQKMKLIYKTRNVRAYRCSNCNIILDRDYVACLNAIRQIVSEDKTLKLLKPLIEKRQLKFVP

SEQ ID NO: 1947 - protein, 581 aa, unidentified
  REGION 1..581: note = Table 20
MSRLQRRGPGCFPEKTGAPLRGACTLGEKKVGGRGKAARIMSAGPGHLGCTASSALVFRGEWGRMGAAAHTGPPVKRGDGMGEKSNGKGNGKESIDTYRVWRVKTNGEVRQSLQRLYVRLSGAVKEACKSLKEKHGDAFRKEPERFSKELIEEASRLAGLPKGFFWYAVEMWKTVAEARRKSKRRNRFTPPPVPLLVRVVNNGGRLHGASSAVAVLDTSRGELRVPSADITIRLKPSLVRAVLEDVQRFEDVKLTLQLTAKGRLRLVARRAVKQAWWNGNDRLAVITLDVNSNHGLYLLAFTFDGEARLLVQRVLKPPNTTLLRLLAAVMRSYSKVKIWEQAAKRFRERRDVEELQREGRGPAVEEALRLAERLRAKVNMTPERAERITRQASRKVKKLNDDWIRGVLKEMRELIRKLRDQGYTVVVIADVPQAESLNGSQLQRTLLRIARRLENLVLYEGARWFEPENNVSGRQCPRCGTWGVEVRRRYYRCPKCGLEWTRDWAACYNAAKLFLKACRAEKHLEALQSWLSQHPRAPTHGTRERPAGPGPSSRHGPTAARRVPRAARGGYVPAATRAEGR

SEQ ID NO: 1948 - protein, 381 aa, unidentified
  REGION 1..381: note = Table 20
MEKKFGYRVWKISASKEVRTKLLGFRCSFLNEPKDNLKKYWQAWQKAFEEAREKSKKRTRFKSPPLFLPVRFQLGGVVRGNHNAPVVIDLRSQGELRISRAGIRFPLKPSLTRALREENSLTPRPEFIAQITSQGRLRIIAFRRPRAELRLPIRVIGVDINSRHGITVVSLDIEATGARLVSRLRLKPPNHGWRKRLTSELQRHADTGRGEVPLALPFVLTTERAGRLARKMRHREKGLNAAFVQHVLALLRRLIREAVGRGYSVLVAMDPINPETLRGTGLQGTLLRVVRRVENLALYEGVALALFGRNGNGVSGKLCPLCGGKGVEVAPRRYQCPHCHIEWNRDYNASFRAILLVLQKRAPESAEALRRWLQEHPRALL

SEQ ID NO: 1949 - protein, 541 aa, unidentified
  REGION 1..541: note = Table 20
MHRVENAVREQAVRGLQLRALELETPASRRGVVPVGKPQNNWAGLGVRVFKLKTSKNVRGKLKEFYDMLTSLLPRDELPKSAFRYREEWENSFIETIHNRLATCKWLRPAKKRGRKKGKRKSRKPIPRRPPYLLTVRFILQSGEQRGRRDAPVVVDLRKREVRIPCVGVAVPIPERLARALEEENGLEPRPDFVVQLTSEGRLRIIAKRAPEPRALEVPLRIIAVDENSRYGFVVAVFDFDSNGYCRLTRFEIFKPPNHGYREGIVAALRSYADKPAEALESVRELLPLIPTPDDAERLARKTLARKRRLNDAFIETLVAGVRELVREALRQGAAVAIVVDPIDAQSLQGTPLQGTLLRVRRRLKNLSAYEGIHFAELRASGRYCPFCGAEGAENGHRMFMCPRCGTVWDRDRAAAVNLVLRYLRGLHKEECQDADTIRLADALLAWLKRHTNFLVPSPVPEGAGVRHRGPSPEGAQRAGRAVTDEPAARRARRLPPPTGGSAFERGGDAGARAQPLQDPPQGERGEVGGGPLRVDGLVHR

SEQ ID NO: 1950 - protein, 447 aa, unidentified
  REGION 1..447: note = Table 20
MHRVENAVRGHAVRGLEPRALELEIPRFEREVVPVGKAPSNRAGLGFRVYKPRVSKVNRERLKALYNDVINYILGVVHELKGSKYLAYYADEWVEMYENAKRVREEAGKRTLPKTPPVLVPVRFVMPDGRERGNRNAPAVIDLRKGELRIPSYGIAQKLRRSLVRALIEENSLEPRPDFVLMVTRRGFLRLIASRYVRASVALPLRIIAIDENSLNGEALAAWDVLKPGRIVRSRYEELMPRNRGFLDRMAALFQGAAAGKAGALEEVKELLREAERSEAEIAALLAPKKLAEIAAKTLEREKRLNRAFAEELVSLVRKLVREAKERGWSVAIAIDPINAESLKGSELQRTLLKPRKLLRNLARYEGARFKLYRVSGKQCPNCGEIGVEVGHRRYKCPRCGIEWDRDKCATFWLAKRFLDEHFKEECGDETYVDLDGWLRKHPRGLL

SEQ ID NO: 1951 - protein, 278 aa, unidentified
  REGION 1..278: note = Table 20
MGRELPPLLQRYLCKGRLRLVTIDVNVEDVTIAEVEVLQLIHVVKYYRVRRNTGKLLFVRKVNRRSMRLHGRPASSWLKYAKNLDNDWINKSVGLVKKLVRSADAVVIEELDSKQLKLKLKSKDPEKALLFSSWPIAKIVRRITAMARKAGKLLTVPPHYSSRLCPKCNSMMKHESGRWDRLRCERCGFTDDRDHVAVRNLARTALLLNGLHYLATILGSQLRDYRRALKDALAQDPEFQAPSLGGEGEAPSPSTLRVGPGPEGTWAGVVNELFSNGG

SEQ ID NO: 1952 - protein, 458 aa, unidentified
  REGION 1..458: note = Table 20
MIPAQLLRKKVSSTRTYKYRIYDDLTESFKQVQTVRRLYFNYALKYLYQHYGSKHLAHYLPSGKKRQYLIRNLVEFARKKVRVHGIDLKKMDYSVQSVDKMISELLVAFEKYRRQQYGIQYWSEKNKLNFLTTHNCSLSGYGRISYKHNNEDFKSVTFKQNHNRIDRINNYLMKVPYFGIVHTKRSMTHLKHKKIVEARIIKRSNGDFVLQVVTKFEKQKELSPKDRQKLVGLDINLAHNYFFQLSKKMKSSEKTWSKSVYEKYLVLDDKARRLQHYLTSKGHRFDGSQTTRRIKGQLARIRARNANLLDAWQLQKAKEFSHKYPILAMEQLDSFTMRMSRRSKDYWLRKNTNHKLATFQPTSFRKMMEYIYQDEGHLLLEVDSYDTSKACNKCGKINEKLKVGEKEWTCPNCGQALDRDYNASLNIRDWAQDITKHPKHGKTINGRKVKDSDLLLVF

SEQ ID NO: 1953 - protein, 455 aa, unidentified
  REGION 1..455: note = Table 20
MLKLPSTTEYVRVRRYRLVATPELAKKHQANLAVENQLHNYALKCLEKAYGYKHLSRKFPGTRTGKTYVIKDEILPSFLKENYGLKRWNSHKVGLHSQAAYQFLLTLLTNFGEYRKVLRKAAKMTDQEKEDYRNNKHHNNPHHRSWYRKGSLNYLRNGASHQTVSLPDNGQIAVLSAHHIKIQDYGSLQVVENIINLKHQKIVTSKIKHKRDNSYELQLVLKDRLPRRKPTDVCGVDWNMKDRKIFHTSDNKKLYLDKFVSVKADKYERIIDGLKSRRDKAIWLGQHSRRIQRLNNLIRFYNIHRANILTNHYWHLTKQLFSDYDLLVVEKLGAKEMRQKSQNLDTKGNHTKNRRLAKIKPYELQQCLKQVADKSGKTLVLVDSYKTSQVEYGTDYQEKHSLDGPREWTSKYTGKKIDRDLNASRNILEWGFNPEKHIKLKDYPALKPSSLVTIN

SEQ ID NO: 1954 - protein, 453 aa, unidentified
  REGION 1..453: note = Table 20
MATYQYIRRYNAVLTEEQQARHATNRAAMDAVFNHIVAYLEKRYPYNGKRRFPTNVGGKRVLRNELIKSLRTKLAWLKKFDGVRNIYSQSLQIFVDLIITNFGEYQKKLNKARSMTDQDKADYKANKGRHKNPQHRSWYRKGSLAFLRGGKQAFKTVTYSNNGKFRVISDHEIFVQQYGLIHVRQNIRKFRGNEKQIAQVKIKMRRHGDYEIQFVLNAPRVKSEGLRAQGVDMNMKHNKIFHTTNQDNVQKRYYLSRDISGRADKLSDLVDALKSQRDTSKLSKQSKCYRALCNSIRYWTRKRENILNNTFRHIVRDLMSNYDITVMERLTAFDMRKKRRENRGFNKKLTEVRFGMLIEFAQQYANHYNKRLILVKPDMTSQVERGTSYVKKHALDETVVFDGVEHRGWFSEIDGQFVSRDGNSSGNVLDWGLDPKSHFLYPKYPVSKLVFEK

SEQ ID NO: 1955 - protein, 507 aa, unidentified
  REGION 1..507: note = Table 20
MEIEVINAASFMNYHSVCHLSLWYNYSIKKDERRCASVSNEEKYGFTRQYHVLLTDKQKIQHEKALKTQSALFQYALKYLFKTYGVKHIGRPMPFSQKPIQYLLNKIKTGFIKDKYGLARWKKSVLFLSSHSADEFLKTVYTNLSQYRKRLVKADKSMDEKARYNFKMNVTKDKYGKHKNQLHKSWYRKGSINFLRNSASFRTITSQKLPEDSKGGIRIEDKHTDNHTFLTIADFGTLEVIEDLSELNLKDIALTKIKKLPDGSYRLQLTFSLPRKKQKSKTIQGFDWNMAGNEAFCSSDGKRIKVSDAAIKRADEYEQKINAIKSARDLEGNAHGQSKLYRKLDRRQQKLNAKRSNMLTNEYRHLVHEVVDDCDTIVVEKLDAYEMRKHGKGSAQRKGINRRLAVLKPYELMTILESLVKKQNKRLVKVDSFWTSKACHDCGYINKDLKVGQKEWQCPSCKKTVDRDLNAARNILDWGIHPEHHAKLKKAAEEGKNLSPSSLVTEV

SEQ ID NO: 1956 - protein, 295 aa, unidentified
  REGION 1..295: note = Table 20
KLPNGNTKLVSPHHLNVADFGEIIVFENLKNINFEEIALTKIKRLPDNTFRLQITFTREKKRSSQNKVVGADWNMFNNEVFRTSENKTIAIPKDIVKKANKLEAAKDKFKSLRDSEYNKRGKTALWQRYQRKQAKLSAKRANLLTETYRKLVHELVDEFDTIIIEKIDAFEMRKRSWSLNKAQNTGKNKRLALIKPYELSKIVASLVNKQNKTLIKVDPYKTSQVEYGTEYEEKHELRETNKDGKRIYVSAYTGKEVDRDYNAALNIKEWGLHPEKHVKLRDYPKLNASNLVEII

SEQ ID NO: 1957 - protein, 452 aa, unidentified
  REGION 1..452: note = Table 20
MAELWVKERRSRSQAFAFTEKLKVTLSGVQSRQHVHALMVQEQLFNYALKYLYKTYGRTHIDRTIPTGIERNKLINHIIRLFLSEKYQLKRWNYRVLSLSSHNAQLFLRILIINFTEYQKLLRAGFKWSDKIKFQYKQNILKNKHGQHKNPHHNSWYKRGHLRFNLKSRTRTVEIQANTPIHILSAHVIKVTNFGTLHLHKRADQYAFADVKLIRLKRKADGTHELQIVHVRPKAKANVQAKPAIGIDWNMTNNVAYHDSNDQQYQLPPEVIAKADWYERQLNQFKRKRSLLRGSTKKLTKQIQRHSAKRAQLLTETYRHLAIDIIEPIAVLVMEKIGAKDMRKSTGKAKNRKLALLKPYEAKKVIQNRAFKQGVTVVEVDAYKTSQVEYGTENIDKHPLSQREWISPVTGKRINRDHNAAQNILDWGLHPSHHIKSKTFPKVTAAMVSAII

SEQ ID NO: 1958 - protein, 458 aa, unidentified
  REGION 1..458: note = Table 20
MAQIIRSVKFQIYMDSKLEQQIKETLYYYKEVVRYILKTIKRYKNCLIPWKVKGQKQWNKLKDWLYTKYGLNAIEYLINSVKKTKNREGRNAIKDLKKNFPTMPKLPRDTRRSCINVAIGLFKGYRFHYEAVRIAREIIPLYHILCTVQNLVSPREFRISHVMRVYRSKHRIPKNTWNAVYQKIKKYFKKGILNPPRFPAAPAVLEIYKERITKEYGEYCVKVPLVAGNKFRKRTIYLKGFGYAHKFFNTWAQKSLMLLHNGEIFVQGVFFKNAPKTKLKRPHHMIGVDLNYATNLATVAILSEKNKVKSSFIRGFAKERISRSRGKKKGRIIADFSHKTAKEIVSIARRNNGWIVLEKLEFKNTLKKRGKYHDWSYGQIISLIKEKALLEGIPVMQVNPKGTSYTHWYCGSTDTVRDRKKSLLYCNICNKNICDHLNSALNLAKIGWQRISDFPVIT

SEQ ID NO: 1959 - protein, 376 aa, unidentified
  REGION 1..376: note = Table 20
RAIIVFALSPYIGKNVSNIIQKTNPEQLSSFPFMKRKKGRIRIILLMNKDHLILRPGNSLQMIELVRKEGKFDLGFILKGFPRINGTLIFSSKVRTYLQRGAKIKVLIVRSSSAPSYKLRVSVVLEGTSSVFVSSRLVNSYIKKIKVKKTKALGLDINRLGEHMLAFSSKVSLPDEFNLLIDRYEKLSSVVIPQLSYSLSVKSKIKNSYDFVKTKGELVRVYHKRKKILKAIKDLVPHFIAAVIIKSGCKVLYIENLRSDPRGTRGALAKAIYNMPDEMNLFEKAVSLASSLLGYEVLLKKVDPRNTSRFHNGCGGTIQRSPKSYDIAQCKKCGKTVNTHINVAKNIRDKGEKNSNLTIAPFPHTRGMDSISTKST

SEQ ID NO: 1960 - protein, 656 aa, unidentified
  REGION 1..656: note = Table 20
MPLNIILWIYLASKVVSQTATNLQTLLPSTSTGVMRSYQVVLKCADQSQREEINQRIRTLEERQHQLLTPQVIKQAVELFRTNLKEGFFTRKLCKEVGKNPNIAESAFHWLYIAIKGKIDKEQKAQGMLNFLLKNHQQLIEWIVFGRSPYTERSLARYWKLKRRYIINLLTSSRSQTDSYWRKKHNALYSSESLQLNTLLPHCSQTEVLQALDDALFYQQHEFSLLPQLTKNQQAFLKKLQLLKQEQNVVIPFLTSWINSPQDSRWKSLKELAEQLATIIGKPNRKLFSAVRQIVVFTLFDHYMQSVPQLVQGLPIANVVPLPFKRKKKGRLPIKLLMGKNYVITRQGIAQELTDQVKKQGWTELGFPQQGKKKLTAQVHFPPKLLEYLNNGAHIKIFQVSSGHAPCYKPRVDVVLEGTHSCFHSSILLHRYLSQIPGKKSSVLGVDINRLGQYMVVFNSAIPLPPDLLALASHYDHLSKKVLDELNLGFLRKRREYDVHGSCKLKGELNRVYTHRSRILREITRLLPHFLAAVIVKKQCKVIKIERLTADATGTKGALAKAIYTMPDSLFIYKKAVWLASLELGYKVKLETVNPYYTSTIHIKCGGSLTRQKGQYDVAPCNKCGQQVNTHFNAAQNIAFLKGTSFLLNPFPSSHV

SEQ ID NO: 1961 - protein, 286 aa, unidentified
  VARIANT 189: note = misc_feature - Xaa can be any naturally occurring amino acid
  REGION 1..286: note = Table 20
  VARIANT 191: note = misc_feature - Xaa can be any naturally occurring amino acid
DPTAAPIGDPNPDWRGSFGFSLKYKKFYLNALMEHSQGGDVINGTEGVLLDYGTSAATGFERVSDVPLKRYNGTIIPAGTPFRGNIKDFGAGNVALDQSWYTGPGGWFGNVGELFLEDATWTRLREINFGYTVTSDFLKKKAGISSLGFEISGRNLFLISNVNGYDPDANNSGSTSGRGVVYFVNPPTXPXSQICSNCGQHRHKMPLKNRVYVCPECGHIEDRDLNAAKNIERWFEGIFIPSRSDLAVSSTVSACGVDKPLKNHLETTMNQEVNAEDDTWFWTAEE

SEQ ID NO: 1962 - protein, 1492 aa, unidentified
  REGION 1..1492: note = Table 20
MAPVSTAPKRIKVSSISKVKKQITTLEKPNFNANEVKRATKDTTSFKCPVSPKKIFLEPTDGQVRQFYGARNFSGTPYDRLPQAENLAWQESLRDNLTLIGFHVYSQLFPSLLENRIKLNKASHHYRDIDRATPEGRKQLEQRREALTRLQRVGSARSVFHGLPYSVDKSKSILQFMNMDFDDDDSRQRFFLQRDFATISGKRGETSSSSVYASCSSAIGLMWFATVILGRPTAFESVVLPLNVMERRVLEERWLCPPCHLDGAIRGWETDWRGVFRAINVPHRNIAYIMLERACQDKYIEGFHVGDAYGLFKATRSAPGDAERIATLFRAYTEKTKYGIECGPVVGSLDIIRQRPVDSVGRMDGSVLGSIHLTAAQRSSTLVSAKLTEIMAHFDSQLWKTRKRLKMANTVSTNLDPAGLNKKVDGGRMLDPTDPKAVEMMYDMLKGVCFGVWHPLKSLIGEELGASMEHPSAFLKISNQEAELLYEHAKNKGVLYSDVANLCVLLALSNCFQRSQVMREATMNEFALVPDGTHFRHTFKDRTWKTATASASSGALPVSHFEMSADQSVMIHFVACVGHRFCDVDMRDGNRRLFVNSKGEGWTPNDTRSRFKKIGAYWLGIENFSPHVCRTFWATHALNSGQVNSSNIDDFSSYLQVSSATLRSSYGAASANTAAHTIGNVVLGGVVNSACHVEIAENGDGPQGPKLRKIRLEFLADIRASLLKYSGDAKHMFQDLVRKRKVGQLGESEKWFRKENTFWKDEHERVFLRFVGGAWAQPDIASRAKKIGAHWLGLPNFCIHTCRTFWATAALNSGQVDPSNMDEFSSFLQVSSATLRTSYMSAAGYSQAHIIGKSVLGSVVNSACLGETTEKGAKPSTKKLGARREFIAEIRASLLKHAGKTRKLFRHLLRWTIVNKSKCVSTEKRKKEKKGLQPPEVKKVFYDRCWAAINIRISGKNTRNDFSDLLDEFIDQSGFDTSLFPPKVPCRLQETVTREMEVSAKNSIVVHLEAKIKGFLRFRLMNDSQLAFQHFPAKDRSRVIVSLSNDCLEREMREDLDPGYVPHVLQVRDLLAQVYSTEPDVPVLKILKKKPHLFLELISMISRVAEEASDNNRALREETKTRSDEEKVRKAFYISERIKRGLVDRPKMCTVLPVWKLAPCFPYYSSSVVGSIFHKEGHDFSSVSRFISEHFDLRRVNRKGYKPSGFRSDGYQVQVTFMALVSKKPHVPGTTDLAKSGYQIAKKVVSLETQERGLFVLSQARKDSRKIVADRVHAYNLTVVDPGCASVVSVRSCPLEFCRCVGSVREKSTDWEMKGTEYSVKSGRTMLEGREKKRRSNDEYGRCFPRFSAVKKKTARKSSFLAYCRVAAETFKVMFAEKMKRARKRSRFHSSRLVQKTVDKLASNIAACPSDRKNIVLFGNGSFRAMKGHASAPRKKLVRAICSRVNVGMLDEFRTSKMCPGGCGGEMTDVQGDCKARLLIHTRGLFSDEYVD

SEQ ID NO: 1963 - protein, 245 aa, unidentified
  REGION 1..245: note = Table 20
MLGKHCLDAGFGQFFNILEQTCFKRDVYFQKVDARKTSQICPNCGTETAKKELSERNATCFNGAAAFRGKLPPKTCLGNPNALRVSAKRTLRERSRLGRETLLQRWSHQIPLSGNTHQVLAPFGFTSRLCRETLWVCVAPPMPAARLRLSGLVARQSPGSGGTPARGWLHNALNPTPDTSVGKHSSSTGSARHNSWQRWIHRNAVAPHVCSHCGYTTDRDVAAAQIVAIRGLAAVGHTVKMRGFG

SEQ ID NO: 1964 - protein, 372 aa, unidentified
  REGION 1..372: note = Table 20
MTKKQEYKDDYPDKTLYIPGPTEVRDDVIESMCEPMFGHRMDRMTDLYTTIVEDTKEFLGTDNEVVILTGSGTEFWEASTLNLVDENILVPTCGSFSERHANVAERLGKNVDRLEYEWGQAIKPEDIRAELEESDTDYDVVATVMNESSTGVRNPIEEIGDVVAEYPDTYFVVDAVSSLGGDYVDIDEHNIDVIFASSQKAFAMPPGLAICVVSDDAYERELEKDSASWYGGFQRTIDYYERKGQTHSTPAIPIMLAYRKQMKHMLEEGHEARDERHREMAEYTREWAACGVSTHKPLWVREHSCPSCGFTADRDWNAAWNILSRGIKQLGAGRSESPPVETALPTGTTSVPAKRVIEAGSPSLKERAQASE

SEQ ID NO: 1965 - protein, 520 aa, unidentified
  REGION 1..520: note = Table 20
MLLNMHRRFTFGTPNRAGFDPAAMRVLDKHRRLFNAYVDLHNKYLERTAEALDIVIPTDRPSTLERATWHAAARAAAASQTTKDNRAALREGAACLGADVYWQNRRAIWDRFFRLHLTATRDLKRLQPKAPAVTPKIKGNFTYRPKRPLSPSEFMTAGAALGEQTVSPLSVVTDPGSKHALLRMPIDKLDDARGNYIYGEWPFVMHRQLPDDCQVHEVNVSGTQHGALWRQEVSFLVSVPTPALTPAQGRPHAALDVGWRMTHDGLLVTTTLIGDQITRFVLPLSIVADFAYLENVDAELTRTSRAAVASPSGEVPSQSWRALLRASRTGAGLNPAQLTSIRRWALHTRSLRHESQNLWARLSRERLALYRKYANTLCSTVSRIAVERLNLRALMFEDAQLPIHRSQQSMAAVSELLRCVREAAESHGIAVVQVSPHLTTRQHIACGHINPPATGAVVHCKGCGLAYDPDENAARQIAQRAFGPQSADRLNMSRPDAATPAVPSQAPEAHLSTESVDNRA

SEQ ID NO: 1966 - protein, 599 aa, unidentified
  REGION 1..599: note = Table 20
MKRQQEDTEALVYAYGARIPLDDPHLQEELRKQRAFWDALVEATLAAERELDDRMKADSPQYAAAVQALIDASQAVREAIERRNAERAKTRSRTTSVDGEVKERITEKNAARKEVWRLAGEWRKANKEAVSEHQARMKEEAKRLRQGCGLYWGNYNRVLDSFQRARQQTLKKGRRVRPSDPARDDGILAVQIQRTKSGLGASPEELFSGNVSQLQIDRPPPGVEFLPANRRRREARVTARMRVDAAGHMIEFPVVLHRPVPPGARIKAAQLVWKREGERWRGQLCLTVSSPKQEREHPGVEACGIDLGWRLQKDGALRVATVADSKSRLYTYTLPADWMRGMDQVERLSSHLDENAMEVAAWVHAHRDELPEKLTQPAANWSPGKGSKWLRDKELHDAVRALNWEVPAEIRHWYERYRHLKTWRDNLRAKLLRSRREVYRLLAADLAGRYAVIGIEDMDLSKIAKTKKRKDASDPELHATARAQRQRAAVHALRHEIEHQANKHGAQLVHVSGKTTTTCRACGAATGQKDRASLIWTCEHCGAVWDQDLNAAGNILDSAMGASAPAATTLAKAKSRRYDLTQPNFRERSKTGSRASARA

SEQ ID NO: 1967 - protein, 525 aa, unidentified
  REGION 1..525: note = Table 20
MLKTYVFGLLAPDNPELVATHLAERARVWNRLVELHDTSHRTFLQTLGAQHPGVAIAQEHYEAARLALAEHRRTPGRTDRAAPDVETTLKRAVQQRYVAVVDALKPLKSEVRDITHASNARFLKEANQLTGNSFLWWPNRNALMHEVIRARQQALRRGGKLRRRNDSETGVLVIPFPNPVPATHLADKSANLAIEGEGRKRTLRFTVATLGKKRDDKILASFPMVMHRPLPPDAMVKLARLVTKRVGVSLRYEVHIVVETSGQPVLKQGNLSAAINMGWRITETGLRVAAVRFSDGTEEVLELPAEWMLSFDYMEDLESSVRRAAVADMPQIMPELELAPASLRHHVERIKANPGTALGLRSLGERWSREAALSPQLQTWYQANRRKFDEAAHLRKNLLARRAAIYRIFVAAIAPRVSTIAIEQLDLSMLANRQKNDNTWIVEQRRGHRQRAAISTLCAFFAESERAGRFEVRRIAAPYLSQECHFCGTRNVLGSPLMITCTGCGSQWDQDFNNAANLLRASQNR

SEQ ID NO: 1968 - protein, 520 aa, unidentified
  REGION 1..520: note = Table 20
MAQHQITFVYGLLAPDTPELVDAHLNERNALWNRLINRHQATQTAFEAHLKQEFPHVASGQAQLAQERMALAIAVKDKVPDLQERKQRIKEQYDSLRALIDATPAIAALSQQHSQTLFELANQDIKASFLWWPNHETLMREFIQARARSLSKRMPLGYRAVAGEGSLYVTFKRPVPVLHLFGKCPTVAIVGEGRRRELKLTVATNGRCRADKQFATFPLIYHRPLPEGALVRQVRLVCRRVGSQRKYEAQFVLSGATRVEPPPGKKVAAGMDLGWRVTESGMRVATIVDEAGEGRHVELPADWMLRSDYVEDIDTQLSASLVPHIETFKSLALTRETAWLAPMLSRERPHAASLALKVLQAGQRPVPPAIAQWVASVRSLVEEQAHLREKLLAQRLDIYRKVVADCCRKYHTLSMEKLNLKSLQLVHGGDAWIDHQRRTHRHRAALSILIRLFKEAAHAKRIALAEHPAAYTTCTCHACGHINESKPTLEIKCAGCGVTWDQDENSATNFLIKIRPRHAA

SEQ ID NO: 1969 - protein, 593 aa, unidentified
  REGION 1..593: note = Table 20
MVSRQKKENNTVTRVYKYGLFRKDNLPKDAIDELFHANQIWNNLVNLHNENYKKIIEARCDASPEYAKLTNDINAFEELIKIENDNIRKARIKAKTTDNSHPDIVPIVEARGNFIKSKKDALEKRKSIKFNLDMKSIKKEFYNNVKEINKSYNGKVYSLTTEKIKKNFKTAREKVLSDPRKSRLNFHRFDGSGFYHFRCRQIDKSSNGAKWSDLFEGDNWNLRDKRLMLTGIKRTVEKKNQVKQWIGVKSKLGNDWVHFDLIYHRPIPDEGIITNGQIIRERIGTRFRYHLCITVDLPQSEPSSKNINANIGIDINWRLAELADHDNKTLKVAACVHFDHVNEKLLKSEMIYLPEKIQYAANHVKRLESELSESARLLGEKLKPELQKCKQEENKYWKIAANNRFQLNFETARKLKSDHDFGKVNLTEIAENLLNNWHQKYYIKYCEHHNLNKKYLTNRKHFYRNLAARLIKYNIPIAVENLTLSKMAEVKNKSNKLGGKSRGQRVHAAPSELLSALENVAKREGIAYTKLNPSNTSKTCHVCHTIFKEMDSGEHWECPSCGTKHDQDINAAINIAHRGYESLQKKAKNNGKN

SEQ ID NO: 1970 - protein, 575 aa, unidentified
  VARIANT 421: note = misc_feature - Xaa can be any naturally occurring amino acid
  REGION 1..575: note = Table 20
  VARIANT 6: note = misc_feature - Xaa can be any naturally occurring amino acid
MGYLPXSVIGKGGELHRANNLWNTLVALHRESRENWDDARRAASIHYSEKMDEFDTLQRSITLQKKALRQARMEDGSKTGETPRVKSEYAALKRLFQESKNLSADLKPLRKDADGKIDKKALKEAYRNKCKQAVSVKNCGIYRRTADQIHANFRTARDKAFKDNATMRFHPFDGTGYFQFRCGRRDSKTDGITVDEFMTASFRGFMGFAVQGIDNSKKKPRIRVKAVLTGGATKANKVFHDFDWIYHRPLPPDCQIQNGKILRTRVGDKFKYDLVLTINVPVSEVIPPSKLNGTIGIDIGFRRSGDTVLVATVMTDDAVQPPLEVKAPLKMVSALEHVIDLQSELDDAATDLGKAITPLLLANPLPDDHPKFKLWQSVAKRPSFVTLSYEKAYKFALWLNREPDTFPKEITRKVFTWWRSXSRKYREIHNRRKKQLTHRKHFYRQVAYDLVAQRKLIVLEKIDLSRFAETKDKDTKLSNKARAQRFLGAVSELRDAIKNAADREGVPYIEVNPAYTSKTCSACRHLNKELKAEKKWDCPKCGVVHDRDVNAASNLQQMGKRYIETVEKENKKVLE

SEQ ID NO: 1971 - protein, 570 aa, unidentified
  REGION 1..570: note = Table 20
MARQRLRKDWQVLVYKYWIQPTCVPEKVWETSRRMQALWNEFVDLLEAETAHPDTARPVLDRTPKDVFHPAMDAALRKAADRSGLNWECREFLFDRFRSAVQRAIHATVHGGQDAQVGTPQRRSRLTNIVIPHRYSQGGIPAANLLQARPRRSLRRFWTKPVPQQAYIDNSRKSKRLRYTEGFFGLDGERMTFRTMLHRPVPAEAFIKTVNLIGNHRGQIGWEWSIAIVCELPPSAVPESTGRTCGLDLGWRRFGSYLRIGMLVGHTGEVAELRLPLDMSSRPTRDFGRWIERSGRPNADRIYESWEEIREATSRADQSFESLKAEIARRAAGPEWPENLRNKFSAITELGQAALLQFQRELQEAEAGPEIRQLISAWRVNDARLRRRIHCARMRFGRRRHWLYQNLAAWLATNYDTISWEADLGIRKMSEDGSKKGRLRLADRNRRIAAIGEFRKILKHQALKRKMLLIDGRTAYSSTTCFTCGRRTPGGPDLILQCPNGHRFDQDTNAASWFLSRIDRQVSAASNLRQGGVHASVKQLEIPEILKSIIVPQTTERAVIPMESDAVITV

SEQ ID NO: 1972 - protein, 507 aa, unidentified
  REGION 1..507: note = Table 20
MANHFNKGVVFGKLAGLERKKSEGGKPYIQIYLECPNDLHGDAKVYGRMWGEDRVNAFMAGLNRDGKLLMGTGLRLEGFFSQYDAEDGLYWANAAHLKDKFMNAYFSSLRHGRKLHFHAFDGNLRFEHVFTSGGIPAEKIFTDNPRQKRIRITPISRDIYQDRQRGIISQREMKRKARTEALITLAGLQMRFRTILHRPVPEGSILKKAVIKRIRTGRYNYRWTLSLTVEVPPDDSMPAGQAPAGKTAGLDVGYRMIDGRLRVGYLAGDAGQMEIYLPGRIMERFIHVQELQQKSDALLEEMKARLVEMLPEGLPAELKANWHMARHGRLRKIIRWLADNSPEHIALRELRKWERQDAAIQNEKEGLRRRAIRQRQWFYYNLAHRLAGEYGTLVIESLKPGDLQRKTQLDDDRTLPRRASFYRGIAAVGALLDIIQDVGRRKGMTVHKVDPAYTTLTCHVCGHVVEPVDRASLLWCCDGCGSEWDQDYNAAYNLYMSGRESKEAKVA

SEQ ID NO: 1973 - protein, 299 aa, unidentified
  REGION 1..299: note = Table 20
MKKVVLTGRKQSPVMPWRFWLVLTVEEPKPAARHPEQLCVVGVDVGWWRVPDKSKIRIAMTWDGKRHRELLLPLSFWKKELGEVSIAHITSLSSQRDLLLESCKQKLAELLPEHPRAKNKVAWQRTRSGGLVRFLHELDAATPAAELLRIWKRDNDQLLRQQLMLENAFNHRRKWFNRNFAAEFAREYHVVGIENLNLVQMSSREKTKGEEKRGLRRLAQRRKYAALGELFDAIENPMAKAGGRVVRVPPSSTTHTCSACGKPFDTGIDGRLGVCPDGHEADRDKNASINIFSQTCRAL

SEQ ID NO: 1974 - protein, 579 aa, unidentified
  REGION 1..579: note = Table 20
MIRIYGYTLLPPTLNAQLVEEQMRAGHRYRNTLVEIERERRERVAAVLSGHVDTEPLAAEIATLSEERERLRLQIKASRAATRSRSEAAEDRARVRDLGARIKDLREQLRAAKAAIASDPEIQAKLAEIEQWSRERVKEERARCGVYWGTYLLAEAAADQARKSKTPPRFARWTGEGRIGVQLQGGIAVDELTTDTQLQIHECEDPRTGRRAGSRRLLRMRIGSDGRAPIWAEWQMIMHRALPDGARIKAATVQRRRRDCRRWDWRVQILVDIPDGWARPAPDAGAVALNLGWARVDGGIRAGYVRGSDGTTHEILVPRSIVDRIEKSESIRSIRDRHLNEMRPRLIESIGAIAGPPQEIVERCEHMHAWRSPARFAALARWWRDHRFDGDAEAYEMLEAWRYRDEHLQRYEAGLLRGALGHRREIYRRLAAHLARRYRTLVVDDTDLRALQRSPAPESERTEIDAAKRSQRLAAGSELRAALVSAFSERRVVQLSAQDVTRTCHACGSIEQWDRAASGRMHTCSSCGVQWDQDDNACRNLLREWSRAADEWEAARARKDAERKESRSERLRRGRRKAA

SEQ ID NO: 1975 - protein, 624 aa, unidentified
  REGION 1..624: note = Table 20
MTTKVYRYGLLPPHEGADLVEEQLRLAHRYRNMLVEIERYRRGAFRQIEGSLLVEAEAAMKTAKAAFEAVLEEAQRHKAQHRTRKVPDEIQSRLKAARKTQQDARKVWQDARKDLAADLSMAKARALVEERAEQLLKSARAHHSPYWGTYLQIEQAHAAVRKAPLYWTGEPNDPRFVRWDGEGLLGVQFQKGLDPADLGTDNRLRILPREAPPGASPTSKTSARRRYVEVWMRVGSDGRDPAWAKWAAVLHRPIPEGAVLTWAKVTKRRVGPRDEWALHLTVDMSKCRPKARPERRAARVAVDIGWRLTHKGMTVTETRSLDGAIRVCAWEGSDGRKGALVLDARRIEHLTKPEAIRKDRDDHFNVAKEWLRTWRAEASLVAARGNGPFPAAWFLHETSTIHAWKAPARLARLVKLWSGDRFAGDEQIFAEMEAWRYRDFHLWQYETSVRTTAIRSRQDFYRRFAAQLASEYVEIVLEAESENRDKVMDLNPLARKKSTDNDRARSHRFLAATSILRGALRQAFDREALEPKANTTRICHACGALEDWDPAPDLWHTCSACGAEWDQDFNACRNLLRLRERSSALEDPGASREAGNHGVKRESRWARAKRMKREKKALGEALAE

SEQ ID NO: 1976 - protein, 610 aa, unidentified
  REGION 1..610: note = Table 20
MKTIVYRYGLRFPTCGVDAALEQLAASHRYRNQLVELERTRRAKLRAAESKDSAVAQRLGAMQGAQTKLDEALEAAKRSRSSSAKTASRAVSAEHRAAIAAARAVLKETRKAWRDAKAEARDRIAPVCDAINAEALAARKAARAKCGVYWGTYQLVEDADQAARKAPLWMDGEPNDPRFQRYTGEGDLSVQISDGVGLSVSDLAKGTQVMLRECDAEDRRIDGSRRKALRRRCDLWLRVGSDAAKAPVWAVWPMIQHRPLPAGARIKRVTVHRRTIGPRVKWHATFTINVPEPERRCGDGIVAIDIGWRARPDGSLRVAQSFAPDGPSPSEREFTLPREIISALKRADTLRSTRDQNFDEMRRVLFGWIRETRSMPGWFLDDVETLPSWKSPNRLAALAIKWREQRFSGDNAMFDAVEGWRKQDKHLWCWEDSQRAKSLGRRRDYYRVAAAKLAENFDTLILEDFDLSVVSRRPAIGDAKEADYIEQAARNRTLAAVAAFRGALINAFRMRGGSVHKVDPANTTRECHVCGVVETFDAASKLRHTCINGHEWDQDENAARNIYERWRRAQDTATARSEEESVPAEARWARAKRMKRERDERMERSKGEAV

SEQ ID NO: 1977 - protein, 501 aa, unidentified
  REGION 1..501: note = Table 20
MDEINERAARLRRGARALCGVYWGTYLLVEDADHRARAAALYDGAQPNNPRCSRFVGAGRVGVQIQKGFPCETLFGSDARLRVAPVDSGAWHSMRRGERRQLSRTTLSLRIGSEGRDPIWAQWPMLMHRPLPEGSIVKRATVSVRRRGPRDEWAVEITVDVADEILAVQRTDSNESAVAIHIGWRAIGNELRVAAWAGSDGRSGELRLPASLLGAFAKVEELRSIRDRNLAAARDALSGWLAAAASIPEWLREATVGIMEWRVPSRLAVLAKQWRNVRFVGDEKAYEALEAWRYHDYHLWSWEDSQRIHALRARRELYRIFAAQLAREYVSIVIEDFDLRVVAKRHLVEDASIEWRGLRRNRQAAAVSELRASLQNASKSRSARIELLDTRSFLQPCHACGSKERFDSVEPLDHSCSGCGAIWDRDSNAALVLLQRWRREHACGGEVAHADVDTKPVPEGRWVRARRHRAEKDAHARFGASDNSEWFGNGNASVISIESPS

SEQ ID NO: 1978 - protein, 614 aa, unidentified
  REGION 1..614: note = Table 20
MIRSYEYGARTPENQEVILKILDKANRYRNRLAKIEQQRREKTDAVMLEFCPELMSVESERDKLTTKIDELVDQVKGRSTKARKKVPMSREERESLKSMKAERKVLNDRRKELRAVLFAETSELTHRINAIGEWAKEECRQARATCDLYWGTYLLIEGDAEAFRKGPPPRLRRFEGRGRIGVQIQNGLSWDAMCAGEDTRLRLIADGVPPPDAPPRLSAKGVPLPKQKAKRAAMNYTLWMRIGSQDKGKPMWAKIPCIIHRQPPEGTMVKWATLHRNVVGGVHQWRVVFSLENHASAWTKRDVAYGGAVGIDIGYRVLPSGRQRVAIAVGSDGREHSLVLDKGMVDEFDKVKRIQSHRDELFNEAKAWILEYMNEHGEDPWLKSKLEHLDKWKSKRRLQDVIEEWSARSALPGDALVLEKLEHWAFEREPHLWAYERNLDQQLRARRKDIYRNWVVMLRRTYRTAIIEKMDLREAIHDTKRPEEDQEVTATQRRKASQVALSILIQCIKNGGQDVVELDPNATTSTCHYCGKQCEWDHAKNLRHQCEHCGTTWDQDENAARNLLRAGLEAAPAEAERKEWQEIEGAKSKRHAGRMLAKQRRMAEKIATPSESKS

SEQ ID NO: 1979 - protein, 393 aa, unidentified
  REGION 1..393: note = Table 20
SMMKARTGCPPNFKAWRGDGHLAVQLQKGLSVEAAYSGKNCQLRIEPLPTAGSNAAQRRTRVWFRVGSNPNKSPVWAVIPASLDRPLPEDASIKWVHLIRRRIATHVEWRIQFVMSRKSGWPKGDWAESGTVGIDVGWRMKPDGSMRVAYWVADDGQESELALPADWLGEMARVRRIQSYRDNNLNVIKEKLMAWLYKAKFSLWLREETKTIGQWKSANRFAALTLRWRDNRMFGDDAIYDELEAWRRRDKHLYEFEANLRDQLQNRREDIYRVFAATMRRRYRAAIIEKLDLRDFHVLPDPDQTPENDAIREHTRDACLSVLIRSIKESMAKTVQAPPEYTTMNCHVCGSIEDFDHAILVHRCMACGSEWDQDRNAAINLLRHSSASAVPTV

SEQ ID NO: 1980 - protein, 628 aa, unidentified
  REGION 1..628: note = Table 20
MTDPKPATTMRVYRYFLKPYSAQDDKEVHRQLRLAGDYRRALAMIENGERAAVGALYLEDTAIRDRTTALTAALTAVEKDEAMISQLKAELHALRVARGKTVEHRQALTKIRERRGPMVRGVRGHFSAAGLFWGTYLLVEDAHDRAVRSLPAWEMLAVRGPWESLGVQIQSTRPLTSSALHGGADSRVRITEDHYALAKQYRDDAGMPVSDRYGTPSQDAVDRAGNRKGRRFQTLSIRTGTVPGKQTPIWTRFHILTKGRGQQRQIPDDARIAWIKVVRTHVTHRPHIIRNGTPTMTARERWEVQFTVTEPVQRTTPTAAGTVGIDIGWRRVDGGIRVAYAATKTGAQELVIPDSLLALRGKADSIRSYRDLQLDLLRNALIVRRETAPTDFAEVLAHAHSWRRVGHFVHVARRVHEAVLAGRLDVVTWLGPWFVVAMLGVLKRDGHLRGYEAGLRDQQQRRILGRTQTWIAGTLAEHDVVGIEQTIRIDRMRARDTADTESARQAAVAHVETAPGRLREWVIKMAESRGITVREIDPYMTTQRCDACGDNRGPCTELYAVCPHCGFAEDQDYTAAKTIQKLASGELPPLRPLPLATTVSETSTKPKTFRRNRKAPKPEVLATEPTNT

SEQ ID NO: 1981 - protein, 536 aa, unidentified
  REGION 1..536: note = Table 20
MPFGKKARHVKAYQFGADAPQEGMEAVLEQHRLRTDYYNALVEMELRQREERTALLANLAAESGLESPNQVYERLKAAGEKGIRKHPEYVAARERQKALYGHPRLLELQSRQREERNALRRSFGAKGLYSSNYLDVERAFDKARQSPELRFRRYSPHEGRLAVLYTEGLPMREIGSDTRVQLPLPDPIIYRDRATRRKHQRVLMKFRVRSVERQPLWITVPVYLHRELPDGVCREVSLHWHRVADRLRWTVSVVVEVEGPPVASPTGRGAVAVDLGWRRVEGGLRAGFWVGEDGAGGEIALSEGDLKQFSKVEDLRSIRDQHLNALKEALAAWLEAPPAPLPDWLAEETKTLPQWRSPARFAALFRRWQSERVHADEAAYGLLEGWHKRDRHLWQYEANLREQMILRRREQYRVLAATLARQYDALIVEDFNLRAAAELDQGGSDLPDAARRYRTIASPSTLRDALVNAFAQRGKPVRKLNPAHTTTDCHACGGALVGDPAKELRLYCPTCERFYDQDENAARNLLRRAQEVQAQV

SEQ ID NO: 1982 - protein, 531 aa, unidentified
  REGION 1..531: note = Table 20
MPRTDRARIMRAYAYGADAPVSGWDEVQRQHRLRTTYWNALVEIDHWAREQREAILAPHAVGETDTERREARRLAARTPEVRDQLRTVDQAVTERVRLARQAAAANGLYWPNYLDVEASWRVARQGRNPLRFHRYVPHEGAIAFPTTNGMPVAALFAGDSRVQIDPVPPDTWDSRRQRRRQQRTILRIRVGSQGRAPLWCEVPIYLHRPLPPEGIHRVTYLTWRRVASRLRFQVSIVVELPVPAAHLADPAEGPLVAVDLCWRRLPDGGIRVGYWRGEDGEGGEIALPARWVAAMAQCDRIRGYRDSDDLTPEGGLEQLRARLSAWVDAQDPDTLPEWLRYARREWGRWRSHGRFAALALRWRGERFAGDEDGYTLIEAWRQRDKHLWEYEANQRDELLAERREIYRVIAAQLARRYRRLLLEDLDLRAFARRDGVDAGSDELVMVQTARRHQRVLAAPHVLRGALVNAFVREHGPEAVVRIDPAYTTQTCPGCGQVHEFDAARQLIVTCPACGETWDQDARACANLLGAA

SEQ ID NO: 1983 - protein, 582 aa, unidentified
  REGION 1..582: note = Table 20
MRVYEYGCLAPVSGEEAIVGVLRARSDLWNKLIETERELDRKRREVYARASELASLGVLEKEIEFVSNLIGSLREEIKRERKLHRQGSVALSARMLEDLNRFKGCLARLKAQYKEARKGALDGVREELEQLEEERRQAVQRVDDEFKRVLWWPNRDEERVEYENARKRLVRSRSEGQKAELRFHRFDGTGKATVRLRERGSAGPWGMPVGNIFIPNSVCWMRPVPPEAWTSPVRAERRRKARTVLHFRVGTDADGNPVWAVLPMVMHRPLPEGGVVRQVSVVRERVGRHFRYKAVFTVQLFPNAIKEEPLLDGVVAVDVGWRRVESGIRVAVWLDDHGNHGEVIIPDRLYREFLRLKELQSLRDTHFNEAKKILVEFLKKAQGMPEWLLEECRSLKEWRSPGRLVSLLGRWKKNCFPGDKGILNWLSDWQQREDHLYDWQSHLRDQILRHRREIYRIFASQLADKYGVVVLEDFDLRKVVKTPPPEEGTQGSIPPDYQRFIVAPSELRLCIVNACAREGVSVSLQPAAFTTLRCHACGYVEKFDAAREIWHRCPKCGELWDQDYNACVNLLERYFSKESADS

SEQ ID NO: 1984 - protein, 594 aa, unidentified
  REGION 1..594: note = Table 20
MSRLEARTRYLQAGQKRLGKIRKRGFFMETAATKNYLALSFGCLSPTRGEEYLLDQIKKKHDLWNKLVEKDREHREKVRQVMVFESETTKKIKELEEELNSLREEIKNQRKTKRTGKVDLTDQKARIEEIKPQLKQLKEKFKEERSFIFEARKQELAQLEKERWAVVKELGKGSGLYWCNLEDVVNSYDIGRKKAKAAGGEMRFHRWDGTGKVTVRFQKGLPVNEMFSCTNNLLQIDPVDKDAWYNPVRAIRRKKSRTRVRLRACSENKKPLFIELPVVLHREIPEDALIRTASVIREKVGMRYRYKLNLVLEILGENTNRILPALEGTAAIDLGWRTVKDGLRVACLVDDKGHSEELILDNDVLHEFNKIKDLQSIRDNLFNETKAKLMELLKTLELPDEAKERTSHMANWRSQQKMLRLHQYWRENRLPGDDEVWEVLEYWRKREIHLYEWQENLRDQVLRRRKEIYRIFAAKITRKYKTIVLEEFTLNKTVQKPNPEEGPAGTLPANRNRFIAAISEFRNELANACRKNHVEFTYVPAENTTITCHKCGHKEKFDAAAQIIHTCSTCGELWDQDYNAAKNLLAFSQKGGVK

SEQ ID NO: 1985 - protein, 584 aa, unidentified
  REGION 1..584: note = Table 20
MPFGRKAKPCRVFEYGCLPPVSGKDELLKELRLRNNYWNKLVEIDRLIRQRSALILLLPGDIEAAHLDAQIDLMRGEIKKGRQRTRSSITDADLKQRIKDSIAELRVLWEQNKKDRKPLIETTRADLAAIETEWRVARKAARADSGLYWCNYDDVDTAYDVARKETAKKWAFPKFRRFDGTGKVTVRWQNGLNANNVFDGTGTLLQIAPVHQDAWNHPVRSNRRKASRTTVRFRVRSENRSPVWVELPMVMHRPLPAGGEIRSASLVCGYVGGKPTYKLVITVAPPAHTLPEEGMHRGIRPTVGINLGWRKKDNDIRIAYWADEEGRHGELTLTSNTLAQFSKLNDLKSIRDKYFNEAISALALYISEGTIPDWLKADTTHLNKWRSKPRLLALVGKWRETRFTGDEIIYEALFYWRGRELHLHQWEANLRDQVQRHRRERYRIFAAQLAKDYSQIFIENHNLVVTKKKKATEDGTYLTTEVDTLRTIASPGILRGQIENACRREGVIFTKLDAKHITSKCHICGWQEKWNAAATITRECPGCKTEWDQDYNAARLLLQRGLDGGYLAVPQTTLEDDPNFCIGS

SEQ ID NO: 1986 - protein, 559 aa, unidentified
  REGION 1..559: note = Table 20
MFGRESKPCKVYEYGCLQPVAGEEILIEEMHRRQKLWNKLVEIERAHREKVREILVVPDDPVTPLMDRLKELRNQIKLARKKERTGKVDVTTLQGQARELREQIATAKMQRNEAKKLARESNKGALDQLEKERREVVKAATKASGLYWVNAEEVRNNYEIARRRAMRDKTELKFHRWDGTGKVTVRWQKGLAIPGAFESDTRMQIDPVPVEAWEHSKRSVRRKKSRTKIRLRVTSDERKKPVWVKLPMVMHRPIPAESEIRCASIIREKVGRKYRYKAVITATITNAFPLHGNGTIGIDLGWRQVKDGLRVAYWADDRGEHGQLLLEPEILHEFNKLPDLRAIRDKHFNEIKSELSAWAANNNKPDWLTEELKTIKAWRSPGRLVALIFRWSVQRFEGDVEIYEKLEYWRKRENHLYDWEANLRDQVHRRRREIYRIFAADIIKKYGTVVLEDFDLRKVARKKDPEEGTRGSLPMDKQRFIASVSELRLAIQNACARAGAAVYTVDAKYSTVECYECGHRENFDASVKLMRTCPKCKKLWDQDYNAAINLLHRGLEVRK

SEQ ID NO: 1987 - protein, 563 aa, unidentified
  REGION 1..563: note = Table 20
MNKVSITKVFKYRCFEPVEGLSLFDEALDNRHMLWNKLVEIDRDFREKSSKIITPIQSDYQVLDQEIKNLQDAVKAIKCKTRSTAKEETRTIQDTIKELKVKRKEAYQEFKRLKHEAIEREKPLLDCLNNERKEKVKQLRSKSGLHGFNFDDVTHNIYEVARVKAMKQGTLLRFKRYSKNGKIAVRPYSNSPLYGSDIHRVNTIFYIDPVNQELYNSPIRGVRKKASVTQCHIRIGSAVKGKPIFVTLPMVYHRPLPMDGKINAINIKRHYIDQKPIYECFITVTYLIEAPAVNPNSCVAVDLGWRMTKDGLRAAYATDKDHKAIECIVTQRQLNEFDTIRGLSSTRQKHFNDCIHVIKAWIANKNLPDWLIDAVAYIDKWKSYTHIFKLYNAFLQHEKSGNQEIISYLEAYIERENHLRIWQSNLQDQAIAKRNYEYQNFAARLANMYDVLVLEKLSITDIVKYQKAIIGSQQSTALDRNRTIVAPYELKTILINAFTSRGKQFVEVNASYSTKVCHHCGALEEVHQSSIMHTCTQCHTVWDQDYNACINLLALYDNKVGAY

SEQ ID NO: 1988 - protein, 578 aa, unidentified
  REGION 1..578: note = Table 20
MTTKVYQYGIHGLPDQLPEPAFQQLRLQNNFWNALVEADRANETAYLAIVNNASDQVRHIFSQIEQVELQISNLRDRLQQEKIDQRSKTPATTTKDEIKALVTQMKDLKAAKKEAVASSKAAIKPQLDALNEQHKAACKALRQHYASEGLYWCNYNKVADSYRRARAAVLGKRGKGQSAKLNFHRFSGEGYFEVQIQGGMTVADLFGGKSTQLQIDPVDPVAWYSPSRAERRAKSRTTGRLRVTSDGISPVWLPFRAVIHRPIPPAGAIKAANITRRKLGTKWQYQLNITVTLPDTQVQHPHPCASVAIDLGWRILPNRIRVAYLQDDTGQQQEISLDASYTATAKRLEELQAIMDERFHAAKDHLKTLLTLADRTDRTWPLPDMAPEELDQIAQRLPHWRNAAKLLRLVEEMRPTPDEDVQQLRAWAKKHKHLYDWQANLRHKLQGRRRDYYRRTARALCEKYGRIILEDFAMPATRSEKDSDPQWQHYRRRAANLASPGYLRQEIERCAAETGSQILKTDAAGTTTHCPKCGTAVKTDPCENIQLQCHHCGHSYDQDQGACENLLKASARKISTSN

SEQ ID NO: 1989 - protein, 600 aa, unidentified
  REGION 1..600: note = Table 20
MPPRIYKYGLGKNIEGPDQRLPDQVFEQFRLQNRFWNALVEIEKAHAVKYDELRTGADARLGAVQERIDSMNESLEHINSDIKAQRKNARKVVPTDPATKKQIADIKGQIKALKIERKELRERIKGIIRPQAEALNTQRLQEINDKRREFAALGLYWCNYNAVLNSMETARKHILRKRAQGLPADFTFRPFTGQGRLTVQLMHGPPFSEILEGINTQLQLGPVPDDTWTSPDRAERRRLSRTQGRIRIGSEGFQGREPIWFEFPIVLHRPVPEEGKIKKAQVSRRKVGLDWVWELDLTVVLPEVQPEAQREPQTGAQPGQVRKVQHCIGLDLGWRKTDDGLRVAAWVDSDGQQGVFRLDVGYVATQDRLDGLKSVLDKNRDQITAQLLDWGKQHEHLPHWLDLQKVSVVKSHQYFLHLADTWANDRQEADQEVFEDLAQWRKRFVHLYSWHSNLSRKMRYRRREAFRLFAKKLAETYTHVFLEEFNLAWSSRKKDAEDTPLALQRASNKWARVASPGAFRQELQNFCNKTGSLLIFGKSDKASRTCPECKNKIAKDMSARIMVICEACRAEYDQDLGAAANVLCKGMENHFGKQPEDLAG

SEQ ID NO: 1990 - protein, 589 aa, unidentified
  REGION 1..589: note = Table 20
MIRTYKYSLKAPENFAEDCEDELRRMNDLWNRLIEIDRQRERSFKDLCRSTSAEYAAAQDEIEALREPIDNLYDAIRAERIATRSKEPSDELRARRDELLGRRKALWEICKAIQKAIPKESQAPINEVYKTNVKLARQQSGCFWGNYNAVIESFETAKSKAIKDGGRLHFKSFDGSGRFVNQIQGGMTVTELLAGSHSQAQLTNLVTTNKTKGRFAFTAFTGKDDAGKRFRRQLFSEINYHRPIPADGVIKAVEVVKVPHDGKQKYKWHACFTVALPEVDIKHPKRNIAGVNLGWRQFGGRLRVAVVVDDAGKKTEYFVPAELVSKFEAAETIQKAADDARNEMLSWLRTFYQDNRDEAPQEWRESIQGLLRNRPSVDAANHLMTIWRECVFAQEESRRYAAWLKSDAALRRSYTGCRQNAVKWREEIYRHIAKELAERYAVLAVTDTPLSTMSRTKAKDDLAVDNALPESARRNRVIAAIYSLKEWIGKQAAKTGSTVETITGKMTATCHKCGYVAEKRLRGSQYATCKSCGSELELDENAAINCRNHASGAVLISDKPEKTGRFQRAKMAENDFARKIGDNASPLVT

SEQ ID NO: 1991 - protein, 593 aa, unidentified
  REGION 1..593: note = Table 20
MPEKLGATSETDATEEPEEKHVLVRQYGLLAPLDWDQDCQEHLWLQNRLWNTLVEIEKKHREAYFRLTSSDPELRGIEEALSALMAEKESLIAEKKFLRQAARKKAGVDTSAQDLRIAEIRPEIRRLAVLAKEKRKETRERMKPELDALEQKRREAVKCARNASGLWWGNYNAVCASYETARIRALKTGAELRFHSFDGTGRFTCQIQGGMTVSDFFSGDPQAIVSADPVSLDAFHHPSRGERRKASRTKLRITVTTTKDANGKYVRRMLTFPMILHREIPSDVLIKQLVVSRKRVGTEFRWTATLTGTRSGSPRIVPGKPGICGIDLGWRLVPGGLRVASVADAESVRHIVLPEKMLRRMDHVEDLKSRIDQEQGRLMTWFRARWPEISGSFPEGIRERFANHLKSPMVSSRKLAGSVLAWRDGHGDFRPDLLAALETWRKNNKRMTQEMDNLREKLSAQRTDFYRNEAGRIVQDYSLVGIEDFDLREVVKIETPEGEKTDQPAPARANRVRASVSDLRNWIRIQAAKTGTEIVRIPAADTTRACRQCLHINSGRPEDLVWTCDGCGTVWDQDENAARNIQMAAESAKGKQA

SEQ ID NO: 1992 - protein, 562 aa, unidentified
  REGION 1..562: note = Table 20
MIVVRQYGLGEPLDWSEDCENQLRAMNRLWNTLVEIDHGHREQVRALTDDDLNIALKNLELVQARQEKKELSTQRKKLRSEARSKNIDTKFIDLEIKRLAETIRVLSGELKLLRAEVRKHLQEDLRCLNYKRYEEVKQARQQSGLWWCNYNAVCESYDRARKRATKTGSALRFHRFDGSGRLKNQIQGGMTVTQLLTGKHAQVQIHANTGPVWRHEGRVGQSKGELVWTVYTSEEGRRTVRFPIYLHRPIPDDVILKEAVVNRRRLGLRYQWTVTFTCQAPDVEPAWSERRACCGIDIGWRKLPTGLRVATLIGTNSNVPEYLLLPSSMLEQWDYIEALQSTIDNEQNTMRNQLQVWDWVGAPEQLAARLKRLSTITHGGAGLMAVLAKEWREYPDYESQRLTLLENWRRHNRRDCTERDNLRAKLIAHRREIYRIWAKEIAERYGVIGLEDFDLSSAARLEKEDGKETVLALSARRQRNIAACSQLRQWIELQAAKTGSQVICFKGPSTMTCHDCGKINRPRDRAMLEWHCEGCGISWDRDVNASYNLCNAAAGNMRTLQC

SEQ ID NO: 1993 - protein, 664 aa, unidentified
  REGION 1..664: note = Table 20
MKRVTITIDGEQTKGIVIGTIAANHTAAEWLLTASVSAKSAKVRFDPEEAVAETSSLVMIAPTRTEKYLYLVPDEQVQPVTTIVRKYGLLSPLDWDCPDYPAGDAFEHLFLQNKLWNDLVTIEREHRAKYRELIGSDEETAQMDTEIASIKDRLSVLDEGRKKLRVEHRKKKCPEIDCLDENIKKLKSELKAVASKAKETRAAAKDRIRAAGNDIENLEKDRQAAVIKAYNNSGLWWGNYNAVLESYKKARIKALKDGAELKYHRFDGSGRFTNQIQGGMSVQDLLEGNRNVASLRLVSSGELGDISGKKPPSLDLQSVGSRRDSREYGILAITLYTGTDEQSKKFRRTLSFPVILHRPLPEGATLKSLSVHRKRVGTDFVWSVVFTFTTDCPTYDQRSSTGNRCGLNLGWKKQAGGGLRVATIYDGSDARHITLPQAIIDGLDYVNGDLQGRIDSAANENHAWLLEQWGGDELPESLQELRSMLRRSKRPHPAKFAKAVIAWRNYPEYLGDARDEAEQRRKATKRLTIEMAHKREKLLRRRMDFYRNTAKQLTSVYDVICLDKMDLRRLALLEKGDGTPNELTKIARKQRQQAAISELRECLSKAAAKNGTQIEQVSTASSATCSACKGKMEQVDGIMWRCRECRALVDQDINAAANLFREVL

SEQ ID NO: 1994 - protein, 585 aa, unidentified
  REGION 1..585: note = Table 20
MARIDEFKRFVIRQYGLLEPLNWDQDCAEHLYLKNKFWNTLVEIERDHRTAYRIVIDADEAVAEMNLKIQDIKDYIFAQDEQRKEARKQHRSKKGSHTKAFDEKMKELKGQVRELSPQAKELRQKVRDQAKEALGQLEQQRKEAVKKAYQDSGLWWSNYNDVIDRYNTARVRAMKTGTELKFHRFDGSGGFRCQIQGGMTVEELLSGRYNIAQIRMVDQGCFAELRGGLERKSKQSYGSRNYKRGYGVLSITVYTDKDEGGKHRRRMLDFAIILHRPLPVEATLKELRVVRKRIGTDFRWDVTFTFTEKAAPIVHTHPEKFCGIKLGWKAVKGGLRVATIFDGESKPSHIVMPQVIVDKLIYVEGLRARIDTMTNENYEWLLKQVNEEAPKSLAEVFESLKRAKHPHPAKFAKMVGTWSNFEGYLPDVFEKADLRQKMCRRLSLEHQNLRDKMLRRREDFYRCRAKEITEEFGVIVLDKMDLRWMATREKANGEPTELHPKARHTRNLAAISVLREWIVKQSAKTGAQINTLNIASSTICHKCGSKVKAGSGIVRSCLSCGTSWDKDENAAINLWRAISQVANLK

SEQ ID NO: 1995 - protein, 586 aa, unidentified
  REGION 1..586: note = Table 20
MKQITIRKLGARLLGDSESTILQSMRQQNRLWNKLVEIERANTEAYRQIVAGSDAELAAITKEHQTVEEQLEEVRIARNRARAAKRTKALDNAPDFAAAIKTLAARLKELRVGMKACRARAKEAAAPGLQQLEEGRRAAVKAAAKEAELWWAHSELVLAAYDVARVRALKTNGTLRFKRFEGEGRIGVRFNNGILLSAPPPTSMLKVREPTLDELGGLQATRSKKRIVAVDMRVGKAGEDRTAPIATFLVTIHAGAELLLNTPLKTVVVKRENHAGRGKWFMLFMFVDADADPIDKPLPARAVGVDFGFRMVRSPDVHSVGDDARSQLLRVATVVGGDGAKEHITLPSDLVGKFHHAAELRGELDRIANDFWLAHGPLFTEDVLGAMSKDEWLRVLVQKAKRARQPYASLMLSIVRAHAEQPVLGEAVNNAMAAWGRRARRLTVATYGTRRRAVERRNHLFRNAAARLVAECGFLALKNTAFAELARLVSEDGSTESPLHAAARANRVIASPALLRAAIVQAAKREQRELVLVDPKDTTLECSQCGHRQGGPIADLMFVCYSCHTVHDQDENSALICLKRALESNA

SEQ ID NO: 1996 - protein, 605 aa, unidentified
  REGION 1..605: note = Table 20
MQKQTRALASFGVYGPPSDDEVAVLKMANAFRKELCQHIWEEYRKEIDIRDNLPGVYDAMVKHEALKATVFAINRSIKERNSQERDRNSATDEDILRLKTAENERDLAEKVKKEKLRVWWDLKTRFSKWLSTSAESRKKAKTLKSRAALLDSLVCPNEFQVLFDLYGFSQSGRRALSDKYQALGLHSSIRGEIIAASEIKRKKDGPGIRYSYDREPEPESWTKLTLQISKGRTVSEVLKGTPSLNLTPVYTNHKKSGDESRYTVNHQIGTEDHPRLLTYDAKFHVPLNLNARIQRWTLVIDGNKRTVVPIMTDMDFSKPTGSGMFAYDIGWRVTEEGVQIAQFLGTHVNETLILPNWLVSARLSYKEFQAKWDAEANLELKLVGYEGKITGIAGAYEFLKRHDDLFIRDKITQYEREDRQARRIEKRAERAILKIYETATSRVCRLHDTVVSDKIQIVNLKRSKTRDLTKPDEIAKSTRERLQSLAPGKLQALLKGYGLKELVVDCANESKICPNCGAKNKSSRDKLRTCKKCKQTWDRDMGAVIVRLARAGMPSPSLNTARKTDLFSTYIESLGVKTGTKTNSPNYRSQHASQVTTANQVTMAG

SEQ ID NO: 1997 - protein, 605 aa, unidentified
  REGION 1..605: note = Table 20
MELKPGQIPSSEALIYEFGVRIDKESRAAIDDQIMRARRLYNDLVAQIRTIVAEMNTYVLDRAGKPARTLQAEVEVLNREFDTARATNDELAMKSIAEMRRGKWRELHAALIETRQRLKGELQTRFFARIGKNSACDTYRARSEAVANGLGWATANAVLDAALLAFKKSLQKGQGPRFSIGTDKVQDTLTLQFTAAGGVSAKTLLEGKYGELALLPTNGCGRRKYGEFRFRLGPAKAATYATGTWQYHRPLPEGAQIGLARLVRRKIGKDYKWAVQLMVKPPEPVFVATYARKPLVSVHFGWAADVEGRRVAAIADSADPHAARLVYLPPHIEATLERAATLQSERDTSRDKIMPLVKAIEANENWSEGVLVELAALRKLPAQHVAITRLHRLCRLLREAEGLPEWLEVWRKEDRLRWQSSAHMARRARNARRDFYRNLAADLARRYDTIVIEPLDLAEVLKKIDENTGERGEFGRKARSGLMVAALYELESAIRWSVTKTQTAVLELVGKTAGCCALCGGKVLADVEDHQLLRCQDCCADLDRKMNGAAVAWQASLAQREDAVSEFWIEVRAAQEKRSAKKADRLARMTDGRRQARGANSSKAP

SEQ ID NO: 1998 - protein, 593 aa, unidentified
  REGION 1..593: note = Table 20
MNLKVCGDIDDQIRRARAMYNNIIAVMRGIYDEMQTFTMEHAGPEGQALHEKIVAANVAFDAAKADNDEPRMKQIAMERRELWKALSIILKEVRKEHKNTLKERFYSRIGNNSSTETYQCRAEAIVGGLGYATATKVLDNALKAWQMSMVKGKAPRFARGEEKDQDTLTLQFSQAGGVPVEDIFTGKRKDIGIEYPKKGFGPRSYSAFRFRLGAASEESYAEGTVQLHRAIPENARIAMAHLTRKKAGRKYQYELQLLATLAEPINLLPDHRRKPLVAIHFGWSGDEEGRRLAGIADNADPLEARLLTLPPDIEDDIREASALQAKRDTYRDEVFLRLKEENTLPTKGETPLSEHWNKIRKLPAQHVSANRMHHLAWLVKSELIEIPEWFETWRKADQRMWVQATSLARRARNRRKKYYEKVAIDLASRYEAILIEMPDLKKSAEKVNEKTGEKTEFAKKARSGRVIAALYVLESAIQWAACKHGSAVLKIKGEKTASVCAFCEGDHLEEKEEHDSQTLYCPDCGSTVDRKLNGAANAWKRAASDLESLVTEYWEETREKQMGKAETKRLKSEKMAEARRLKRQAASQASAGA

SEQ ID NO: 1999 - protein, 595 aa, unidentified
  REGION 1..595: note = Table 20
MPTVTYEYGIRTDAECLHHVDEQIRLMRQTYNEMIAVMHEIHAASQAYQLTVAGLDAKTLSDRITALNDAFKCARAAQDDERMKTVATERRECWKDLSVLLKVVRQEHKQELQMQFYSRIGANKDTETYQIRCKAVAAGLGWATAQTVLKSTIVAWNTSMRLGKAPRFARGDEKTQDALVLQFTTKGGLTQDKLFAGACNEFGIDSPDAARKRQYWPFWFRLGGASAGAYAKGSIHFHRPLPEQASVAIARLVRKRTGCRNRYFLQLVLNVPAVRQEVTHKRKPLAAVHMGWSADSSGRRVCGFSDTPEPGLAQVIRLPPSIENDLHRAQDIQGQRDKARDAMAPLIRAFGGPLPPEWTDELLEYWRRWKVLPATHMAASRIHAWAHRMGDFAPEWWIAWCKADRKQWLDATHIAKRARNRRKTFYREFAKSLATGYEAIALETADLKKASKIVDEVTGERTDLAKKARTGRVVASLYVLEMAIRWAAEKWGAAVLDIEGVKTTQTCGICGAEDMDTDAEDSQVLHCASCGAVVDRKQNGAAVAWQTVMENRENLVTDYWALKLEQERDTGTRKTERLEKMQAARRAKRERTSAE

SEQ ID NO: 2000 - protein, 332 aa, unidentified
  REGION 1..332: note = Table 20
MGCFAALGIDVNKSYVAFSWVTNDPDLAASALGAWGAHPITSWLFEEHIALDTPLKLSEAVSVPEAHVEAVLMWLPGRRNNRQKRWRRMATAKLFATLTPWLRHLADQGTPAVIGVEDLRGMARRRGISEVEYAKIWKKIIGAFGTPLREGPGYRAYIGRGRSVVIALDPRGTSATCALCAAQGRTTPVQERGGRTVHCPIHGPINRDINAAINIAIKAVRIYAGDTPGGARGGQQPQPRTPSAGHPNEEKGAQRPRGDETAETWQGYIAASLTAPPGALDAYMEEVFKHFAGAEGRCLPLEGGQTQGEGEEEGGALNKGARTPPFSHHVGP

SEQ ID NO: 2001 - protein, 619 aa, unidentified
  REGION 1..619: note = Table 20
MGEFYYKEGSPASCNPRRNGDEPGFLDVLDEHGARYVSGLRRPPSKSPVRSGTFRFEVYIETEEWMSALTLRGWFAVAGFPEVTIRRASADERTRLKCISKDGLAPGAELDCNDATLLDPASKRLLHKTNLFDNPSDRWAVTVNGSAYVPPLTVDGRKQYGRSVEDLLGSRLASLDGCEYSMARVTLPDGRSVVRANVWTGRLVHASVLLAALTGKVGDDAGFNHSSIEIERVSRLDVMPDLDSDGTIKDYRLITEYPDADSLRPPTTPAAPMPEGGVDPGVSDTIVESDGSSSGLIRPFGTLEYLHWQDVANEYDRFEATTSIPLLCWRDNPLPHSANQPEWRRNDGLVWDDEIAAWRPEGSSPVSYGELRAKWPTDESGAGAWDGDEEKWIDPEDAARLVQEQYDQAFARLLKDLIRLADEWCRYLHGKYKHLYVQDEDADQWSWHGKYPCDDATEHYCITSLRSGIIPILWDRLRRESPMPGDGFDFPDPRSMRNGKKPWVTMLDRDQPTTAWCPKCGRRTKHDTSERTFHCQWCGYEAQRDKHAARNMIILGKNPIPRTALKHGYGRPMGNYQYKPEDQQGRATGPSLSDLGSLVALHIGNGDDDGNGDDEDWDF

SEQ ID NO: 2002 - protein, 200 aa, unidentified
  REGION 1..200: note = Table 20
MGNSRCGYNNDFLSFIETGDNEGYLAINFEYISALPWIQSYQKVIGESLPFEEVQQALSKEGINAFNLPDDDQFKAKIEQISQAALTDQGIGVISLKRNSEGKWERTNSPADRRIYGISGLKDGRYLPKFRAKPLTRTHQCPYCQTVLDRDHNAAINILNKGWGDDRAHLKVPQGMRKHTLEESWCLCQGGEIPSAKPSR

SEQ ID NO: 2003 - protein, 393 aa, unidentified
  REGION 1..393: note = Table 20
MAPSPARRAAGRYLGRLRSGAGNRAAAPSRAGGHGDRRRPQRRPVRAGSGGPDAARGPVCGRHLLRPSGRLDAAQGGGSRRTGPPGRPAHLGRGGRVSRRSCSAGTRHRLLPPDAPHPATGRWRRLRARCLCGGPARDRLPRRWPASGRTRGLARRGRRRVGGDPEVRRGRRWPTGCRTGARRLRVGGGKGAVLHDAVGRARPGNRPPALSGVVPPPRSRSRPASERRCPRAWGGSRRGSGRRRRSSRVASAARTDAAGPKFASRACRRGRPASGATSTIARPWASPAASASAEEPGRNVRQKAGLNGAILNARWHQFATILSYKIEERGGQVATVPARFTSQTCAACGVVDARSRGSQARCRLEGTSRFPKIPVVHGGEDVRVLSSLDARGS

SEQ ID NO: 2004 - protein, 249 aa, unidentified
  REGION 1..249: note = Table 20
MKYIIVNTSGSILLYNDSLPQTNPYSTVPRELTHNLNLWRPDSDAIAYGIDAAAPDGYQWVDLRSAWLTLTPRDFDSATHGVMWVHWERTTRFCPACGTPLLRSEELTKHCPQCGKDYYPNIAPAIIVRVDKGEKTLLARAALRPNFFGLISGFVEGGETFEQCVVRELREETGIEISNLTYFGSQSWPFPSGIMIGFTADYAGGEIKLGDGELLEADFYTRQEVLRMNIPKPFSISRHLIDQWLNKQA

SEQ ID NO: 2005 - protein, 259 aa, unidentified
  REGION 1..259: note = Table 20
MTYWFIFSDRQLLLAADGDKLGIPLTDTMPLPVAEGTIVHDIGTIDGHDCKAYCTTCADLGGLERCDLRASYFKIEKRLYDKAGAARELVHWDLTSRYCPACGTPTRRTQRIGKVCPKCGHELFPSISPAIIVLIERGDAVLMVHARNFRGTFRGLIAGYVEPGESLEDCLRREVMEETGLTIKNVRYFGSQPWPYPSVIMVGFTAEYESGELRLQEEELDAGRFFTIDTLPELPQKLSLARRLIDWWIEKQGKTAGKA

SEQ ID NO: 2006 - protein, 297 aa, unidentified
  REGION 1..297: note = Table 20
MTTTLSKRLTLTSLFYCINKTVFITSQFEEYRKKKMSQTAQSWWFVFYKDELLLEKKENGTFALPYGEIPPVFMIEKTTVHDVTTLEGSNCKAFSLARPIEESAKYVLIGLRASYECLPVAHYQAAGKAHEILHWDRNSRFCSACGTPMEQKESIMKKCPNCGREVYPAISTAILVLVRKGDSILLVHARNFKGSFNSLVAGFLETGETLEECVVREVKEETGLDVKNITYFGNQPWPYPSGLMVGFIADYAGGEITLQDEELSSGDFYTRDHLPELPRKLSLARKMIDWWLDCSNK

SEQ ID NO: 2007 - protein, 290 aa, unidentified
  REGION 1..290: note = Table 20
MTFSLVKEKNKHKHMKQYYFIFCKSDLLLEVLPDGTYTIPYHSESPIQTKAWTHVMNISPMDDGIEVKTFKINNPSEIEDITKGYLQEGHSFEMCPLRQSYYKISKDLYNKAGKCFELIYWDQNSQFCGVCGAPMKMHTDISKRCTNCGKEIWPLLGTAVIVLIHKGNEVLLVRAKNFRSDFYGLVAGFVETGETLEHAVHREVMEETGLNIGNLKYFGSQAWPYPCGLMVGYNADYISGDIHIQKEELARASWFTKDNLPKIPEKLSIARQILDDWITNGPGHSSEIIK

SEQ ID NO: 2008 - protein, 274 aa, unidentified
  REGION 1..274: note = Table 20
MTTFAFHRRYPPAQPAAGPAQWLVFHATDVLARADTPPTLLPGTTQQPRDVAVESAFFLGMREDTPVMVGTLPAEYPLPPGWRVLNLRAALGLAEAEIASLLGYAAQLIYWQRTSRFCASCATPMLANDSWGKKCPNCGYAIYPPVSPATIVLIHDGERILLTTKDGWGKRYGLVAGFVEPGESFEACVAREVHEEVGVDLTDIRYIASQPWPFPHQIMVGFMACYAGGEIVIDTNELVGAGWFTRDALPELPPPFSIARQLIERWLRDGAPEP

SEQ ID NO: 2009 - protein, 276 aa, unidentified
  REGION 1..276: note = Table 20
MIQDISPKKLLNSYSNKSVNANSLIVIFKNKKIMLRMNTDNKTIVFPTAKELGINQNYTYLFSIDNEDFFFVDVSDVLIPNYYDFYDMRELRKEYFYPKHYIFAAYTAYHLMDWYETTKYCGRCGAINENSLKERARVCPSCGNIVYPRINPAVIVGIINGDKLLLTKYRTGFTYNALVAGFTEIGESLEETVKREVQEETGLRVKNIRYYKSQPWGIACDILMGFFCDVEGDDIIKMDKEELKYAQWVPRKQIELQPLEYSLTNEMMKVFKEDLV

SEQ ID NO: 2010 - protein, 271 aa, unidentified
  REGION 1..271: note = Table 20
MDIKVSEKIPKDAYWFLFHNDELLVKEGEGNTTIPLTCDIKLLVSQPADVQSIGIFHEHECFIATISNDNLLSGFSFKKVRPLYGYLEDKYFWVACRAFHIINWMKTSKFCGCCGSSMTILSHEIAMKCSNCGHLVYPRISPAIIVAVIKENQILLARSKRFPPNRYSVIAGFVEPGETVEECVKRELREEVGIEVEQINYFGSQPWSFPDSLMIAFTAKALTHEITIDNNEIVAADWFTPHNLPDLPDKPSIGRQLIDWFTEKYKHTSIT

SEQ ID NO: 2011 - protein, 284 aa, unidentified
  REGION 1..284: note = Table 20
MNTSFVPQITPPETLEEPAYWFIFSGSKLLVHQKSDTVQVPRLWDLSELGVTAVRQQYLGYLEGSKPIHCYTVGVPEKSEAPAGMAFMGLRQLFGLLDETCIYLAGRAFQIIDWDRTSQYCGQCGAPNTQLTHERAKKCLHCGHIKYPRISPAIIVRVARHDADGDRILLANGRRFRSSKTYSVLAGFVEPGETLEECVRREICEEVGITVKNIRYFGSQPWPFPDSLMIAFTADYDSGEITLEETEIVDANWFRPGELPDVPPPISIARRLIDNFVAQTEQQK

SEQ ID NO: 2012 - protein, 449 aa, unidentified
  REGION 1..449: note = Table 20
MPILSMIENPISKSSWDENCQLWPHYLEALRFLLSDLEARTSILVAEGKSYPRPPRKFSLAPIYGFKPHHIMLDERGCRDLHSLHVQLGNRRIPAEELHIRQIFNVRAVENLSEAKQFAGTLTTNGLKVCIQKIMRIPRVDNSSGDGPSFESVELNDNTIVVAMDPNKPGGTVAGGPVSESGVKPSYCFDVSRNEYYHSTGLRASARRLKRYLKTGGWEAMQSSLPTAKTTNYRDALKRLEQFSLVARELLVAYRDSSCTQDNWNFSVARNRVLHRFARRISHLGQRDEKGQDFDFVRNSNRVRRRRKSSHREPVQEPERRDIVFVTSDLSAPERQGISGTTMLLKLLCSILHKGDGNRSYVRAVVNVGEDRTSQECNNCHHHGVPTVLTDVHIDGKKIWRIKRCAQCQTYWNRDICAALNIRSVWLFGNSHNGMRPGNFVRGYRGHPA

SEQ ID NO: 2013 - protein, 870 aa, unidentified
  REGION 1..870: note = Table 20
MCEDARREGQGLQPHCATCCRLRKTELVEDDMYAAICAVSVCDLTEQGRKRGRPSKRDQHPEDDLFRHVYEEHFPRDEEAAGARVNRSGLTPFLPPLSKGMFTNVNNHYGANFAAWLARSFRCRIDNELRELRTPATEKLDKLAWSMAHAVLNDGELEQPRCWAGWAQGAAAQVAGAAAAAAAQGAGPAGVAAAAQAAGAAAAAAAQGAGPAGGAAAAQVAGAAAAAAAQGAGPAGGAAAAQAAGAAAAAAAQGAGPAGGAAAAQAAGAAAAAAAQGAGPAGGAAAAQAWTALIDYVNAQRASKRAAELLLREVKGAQATYKKASTRHMEWAAEILAGLEARRDQLGAQVQQLTQAQPLTREDTQRLASLRRELHRARPFTLTPSPSFAPIYVPLDNTSMARLPGLLPTLARRHGEVFAGAGAGAVAPSSFVQAVFGGGGMQSPATLNAVGWGLFQLGGVTSRNAPFANYITTDGVACSVAREAHNKPLANLKPATAPADAEELCTLEEMKATQIIGVDPCGGGNWFMAARSPLYQPGPWAWEGVREGVSPAQRSLLELHDKQLDEELFPGQLPPEPRRRRKGVRRKGGGRKGGHRRKQSKHWQPRARTARRRRQKRGRFLMSMGHWRHMSGLERLQPNRPQLAPALQAYVGGIPTAATASAARFEERMRYLFASGAAGQAAGQAEAAGPAEAGPRGAVHVLWHYHFSAFRRKRWAAFIQRDRALHRVAKQLTGGRPKEEVVVGWGSWAFQGGKGGSPISVRGGRAPTGRLIKLLRERYAKHVFIIDEYKTSKTCYNCGCQEMAIKRLGGLKEGQRPWSVKVCNDCLTTWNRDVSAANVIRVLLLLKLMGFERPTKLQRPPWPPAAAGPG

SEQ ID NO: 2014 - protein, 668 aa, unidentified
  REGION 1..668: note = Table 20
MKRSAAAWQALVAGAAAAVGVSFFLQLMRRLGLRAKSGLTPYGTPLPRVAHRRLEPVKPGRLIVVGDLHGTPELFTLLERLSFRPSHDNLVLVGDLVNKGPASLRLLEALPGLGAVAVRGNHDDAALAAWLAWRQKGQPLPSKFEWSRDMSPAQADLLAQLPFTLAVPQYGVAVVHAGLVPGVPLKQQKLWACYKMRNLVPHPHGDGGGGGGGGGSTSGSGGADPATATSASTSTSTSAGTLTATASSTVTGHAPGARYTAVEKAKEGGQAWAPLWPGAEPPAQHVFFGHDAKRRLQLAPHATGLDTGCVYGGELTAAVLPPLGELVASSPGFVAAMRHGRPLTREDLRVQLVSVPAARVYSAPDGHADTAAAGAATAAAAGASAGSGSGSSSGGMAKEAGRVGAASGAGVELVHPASRGAAGQAAGQAAGQAAGQAAGQAAGQAAGQAAGQAAGQAAGQAAGQAAGQAAGQAAGQAAGQAAGQAAGQAEAGPRGAVHVLWHYHFSAFRRKRWAAFIQRDRALHRVAKQLTGGRPKEEVVVGWGSWAFQGGKGGSPISVRGGRAPTGRLIKLLRERYAKHVFIIDEYKTSKTCYNCGCQEMAIKRLGGLKEGQRPWSVKVCNDCLTTWNRDVSAANVIRVLLLLKLMGFERPIKLQRPPWPPAAAGPG

SEQ ID NO: 2015 - protein, 1675 aa, unidentified
  REGION 1..1675: note = Table 20
MQRADEKIIWVWRQPPPGKELYVSLGPDPFDPPAPDGPSLAGRGHGEGEEEPALPPPPPLPPTRGFSIPITVTAKMLRGGYLRVHSAFAADAGLADGVDPPPLLPFRDASDDHSEGSFVEAALSVTPAGPGGKAVCQLLGLGEWMAARGMAEGDVVRVAFRPLADFSLALVESAAALSQPEPGPPPLLEHGQRFDQQEPPAPLQRGDEGDNGGIEEEEGGGEPGVEGNAGGPWESGAEAGNEPGGEGDDDELVDEDDGDEDEEAEVEAEGGEEGSEGRSDDPAEELSLLDRLPRPQQAPLPRPSPGGTRPVPAPGVALRRTLAGTGTGAGCAKEPGVPIELRLRVSKSALATAFPPHLSVSRATASSFFGIRNVKHVEHGHYVPLAATASAWTGPEDDELKPAVRLEGAKLVAYHTKKRPHPAWRLTLPRRWFEPCRAELEDGLVLKRLPEERGGWAFGARLEKQEAGGGSAAAAAAGAGSGAGKPAAPVPKSGSKQPRPAERRQAGNGGGKGPGSGPVGTPMPRPLSPKARPAFNPLLKRRKLAAAAEPGAPAAAAQPKPARLAEPPWFDPHSGKVLPATEASNSYCIATVLMSGPGGVFEGLLRELVATDGAPLEITITRPGSKQQWTVTVTPLRNSGRMLRISCMRGLGAEEGDVLVFEPDPSRAKGGHAFLLHLVKPGGPPPQLRQAARVQAEPVSPKSPKASAKLRMPVSEVLPPAPAKRPPPPPPEPPAKPPPPPPEPPTAPPPSEPPLQPPSPLPAQARAAAAEAPAAAKPAAAANAAPVAAAEPGPKPLLICGLTFHPGLGPSARQAVAEWRARVEESGGLAACSPASRQVRVPGVDDTADGGMPAADAAAAALAAFERHGLRRPILASRVTRHLGIDVDWAATLPGKGPEPLARSLVGPGPDPERGGAGLFARAAIKPSWVLGVVGGYVMPRRAAEAVVASSAWTDAPKLTAALSALRSGADPGWGAVLCGPFRRRLPDAGVDEQEALVMLSYGPDAVLVARAAHLPVEANQLPAPPAAGPQAESQEGATAEPSCLVLPVLVRGLLLPVLAASRAVAEGEQLRLPPRPATSSQPLAHTSRPAEEPQPSPGPSAVRIGRDRGRSEAQQQQRPGSGAEGSKREEKKARRKERSRSPKRRRRSRSRSPGRDRERERRRSPARDRSPRPGRPDERRDERRRSPSPQRWRGERGGSPRPAGVWGSARQRHRSPSPPRPTRSDAGRPGVNRERRAPAGAPASREPHSGRHPNRSPSPRPRRWHSPGAEDRQLRDRSAHQQGRGGPAGHQAEAAPAVAQGRSQEQGQQHQSAEARRSGDGRPAAGLDMPRQQQQQPPNPFAALPQSYSWSPSAQHPSPSDGLTTAGGSGPGRFGGGGVAGRFGCGRGRGAGGAGRGFSLLPGPMSGAVEDMLQTSTPVVVTTPCTPMSAVPSMPSSQSDADVQPQPQLWGTQALGATAASDEAGGSSGAGGASVAAEGKDMERLPPPPPPLPARGSDRALFDALLGGASRSGHLPPAAAALGSAGFGLLPGGGSSGSGSEGWHTASGGGLPGLGVVDVLWHYHTSAFRRKRWAAFIQRDRALHRVAQQLTHGRRQEEVVTCYNCGHQDMVLRNGLVGLRMGQRAWSVKDCNSCFTTWNRDVSAANVIRILLLLKLLGFSRPAALERPPAVDPG

SEQ ID NO: 2016 - protein, 1898 aa, unidentified
  REGION 1..1898: note = Table 20
MALPPGNAFSSEPAAWGPAWPLLLSTSSRADYFPTHTSKLGLRIHDLSCGMYEAEAEAQELVAAGLAEVTAASLSSSSAELCTYDDLGLDDDVSPFLGGCGFGYAEGARGDEEARRCVAAAVRALVAGSSAFVLLAAQGAAHPEAVRASVQLVVTAACPEDQRPGWQTDLASTVAKRAPGWHLAGVSVRRGSLIVHLDLVYLPPGATAQPQHDPGFLPADASGADPVPGAASGSHGLGPPAERPAMARALGSPPMPLLARAQASNVSPFGDGGWGSGLPSPGSTEGLERLWTGPVAAATSAGPASLDPAAVLGDAGEHSSERSGVSGPGAVQSLVTFLHGLGAAGVVEALGLPQRRLVAQGDVISVQYEDTMLLYDDAAESATAAAGEAGAVAAITASQLREGGEDGSVEAASPLQIGRTAFQIEEAGEGAPMPVPTAAADAAPAVAMSAAGPSPGAGRARAGAGSALQPRLEDGVEPAATAASAAELAPSRLIPAGASARDIHGAGSLRLRETGPSKAGPSYSRSDSAAAPASAATADAPQQHAAPLSSAPLLATAVLALLASVVCAGAWGPGGYAAALVVGALLLAGGLAAAAQFRRAAAAGSMRTPTDAAVCPGRGGVEEESAEVVTPRTASLLFHDDSALDHPASPRPQPHCDSPFTAPAAGAESFTLSTPASARALAPASTLNDARESAFRGAATPSISSLVPGESSVGSVVVNALLPDPWDVHVDGCALVLGRSPHARHTRSTLRLGFTCASGAVLDELKVVLRHVSPSSMATGVQGSSEAQGVTVTRRLTAAASPAASAAGGAPAAHAQTTSPPLRCAADLRMWAAPGDTPGLVFVELWRGRRRLSSQPVLLAGEEDWEEDGDETPGLGASEGAGTAAATAPATPTGPGGVSAGLSYALAWAEDVESYAAALEAEGQGQAARQFVEDLGSWLAQVAALDQGLMTPAADEAARGLAAAGAVTRVLHLRNRLAPGAGPVCAAPLPVASPRWRAPAAAPRRAASAPRAPGAAPFTGRPRRASTCVPGPSDGIGMDAGGLAASLRQLLLASGRVLLAVAVEAGCVALATMLQGLLAERPLAAGAAGALEGAATPVTCLPLLHAAVKSGRPEMVDLVASWYDGAGVQVMWAQEALVRAVALDAPGSGAPAGAIGGLLDASYTLGPQPGASQQSEGTAGLPPPSFAEFLSVAADGPQGRPGAGGEAATPEGTGGGSKKRAEPAAVMKRERLTGSFQLGTPRLAFSAVRDAVTRQPQPPSHGRPRESTFHGAAGPVAAVAMAAVPSSAQAAALLVGTDASAPPRWPFRVVSLRPSVQPGRPTNATAPVGVLLAEDAQVAATSSPGPFSSFVPHIPRTDLVEPGPADGATAVALLPLQPTTLELFASQPHASLVSRTSQTGAATATSPSNIPSSARATDMGSTALPPPGRSHHHILGSGADASACGNLAGAPGHVALADVPRAPLTAAAGSVSGYSAVGPAGGASIGCGLLDGGLLLLTPLHVALALDDEGRIATHVLSRYPEALSLFQASVSSAASALSSHHLATGPGFSWSCALASAAGAMASSVSHTTLVLGLAGAGSSHGNGATVFPMPTANTPRGTASAPTAPSPAAAGGLASAGSSIGAGTGAGAGGAARSGLGPYGSGSSAAHAAVLGCHSTASSVVSGVSLARLRPSGVSVGRRSTAGAGGGAGVEAAAAPGRSGAGAGAGPEAGRVGAGLASGGANARGVVGGGGVGRLLAATSILAENSGAWGEFGEVPGARTSTALGSARSVTGDAWEAAVKPGVVQEESQEGLCSEERGGSVVQSLTLGEQAFLDGLRWVEDETCYNCGHQDMVLRNGLAGLRDGQRAWSVKDCNSCFTTWNRDVSAANVIRILLLLKLLGFSRPAALERPPAVDPG

SEQ ID NO: 2017 - protein, 1162 aa, unidentified
  REGION 1..1162: note = Table 20
MSTSNTLPTIAVQAFHSMISARAATSMRTALKKEEVKKTDGELITEDDVENVKSSDAVKKACKTAKDQLEGEKQRAPRGLYDKMDEIRGLSEGATSKEISNKKKLKGPVLEALAKVNVQSEFMEAIKRFTINDWNETTFNDSKHDICHRTVSCPFNSIIREDLKNKNDILARLQTMAIDCTDLYDNMCTIMHINMLRYAALDDNGTCISIKELVPRGLDNTMFDRDDVKVTTYPESPQADTKLLFTMQHLQYLYANHFGMKGSREGTHTKYPIWKTIMGEVTKKQNSIKSYTAHEVIQQLATNISNMYNDGKLIRKLLENLLKVLLDIHLPADDDDDIDITNIAAEYSTQAHADVVVPSAVSDPDASPAYTTIPSSTLVVPVILPSMLLPADEQHIALPEPMSVKDEVQTAVVLCPEEDQRAVPASSPTSRRRRRQRIRDTLRSKKHEKSKLEEQEKKSGSLSESKIKRMEAVRDRVEALEGEFEKFRIEAEARKQQSAAGTIVSNEAEQVSKPTKKRVSVFRYGLGDTKARRTKVKGFLKKILMQKNEVDRAEFGSLWDGKSLSTHEMAVIVKIYHSLRPLLRHVYNTNCAIASQIPFCHLANRVLIATGNQKQTRALTPFPAVASIHSLPITPTTLLEILGDMVPNPDSITIAKAKDHKEEVMGLLFATDKVKDVCKDRRLQPAHRITMTNHGLARILGTVEDVSRLAPTYKPTSQPKPLLSLSKQEIADEISNNNDDLKRQSKEIEEKREAYASLLSQWEKKRMDLGNHFNPNDDDCVRAQKAVKELKQQLHDMQFDICRRDEEMRVQKKKISTLNTASNASAKSREKKKDREDEKIVLTADNMRCLAPSHTVDISQLQDEGKQLGFVGVDYGFHTLSTSVAMIEEHVSAHLDLVSPYKESTTKDTAFHALVKPITTKSHTIAHQTGELRRRRRLEAKKNESSNVFTAEAEIAKAPIAMTINERDIQHAKEVRDAHKDTLRRFYHSKSMTREKRQQEYRVQKWKDRVLSFERKCMKKALTQEAKKAGTPLSSAIFMIGGSGMGYGSTIKGFIRYGGKWLRIKHSYHWPVLVVDEYRTSQVCAFCGWQIQRPRTANKKKSQGGCLCINPRCVSFFNGRAASGRDTMAATNISVKGVASTQGRIINGMERNIGSFLLASKL

SEQ ID NO: 2018 - protein, 1345 aa, unidentified
  REGION 1..1345: note = Table 20
MDSIEITPDKDWLAKAPKPPPRGPDAENRFLLAHTHPFASCANENATKALRNLLQFGLIAEPTGGSSLAHYIADTILNYALRKNALKEDTASPFKFQLKLDSGHQELAIPTRSRLMLLYLSQLLNVSIYMFSARSKSTCFKNSSATTSIAFFHRIDSFYGVSEYLVLAPSPHIPVVKDVPLPKNPPVFTSSTSAATFRQVKRPQQKRALEDVSKVEDDTCRKIFKRACVDSIEDLIQSAVAPIFKKKKFNNGETKEQLLADSKAQLDKKFSGKERVPRGIMEKAVGVARSEYNLNSNFTFQDLQKKLGDPKDNIKLWKEAVRSDFSRAWAGAMLRSKEGGPNKTTEAGIAIEELEDKSDEEDSEGEYEEEDEEESDDKELIKTCSTTLRNILRPDLQGQPEPNGQDDEMDLEDYHDRVVSILVKRQTELTDVIAELSTLTHKTILVIASGELYDESLGPRSTSSFDVRGLLPSGFKFRCNVKPIINMAPIPIHLQDHLETSIEHGKDDLTQILSQDHLQFMHTSFLSAKEKVDKGKHPLWQRAANFIKENGAINPPASPVGLSHTVTEQIRQFSTAVNNIWEGSIFNKSMEYLLRILLRLHLAPVREEKFKQKVRLNKEKKKHRVESTRTVSRSLRKRKVKLLCDELADIQQSSRDDKSERMQAIMKKLMELNSVEPTATSATDNPIPCLEEQPRQFIEADSATAGDNEASDTSECLLQHQSALVPGVLIQDDFEDFDEDFDFDFNDDFEYPNDNEYNQTAHESSRSRLRALQCVLRTLIESPHINEHINVNWVKKSSYYDSNFTDKECEVVADLANALRPYIPRKRPSTDSPNLQNSISHVTLRAPLAIITNTILRATGYSHFTRRMTPQISPASLHGLALGPVGIYEVLCHRSENHFDVRDMCGSMVTDYRKITLHSQNRKAILGSFFDLNKIKEICKAHGLTFRDRITFVDRYTIQLTGTVIPNGPDRSGAPVRSELEHRKKLKIKAPSSNRWHEEFLKSRLGKDTVLQEVKVAVEAVKFAEKEIKGPRKDMREKEQTQNLQSIRVKNQEPNSYIDLCKAREKVRDGRKALLPLEANLRQLRQRSYYWRNMEKAARSKYNSNSARKSRGSTSFTTPTWDHPTVEDITDKLDISYLQTNTQGKNRMIVYAGTDYGLRTMSETVVQTHHQIETHINRYHVLFGNAGTCVGSRLGGHARRGGLKMRAEHLKHTTVAITDEYRTSQTCVYCFEQVRQARSRRLVDGRVKTVSVHGTVECINPDCISFKCGYSIKPRDAHAAVAIAISGASRLFDSDRMPLPPFSRGFKLRDTITTNNTSSILETSSSQDQYRSHESTDVEALDYRL

SEQ ID NO: 2019 - protein, 631 aa, unidentified
  REGION 1..631: note = Table 20
MVSEGSDRESVPATTAEPGDQFGETPEGSEHEGSERDSTYGALVQARQTLNPKRMELLNKESALQQCRQKRYYWNKVAKAAGSNRTRSVSQATDTVPTWKTPMAEDRTPNLNINKLVQKSNGSNKVVVFAGTDYGIRRMSETVVLTHGQIQAHVNRYWALYSDDDAEDDGSGADEPTVDDDDMPEYDDDDDMPEYDDDDDMPEYDDNDVPEDDNDVPEDDNDVPEDDDDMPEASVSPQGSITDAHIHVTPLRSFRMSAPMVNEVSHTRKISRLRERRLNKDNNVQQSLEIISRREHSLNTARDIDNINVAHAARSDERTTWQEFENSTPRLKQLHTQRLRSKRTWAKLCAAERRHVRQHVMNQTQGDSQLATPTTMDPSSATTGTTSTASPSTAAGLRTTQSTVSAVDGWCTQCSVHHIPNEPEAKTFQHASQCPKTLPEQRPVLLIGEAGTGVGSRIGGHQRRGGGKMREQHRRYCTVGMTNEFRTSKTCIYCFCQVRQARARRLVNGKVKSVRIHDAIECINPECPSVMQGYTVKPRDAHAAAAIAIAGASTLLDPSRKTLPPFSRNTIPPSRNATIYQLQSSTGSLVKLSTGKSPVMRAPCGYKDQTTAATARDTKVLLILGILIVQE

SEQ ID NO: 2020 - protein, 501 aa, unidentified
  REGION 1..501: note = Table 20
MDKKAIGDKAEDFKNQKKQLEARVKDPRKRLGILRAAQTIARRDSNRTGTKVAYIALQEARRAVRNAREEIKPMERDLARVRKEYYLWNKLEQLGMSSQDVHLSSSTAQMTTPTWQHPTVEDDVDHMNIEIIMKESQESNRAVVYSGTDYGVVKMSETVPVTQQRLEDHLQYFKRANDPTVEVPRRVSHVPESSKITAEQINSISHSRRMQRRREKRLTGDEAIKNAFETISQKQNSLALATTLKEISNAHAARRGVRDIVRPFEMSRPRTKDMHTQRLRTERSWRKLGSAERRHIQDAVFKEAQDRARSSHSSGTTNTNLPSPDPPASVVSAVDGWCTLCSMHHTPNRPEDKMFAHMRECSKQATDVLPVMLIGDAGTGVGSRIGGHSRRGGKKLRQEHMKHCVAVLTDEYKTSKTCCYCFEPVEQARGRRMIHGQDKMVKVHGTLECTNRACPSVQIGYTMKSRDPHAALAIALAGAPSLRSPTRQRLSPFSRYAIEHQ

SEQ ID NO: 2021 - protein, 1008 aa, unidentified
  REGION 1..1008: note = Table 20
MDASVQNATPDEMLVETSGDIDADDEDQSCDSNVKEEQSDNTQVEEDQAVKGKELRTCTATLGQLLGDDRPNIERLLDTKQEALFDFKDEMGCAAFKVTLAVCQGLLHEDKRTLDLREVFPPFFQFRDKYFQESPVILAGAVTDDLCRYVTEGLRQGGRHTDALGMLRQGFLQYMAARVFGTKSITSATSEALHPTWDKCIAAIQDTADNTPGSSTSTSIANTTLDPPLLAHQAPTGLSTTLNALHREQITDISNLWEGGLYTKLRNSTLRYCLKLWLRLAAEQRYRNSRANYAQQKQEKLEKKADKKKELSHNTKNWKRRSIQLFDQLDHTIAKHHLESWTTPHIAKVLNLIDIHEQQRPIKPTASTTRLLTYVDKYTIRLTGYVNKDRAHPPVRSKYEEKRKKHKAHPSAIQWEQERQELGLSTVEAKNMAESKKKAVESKTKELNPLKKRLTSLEQALSKAVEVHEACGKDDTKERLRLYGFVQDARAAICEIRPPVLELERSIRTLKQETHYLNSYTRSDKTNNNSSNTTNNNNGSSNSNVQDVEQQRFSEPSFSEPAMQDFVESTSIDRIQGECTHINKQLGPSATDRGLSKMHVTVPVKWNTLLALRNRFDVLSDESAGESDPVEGVQDSMDEPSPSPSRKDLVQSIKFAEANVISARHMQQISGVQKATSRREKRLRQPKSEKVRDAHAALAGSSLHNTQTLEEIEAAQEVRRKERKHLRAFEMSAVAKKERYLVEMATKRAWAVVAADERRHIKGHINAPSPPLDILRTEYQEPNHSEEGSGAPSSGIQGSSNPSSNEPVQGSQQGTVNQDNGFCSDCSKHHLPDFSRTGLAYPTSCPSNELPFVPVLFVGTAGVCNGGRLGGHLKYGGNRVIEQHMCSSPVCMIDEQNTSKVCPFCFQHMRLARATKIVDGQRRSVRVNRAVECVNPSCLSFQLGYTKRARDSNASMNIALNGLLSSPRPTVKSFLLTKETSDQPSPPLMPLASILALKTLSLLQLRSW

SEQ ID NO: 2022 - protein, 422 aa, unidentified
  REGION 1..422: note = Table 20
MSRTDIANMAAVFNRHKSRLEKEVKALKRVLVSRRINRTMARRDLNLHKGDTAKYRALVDARKEVRTALSALSPKLKQQRYVQQQCYYWNVLDKTRSTGTKSSTSSSTSTTKKETIPTWDHFTVEDDLEHTDLSNLTADVEHCIVYSGTDYGLCKMSETIALTQSQLDAHLYYYHKSAEMLNEVSHLRRMGKRREKRLRLADDSVKDAFKVLSEKTSSLTTATTIAEINLAHDTRKGVREAVRAFEMSKFRQKDRHTARLRKARAYKKLDAAERRHIQEAKEDNAQTVLPIMFVGDAGTCVGSRLKGHAKWGGKKLRRVHMASCPVILTDEYRTSKTCSYCYEEVELATARRIVHGVEKMVRVHGAVECTNDKCPSFKIGYTTKPRDPHAALAIALSGSYNQRYNKPFPPCSRAPLSDRIIM

SEQ ID NO: 2023 - protein, 709 aa, unidentified
  REGION 1..709: note = Table 20
KEPSRKKLGAMQAILKVLLESDTIQGKITRTWIEKTAFTGTKFTEKEFSVMILLANALRPYVPKRRPGKDGQHSQPPLPHVALRCPIVMIANSVLRATGYSQYARQISPTTFISEIHAFTKCFDPNNKRAVIGAFFDLQKIDAICKSHGLEFRNSLRIRLLGAVIPNGDQRTGHPIRSQLETRKKKERGKSRMNPWVSQLAELGMTKDEVKSMADSTANEIKEVLENLAIPRKERSRKREAQKSARHHHNQNKSAESYDKLRKARLEARDAQRDIIPQEAYLKKLRQHSYAWNKLSTVSLSSSSSGNNPAVPILTTPTWDHPTVEDDVKHMDLSVLQTSCMDTPKTLVFSGSDYGIRKMSQTVALSQNTIFEHLNYYHALSDSTVEIPEEFPHVPKGNTITAGKINNSSFTNKMRTKREQRLRKPENRNVSDALKVISDKDNSLSRATSGNDIDVAHEARKEVRDVLRSFENSSKRQKEKKTQELRTTRTWNKVGAEERRHIKSTVSTSSETESDGFCKDCQVHHIPEDGNCGPAQCPKTTADVLPVMFVGDAGTGVGSRIQGHARRGGKKLRVEHQKHCPVVLTDEYNSSKTCIYCFEQLSKASSRRIVNSHIRTVSVNGALECVNPDCVSFLVGYTIKSRDAHSAVAIALAGASALLPPTNKVLRPFSRHIQLGEILKKPDQKTGTTITAPNIDKNATGAPLLGGGL

SEQ ID NO: 2024 - protein, 1551 aa, unidentified
  REGION 1..1551: note = Table 20
SKNWQQQPNQQHFQQRLGEAFVDPQLNDCRERTEAALSRLLEHGLIVSNNPDARDLGSFIKTHFLGDTSQYELEVSFSTIKNDTSEDTWTLNHLAQELQANIFLFSNRAKPRLYSCSEPKYTCALFHRVDSYFGIGEFLVLTFVNHRTTRMMQRQAVSSTLPSTSSQPAGRQQAAVLRKTKRVKKHSKINPSEEKAAALLRALEEACCKRIHDMVKKKVEETVKLKKHGRPANQRNAVEQAKQALWDDLFEYTRVPYGLMTNAMDIYRGWSTAVDSTPANRLRLEMTQAVAAVVRDVKADEGEGATGKKRKSEDDDDSHVLYFWMSVVGAQFEDIWKQEYEEKLCRGNQARTAAMRNTTTKLRKETHNPAPTLKQILHPDLVKDPETLCRILDLFEQQQEAATDVEDQMYGLAHKATLIIASGALWSEDPEPFDLAALFPEDFNLPEDLRSAPVAPLPKDLQRGIEEATMNSRKDELANLFGQNHLSAMFTHFSPDPHTPDPSSSSSSAPAKPMIETMGTATTSIWTRLSHKIATSSECMPVRGRKGMTHTINAHTRQCATMLHNLWHGSIYSKSLDYLLRFLLRIWLAPLREQSNKDRAAKHAQSKQDIEKERSAKRADRLTPSHWRHSMRKLLDQLADCENKLSQGGEGEGEGHSQEPTACRRAMLLSALVELDRKRPEQGIWDRQPFSTLGQPPLETELESEIELEPDDDDDRDGQADLEKLLNMEQEQSAQVMLDDQASLPRSGPALMDEDMTTPSHSTSPSRSSPNAPSQPPPSGDKPKEPNRKHLRSLQALLRILLESPSPVEQYTLQQVQEAAFEDHDFTAAELSVVKTLANLLRPFTPRRWRTDGEDSYRSHTPHVALRSPLVILANAVSRATGHVGFTRRIAPHVSTGDVHALHLGAMQLFETLCSAGENHFDVNDMYGNSLTNVGNVTSPKGNKDAVFFDIPKISQICQAHGTRFINRMMFKDKDTVHLVGRQLTNDDDNPKRHLVKSGYEQRRKNSPGGNIHDGKWRKEWQQLQQQGLTRSGLEERLSTARQQVQDLKQAIGAPRKETSNLRAKATIAIHAYKTNKDLGQRGRLFAGMKTAQTRRRDASDQLAVIQDRLTKANKTLYFWRKIEAAAKAEARAANKAKAKGKSTTTTTARTTPTWKRPAAEDSPQHLEISNLLSEHSTVVDGKQRLVGFWTDDPGVRVMSENGFQLKQDEDGTAMDIDAPEDDQDDSISAPPVRTPQKNPATRAKAKELRSTRITSKQIDDISFTRKLMKERERALSHSKNQEAKEALLSVSNKDVALSSATSLNQIDSATIRKFNKNRSLTKLKRTQRHRTGRVWAKVASNIRDHAIQNAINSAPTLDPPPKTDPTTGYCAGCHEYESEKIGSAKFHHPASCVKHKPEVRLIGCIGAAGTGVGSRIGGHSRRGGSKLRAEHRQHATVVITDEYMTSKTCPFCFRRTHPARARRLVGQKIKMVSINGAMECTNQHCESFQAGYTIKPRDGQASHNIGTTGGFALLSPKKEAMPAFSPHERQQLAGSSTRIQHLQDDAMGAP

SEQ ID NO: 2025 - protein, 1669 aa, unidentified
  REGION 1..1669: note = Table 20
MNTIMQRIEVPRAWSQPQVAGPAQPTDEEFAQRIEKAAQGLQHTIFDDRLRQMYKSLLAYGLVPLLDTSAPTSSIQTQVAKKVVKLVHIGGVQYQTGHGPLAVKRPELILLKAAHFFRVEIILFSSRKQVHRYRPLVPPLLSIALLSVKDRFASMSELVVLVRSKSRPSHRALIPPPSPPNIPPASKYSPATKREVPRQRVVSRYDHEKDLEAFHLGCIEKIRDDARVAVKKLVNKNAYKKKQPFAKEQEQREVCEGVRTKALNGATLPNGILDRAARHLPGGEGATSSRKKAMQPTDSRVRVERWRDIVRSGVYYDIWKEEWLAHSTDPVIDNPFPPHQPMHNYAKHLCDLQQTIDQVETGEEQAKPTSLRTCSSTFKNVIRPEHVMSGNDMILLQRIESVQSSISSVISEIYTAAHMATLLIARGGAHTQADGPAPQVGFDLRQLVPENFRPESASEWDIAVAPVTLQDLIERNANTGSPDDCYKLLGQESLKFWHTRLLSPGAESAVTPLDTHPVWSLILEEIRASGYEFQLSPSGLTHTIQLHIQQAATCISNLWSGSLYEKSFKYLATNALRLRLAPDRFRKWQSRGRRDASANSNQTAIKKNMGKMPRSQWNYLVAQRMYELAEVGRREDLADETAQSRVQGITLSLQRLKSHEPQVVDEPPLIAKLPVRQAEAMARAAENLDREQHQQRQEQPCEGVHEAPSQHECQPTANDLTLCLDESRAVAMDVDENVAESMSDDESDEDVEDVDVCWVPDDEDDEQIADEFDGYYQPEEKDIEELDKDKEQGDDETVTVESSGAQIRRLFTVVKILVHSPHLKHEVTAEDVRRALLKNMSITDKELSVVRDLTNWLRPFAPKRVQTSTGKYRDHTGHVVTCSAMVVIAQAFLDAIALHTFKRRICPQSHVGSGISLQLSSVVLYELFGTGAAGQFDIQDPAGNIITSAADAASPGNKQAVVASFFNLENMQTICKNHNLEFDDRLIFTNRFSLHLQGNIIPHGPQREGYPAESALERRTRKSHGRSATSWIWKQELDHWRELTHDQIEKAASDSAEISKIKATVLKESKTAHLDPQIINRYERELAQAKREGYYWSKLEKASKKRHDYENCKAPVPIDISWQNHQVEEESARIQLRHLIHEASVDPNKVVSWAGGDPGIRVMLEAVPQTTHEIETHLSRFHALYGHLAGWVKAVQHETGLDLADQNRIRLDLVGWDKADLNKVGLDLVGWDKADLNKVGLVMAGWDKADLNKVGLVMAGWDKADQNKNAQKSAGDSSAVVSPMPPLHQGEQLETIRLPKATRVSARHLQEVSFTRKYLATREKRLAYGKRSSRRRPVSEVNARAAEAKAARQHLQRISSPKNSLLNARTVQEVGRISDIRRRASDPINKVQCTRSLIRLRHTQELQKKRAKTKNCRVHHQPTLRTIRTGMASTSRRLVYVSECPRKKPSSVTVFAYGAAGSGVGSRIGGHVRWGGRWLREQLLRQGVVVVVTDEYCTSKTCTQCFQRLQLQKSRRLKGTNIKVRTVNGGVVCVNPLCPAVRTGYASRPRDSNAALGILLAMASVAGSGQGGPEQGWSGSGGLGQGGPEQYWTGSGGSAPPWPILPYARYVRPSCVPVPTTINTGDHVPDLHENRPEQMGSIPSAIGDTAGSVRLDATEQKTRSAFPLF

SEQ ID NO: 2026 - protein, 739 aa, unidentified
  REGION 1..739: note = Table 20
MEDDDEDPQPDFTQPARDSSARQINRLFVVANTLAHSPYIERDVTKGYVRKNLLRKMEAADRELAAVKEIVNALRPFTPKRVPTEKGHRDPTPHVVLFAPMVLIARHSLVYEALANSSPNKFDVVGPLGSLITSANDAAMPRNHESVLAGFFNMDLIKQLCRDHYIKFGNKLIFVDKNRILLSGKLLPFGWPRGGQQLTSQYEQRLLTYNKGSKVSHVWASERIHWESIGTSHAHVEQAVDQSTKNAKDSAKRLKQIKKDCGPDSQQAFSAKQDLFQLRREQYYWQQIEKVKQDPSKLLAFGGGDPGVRVTLEGQQQTLAEVESHLVRYRTLFGNPYSVLSESEEDVPVNEVEDTDVDREDIKANSKANRMGLDTEKQDLAQIRLPRPHRVKARNLQMVSFTKKLQGERLRRLNMRDKGKRKRETDLSDYDDNGNSDVVFKENKASDAEQAHKSSPKGSRTLQRMESSPALIRMRKSQELRKSRALAKTASSLKKSIADHSLAEFAESTSTPTVDPRTGFCSGCRRYHQPAVHTLRRGPGLSTNQHLAYPATCPKAKPETVTIMAYGTAGSGIGARIGGYLKWGGKWLRHQLLRLDMVVALTDEYNTSQVCVHCFNKLQLARSSRLSGTEIKSVRIHGSVICTNTSYVAVQCSYATRPRDSNAAIGILISYSSIAMRNLVFGDSNQWMPPWPTTPYSRYARPKSLPRKPTNTCDSFQDTKPLSLEQTSAVAAHAGEHET

SEQ ID NO: 2027 - protein, 767 aa, unidentified
  REGION 1..767: note = Table 20
ESSKVTYGPGAHEDLDDVESRAEREQEQIKRKADPSNAKEPSRAHLKSIEAVTRMLLEAPTLDANITIAQVRKSFYKPDKVTEEECQAIIDVVQILREYVPKQQINSKGVSMPPTAHVANSAPVIIIANQLLRVSGYPQFCRRIAPSSSIGPLHPLPLGAASLYETLCASAPGHFDTYNERNTVISSVPKARRNAVALFSSLFDLDKIKSICARRKLTFAHRLTYVDRYTIHVLGDVIQEGDMRGTGAPVRSALDDAKRNKATKRASGTDWSREGAHIGMSQDDARAEAKMAEIELANIERQQQVRRNEYGAAEAARLKAAEEFKLTENTAGAQTGTMERGRAYDQLYRSRRVASDAHQHWASHEAEVKKQRSKVYALNRIAKTKPNPEPPPERRRTEPTWTRPTAEDKTENVFLDRIFAKEGLKTRGTFGFGSDDPGLCTLQVSATMTHGKVSNHIRHYFETANPFGVLEDYDHLGPSIISPSEDVADIPPIHRITAPLLDDLTFSKKHARSREQDLRSSNPVATTARNAHERLSTTPITTTTTLEQIETAQQIRRDVRDACRVFTFSNKRRKQAKTQRIRTSRAYATLAAAQRSKIKKEARLELQTQDMTKDPRKFPSDKADMQEQDHDHVYVLPIILHGAGGSCVGSRLKGHMKRGGRKMNKQNRQYGVVCETDEHRTSQVCSSCFEPIELARATRAEQGQVKHIRLHGAVVCRNRECPRVMAGRGTQGRDSNSAVNIAIAGASSLLSSNKTTLAPFKPFVLPA

SEQ ID NO: 2028 - protein, 1362 aa, unidentified
  REGION 1..1362: note = Table 20
MSEDVQLQHKINEDPEWMRQAPAAIHDPVLATRLRSASTSFAQHNERPTAAFRALANLGLVVDTTQNPLAQYISHTLLNYHFLHQHAQCHPLPTFSLQIGSTTTGDTSRPPPDPSSYHSHIPAAQLRQGLKKGKRKAADYSGVEQEECAQYLKRSCHTHLTSKIEGVVQKAVSRNRFGSLTREEFYNQEKDKTMRQFKAMDSSKGVMKEAISSFKVAHELGDDLLYRNMCTKMGSASDAWRSTVEADFHAAWTKTIESAEKKRLTEADKDNKDKDKDKDKDKDKEELRTCTINMRTVLRPDLHQYYDRICEIVKSSQISITNAIHELSFALRKAVHVMATTDLYAAHLGLPPTPQQPLDIGSLLPAGFVPRNSGAPLTIDVAPLHPGLQEFLVEHVEGPTENDDLALLQDFRFLSFMHTRLLGTMGGNARTDDKYPTWTRIEDTIKDSTTDSGVKPPAGLSHIMNAHVDQLATAHASLWTGSVFDKAMTYSLRVILRLHLAPEREARMQERLKTLRKTKQEQVEASRESRQSRVKTWRWRVSTLCDELEQAIRSGRSPRRVQAILKKLSAIGERDPETLPHRVGFLCIEDELEVKLKEANGEQGAVTIPAPFQASQEISEDTIMTQFRATTTSGPPQHSHDNLKDLDMEDEELLEPMMDIEDLDDLEEEESDQQGLATNPSDNLQTVDTSYPLSSAMVSEDRIQRKDSSARRIRALQSVLKMLLESPKSGAVSPQDVQDAAFKGTRFDNYECAVVANLANQLRPITCVDQYTIHLTGRVIPNGPHRKGFPCHSAYDDEKKKKNKKKGAGSSTGATSSSRPKVEWKADEADAYCNTLEAKLNPMRERLTQLDQQQTEAKREHRRLELKVAKEAASRAACPAGQKLFATPELKQTYGVLKQARSSVAIAREATAPLEMELQNARQSLYDWNKLFNAAKSGAGSASTSEVTLSKATWENPACEDAAEKLDIQDLVTSSRGGKGVLAFGGTDYGIRTMSESCGLSLEAIEEHINIYHALASTPTTPSPIKPSSNSAAVPSWPTSTAHRLPASMKITAKEINDRSFTRRMAKKRERRLGLPCNKNVRDALQSISQPIHAMAPASSLLAIDDAAKAQRAVREKLQEFEHSQARTKDKRTQRIRTKRTWAKKAADERRWIMAQVEQPVSSSDVLEQGWCTAHHRHHIHHRPGKPYAHPEVCPDKRPKIVPILMIGAAGTGVGSRIQGHARRGGGAMRREHRQQVPVAITNEYRTSKTCCNCKSPVKLARSRRIIKGEIRKVSINGAVQCTNRHCPRKPAIKSRDRNACINIAVAGGSRVLTGQTLPPFTRGTRSATLKNTSHSLDKDHNTHRTSVEHASGALGERTGKT

SEQ ID NO: 2029 - protein, 1547 aa, unidentified
  REGION 1..1547: note = Table 20
MEYSFKITAVHDWLQGFPEVPRDPTLDFRVRTAFDHPSTADQREHSRRALNNLARFGLVVDDSVASPASYIVNILQTPRAQPLRLHYGDKLDIPIPYRSLLTLQHLSHMLPCNIFLFSSRSTPIAFTQDSATSTLALFHDVDSFTNKSRYLPLTAAKGMVPGPRPVAEPRATQSLVPAATYRVGKRKAKTIMGRPLEEDEMEENVCRYFRQACLDSLKTQIQKRVVTPVSKKLKSKEGRAVAMEERRDATFDSLVGMERVPRDTFTTSHQRFVLDHQLGATYGLTKFHRDVPRHLGPPVLYWRGIVEKEFGRIWATEIADASTDTSTAAGSTSAGSSSTGVSSAGASSSSTGLSSSVGSSSTSSSAALDPAPASSSTADASMDDPDPNNSSDTSKRDLRTCPATLKQILRTDILPEYDNLVSITRQRQLAMTDILTEVSVVIQKAILLLASGRLNGEIGLPEPITTTFDIRRALPPDFVFRAKIDPLVKVAELPDLLQGALERGHREKKSGPLWDLTKILSPQCISYLYAAFFGASGSYAGSKHPLWDKIIELISELSKVSSLSLSSSPAGLSHTITEHLTLLATAIGNLWDGSVYDRCMDYTFRILLRLRLAPEREAKNKARILQAAQKKREIKKQPKRMSHSQWEMRVRHLCDELAFVLCSPHPKESRIQGIAKQLCDLNAVKPVGAQVHIPPIQEQLDKALIAASAVDSSQTPNPSVAPAPSFPTPQPLDPAVISVESPVGSLPLQEHVALASQDPVDEFSDDIVLSVDDIDALFEDDEDDSSLVMKEPTRARLKALQALLKLLVESPHIEGEINMAWVRRSGFAKDEFTDKECSVVAELANLFRPYTPKRRPAQEGTKTDKPLAHVALRAPFVLIGNAILRASGYPEFTRKIAPQISAGTVHALQLGPVGFYEVFCSENENQYDIQDSSGNPITSVKAVTSPPANKEVVLESFLDMDVVRRICRKHGLKFANRITIVDEFTVQIMGEVLTKNGDIPRHPVTSKYEQRKKNRAGSAGNYWTKEFQRSGLTKAQVYSKAEKCADNVKEQEAVVKQHRAVVAQLVQVQSAASEAEKRERTKQSYEALRTARKNVRQARQVLAPLQEVLRVARREKYYWNKVYKAPVQDNAESPARSAPVRDSVPTWDHPAVEDRAERIDISQLLQNCRGKDRQVVFGATDYGLVTMSETVGFTLPQIQCHLNRYDRLQEPAPPPEPPPAPAPDPVPVPAPGPAPAPAPAPATATAPAPASEPAATLDTFTKLPKSYRMTAGQIDQVSHAKGVAKTRVRRLAKSEAATKAMASVSETRASLSWADTMASIDLAHSIRKEAAGTLRGFELGHARLRDKQRLRLRTGKCWKRVCAAERRHVQGALSTDLPGTPPAVLPIMLIGDAGTCVGSRLKGHSRRGGSKMRAQHRQYCPVAIVDEYRTSRVCFYCFQEMQMARSRRVKGQAIRTVRVHGALECTNHECVAVKGRYCIRPRDTHASAVIGLSGVASLTRPTPLAPFQRSYNPDLHTNHTSAIPGPTILSSTSTLMRGQPPTDSGLV

SEQ ID NO: 2030 - protein, 1323 aa, unidentified
  REGION 1..1323: note = Table 20
MAYDSPSPADTSELLAPSLCLNPDALEDLAPVQPSAQNVLPESFPTLSWSEQSSAENRAAKAEKRLCYRHRPDLRSKRAADEIQLDQLQQDIKRLPQQDQQIISHIWSLFGSAPASHRQLVLSGLLTQCCVPQLSFLSNHLQPLLRIDFLSITPPEIAFRILSYLDATSLCHAAQVCKSWKRLADDDVVWHRMCEQHIGLKCTKCGWGLPLLEKKKARSKRQSEQQQQQPPRNRSQQALQPAQENGLDEHNRQPSHPDRNTATTTPSHPSPPTSTASLSPTEATPPSAWPTRRRSASNDLDNEADRAQKRTRRNSRSPSPSPAISGSKRAAPLFLSPEPPIKPAEVVTKRPWKEIYSERLIVERNWRKRNYRLKSFRGHTDGVMCLQFDESFLITGSYDNTAKVWNIETGECLRTLKGHALCVRALHFDEAKLITGSMDRTLKIWNYHTGQCIRTLQGHTDGVVTLDFDSRILASGSVDATIKIWNFATGECSTLKGHGDLVNKVQIYKKKLLVSASDDTTVKLWDIASRRCLRTFNGHVGRVQCLQTSGDALISIIAERIRKRDGPLAQNRPGPVVPGVPTTVCSINRSGVVENTPPSPLHDPHSDTETRTMMSIIITGGLDNTLKIWDVETGVCLNTLFGHVEGVWSLAFDKLRIVSGSLDRTIKVWDTESGRCLYTLTGHEGPVTCVGLGDTRIVSGSDDGVVYVWDYKAIRDSDNKVLLNLLATSTSSSTGTCYKKHLKRWQAYRDAIASETRTEPDYTVDSVRVDYDLSDDEAVGSGSEDDEELSPGRWQPATPPAGVTETECADMNAVASPSTLLLAGELSCQNALVYLWKRQNATSADFPNPASSPRDDLTLQKAIEDYTTRLVYREATTGESRKTSCSVRDPYTAEQFMRMISLTWRMIPFPQAKGKRKYDSERFPYIREHRHYCPVAIVDEYRTSRVCLYCFQEMQLVRSRRVKGQPIRTVRVHGAVQCTNHDCVAIKGRYAIRPRDTHASAVIGLSGVATLTRPAPLPPFRRSYDPERDTNHTRAIPGPTFVAHIKVDAKATPDSVGFSLVAIPIGAGISFLQYSMYDVQGGHRAVIFDRLEGVKPNPVGEGTHFLVPWLQRAVQFDVRTKPRNISTTTGSKDMQMVTLTLRVLHRPDVKNLSQIYQGLGMDYDERVLPSIGNEVLKSIVAQFDAGELITQRELVSSKIREDLAKRAREFHIELEDVSITTMTFGRDFTNAVEQKQIAQQEAERAKFIVEKAEQEKNASIIRAEGEAHAAEIISASLEKAGAGLIELRRIEASKDIAGTLAHAKNVTYLPNQKGNNMLLNLPV

SEQ ID NO: 2031 - protein, 515 aa, unidentified
  REGION 1..515: note = Table 20
MVDEYLTSQICPRCQTRTTSNEKNSSGLKIHPVLKCSTCDTRWNRDHMATCLAVLSSPDTLYPVKFDPFEHFVSKAQKFANNLVYLVLTLVFTWFILFISFPSFILLAVTLGLVKLYSFHGRFAIRNAAKWYWYECTDNHKEVHESNHVPSNIVYSCYCSSLGVKDAGYIDSDYRDCYCSSLVGEDAGPINSEDNGYCYCSSLEGEDAGAIDPCNEHCYCSMLVEKDAGVLAKGDDVVGVDNIHLPGDTDLRDGHSANDIDLVAGECSADTNLLVQNAEIYGNMNPVILENKFLSPTEKMDDNTVSTVFHPFVVEEKDCGGSDTSFFYFKNTESQASAIRRSRLRVRRFVRSFPGAPRCTRVRPLRFSGSSSSRFSSSLVEYMEVDCFDELEKMEVETSSCESMDIDSFEEMSVSDQELVVGNFGSFSFGYVPTLKEGSFEPVVTGAGSPVISMPLPPSCGVFLKESVPSDVLPVATGKEFETSVSKERGLAPIATTKEENVSSLVNAIISPARP

SEQ ID NO: 2032 - protein, 499 aa, unidentified
  REGION 1..499: note = Table 20
MLYTLLTSYGEQMFDLVCKDGVKISTDATALKRKTDVFGFIFDMDSITSYCSSRKLKFIHRILVRPGLVNCILTGVSLKAISVTTTPISSKQSAVLPNSTEESQSKEKRFKDLKEEITTLNAQLLKKKEAFSLEKIDKEIRKMNKERNGMVDKDDRRMAATLIKAKKGERWRNFNELEVLRQELKALRREEYTCRNSLKYTSRKQHSDDSVDLSTELKETRFSGTDYGLKTMSVTVPISMKMFNTHLNLYNKFHPDSSLPVIKAKEKYLQLPKAFKITAAEINHSSLKNKFQYCIEKQKKNTAIPSIESSLSLLSKEVQPANVMSLKRYFVVAMKERQTLRNFYYGKKISRQRRTLEVKNRTVKDRVISKERKFVLQGSKTLHPVMAIGNQGLGVGSTIRGYDRRGGKWLQRKHERHATTIITDEHMTSQLCIYCYNPLVHPVLGTLRCLNPDCPAFKCGRATNNRDVMSAAAIGISAMTKIILKKDLPPFCPKLSLQL

SEQ ID NO: 2033 - protein, 1132 aa, unidentified
  REGION 1..1132: note = Table 20
MMIYSPDAVDPIKKVMQYSLRAKGLLWQFQNWYQAYILDSVQLLLPCLPYKRQMRPKLSLIPATPLTQIVPGAQPSGASATPSNSTSAVPTYQLNRDILTITDAWRESTAWDSLAKEQERVAFLLLKKCKRRRVEDRTEGVEYNLPVPRSKRRAPAAATLKSNENGSRLLLAKAFRSRLTSIIETHLNQHSESDGASLRNTEEERKRVPLGAFEALDSQHGPYWTGNTAKRLKVNALSLYKSYLQENFDSLFSAVKERLDEGAESEEDEISTQSVEHQVKSIVVPLGHVIRKDLPVELRSTIMEKLSSAVCKYSDFACIFSLVVQLTMTTFAMSGGALLETNTLIPSEFQRDASPVILPAPIRNASSDDADYKALFSFSHLQVVNTLNFGAVGIQQQTRTRHPLWISMHEQVEAGGTSQAGNSSQSTDNDVSSEAQHIFAEAKDFNATIKKSVIAQFSTNLDNMYKNGKRLKNAIEKTLRILLKLHFQPKKERIRRKYINELQTSSDTSHTVVTENSIFSRNKKRSLLNKYRKQLQKYQEKNKTTKADKIARKIEHIKELQWKKKPKRKKAVAKVDNTDQDVETVIEEDDEVNVSGRRLAKLKGILKSLLCNHDAETINKQDIEISDLPKRSFLSQPSSLLYLPLDTTMLYTLLTSYGEQMFDLVCKDGVKISTGATALKRKTDVFGFIFDMDSITSYCNSRKLKFIHRIVVRRSLVNCILIDVSLKTISVTTTPISSKQSAVLPNSTEESQSKEKRLKDLKEEITTLNAQLLKKKEAFSSEKIDKEIRKMKKERNGMVDKDDQVLRQELKALRREEYTCRNVCAKTYYYSLKYTSRKQHSDDSVDLPTELKQTRFSGTDYGLKTMSVTVPISMKMFNTHLNLYNKFHPDNSLPVVKAKEKYLQLPKAFKITAAEINHSSLKNKFQYCIEKQKKNTVIPSIESSLSLLSKEVQPVNVMSLKRYFVAMKERQTLRNFYYGQKISRQRRTLEVKNRTVKDRVTSKERKFVLQGSKTLHPVMAIGNQGLGVGSTIRGYDRRGGKWPQRKHERHATTIITDEHMTSQLCIYCYNPLVHPVLGTSQCLNPDCPAFKCGRATSNRDVMSAAAIGISAMTKIILKKDLPPFCPKFSLQL

SEQ ID NO: 2034 - protein, 690 aa, unidentified
  REGION 1..690: note = Table 20
MSKKWSRGALNERRQAGLDRRMSNLQEKMDFYKKERKQIISSKHSSSVEAQSSTDVSIATDADAAALSDDLDSDGRNVEDHEEPSEADVSARRMRSLQGITMKLLFSEPDVTLQDTSLKKHTQKLQLIDKEVRAMKLVFNTLKPYIPCENAPKCHRLNIILFGNEVLRVAGYDKFTMEACPSVSAGTTYSLSLDAPSVHELLGKHINVKEKGIGSAAQARHQKNDVFACLFNMDKVEQICSKNGIQFIHHIDIHGSGDVSLRGTTMKPRQKSVYEERKLRGMGKTAPGSVPVQESIDELDLCIKNLEKERDVQSKSARIATASLSDLGKNMKDKLTRGYGDERFKQERHDDVKAERILKEQKREAINAKHDILDKLAEKRKMKYLHQKEQSDKSAAKKPAKAMDKQPPPPPTVLTPTTRTEEDPCETEIGTVDLEHTVVSGTDYGIVSFATTVTHSAQQLSTIMKGEFVKLPKATTTTAKDLHWRTGTFHFMKKLQKRKKAARISDPEALLAKNAMTFCTTHDDLLARYAKTQEASAAVQAFYAAPWIGRARRFLDWHTPLVREGMVIQEQRRHKPNQLIRAIGNCGSGVGSRIGGHMRVGGKWHRRVAQRHGVSLIVNEHRTSMTCPFCGSCIMHPKKKGGRLNLGTSACINGSCPSVKISMNTFGRDSLAATCIALRGFGQLVGHPTL

SEQ ID NO: 2035 - protein, 507 aa, unidentified
  REGION 1..507: note = Table 20
MEVTTFQNKPIKAASKALDYKSAVFSSFFDIRAIHSICKSNSPVFAHILRLLPGCKTVRVLGKLRHPSISDAPTASEGTNSSSISAAADRRVALLKAEKESSQRELKQHRKALADFHRSTSIRKLQQDFNHTSEAKNAIKMVKKRTHELEFDIAEARRKIQLKKQKIQALSWVPSNKQPTFVDNNATCYQRAEDSLVKLEDIRGATFCSTDNGLVTVTETVAFSLDDFKYYINLRNYTRNLDSAKAIHLLTFMAADVFRPPPPSFKVNPKNCSHWRGLTDFQKYIKRHKTKELKQTEKRMSEYPLNVSSMAELGDNYTVHQSAAPFLRAFYYSTPMGKRRRRLEFRSKKFKQKLLHRERAFCSKTTPPIMFIGDRGYGTGSYIKKHQRVGGPWQGKLHGSNTKVFVTNEYNSSQTCLYCYRKLSHTYKQKEGKKTLNRGSFICHNPECVGRFRVLPRDRVSAMAIGLAGLSQVLFGVTIPEFDPHPTAAKSKEFNKKAEEFCRTFIV

SEQ ID NO: 2036 - protein, 1079 aa, unidentified
  REGION 1..1079: note = Table 20
MDNALKSQFHDYIFDQIAASTNTTDTFSSLISLKKMPRVVIQAEDSIKADRGTISNYLRGLPQSNISLFVNYAKKNFDDIVEEVEATPSASSAGPSTAPPEPRPSTSTSTSTSTSTSTSTSTSKLIFTEDEDDGDLRGCTASTLSILRQDMLPEAQAHINHTLEQTLARVSDYIVDFSAQVRKLLLLFRDHTFELDQNSVTFPLVAPLSSNALLPTDFLPNDVQLPPHWPSKLLDSKKYEHAFGQLFTLQHFSRIHATYYGQIGTKTASPYHDAMVTALPKTDGNEAASRQLSPHAMRKAYDKFSTNFANMWSGGNRFAGLLDRLLLHLLNAHLVHRAQRERKDKDTAQTPSLQQQTDTQYTFGSKSKGTVKKIIEKEEKNVQRHLNKGNHDKAEECRRRISNYKATQIRETNELRYYASDQGRKAESSTAMSTKGKQKVPSTEIVTLDDAEEPPADESVTKTRIQDLKTLVKKLLQDDKKVSSKSLQSVFPGIKANEMEAVTKIVNTLRPYIPRKGKSGFIYKLPLILLANCLLEAIGKRSATVSISPVSSCVKLQALFIDTETIFSLFVASKGATKAERVMQITTFDDQPIKSASQALDNKSAVFSAFFDITAIHKICQSYHLSFANIIYLLPGCKTVRIMGTRSRLVHDLPPPSLPPEASSTTAAAERRAAVLKAEKEACQRELGEQKQALADFHRQTSIRKLKNEFNNTKEARQAIQTAKEKSHKLEFQVAESRRAIQMKKQEIQALTWVPPKKQPTLVDTDAPCYKRAEDSLLALDDIRNATFSGTDNGLITVTETVAFSLLDFKYHINLHNFTRKLDSAKADVFKPPPPSFKVNPRNCSHWRGLSEFQQFIKRHKSKQLQQVEKRMLEHPLNVSSPVELGDNYTVHHSAAPFLRKFYYSTPIVKRRRRLEFRSKKFKQKLCHRERAFCNKRRPPIMFIGDRGFGIGSTIKKHQRVGGTWKGKLHGSSTKVFVTNEFNSSQTCLYCFHKLSHTYKKKDGKKTINRGSFICHNPECVGRFRVLPRDRVSAMAIGLASLSQVLFGVTIPEFDPHPTATKSKEFNKKAEEFCRTFIV

SEQ ID NO: 2037 - protein, 428 aa, unidentified
  REGION 1..428: note = Table 20
MQISFFNIKRLIAVSSSHGLIFTNRIHILPGLKAVWLYGTLNLNQAFASDQDTKVKSAILAAEKKTLENLLKQQQKKQKEFFLNNSIRQLKKNGKLILIEGKNGTWKTYEARNLSPSSPVSESNKIIFTNDKPNHRKVESYKLHSNLDVCNLTFSGIDNGIVKVTETVAFDIHRFKCHPELYNRFNVLEDQDSDTTEGSISDEFVPSQFLSLPVSMKINPKSVNQGSGLANGNASDLGKAFERSSRSLYIIMDFYFSNANAKRRRRLELTKSRYYHKLAAQERAFTQSKAPIMFIGDRGHGVRSIIKDYQQFGGHWKEKIHGRYTSSLITNEHNSSQTFARDKVIKINNESFICLNNKCHNKYVVMSRDKLSALAIGLAGIAQLLFGGTFLCFNHQSAKEQELQFNNLALAFCTEIACRLALVESQTL

SEQ ID NO: 2038 - protein, 628 aa, unidentified
  REGION 1..628: note = Table 20
MLTTSRTLTFVASNQKKKYEDKGNTRAAERCQVRLDMYREVLARQRDQRGVIYQQQQPAESYDIEEQRLGKLVQVARSALFYNDAISPACIKKKLEQATEKEIDVISRIVVFVKPYIPPKVNYRSSIGRESQVLKITPIVSPTSLRTLVIDTATLFSLFCSKNATSKMYLQDYSGRLIQAKSALYHKDADYGMEFNNRMHIFPGLNTVRISGIVSVMHTKPKTSALAKADNQNMPSDENGHDDETLAKLNKRKTALEKLLRDTTREWKQKPDERQDIGSKRDNLKVETRERITRVRDAREQLQAAKRAIYEYRHPNTAPATNPIIIDSKPSLHKAEDCELSDCVCLTNAVFAGTDNGLIKTTETVFFDIERFALHLELYRYFYISEDPIDTDDIVPSTCLNLPETHTVGPKQIAQQTGLTSYTSSLVSKKKRTTAGHQVMEAEELLSGCSIHQSTTAEELDRIYQEHEQCRESVRSFYYSNKQRKRRRHLELSKKRAHDRIAAAERKASGFKKGGKALVMFAGDRGHGVGSRIKGHQRVGGTWKQEIHGRYTPTVITNEYNSSQTCLFCFRKLSHPLKTIGDKVKTTNGSFICLCVGDWPRWSRQHSLWRYVSLLRSTAMSPQAPAVQ

SEQ ID NO: 2039 - protein, 505 aa, unidentified
  REGION 1..505: note = Table 20
SAFFNINQLKKITSSYGLEFVNRIHILPGLKTIRIYGALDYIQQRQKKPEAINKPIAQDKDEDDTLNALNNRRSILKTLFKERRKELDQFILTDKSVRASKRDWKNKVADRDKYYREAEMTKLKKRELVVGIRDVRQDLQSSKRQIYEYRNPSTPLTSTTSPDPFIINSKSCHKKVEECMLDIDMNLDDVVFSGTDNGIIKTTETVYFDINRFTFHLELYNRFQILEDAMDTDDTYNLECMKLPLSLTIVPKEINQGSGLVSYTKSTVQKKKSTIEGHAVLDEEEKLSNYSLHQCQTVGGLQEAISHHCNAREKLRSFYYSNSQCKQRRRLELKRRRFYDKLGADERKSSSAKRPIMMIGDRGYGIGSCIKKHQRFGGHWKESRHGLYTPTLITNEYNSSQTCLFCYSKLSHPISIVAGKIKTINGSFVCLNQKCPNAFEVVCQDQVSALAIGLAGVAQLLFGVTFPCFDEKSNYINRIKFNDSALDFLYRKQRMGSPLDGGNTL

SEQ ID NO: 2040 - protein, 1067 aa, unidentified
  REGION 1..1067: note = Table 20
MGALYATFKAKLKEAIRQCPDRMNYPELYITLFERTKLPRYTVPDAARRLDIDLRLVESFLRQQVQTTGKQTIAYWKEYVEQHFDECINEVLYVDPQETEANSSDVDDQDDDDGYDETEEFRTCTTSFQTIIKKDLEEEVRHRIEETILNCIRDTTNYTSDFSIQVLKMALVFNTHTFTLRNNTVILEEAQGANLGHVIPIEYLDDAMRVPRPFDAACFRNQAFKKDFDLLFQTGHFNIINSSLYGTKGPTDANLNKHSVHRLISDAIGLAPTEAYHHLPSHVTKMARLQYTTNVKNMWSDKTIINKLLKRLIKCLLCIHLRPTDEKQLQERRLQPRQAAPRSSNSNQGMSFSHKTRNGRRRVINNEKKNLERCKRLNKVDKAARCEERLTMYADVMERERRQKALRRQASSSLEEGVSEDEEDALVADEPESEKTNDTSKRRITQMLNQIRSNLFQNTPLSRSTVGSKIENLSDSEFDAMSIIAGFIKPYIPAQVDYAKLQYQLPFLLMANEILRYMGRSSQCLQILPLVKPTTLHTFLIDAKTLYALFCASTLQQPMILFNFQNEPIQEGMVDSYKDAVLSAFFDIAHLKRLCERHGNQFARRLHIFPALTTVRIYDTVPRLVQHQQPITATDGDPIDEDHHPDLQQQNDAVVRFQHELKDATARLETMLLMSPSVRQLKNDFRGGQASFKTVEDAKTTKRRLMLDVRDAKTNLQIARREVQRLKSMHKFPPTLPPNYQRYMIRQQPCLKKAEECFIDEDFDLQGAIFAGTDNGIVKTTETVYFDIERFLYHLRLFLHFHPSDQNGQPVGAPAMFMDLPATLTIGSKEIKQGSGMFDYMRSMNKKKTPGEQVLAIESTLSANSLFNCSTPNELEETAHLHQRHQQAIRSFYYSNIQCKERRQFEWRKERYYDRLASNERNSSGVKHPIMFIGDRGHGYGSCIKRHLRFGGHWREERHSRYTPTIITNEYNSSQTCLYCFNKLSHPTFAHNNAIKTTKGTFVCLNEDCPNAFVSVCRDQVSALAIGLAGLSQLLFGAAFPCFDEDTNPMNKTRFYEMATLFLREHA

SEQ ID NO: 2041 - protein, 778 aa, unidentified
  REGION 1..778: note = Table 20
RISNYPTGNTNPLPTISDNSNKKLQHNLEEETGILSPQLKQEMEYRMRRKIKICLESNDNVGELKKNCQSLKQLERGLVTDAERKANLPATTIQNFLLRYNNKKKTKKREKLQEERGKLQQQQGEASTSTAPEPAAITAPSFDYNHRTFHGSSRALLRQDLSNELRTIFINRLQDNLQNASGYITDYSLPVHEYIGRISFTRILPNGFDFKNTEKRVAPPIPTNSISSGTFTKHFKPLFSTKHLQLIQSTYFGPQGLRSSSLEKYPIYKAFTDVIPRQEDTQPELDVFIMKMALSQFMTNFGNMWNSRTRFKNLFNDLVLVLLRFHLAPRREREKREFIEQEINKTKDKRNARIITTEDIEPIPIDKISLINLTRDQKRNLFDSEQWKDAEDQNLLYNQIKDEKQRRRLLNKEIAHTKSELQKRCQELHQLRNPNKEPTEITKSYTITQENSCCLENAERVSLSDEILYSKNNFFGGTDNGLVNMTETASFDINRFKNHIELHNYYSVLENDDVDNERLSNFFVPLSYTLTINSDDIYHRSGNKSFLKSLERKKKRTMKGQKVLDAEEELSDSQLSEATSSTLGQLTQPYFQYRGLMREFYYSNTITNKRRSKELRRQKFLDQACSNERIFINQGQRGNTIAFVGDRGYSVGSRIKGFNKYSGKWKPQNHSRYISAIITNEYNTSQTCIYCFHKTTHPVHIVDNTLKTNTGTSVCTNPACILVKSGSSYKGRDAISSLAIGLSGFNPSVGHHHTDFTNIATTFLTRSVERLELDELNT

SEQ ID NO: 2042 - protein, 1154 aa, unidentified
  REGION 1..1154: note = Table 20
MRSRKKQKAPSINASPVNPLPTWVNSSKSAKRKADNISGDTAEASVNHTATKIEQALETEMRSRLTKKIKACLTKGDKLADLKKECLAMARIERGTVSNAEISAGFQLNTITNYLKNHSKANIDFWRDFVKSHFDTIAKEAQASIESSAERAAASSSTSAQPKPSTSASSQASASSTTSTQATISAPKAIVHQDTIRTCSANFNSIIRADLPLDIRDMLNATLSRTLEHASEYATSLGLQVLKLLLIFNNSTFNIDKNDSITLVNAQGFHINDLVPEQFHVEEDKQVAPPLPKQCADSKAFSKEAKKLLSFQHMGLIHSTYFGARGIAAQSLKANPIHNALITILPRENVQPDLENFVMKTVVQTYSTNFDNMWNNNKVFTKLFNKLLLVLLRHYLAPNREKKRRKYIEEMKEKRTKSEDGVVMRLELMADESSKVEEEVLQAEDDECKPVDDSDKSRRHINVLTSMLRNVIYQNYGNTVTEKIIKSTCKDIAQDEIDAFLKILDRIMPYVPSKQNWFSTAHKIPFVLMANQVLSSLQYSKFAVQLCPLTPVGDLNALKMDSRSLFAILCSTHSKNRRALEVYDFDGRPIPSGDAALEQKDAMFGSFFDLNKVKQICQSYGLRFHQHLVFCPGLKVVRITGAMIKHPVPCNCDGSLKKLLKADLAATDRERDQLLKDRREFRKLNQIKSYKSQWNKGDKDGNKAGSKTSGETISNNELYWLIEKEKEKRDKINMALGNNKEKLSSLRRELYLVGRYLREAKATKASKKPPAPPPELKTCIKKGDSCFLKAESTTLDESLLDQDCCYGGTDNGVVTFTETSKFDLAQFQRHLKLYNKFQCLETLEDNDPNSLDTNPDAIDADFHGQNVAAVDSKETYAKDREGAKSKHVLLPRTFKITSKHIDRGSGQQKRRLQLEKKKKSTDLGRQIATFEATKSQNPIFGATTPAEVDQLRSVHESHKQQHRDFYYSNSRCRGTQRYEYQRRRFIDRLCADERRHISNNSPVLFVGDRGYGINSRIKGHMRCGGAWKARIHGRYCPVLITNEHNTSQTCVFCFHKTSHPLKLVNKKNKQYLRCVNGTTVCTNPQCLLRAIGETHKARDSLSALAIGLAGLSTATIGQPIPQFDPNISASKTEAFKAAASDFLMRNSAGHAPRV

SEQ ID NO: 2043 - protein, 1250 aa, unidentified
  REGION 1..1250: note = Table 20
MFSRRLIESSLMAIKRKRRYQETTFTGVANNPPKFRPAGQRLAERAAVGRTKRRSGDLTEDEAWRFFDDGLKDVIRSQILGARLDERSIHDVRQKLVSSTRILRNVYSNAAKIHDLNAKAVTDKLRYKNTVKHQQEYIEDHFEEIANKPDSFPKVRPQPKKDIPGAPAGKQQRTATAPSSDLRTVTTTFSSIIRSQGITNNMAQHFREIFNAATEDVSNHIIDFSVQVLRYITMFKTHTFVIRNDQVQFVPTVAPFTLAEILPETIFDEATLERPLPPPLDQGFLNNAPLLEQARNFLNDQHLDRIFTAYFGRTPALQVLQRYPLHLAVLQTLPPPAEAPPIAFSHAKIVARNKFKTNFENLWNLKGRFTKVFNKLITTLLRFHLAPEREAKYQEYLTSRTQDQGSSTPTPAQAPHGEITFAGKTTNEIRRIFHHERRNQQNYTDKAKTEGARWVQKAQRSAHRLATFTAVRLAEKQQATTVRSTATTTGENTEAELEFLSQTNPAASTQVDDFQDSQQEENGDLSARAIRVLVAAMRNVIFTLHGQAGQVTRAQFRRIAGNTINGNTLEVCLNIVNRLMPYIPSRQNWFSKLHQIPFILLANEVFRATGHAGFAVKLTNLPSTSSLLALELDGPSLYNTFSVQQGDRRVLNLFTYDGRIITEDVTARSNDDAIFHSFFDLEKINNILAPYQLQFRHQITLLPGLKTVRLLGSKRDNATVAHVALPFVEKKATAPSKPPPAREQPTDAEKREIERLIALRTAEVEALARRLKQTMRERAAFLTNEYPYVKKLKATFPNQHPQQQQQAQQQQTQQQQQQAQQTQDFPLTFRATRNEMYQRIRQLKLRRDEFNQQAAAIKHNLAIQRSTLHRLRKGLSIDPPETREAPPTPNIQITQDRYQCYEKAENVRLHPALHNSQNMRFSGTDNGIVTMTETVRFDMPRFRFHLQLANTFEALKDLDETEAATRYTEDMKHILEELKANPDLLRVPKAHKMYATDIDFRTGAKKQRARLYREKHSPQGLPVVQAEAILSQNSLHDAQNLDEINARYQAQLGERNTIRHFYYTPAKARQQRQYEYCNRKQIDRLCSEERKYVKSDDGNYNRERDRHHQTIHFIGDRGTGVGSRIKGHLRYGGHWKSRKHSLNTSVCITNEHNSSQACAFCFDKVTHPVKMVKGELKTINGTAVCSNPRCLLVINKRSHQPRDSQSSLLIGLAGLCTVLSARTTFPALDPKNQDISQSNTDFQNFAGSFL

SEQ ID NO: 2044 - protein, 603 aa, unidentified
  REGION 1..603: note = Table 20
MPRNLNDVTITDPYVMKIALSTYMANFENMWSDGKRTTKVLNRLIDRAAATNFPSTNNDPNDDTSNLELEVLEVLNPKIAERAIEREDELATELNTDTTRRRLTMLRSTIRQAIIKYHGKKITATELNDISRLTFTQKEIQVCCLSADFLISYVPQKLKWNNVAYLLPFELMANDIMQYTGYENSQSLQHPMELYDFEGNAIVCHETATKLKDAIFSSFFDMNKLHEVASSYGLKFCHNMMLLPGVKTVRITGSIIKKVANNTASLVGREITNKNQKKKYTDNQESHLVSPELKKRVINKNNYKCLDKTENLTVDKELIESNEVTFSGTDNGFYLYNRYSILNQKETGPINIKDSSYLKLPITFKVYSKDIDYGSGKENKEKKLADFRNINDVETFYKKRKEPSARLRAFYSSQKQIKRRRRYELQKRKYVDSLRSKERNYITSGSKSILIMFVGDRGYGIGSTIKGHARQGGLWKPKKHSLYSSVCITNEHNSSQTCIFCFKKLFHPISTTTTNSRTKKKSVNGAFVCYNEECVAVKAGKATHGRDALSSFAIGLSGLAMLLFGVTFPAFSSKASQFNTEQFNNKAVAFLKRSATQPTADGE

SEQ ID NO: 2045 - protein, 741 aa, unidentified
  REGION 1..741: note = Table 20
MLKKYAESGYKENKWKEKADRCDLRIQTYERILREEETSEQQLVHQESDESEDMLDFTNLSEELPANEERALKLEDTEIGITNDLPRRRIKVLIAIIKAVLYEHPQELILSSHFQEKASEIDEREMRVCLQIVNIVSSYFPLPNHRKLFQYTIPFILMANKIFHVIGLSRRMISICPLTNPGRLISLHADAPSLFSLLCGTTAKDKPMNVYDFDGQIMATRMIATEQKDAMFASFFDLKKVYTMCNSWKHTFGYYIVVLPGANTIRITNKLNNYPTQQSCKKLPVKEKINQEDPSPSHQQFGTRPSPEFFLSNSQQQESLLNLTQEIEAQLKAKWSSPNKTYISKAARVAQNKARGNTEIFDQIKIAKTRKRALYKAVQEAKSQLRMLRHRMYLMKKKDKINSTKSPNNLITEESYKCFENVDDLTVDTYLLEKPNKVAFSGTDNGLVTLSETVGFDMRKLRFHLDLYKWYRAPGTENSYDTSTLDKDLLSVPTSFKIKSKDLLYLSGGYTSRNNLLRAKRSSLSGASATKSEALLLSYSIQHSSNLMEAKTAFNVHQQEKNVLRKFYYSSTRMKRKRRYEIQKRKAYDCVCSAERRRCHPCPSQKSSTRFIMFVGERGYGYGSRVKNHVRLGGPWKPLKHSLYASVCITNEHNTSQTCVFCFQKTDHPQKVFSKKGAIALKTVNGASVCNNNECILSLSDTSHKARDSVSALAIGISGASRLTSGTTLEVFNPSATTTIR

SEQ ID NO: 2046 - protein, 1319 aa, unidentified
  REGION 1..1319: note = Table 20
MSSLRTKVEQKTPFTGTETSRPPQRKAVGKGKKREHEAASTTDTSSSAQPLFKRPKSLGISSQRLMDSFFQSMRDHIIRKARPVIGSKIKIDALKTQLLAVKRLPPGIIGDAEKICQCAKNELKNHLEYHGTMQNFQYFQKYVKEHFDAIALSLQPQASTSASAGESASTPSTPVMAPADSSVALLRRDLSAVDMASSSSSASGAPSQAALSSMSHAPSDISMVDDLPEDEDYRTCTVSFKSLLRTDVPPNLVESFLQKLNAAMYDVSDYIMGMQLVVFTLMVSMKSLQLVSRGGDGGVQMKKARGFQIHDILPADYEMKIDAATSAPPPLTSSALKSATFCNGIDDLFQGKHIQYLHSSLFAERGAKTSHSTFDALSSANVTVLETISRDTPRHSSELMKVALSLYKTNLKNMWAKNKLFNKALNKLLEILLRIHLAPKRESHYQKLKEKRAKKQQAKKNTFRNAIRSEKYKLQRYQRKAQGKPEGNNWARLAQQGQDRINRMYADFKRAKEEAAAASGQAPDPVSSSTAASGTSLLVASSSNDPDSTFDAVAASTTGSDVDIDDMPIEELLPHYEVLDKEDEEGEQGEQAEEERGKQTGSRDLPRRRILVLKAVLRKLLVKQAGKAISHAQLKKERRDITDDEARVCLLLSEILLPYIPAKGHYSYIGFQLPFVLLANDIFRAVGYGKFAVDLCPTSSCGSLHAMRLDAPSVYTLCTKGDDPVDVFDFEGFHIPSVAEARAHKHAMFNTFFDIRAIFKACDTFGLTFANNLTILPGLSSVRILGTKKNSSKPAYSMKKPLDIDWKFVNDAQSKTDEELRKDIDTLEADMITLSEELKSQSKDHNHEELSSKIKQLNRQRGAERTLHDRDPCSEIADLKTQRYQSFLAVKRTKQQLSRLRSRAFLTRKAIEYRNKEIPAAAVTDPPPSDQELNAMVFSGTDNGLTVMTETVAMDINKYKYHLSLHNRFSPLANFDINEGDGSEGANAATSDIDKDGDQASSGDSSGVDALRGDAVTVDTSAVPQTHDDDAASDGASNHSATFQPLPTSYKMRAEDVDFGSGQFTKRQIILKAKRTTEQGKQVQQMEEQLKTSNVFRAKHVEDVMSNLAAYRNNGPALRSFYHSKKMTILSNKVEHTDVRFRSRFASRERSFCAGGRPQTHLTMFIGDRGLCVGSRLKGHMKYGGKWKPRLHSSVAKVHTTNEHKTSQTCMYCFGPTSHLVQTIKAKDGKTRTKLTNGAFLCLDPECVSVVNHRAIQGRDRTSAMAIAVSGLSSLLFNQPLPVFNPKPSQSNTGIISKTTSFCNRNETRDGSGAASSLP

SEQ ID NO: 2047 - protein, 736 aa, unidentified
  REGION 1..736: note = Table 20
MFLPNRSKRNISGAYEGIFKKEEKKANETVDELKNCLLQAKKLPTGIITSAAELAGCDTRQMRSFVENRPGMTNVEEWKVIVDKHFDETLESLTSRLDSMMVSSPFSTTIDTVEEKQFCTFTALFDKLIRKDIPLNIKEVIMKKISFSMSGSTDFVVCFSTLIQMLLIQLKNSVLFWKTMKTFFFVKLQGSVWQASFSSLNALHLNAPTLYQLLTQELTKVDQDQSSDQEEKPTSLKTVRILGTQEKMVNILNEPKKASYKERVLKNPNVILEGQKSKESLSAEIKSLSDVIKQLEGDLKKTLNFQNESDFSRQIHALKNQWGKENNDKLHKDIETLKIARDLSYEKIHQLKDELAQTRQQLYFKQMANRYHVKLTKSKEISLNNRAVRKKNEKGLSNAEARELITPEDFLFADTDNGLVKMTTSVPLSLQRAKFHLKLYKYYAVLENAEMDEALQLDLNDEEKSFLDLPKIIKTSAETGKEEERERRRKKIQALEDAMSKASTDSSANTIDGLASNFRPNFDNRTQMRAFYCSAKSINQQRHIEVQKARYCHQLCRKERLKLMHTAENDDKSKKLLMFVGDRGTGVGSRVKGFMRYGGKWKENMHAEAINVCVTNENKKSQICVFCFKKLAHPKRKEVKNGKAIFKSINGAFICTNPSCVSVKNRRAVKSRDALSALAIGLVGFSTVLFGVKFPAFNTISQNNTEDFINITSAFLNRSVDRQLRCGSGVTASSLW

SEQ ID NO: 2048 - protein, 878 aa, unidentified
  REGION 1..878: note = Table 20
MRRKKTPQGTFYQGVNTLPPSCLQNNTKRTLSESFSEESVNKRNRVEGPVKDLEECFFNSMRDRVEELVKQTKTQDKTKELKNKLLNVKTLLAAIITNAAQLAKCDRKNGRSSYLKTNKIAEAAVGSVVKDTAKGYSSATPTNKQPYEEMRTCTVQMNSLFRSDLSPIVKTFVCIRLQDTMVRASSAEDKEKGLSFIFKVNLIELLGGQTLAKSLNLICSEDALRQMLNDRKEASVEHRLVVQDLNIVEEQQDFLEEEGTLDDDVPERRLNQPKSIIKHLVFSNDTPVYLEDFLPPKKQYHVIAYQMYFCIFANDVLKYALYTKFTRALCPSRSFSSSSALHLDSVALYQLLTQNIDQEKSEEPSLHTNQQEKKGYSRMILYGYNRDELIGSQEKVRQNKDAIFNAVFDIGEIQKACESYGLSFAHRITCLPGMKTVRLLGSRIKTHGSVTEETDQSYEARILRNPNVIQEGQKTKDVLFSELQSLTEVKALESVCKIELDLLKDSNFQRKIKECKSNWGTTDDKDQLYRTIEKYKESRYKSYLTVNKIRNELAEKRQQLYFRQMKIRFKSKLYNVKDVPQDSRGQIEKCGKGVTKVEDRTVVNPGDFNYAGTDNGLVNMPTSIPMSLQRMRFHLKLFNYYTALSKDSNEDKRKKYTDEGEKVQLIEDSMRELESAPVASNDMAIGKFRAKYDQRQSLRDFYNSPKIINKKRHVEIQQYRYRHLLCRRERLELKHSERTGAGSRVKGFGKYGGKWKQNIHGEAVNVCITNECKTSRTCIFCFSPLTNPRIPGKKKRSYKVNKGTFLCINPRCITVNNRCASKPRDGLSALAIALVGLSSVIFGAAPPPFYNVSQITAEHYTKITSDFCTRRDDFAATL

SEQ ID NO: 2049 - protein, 445 aa, unidentified
  REGION 1..445: note = Table 20
MQTGYYSLLLNGTLFLHNSIDSTLLKAPGVVHWDIDNISFYSTCLLIKTILSLKVLIKSSLPYHKYNNKAYMKANKIRNELDKISPQLIFRQMIIRFKSKLDSVKELPLDSGNPIKECGKGVSKAKDRTILNPDKFSYEGTDNVLVNITTSIPMSLPRMVFHLKLFGHYTALSTHSNEDNISLRLSKEEETFLRFSSVTNMKASDVDVSRGCFRQRRYLERLKKHTDGGKEVQSIEDSTRKMASTPVTFSAMVIENLHEQYKQRRKLRDFYNSAKMINQKRHVEIQQHRYCHRLFRRKRLKPKHSDSKFSSKKSLLFFTGDRGTGTIFRPKGFRMYGGKWKQKIHRETANVCITNECKTSQTCIFSFSSLINPRIPGKKEGSYKGNKGTFLCINSRCITVKKQWAMPVHFLRGSKGAHSQAYLLHRFRVFKADRLPSNRLFLRSI

SEQ ID NO: 2050 - protein, 642 aa, unidentified
  REGION 1..642: note = Table 20
MKHTEQKSYFDGVNITRVPILRQNLKRTASKSSENPPLKRPRLVPESPELLYNSFLRSIHDYIKATVDFTTKKSKNVERDLNKLEQKEHDDTEPEVAGESQLTSENDDDDGIEEEELITGNTTDLTRRRLCCLKSVLKSLLLDDRKDAFSIDDLKKECSDVEEKEAYPCLLILNALKPYIPKKKERFIIAHQLPFCILANGTLMYAGYKKFYRKLCPQPSASTLHALRIDGPSLYQILTRLPCALNNNSRDFSKDIKDLKAKWRNSSLEEKVDLYNAIEKVKDERNQSFLSVQAARDKLKLKRQLMHFKRVAMKQKPAITHETAHASQSSNTQWHVVQKYGHGITKVEDCRLSPQVNPSEEFIFSGTDNGLKTMTSTVPLIMKRFKFHLELRNKYKALEDTNGCKEEAPKIVSKYSSNESRANSFLQLPSSMAIKAGDIDIGSGYYNVRRKLEKSKEVNRRQSKSQIETNVRNAKRPLSKTLVRKRKSVFDRQERRYGEKWRQCMHGMNINVCITNENVTSQTCMYCFSKLDHPIYRKIDKDKDIRTKVKGSFLCRNSDCVLISNKKAIKSRDNLSALAIGLSGLCNLLFQETFPELSAKISHCNTEFINKTASFLNAREYWDTGHDASNRDKSKTFEKKGS

SEQ ID NO: 2051 - protein, 313 aa, unidentified
  REGION 1..313: note = Table 20
MPSGRGISGGSFGGHGGGGHFGGGGFSGGHDHGHSYGPRYRRRGMVHGQSVVIIGGFGGRSYYVPNRIGSGIYILRTIASFLFVGAVILLVMGYLIALTNTQRIQRIESDYQEYQLMVKRAQSDPNYKTTANVLSIKKSDSSNKYCLIYKFKTSEGNSYVEGYTFYTYTYDEAYEAEYIQKVIEIAIDDLNTEIDRETNSIDMRYGQTKLEDDGEYAALTSQGTKNTEVGLKVSGYLALAFSVALGVASIVLYIKKRKLYEEEEAKKEEQKEEAVPVEQTTEKPKSKFCVYCGSKISEQDKKCSSCGASIQRD

SEQ ID NO: 2052 - protein, 452 aa, unidentified
  REGION 1..452: note = Table 20
MAQFAHGISALDVTPSAALSAPVWLLGKRYDDVAAADFDAYKRSFESILWFTYRRDYPAMTPYEHTSDAGWGCMLRSAQMLLGQALQRRLLGRDWRLPALFETDMDARLPETYVQLLRWFADSPDIACRYSIHHMVKLGVQYDKLPGEWYGPTTAAQVLRDLVNLHRREFGGELAMYVPQEGVVYSDDVAKLCVSHIEQETVEKEVKDEGAPEFFDPLLHPPTSEDKSDWSTALLILIPLRLGLDQVNERYVPAIQKTFAFPQSVGIIGGKKGHSVYFVGTQQDQLHLLDPHDVHPAPELNAAFPTATHLRTVHSSRPLVMNVTTIDPSLALGFLCEHRADYEDFERRVRTLHDEVKEEGGMCPFSVAARRPDYAASGGDLLMADCLSGDDMNEDELASASGAGTGEDDEDDYNEDCEARYWDRDVNAAINMLELLKSEVQGRGRMEPFRRS

SEQ ID NO: 2053 - protein, 1808 aa, unidentified
  REGION 1..1808: note = Table 20
MPETVILNFRQHLTGDQLANSCLYFGLPSDPDILEKIRNCKDQINLLRQNPNRTPQLCLDLIPQCFGGFQSQSRANILEQHRVSTLFSADDVRISGVLYLAECAVKNLLGLGRLSFSGSPFAAASDAACKVAGVLVLNRYTEEGSLNLLFDQELAALQGVSTVIIEDSEEARAACNQNRFQVCKTGPSGCVPSAPCAPAAPCVASVPCDSVSGIPNLALPTALPTHIAFYPEKDGPPAFFNTVSNSTTWTNQLSYAMWSPDAQHFAFVNSAKAVEWDTATNLYSPNLPKSDFPPPHAFAPRPPRFDLPPFPQIKPVPYAELSGEDCNQADILWQIDHCVLELNLIARQCYLHIDDCQVIGSVAASHVEIAPFYSQPEGAKNPLELKHNTSTLLPDCRIGSSLHPSGATQQAPGYFCPNKSFSSSLNPPTLKPQFLANFFKLVSSSYICGPLFRALNQIAAVDVEKVFAAAKGDACLKWWVCNARTFKSLLSEALSIKEAFNKVQKAKVVVDSSSLFSFPPRMPLIATLDEMKAGNCQCGIANHKRSTSSSCLFQYNHQLEEFTHPLWTKVEQWKAANSGNPIVAYLIPSVNRKNPNYQSALDLKESRFYFEQILQPMLTEWIEAGRPETHAKMPKTDSFTVKTSYSSFVPLGGCLDIQLKKNLPRFALIRFIVPRFATNVALRMYEESKQSESAPMLPCNSNFYRTVLVMVASDGNLKQPTKGSHPKLGAWFKDFKRDASVPAIHPVDTTDFANTLVHISEQLAADFLRHITIHTGNRITHTLFLIIRSVLRNHGIFVVDWKELGNLCKYYTAKFKVNDKKEFAKARKKGHHSLPPLPKWKHDATFDNQKILDFIGEQSQDAAEEIMRYMGDFFELVEFQFQGMLPLCNRNFKLHGIKYQQGHFWLAEMRELYDPVNIATSKGNPSLTIPPVFYYNKIIRDIVKRPLSLAQMNVLGHEFRRGVLSGLSHPNKMDPFYNKMFFRARGVVSVADVEEIDKLNAAIMDCISRIQQKDFRVGTFGTLPQGVTKGWHTNPQSSFKPLSLPIDTKTMAMLAVKYSTGNERDRVLNALELPPNTNQSTFVSSAIWKKPELWGALCNFDKNTLKKFGGSINISESDVSITCLRPKVATPDTGKTTAETISLPPEGLEFAFDKGIITPFYVHVQARPGSGAGLGPNQVPNGPTKAPVVDPVTNTPRLSKSQRKNRNRHARNLAIKEGTFVFSAPEHPSAERRQEIIKKAALDKQRKKARYSRNCQTRTLAQLKERKEQFGRFAYEKLSPEEKARGMGFPLRNEEFRNLANMDMADVLRKEICSAYEMELNGANMDGKTGARIAKFNAIIDDKKSHIKATISDKIKSIQSGKTAIVQLYNNACATSFAAFPVLHELYLRQDFLQMMVYRGQQRALKVFMGYIHGNLDPKLVTCVFGSAEFSQQMKGTVSGCGGRLLKEMKKRFRWINVDEFKSTMNPGCCWGTGFKGGKIDLGPCSCDFEVEQELAKLTEELLAGKDLNELLTQRDDGTFLHLAQIEALLKSLGADESFSVDETEQFDNSKFFTQKDADHHGEGEEENGRYGDDKGEFGEDGKDLRESLTTVEEGDGVEEEDDSDPMDLEESETAPVLVTVESKSLASESNIMKDVLEEGELATSGDTSTSMEVEEELWSAALDTLLQSFSAPASTDGADPDGIDAIHVTHPSEVWKREGVGDVYPEDVRRIPLTNSVARAKSKTILKHSKAFRPGWKEHLPLVERVKLAFHAGVPVGSPLRGLKYCHHCGTMWDRDRNAARNIWMCFWYMRLNGLKRPFTMQRKKSV

SEQ ID NO: 2054 - protein, 1757 aa, unidentified
  REGION 1..1757: note = Table 20
MTRLQHPPPPPEPPPPVDMSKIMILFADHYTVEDQQLNCLSYFSMGGDPLATDKINHLSAELSHLESQNPNSPNEYLEAVSTCIGYKVPSASHIKKVFDAVTLAKSSGLQVSGVHTMAQCSLGTLFGFHQDSFTGSFIHSSMQAVCDASGICVLELSLPNGQPDPEYAAKFDLAKRDKLYMIVVTSSEVVGGCNKSLHAVQSNACQNICSADKEFTPTLSHNTARNTQPKIPSYVRFVPNQDGHPAFYCHNSHLSSWEPPDCYTVYSPEHGHWWIASGGGVSWDTDGFVSGTVFPPGLETGPFPYPPAFPPAPPSEQTPFLQPPPLHPPIPYYIKPASAASGTRFKLDHQINRAQTLALTSFLEYSDVQIVGSIAAEHANVMPFLSSAGVQKSPLFPNAAVYSRLHPASLTHTLAGFFPPNSAFSPQLHPPSLNDGNLPKYLKQFTVSHLKGPLYSALCRLIELDAEKVFAVFKDNAVGRWFVAGSRTMKSMEKDALAMSRCLSQVVNVNPPLSVPVESKFKYTPPPVYVATVTAVQNGNCFCGVRDHVKTTSRSCLLHFDNYSNQWIHPLHLWLEEWKVANPNHVLSPFLCRDVNRKEKQFLTAISSSEYKQYLELVLTRKPTDVEGKAATELYVIKMPLTTVLRDATWLQPQIEMLLPTINLISTIATKFGTNVGLRMYHESKAGEPMLPINQSFFISVIKTVATNGKSKTSGQHSKLCQWWIDFKSETGVPLLPPLDHVLFSNMIVYAAERMATDYQRHITKDLHNHMINTLFQLYRKYICDNHISCDLTALRNDLFVNDKKLFVELRKTAGTRAALPKLPLPWVSVDRVSPDHLAKLFTLDIAEELAGKTLEFIKDLEAWFPKLLPLCKRMFKFHKLSYSSGHYYLLERNRSLEPQNIPSTKEAPSLKAPKPFHMKAAVRDAVSKPISFLQMSVMVPEYYRSVDAGLAHPDQTDPLYGLRFFRHRGIVKETDSLVRSKLQASINSDIDRIQRGDFRIETYGSLPQGATKGWNAHPQTTFKEKSFQLDSTDLAMMTYKYFPRGAGWDTLCLSLNLPTDCLQSDFKVAGIRKQSILWGTVLPAIRNVFKKEEIGSQEDKSQPRRFGGSMMVNSISVSLHCLRPKKKALDPNQPMLTPENLVLPADSIVISGDPGVVTPVMWYMALNPGSAPGLTPTQVPNISSKSGSYHQANENRRKKEVEVAEGSYIYHAPKLLSVPEANARVAVIAAKKRAKKKRYLNNRRNRTAAEQKKLGEQIGAYAFEKLSWEEQLSGLSFKFGLAEWKEKTQQKYAEMQRVKIREVYEKEAKVKIDAEFAKLAVASSKTTSVADFNKSSKVSFEVYPILYELYCRQAHLRFLTYQGEQRTLKIFMSYLRGNYRRDQIVLAIGHAGYGGNMKGTVSGPSRKLVREAQKTFTTVTVNEGKTTFCCSGCQGTGKCTDILDLGPSPDVVSKEELDHIRNLIRDHDIGTLFETGADGKTVKHWARIEKVLRLLGVTDEEFADLEDEDIDRYLKQVDTNDDEEEDVEIMEPEDCEEREQEKEIEMEGNLESSDEDVAVNQEIDDFLLGLDGMNIEPELWYGDFGVEDKLDDLIHDLSDLEEDRMEVDSSFGGGDCGLMGDGSEPNPIDKVYKTNPAHYFLREGVGDVGAEGRKRESLIQSYVTTTSKNILKLKNKAFRVGWLEEFPLSERVRKAYQNGVPVGKPLRAVKYCHKCGNIWERDKNAARNIWTLFWYLRFNKMKRPFPFQVTRRKKDE

SEQ ID NO: 2055 - protein, 647 aa, unidentified
  REGION 1..647: note = Table 20
MMVNSISVSLHCLRPKKKALDPNQPMLTPENLVLPADSIVISGDPGVVTPVMWYMALNPGSAPGLTPTQVPNISSKSGSYHQANENRRKKEVEVAEGSYIYHAPKLLSVPEANARVAVIAAKKRAKKKRYLNNRRNRTAAEQKKLGEQIGAYAFEKLSWEEQLSGLSFKFGLAEWKEKTQQKYAEMQRVKIREVYEKEAKVKIDAEFAKLAVASSKTTSVADFNKSSKVSFEVYPILYELYCRQAHLRFLTYQGEQRTLKIFMSYLRGNYRRDQIVLAIGHAGYGGNMKGTVSGPSRKLVREAQKTFTTVTVNEGKTTFCCSGCQGTGKCTDILDLGPSPDVVSKEELDYIRNLIIDHDIGTLFETGADGRTVKHWARIEKVLRLLGVTDEEFADLEDEDIDRYLKQVDTNDDEEEDVEIMEPEDCEEREQEKEIEMEGNLESSDEDVAVNQEIDDFLLGLDGMNIEPELWYGDFGVEDKLDDLIHDLSDLEEDRMEVDSSFGGGDCGLMGDGSEPNPIDKVYKTNPAHYFLREGVGDVGAEGRKRESLTQSYVTTTSKNILKLKNKAFRVGWLEEFPLSERVRKAFQNGVPVGKPLRAVKYCHKCGNIWERDKNAARNIWTLFWYLRFNKMKRPFPFQVTRRKKDE

SEQ ID NO: 2056 - protein, 184 aa, unidentified
  REGION 1..184: note = Table 20
MYKDVQDQPYKDVDQYHRRVFDYIIYTDLESVSWITVYPGRPFGNPQHPSPLVPGDYRFNRRYTRIVAVDPGINNLVSLVRATNGFDYDDKDDEMKEMPDIREMSLREELNQAQLPAKEKGRRLKQLDQPWTYSNDQWKEKTGINLHHRLNQVCDRDYNAARNILYCFLYERAFAERPRPFKRV

SEQ ID NO: 2057 - protein, 702 aa, unidentified
  REGION 1..702: note = Table 20
MYKDVQDQPYKDVDQYHRRVFDYIIYTDLESVSWITVYPGRPSGNPQHPCPLVPGDYRFNRRYTRIVAVDPGINNLVSLVRAINGFDYDDRDDEMKEMPDIREMSLREELNQAQLPAKEKGRRLKQLDQPWTYSNDQWKEKTGINLHHRLNQRRAEYTSIASRAHLSVTSAPIILITTPTAITACTSQYQDYIHRPRYLVRHLETLVDYHDKAKSSRWDRGVPEAVADDPRLSGYVRAQGKSGHVLMAKRTRANRLASVLEDAGCFGAQHCQPLHAVRYCETCSTVCDRDYNAARNILYCFLYERAFAERPHHSYKPDSAQFMGTLPQIDCLSFALGYLEHGNASDTPQRGLLAPCFVLCDLHQPTRTGESQPHIQPYHQPRSSAMAPRRINRNTTPPEYAPDDMHGGAAAGGDDPDPYDIDAAYNNQALQFLNAMDALLQRIGASLGGMRLDEDAYNVLSSTLHILIESLGAWCGRTLTRFEIYCDETSQMLDNTTMLYVALLLGNLTHVTYRHPWGMSLEAFTHLSNLKLTHLNVITDYLETAVFDTMVCPKFPFLTHLGVSCFADSAHQCWHDVIRGLSKLKHLKWLQLDWSNSVNMDGLLVSQFTALLNACPLLEGVVYKVAVEAYIDEDDIELEKPYRFGVYGSWTSGESSSVAHSMTRQAVTLDKWHRKEMVKILDEIKDLFEQRKVKLTINYEIE

SEQ ID NO: 2058 - protein, 294 aa, unidentified
  REGION 1..294: note = Table 20
MKEKIVQGFVTKDLMCQLVARVELPEWRRTDSSPEDRLALKGKKEKLPERIQMIGQSLKLNRFLGLHLFLLQAISNRVRIVSENDVVPGVKPPKGFARAKVMEIWEHVHADDLNQAQLPAKEKGRRLRQLDQPWTYSNDQWKEKTGINLYHRLNQVRLLKHPHVQQLMADIPSACTSQYQDYIHRPQYLVRHLETLVDYHDKAKSSRWDRGYARAQGKSDHVLMAKRTRANRLASVLEDAGCFVAQRCQPLHAVRYCETCSTVWDRDYNAAKNILHCFLYEPAFSERPRLFKRV

SEQ ID NO: 2059 - protein, 161 aa, unidentified
  REGION 1..161: note = Table 20
MDQPWTYSNDQWKEKTGINLHHRLNQTPLPISRLHPSPPIALFSLCTKGALVQTGWQVCWRMQVFSLFLQLSIAKHAPAVWDRDYNVARNILHCFLYKCAFAERPRPFKRSTNRVGLSTTLNSSRVSALPDGILLTNLYEHELNHTTHLSTDLSQLYVYSP

SEQ ID NO: 2060 - protein, 1048 aa, unidentified
  REGION 1..1048: note = Table 20
MEDCMTAVTTSEHHQEVQHRDQRASRDPPSHKLAQYVYGHVFQVHRSEDRVGPPRSVTGLSNVVHQLARQMETNVGVHLATNFFRWLKTRCRVQLHRTLHPEAAAAAPDAGAGGGAGVELPRQQQTIVFALATAIAPDEPLCAYTDAVAALQSQPDVLQELELWVQREQDRWRPRGLLVPGCSFERLKNHSLPHGESYLAWAAEVLHEIEQHRSQLRARGVPKAKLARHFPVFGLLPEPSYQQVHIGLGQEAVKELLVHRDHFASEHHLIPPAAVPTGSRRAASSGGQRRRRGRGGSGGSGGGSATAGSGDGSGGSAAGSGGSGGGSAAAGSGGGSGGSAAGSGGSGGGAAGSGGGSGGGGADQPLRWGPKGGKCRNIPACFKEGSKFDGFVTTDAFDMCLTMRRRHHSSWEEDKEAGKQARVSEEELLRLSLRGVDPGCSPTYWTCAMRWPWLPAWVVALLGVDLVLRLPEVRNGSCPVRWPDDLTKDQQAAAEAQLAAHLTASKAAAARDTLMTRTQAADRATAAASTAAARWAKEVQAAAQQGRAELVPPRPLALVVAQSAEHRKAAAVAAADAAAREAADTANDVAREATMSALVQGLRRHVEVLAAAHCAMLQLHRCLQQQQQQQQLAARVWDIADAQRISLLTERCLYATYSLMLEARRIDTRRAIQLSEAAHGGCSTAVAAAGAAAAGRAGGGGGGGGGGNIGVAAAAAAAAVAAAAGPAAAGAAAGAAPAGGAGGGGGNHRAGTLPRRRRQRRRRRRCGRRKRGRQRVGQRNRHGAPSRHQQARAATAKQRHKRRAFTHCSGAEHRTNCGYAQHQRWQQWRLKADTALCAWQSSLPTARTVDVENVLGRLDYKYGGSTGAGGQGEAVVQPPVRELGFVDLLALYAAPAWRQKRLQVYCQKQRVLCREAVRLMGGEPEVTQQKGVVGWGGGSAGYHGTVSRAGQPPRKEFVRLLRERFARHVIVINEYRTSMVCANCGRLSLRRKELPQGGADFHVLVCNDCHTTWDRDENAALNMRLLLVLQLLGRDRPAVFCRQEGGVD

SEQ ID NO: 2061 - protein, 340 aa, unidentified
  REGION 1..340: note = Table 20
MSYPARKRCPYKFSARNAFDKKVLLDKSFTGGILTEDIALESIFERPAPAGIATKIDLSTTILWRLDPGVRDAIVACVGAGAGAGQNRQSHIIRKTSTGEYYQLSGFKSATIKRARNDRVNVDERRLISNTLSTRTCNWDQFNEALRYTFWSFEATKGCYSTSLRNLRYHSYRNKQKTLDEMCKRLFTGSINLYLLGSILARSKDLLWVAFGAARFGGLGGNTAPPTKSFRAALLNYIKPTGRTQAHISKYVVMIEEYLTSQICPRCPTESISNQLDDLDVNIHSVPNCESCNTRCNRDHIAILNMRYVLLYMCLAGFLSTYITVQDTQYTHRISTVNIF

SEQ ID NO: 2062 - protein, 912 aa, unidentified
  REGION 1..912: note = Table 20
MSYCILLDSSGTKGVGDSGPRKKKGKEKAKDVASSIPADFFEDEEYEDFQVPIGLRPPPSTIAREQRDIEEATRLSLQRQGVAESGESSSSTNVRQTPQIARSTVIADFEEDDDFQEPIVIRPRTTRATPSITTPVQASTQSTGMSQEFKKAVSLTPSTPSESSSAPVYLSEKVKMKQARSEAKRKARQKSSTTKSKRNPNVALQQKWLKSAEDFNQDQRTGFITEIRRVVRHLSDVTYAASLFLNWFCLRLLRNGEAVPKLTHKRLYNFAALFVGQGKNADADIREAFTEFATAMGEDFNRQQLFPNIQYSTLITIVMRSYETLIENHVGTNFKPKTVRYLFTRLSGTAEFPNLPFRTGVKCDLAERVYNALTTNQEITYPAKLEVADAHSTSINNLLQECRQRLRGLNLTEEDYYAQPHLYLPWLYHVLERMEQQVTIREPVPQTRVTKGFVHRQLAEIVDFRRLPRRFRSTLETHVKDSINLEHPTIQQYINHSFLEDTQRPRTKASISRKEFRPEQYTDPRGARLFNILPIYNLQQRYIQLNLSGISRIIKQSRIRPSVLANEDMKDVCWSLFDMSRIGFRSANDLDGKALSDKRFTGAIRTDGIALEFICDRPSVAAEAALTPADIATEIDMNTATIWGLDPGIRDVFVASDGVGTGAGQDRQRHRIRKTSTGEYYQLCGFKSAIIKRAKHDQANADARRLISDTPSTKTCDWDRLNQALRYIFRNFQTIKDYYTTGLRKLKYHSYRNKQKASTEMCKRLFTANQQKWKPLAPRDNAGEAERPTVVAFGSALFGGLRGNVPSPTKVFRKALLNYVKSIRRNRPNSRKYVVMIDEYLTSQICPRCHLRSTTNERDNANMKIHPVLSCNTCHTRWNRDHMASLNIRSIFLHMAANNNNRPEEFQRGMLS

SEQ ID NO: 2063 - protein, 385 aa, unidentified
  REGION 1..385: note = Table 20
MEQQLFIREPVPQTRATKGFVHRQLRETVDFRRLPRRFRSTLENHVRDSTNIDQSTIQHYDNHFFLENTRRPRTKASISRNEFRPQQFTDLRGSALSDKSFTGAIRTDGIALKFICERPSHATEATLTPVDIATEIDLNSATVWGLDPGLRDVFVACDGVGTGAGQSRQRHRFNEALRYIFRNFEAMKGYYTTGLKKLKYHNYRNKQKALTEMCKRLFTGSRKYQEGNLDIQQANLQKWKPLAPSDNAGEAERPTVVAFGSATLVGLRGNVPSPTKIFRKALLNYVKSTRRNLPCSRKYVVMIDEYFTSQICPRCYTRSTFNQCDNSNMKIHPVLNCRTCNTRWNRDHMARLNLRSILLYMAANNNNRPEEFRRDEAILILIWII

SEQ ID NO: 2064 - protein, 633 aa, unidentified
  REGION 1..633: note = Table 20
MLKTPVWPTNMVSSPALTEYLLALIMMFKVSSVHTPLTVSKISENPGIVITSLFKILRATEMSNVAQTVAAEEPQDSVSLPWVYNMLSITCENEVEDINKRRRSALARKIRNAINSTTPVALSKPSFLSEVNFNKVQENVLATRLQLAQSRIYLSDPETRDPDVIIPERKDCFIPENFSIHHSLKTFSMMPHYGLKRQYVTIDITTLRSLVNRSDIIKRIAIYDQSLDAYARDSTYFMSLFDLKKLGQSGSVTEMLNRRKVMMRNILCTDGRSADFLFTRPAVPKDNKDIRLEMNDFETWEMQDVLRLWGADPGVTDIFVASDGNGNDAHEIRSISTAEYYVKAGYKKNQVTTKSLKQEEGITTIETNIPTHRTSKLSTFEQHLQYYFTHLDTLLQFYDGRFTDLRFSNYRGQQRMDNELVNIFCSGGKKYNPDEKAHPCRNKADYKQRREKKKKKKNKKKMTLQVGKSSLSAPATAYTTVSVTTSGPSTETQNQKWKKAPFKNEKKVPLIALGNAVFNVTMKGKQSGMLHRLRKKMEEASADERLILVYTDEYLSSQMCSNPSCLLKTLENVRIPDVGKIHNLLTCNSCNKLWNRDTNAARNIYSIASFMQKNNNLRPSRFQRPATDPQSSI

SEQ ID NO: 2065 - protein, 529 aa, unidentified
  REGION 1..529: note = Table 20
MRQSKSTALFSLVPTLSFRRRFITLDAYSFRSILKQAGINVTVPSGVNTHPYTRLARDATLFFTYLDFQKARLRKCTAAFLHYPTLTETDSDSDDDAGGADPDVDNGDAEDDSGSVTDGDANDIGNPAGGSDGAHNTPSEGESDDGDQDQGRFTDETTRQDDGSDTQLSEIDSSDEEEDDDPASLVFSNRVRTDGLQLEFIYGKRAPQIELPDLEMDDLHGEPQERMQLYGVDPGHSELYTSAQEDKHLPGNDRTAPGTEHSSNSTNGWHGRYMRFSNNEWLSLSGRHGRSCNRKRWLKDSGMDEILTRIPPAKTSHPDRFIQRTIYVFQHLDDITEHFADDYSLHRFLDYCGDKKMCAEVVNHFVHGGNKYKHQKEDYDSRKLPVIAYGGALFAQTRRGKKSTRSGKVYKALKIAEKQGLLLVTKTNEYNTSKVCPMCDEKDLEHKTVGDPFLRGASMSLWSVLQCQHCKINWDRDKLAAWNMLRLGKTALQGLPRPALFCPPRSTSTDQSSPHQKNSAVASSSRDPH

SEQ ID NO: 2066 - protein, 877 aa, unidentified
  REGION 1..877: note = Table 20
MDTVQEQRIYLESLKRRKIQRREEEEQRGRVPCPRCGGSNHNNARSRLCPFNRYFGVPTAAMVRQQNRQGRAAGQERLRLEQANLDVPRCQRCILPDGTNDGCLHHGNTASHLCHAHKTSMDDIVSNVLGPRHHSFVRRCTLKRTLTCFGRTRRQRLSAKIKVIREVERVVDHVRNVSIKAMLFVQHHVLKMLSAGEPIPPTLGMQGYVYGVMQLVIGKQVTNTNPNLPQDTANAFQAYVEQFDASGLPTVDPLPGYSQCYAHMAKTLATTIKNCLTEAFEPRCKAYIAFKLRTLISRTDKPKKKELKKLVNYVYSKLSGEDPANEPAYARQSWERAVATVLETTSLGPQPVTFENLTAKFYEYVPVMYKFLEEMEAHSTAQTDQPSEWVIVDEADSQYCRELLSAVDGFDDLGRRQKAQVQRATHKFMNSPALPLNFGPRMEDDMRQAITALIRTTRFQLSMSHQYLQGNDMIDPSLCFKSHSSLWIINAGPEYSLKPAGVQPRLVDDQLFLTQLGEHTQQESDLQQVGKKFLVFWKTLNFKKANLSKVFDTLGTYNTDLPPEETDIAFTNLIRTDGHTVEFICSKKAAELLPDLVMSDLDDEDMEVFKPMGVDPGHSVLFTSMDTNRQCLRLTNPEFYHRIGHMRRRYTRQNNAEQLGINPIISSLPTKKTVSVSRWMAYCRQLCLCLPSLTNFYGSAFTNDRFLAYVSKQKILDEAVNIFVSDGRKYRKSKARRGVDVDDDENDEGDEDGEDERPNIPLLMLGSGVFGFTRQGKKTRMSIIPKLKAAEKEGRLLVCVVNEAYTSQVCCFCHHRSLSTKRALDPLTNATFGLWAVKYCRVCRTNVNRDKSAATNILHLGLREQEHLDRPAVFCRH

SEQ ID NO: 2067 - protein, 442 aa, unidentified
  REGION 1..442: note = Table 20
MSGMFKRGALDDPINIIHVFTDAPPQQLANTKLSSEIRKYFTFRGAIMRECFHATRTGPATHDSLEFDEYENIDYDPSPSLPAFSKIKNRFRVFYEHLDFQKLGLEACERNLEQYSGEGQDPPPDVKYAFTNLIRTDGHAIEFIFAKQAPQQPPLPDLTMADFIDEDLGNFRVYGVDPGVTQLFTAEDEQFRVTQFANAEWFAKSGHRKRRWNQQIRETDTGVTTLESSLPTHKTARPTNWHTYCQALFNNFETLTSFYGNQWTNERFLSFLGRQKMENEVVNIFLSGGKKYPGRAIDNRLPVLAYGNGTFAHTRGGKGASHHGKVYRALKRAEQQGLLVLCLVNEAFTSQVCPLCQRRSLKLMEVVDTFSRRMVKLWSVKRCEECLHHWKRDHAAAMNIRDLGIKEQAGHDRPRVFCFGQDDDAMDVDAQAGNAMDMDLLG

SEQ ID NO: 2068 - protein, 584 aa, unidentified
  REGION 1..584: note = Table 20
MNQNISLPEDTAAVFVQYKAQFADPEQYGTVLRNGITEAFESRAISFITHRIGQGLDRQNWPSKGKMKLIGMYVYKVLVGNEHDPPGEAPNVPEPAQVAIDEVIMQASLGSTPISHDHLLASIDEYTQVLFGMLQKRGRDSNSSAIQDSLEITDQVDHGWFSSWLQAMPAYLNLPRRRRNRLMRSILLIMNDEEAEVHIGYQTSEALKQDLIALIHTTRRQLECSWLFLGGDPMIDLLNDVGVPIDYNHSDILRALTKIKNRFRVLYEHLNFSKVRLDNCARNIDLYSGMDQDPEAKLSFTNVIRTDGHTLKFIFAKRKTQGPPLPDLTLVDFIGEDMNDKQVIGVDPGMGQLFTAVDDRFEVARMSNSEWYAKAGFMQRRHQQQTRKQEAGISDLEVSLPTRKAASPNSWTAYCQAIFNDFDTLTSFYADQWTNDRFLAYIRRQRLESEAVCPLFQERTLQQVEALDTLSARMIKLWNAKHCTMCQHHWKQDHAAALNIRQLGLCELSAQPRPSVFYFNQESDTPSPTVVEPHEPMTVYTPSLIAADTLGPMDVDTPGLIDVVFPDPAGYVEEESMVIDHWDE

SEQ ID NO: 2069 - protein, 1077 aa, unidentified
  REGION 1..1077: note = Table 20
MQRGDYNLTDYRGMSPRHVALYKKEKRQALNDSDNEEADEENIDDWDGSDEDEQAAESDDHNDSDEAGPSTKVFTNTKRKLKSKQAAGVKLAKMGASKEAAKDMTNPDLVGPSRKKGVRKDQALRSILGGPFVRISRKGKLTHGMSLQGRPKKHFITVLRQVVDYATHVRFVHACFLKFMLTRMFDRAVAFPPCLFHVRFFSSLTQAFLGRRITNQPVIGAFAQTIDDHVTEFKALFPSLRITLLADPHHQKMYGRPLDYVARQQCKDFSNHVTENLVDRIWCMVQKRLAQEIKGLKTGHLLSIAKHIANGVLKMEEQDPLPTIDYSIQGDLPAAIGQLTQDLCWDMKSAEAFIAITIKRADVADERVNLRIETAKMVWACHDQLGCRTTMETLVDIARAHGFTKHRHVYLHYLMVIDKFAELSNSETYAQVKRPQEQATNAWAYHELSTKLKQWKNLGRRQHSRLVRAVVQTVNSSALFDGTKWPSLTQKSIETIKRTVATAIKQISWSRKCLQRCSNDPQFLARCFFPFEHVKPATMRLIGPSPTPSFQRLHLTLDNPALYDIVITAGLQAFLPKGSCVSDLVKQGYFVNEGSLVSEEHPNGKYVFTDIITTNGHVMTTVYAKRKISRPLPQLSLQDFEPWELPFLSPWAVDPGDRDLITAVNDCDPHMYESPAFVPSEADLNLPRLPHQVRSFSSVEYRKHILKTQKQMQRWKRKAGIDKVESAIPTYRTVCPATMDTYLEYLNENWMKLLRFYASIRFAKAKFNIWRQCQIQNDEVVNILINGGRKYQQDPPGKITSRDPIAVGQKWRPAPVANDTRKLPVIFYGAAIIGASVFKGRKTQAGLSKKVKAAFKRADAQLRLLLVEVDEYLTSQVCSRCATRSLNHVNVNPDALHLPRVSTTTFTSPPCPSDPSTVSKTTSTDTFFTNEETITITTTKHTKETREELDEEQPGRVLGTTVSSSSTHDDDGSSYLHVLTTTVTSNQPTFTSTLVTTNTVTTATSPRSTADDLMLYSVLKCENCRTLWHRDRNAARNILSIATHVIQYGHRPSILNRPITDPQETTLHGQTETAPAN

SEQ ID NO: 2070 - protein, 440 aa, unidentified
  REGION 1..440: note = Table 20
MTAIYVKSKPSKPLPRVTLSDIEPWEWPYFSPWGLDPGDRDLVVAVDNCDPLIYDAPNYLTGEQLQDLSRQYPSLQVPRQYAAYKRPHQVRNFFSSEYRAKSDSLHRKLQKWRTKSGIASLESSIPTYRTVDPVELDVYLRYMDAHADTFLSFYAGVRMAKARFQIWRWQQIQDSELVNIFLTGGSKYKADPVGRITETEPMPRRNKWRRAPTRNDATKLPVVFYGAANVGSSVFRGRKTQHGLAWPKGPGNSLKKQMPSPVPQNMQFPEVTSVEFTRPLSRDGLSKEKKTTTTTTTPDSTIVTTTTTTTLVTNVPASDDPGRQSGITSVDHGSSTSASHNRHSHVEKTTITYEGPNATHKTVTTNTMTTTTIPASQEADQKLYSVKHCNTCNTDWHHDQNASRNILAIAWNIILGRRPTVFTRPGNVSPPQLPPPSWPD

SEQ ID NO: 2071 - protein, 1029 aa, unidentified
  REGION 1..1029: note = Table 20
MLRLVPEKRLFLIAVDDLEEDGDDQASTDDSDHDHDSESDEDIVDDEEAGPSTHFINTKRTVKKKQSLAVKQSKKLAKLEAEMDMVDNDKVGPSRRSYTRKDAIFHAELGPFRRFSRKGKLANGLSLTHGQKQSFIGVTRDVVRWATRLRFLHSLFLKFVIVKLFDDATPFPKCLFHPRLFTSISQLFLGQPITNQPVIGAFAPTLTAMYDLFSHAYPHLNITPLGGAHQGKKYGQIQEYMAKQEVVDFQNFVVENFVERLWYITQKRLEMAVKGLKTSDVLSIAKFIVNSVIKIEEEEAIRTIEYEITGDLPTTMNQLKEDISVDLKSLAAVVAIGKCSPGQPSTDERRGHVDSAMLVWACHAKLGCRDTLDTLLAIARHLQCRGYTTNASDGPPLLPIKEKYITTHRHLFLHLMIVMDKFAADAMLTQSKLPQNHKKWRANHGLTSKQITWSKKCNQRRANAPSFLARCFYPHEHIRPPTIRLLGAYPTPSFRSIHLTLDDSALHPLLISAGLRSQFAKPGCTNAILKPGYFVNAGSLRNVTTHTGKNMFTGMITTDGYSMTAIYAKSKPSKPLPRVTLSDIEPWEWPYFSPWGLDPGDRDLVVAVDNCDPLIYDAPNYLTGEQLQDLSRQDPSLQVPRQYAAYKRPHQVRNFSSSEYRAKSDSLHRKLQKWRTKSGIACLESSIPTYRTVDPVELDAYLRYMDAHADTFLSFYAGVRMAKARFQIWRWQQIQDSELVNIFLTGGSKYKADPVGRITETEPIPRRNKWRRAPTRHDATKLPVVFYGAANVGSSVFRGRKTQHGLAKRTRQLFEKADAQCRLLMVDVDEYMTSQICSACGDHSLQQASVPQNMQFPEVTSVEFTRPLSCDGLSKEKKTTTTTTTPDSTIVTTTTTTTLVTNVPASDDPGRHSGITSVDHDSSTSASHNRHSHVEKTITTYEGPNATHKTVTTNTMTTTTIPASQEADQKLYSVKHCNTCNTDWHRDQNASRNILAIAWNTIFLGRRPTVFTRPGNVSPPQLPPSSWPD

SEQ ID NO: 2072 - protein, 252 aa, unidentified
  REGION 1..252: note = Table 20
MDVLPNLEFEDFTPDELENTFRLWGLNPGQKSTDTRFENSPQPDAFHDFLRLFFENARILLNFYSLDLFRELQFHNYVGQQKAGAELVNIFVKGGKKYRNVQVPARTPRSKFDIHRDTKRAPQGFTVDNRIPMIAFGAITFSQTMRGTISGLARRCYKALKTAEAEGLSVVLDIDEYNTSQVCSKCQTVGLRELRTEASSFFSVLVCDHCTTQTGGQAIWQRDVNASRNMHSIATPIIHGQPRPNHFLPAIT

SEQ ID NO: 2073 - protein, 713 aa, unidentified
  REGION 1..713: note = Table 20
MMDPLANSQNLRGMCPIMFSKEFFYGCMQLVLGSKVTNKNTKMPVRVMESVFSDYRQLFSSEDMFLEKMPPGKSYSASLASMALTMATSMKNIVVETFEKRCLLYLEHRLRAEIPDIDTKTVKKLRIYLYNELSGVEDPPWPTSLDKTEDLMVHLNRITLTEYLGPHPITPKSLVTNICEHMSVLHQILRNYEQYNNVSSNELADQVSPWWAYQQLKDHDEFLNLTKKQRQQVSRQLRQHANGNDGDTILFTTTISDGLRNALLELVTDTRARIANSRRVKAGDDEINLDDCFVPTRSSLKPDHRLFNLLPHRSLGMPFVEVPIDSLVALVNNSLPPGSPLPKARRSTLKGIHRIREDGKTFERVFNLGAVRLARGVDNLDQYDDEEGAAGRKMPIFNNLVSTDGHTVNVSLVRPTAGPPLPDLELEDFTPELVNNHFRLWGIDPGMTHIFTATDGSSQYLKYSSAEWRAKSGFTRRLTAQRQRMTTQITDIQSRLPTTKTASVSTYATAVTSIMAHLNTLVSFYADVSWSNDRLLNYSGRRRLDEEVVKIFVDGGKKYAHNTASAPSTSSHASRFHKAAFTPSPAIPLLGMGDGSFAMTMRGTKPGMASRVKKVLKRAELEGKLVLVPVNESYTSKICSKCLTNNQENKVLEDGSRLHSVLVCKDCNTVWNRDINACNNIFFLATEEIAKRSRPSVFCHPNHPPPQPPQTMG

SEQ ID NO: 2074 - protein, 905 aa, unidentified
  REGION 1..905: note = Table 20
MQHSYNQLAAHRLQEFQVTKIHGGIAYTEIISSTMDKYSTALVNRIEGDMTQWMTNLYSLRLREVADQQDPPTTSLEAGAADKLGLYVLQRYMNDDANPPVFPSTLSDFGNSDNGKAIIQQVQDESNVDLRIIHNMSTLKAHYDTNQRRVESHYRKLHERIVHIETGSWVTMDKALTRIDQLLQVPFATNDVGIITSIARLSQALLGLLQLTQQSVTDLVTISDRLGLEHRLYETHWNSGIMDTTLGTLRISATQNQQVVVQSNLEAAVDLETGELSDLIDTSTVELTLLRDNLINEEQVFAVSQQHYNEASRLYFANDRFGNEQLLRDITEHCQQSGTTTTPGYAPLKFTQATISQHCDVFTKYAYNIARHLEQFNNNQVRATDLVQKEAPISWCWREIKRLDEYGSMGKHRRSSLVRFLRKIIPTEQTLDRERLAYLSDGSIAQLETTIMETRCQIQKSMEYLRDPETNHHLYDQCFKPELHDIAKEQRLFNLVPKPSFIKKYIKLTNGGIKTLLRHVGLGTYVNDEGNSRPWEDQNTAGGYLMTEGYATSVPFHKPLTNNTEQLPELLPEDFKGWGFKYLNIWGADPGVSSIYVASNGSDNDVYHGRPDALDEDHDRTRLLTGAYDEHEIRRFSTVEYYTKAGYKKTMQKINTAKTTAIQTLENGIKTNRTADLNKIQQYIDSVLVAFTPVTDFYAQPEIQSLTFLNYQGRQRMDNELINIFVNGGKKYHPPACAYERFHNAGQQLLGAGTRRRRRRRTRSVAVGEPPPSKENKWNKAYINHDDTKVPVVVFGDAKLGRMKKVALADRCRGLLQKAAKKGRLVLINMDEYNTSKTCSKCGMKSLSKLETHEHHQLYSVLACSTCNTVWQRDVNASRNIRALFVNSVINGHRPGHLSRPSSST

SEQ ID NO: 2075 - protein, 1015 aa, unidentified
  REGION 1..1015: note = Table 20
MARTKQGRKRRQNTPEVESDRTQLVPIEEEAGPSTSRPVKRQRRNKTRNVTKRRQNADEKAEKRTGRDERSLAIDRQRRSRRPCPTCIKNGNIESSLTHSRSSSRLCPYRIPSQRAQGNQLLGGKKTKTLTIKHGLYPLLKSLRNAEKEILMGGLQAVVDFNRRVLICSHLFILDYFNSRLTNGLDIPLVFLDYRFVNGVFQLVIGRSWSNNSLFTEEVRQHIEESFATFLIQHPNVHCPLVPSTVRGKRPIGFSKILTSTARTYASSMVNHVVEGFDQAYIGYLQARLARSIPELNRFQVGALADFVFDTCAQNQDFEPVWPTINVEDSIDHAMVDAKVDTALNELIDETWDRWTQLAIRIEQEGPLTQQDADEDNQDDEDNQEEVDNLSVSTATAMSIDTISTLGISRLDVATGPYTLPPLADPSLSTDNAIRSQVPPSVSITTTTITRYPHLFIKILFDVLCSLERLNEDQHTAPAPQTSVHWNWTHHQLSGMHDWSYLNHHQRSKLVRGISKSINNNTPVDIERLPRVFSQQSRQQVTTLVAETQRALAAGTFSSEAYLVSPKVRLFSVLPTPSLTRKFIQVSHDSLGEIMRHFGLEHYAVPQAIRPVAGQVHDNFKILNLKRIHSGRGIFLNQLYTDGYSVCVPFKKMSGASIGQPLRLTDISPVAMQQMDVWGIDPGVTDIFVASNSSDPRAYLSPADLPDEPLLATPPNPRHQIRRFSSAEYYVKAGYRKTVANIKAWKQQHGITEIESSFGSPKTSVRQNITAYITEKLRHLDRLLLFYGQDIQQLRFLNYRGAQLVNHDLVKIFVDGGRKYGSHASNYNSHDTYMSRLNEDGSFKSRRRQHAHPSPLQPSETRNGKWRPLPFQPSTQIPLLCIGDGKFGRRRFNKKPLGLANRFKKVVRLAQRQFPILVVDADEAFSSKVCSKCGKKTLTNVTVDGGESKLHAVQCCETCSTVWQRDCNASRNIHALSHFAALGVKPLVFTPQDQEQADPSTTSPPDAQPNQPTPT

SEQ ID NO: 2076 - protein, 299 aa, unidentified
  REGION 1..299: note = Table 20
MQQMEVWGIDPGVTDIFVASNSSDPRAYLSPADLPDEPLLATPPNPRHQIRRFSSAEYYVKAGYRKTVANIKAWKQQHGITEIESSFGSPKTTVRQNITAYITEKLRHLDRLLLFYGQDIQQLRFLNYRGAQLVNHDLVKIFVEGGRKYGSHASNYNSHDTYMSRLNEDGSFKSRRRQHDHPSPPQPSETRNGKWRPLPFQPSTQIPLLCIGDGRFGRRRFNKKPLGLANRFKKVVRLAQRQFPILVVDADEAFSSKVCSKCGKKTLTNVTVDDGESKLHAVQCCETCSTVWQRDCNAS

SEQ ID NO: 2077 - protein, 620 aa, unidentified
  REGION 1..620: note = Table 20
MANDRGIQTAEEDPEGDDDADMMSLDGQSSAYGSIATTNASISTMGVSSLQINNPLPAMQPICITTSTLTLYPHLFIAIMYEILREIEDFNSNDVRLLPLEPQSVNKNWVYHHLSQMADWARLNHRQRSKLVGALPKIINEGVEFDPLRLPRELSCPDIFVQLTEQSHQQIITLIATTQASIQAGTFTTQEYLTRPQLRLFSILPVPSLTRKFIQVSHQSLAEIMRHFGLGEYALSSTSAASNTIHQNFKIFDMKKIKHGVPPGNQRQLALSDMDPSMLDDLEIWGIDHGVTQVFVASNGCDPHAYINDNELTDEPSLATPDNPRHKIRQFSAAEYYCLAGFPKTNTKIREWKDLYGIPQLESSIGSPKTSSLQGIIYVLDLLLEFYGTDAQQLKFLNYRGRQKANDEMVKIFTNGGIKYGPHRERGNSLEVFERRRKTDGTLRRRRRQWNQTEALPPPSAPRTEKWRPFPYAQTPRIPLLCVGDGRFDRRTFRNKPHGLAKTFRKVLKQAQRQHLLMVVDVNESWTSKVCSKCGSRGLENVLLDEDDQSSKLHSVVCCKACHTMWQRDYNASRNICAIALFAIYGFRPLVFTNDYGQETEGQQGQNHSPHPGTRNLLDE

SEQ ID NO: 2078 - protein, 266 aa, unidentified
  REGION 1..266: note = Table 20
MLQDFEVWGIDPGVSQVFVASNNSAPGAYLEELKVPDDELLAPPENVRHQIRTLSWRSFAAQLGFPRPMPGSRNGSKQMALMWLEVHIRTKMAVLDRLLMFYGQDIQQLRFFNYHGRQKATCEMVKIFVDGGRHPDQGNSFDVHQSRWKPDGSKSIIHRFERKIFRGKPSGLANAIKQAQRQHLLLAVDVNESWTSKVGSTCEQRTLDNLRLDHYNVLSKLHSVVACSVCRKLWQRDVYASRNIRFRAMLQVFGVISQVFTTFSSG

SEQ ID NO: 2079 - protein, 1340 aa, unidentified
  REGION 1..1340: note = Table 20
MTMEQEFASVFQLLMGNDTANKKTVTENYGKASKQLLRAAYDPPRSNSLGSRKDSRKRRIRLERQEASEAQSTTHSGSKRQRTGRSRSTVKRKQSADEKKAKQDARAEFSAHLPKFGDQRPCPTCMKEVDRLEKLGDEASLAAAEIRRRTAQTHSRASSYRCPSHKSTKRVLTKRKLGGTTRQHTLKHGLANLIKHPANDALDSTVPSTFISAVRSLASHNRDIVILSHLFLRHFVTTLLRRPNDSLPPALFDQVFFTSVFQLLMGKAVTNTRTLSQELRADLTSAFATFRTEYGPPGNQPWCPPVASPVGRRPVTFSSALSSTAMQCAKDWKNHVVEGMSQCLVTFTSAKLLRLVPELKSGQARAYALYLYDRIAQDPKFEPELPDYTSMDSRLKGKVQSKFNLIINDCHALLEPAIRQIQEDLRERQALAEERHRKQTFEQASREATASTQPATASSSHNTPTAPWIPLEPLASDDLDGDDDMMSLDTALSVSATIRFGGLNLQSVSASDSDVSSNAGSAPDDQPALRIADGDNNVMLTTATYSGWPHLFLPVMAKILGTLEMWNKADEEQPANNQKEASLSWVRHELSQIPGWAKLGHQKRTRLVSAIAKLINSQSARFDANKLPPAFDANSRTMVKDTVETAKQQLAQDCFKPPAYLFSPPCRMFALLPVPSFRLRYVRINASTMGTLLHHFGLHHLLPQSSSSNENQPGALVAPHKNFGLLDMTKFKNQGVFEDSLMSDGCAVSATFKKLKPVNQEAPLTLEDIDTDDLSECRVWGVDPGVGQVYVAVDGSDTSIYDNEGAMASDPRHEIRRYSSKEYFHDAGFHRTNQRIRDLKSQHGIDTLESAIPSPCTMDLSKLDLYTKAVLERAQLLKDFYAEHLPPLRFLNYRGRQKADGELVNIFLSGGNKYGRQSDRELVDLTVPEGNVSMQSPQEEQVDMDAYEHDGPHATATSESAPPLALSPVLSAPPHATSQPSVGTDPTSRATAIATAHGAIAIAIAEGYAPSIRISIDNPQPQEPMQTGTRATTTLQQVTPPLPLISTQPSHQMGRGSATSIADSQNAIAIAIAGNRAPSINISSGSSTSQDSLPIENDNPSVSIIGTSSEPSVAVDVGDTALALASTSPLFLQPMIDSSSRRRSETAPSPHAPQSFANEPDVLTDVNTPPPLPRQKWRKQEFVATPKSKVTLVCLGDGKFGRRSFRGHPSGLTARLNKLLQRADREDRLVLLSTDEKWTSQVCSKCGRQGCKPIEIAGSNLHSVTVCQHCGQMWQRDCNAARNILSVARLAIEGASRPQVLSQKVTDQDGDVQGAPNDPDPVDNPPPTASPIVHNENVQV

SEQ ID NO: 2080 - protein, 624 aa, unidentified
  REGION 1..624: note = Table 20
MLPSHWTRLTKTLTSLIFQSLRSVFEDSIMSDGHSVSVTFKKLKPIDQEEPLSLEDINADDLADCRVWGVDPGVGQIFVAVDGSDPSVYDVEGAMASDPPHEIRRYSSKEYFHNAGFHRTNQRIRDLKSQHGIDTLESTIPSPCTMDLSKLDLYTKAVLERAQLLKDFYAEHLPPLRFLNYRGRQKTDGELVNIFLTGGNKYGRQSDRELVDLTVPEGNVSMQSPQEEQVDMDAYEHDGPHVATTESALPLALSPVLSAPPHATSQPSVGTNPTSRATAIATAHGAIAIAIAEGYAPSIRISIDNPQPQEPMQTGTRATTTLQQVTPAMPLISTQPSVQMRHGSATSIATSQNAVAIAIAGNRAPSINISSASTTSHDSFPIENDNPSVSIIGTCSEPSIAVDVGDTAFALASTSPLSFQELQPMIDSPSRRRSETAPSPHAPQSFANEPDVLTDVNTPPPLPRQKWRKQEFVPTPKSKVTLVCLGDGKFGRRSFQGHPSGLAARLKKLLQRADREDRLVLLSTDEKWTSQVCSKCGRQGCKPLETAGSKLHSVTVCGNCGQLWQRDSNAARNILSIARLAMEGASRPQVLSEKSTNQGGSGPGPMDNPPPTTSPIVHNENVQA

SEQ ID NO: 2081 - protein, 1997 aa, unidentified
  REGION 1..1997: note = Table 20
MSINITSSSSKQKRYEGMSAKDIIEYKKRKKQEEAQRMKDEKKKKQEETGCCGNNGHRNEKSAQCPNNAKNAKAQEKQAKSKAKKERLASTPKSKPLQGCPTCRSKGRYDSIGNPHNSSRDRRCPYHEPTLKEKLRDELGDKHSRFVVKCGLETAVRVQAPANDDQIDNNVMKANFITEVRHLTDLVREVAIRSMLFASFFLYGLLDAGVELQAILFTEHFFRGCQQLVCGMSISHNTLPKADMTACYNQLLTRIPTLPVPQHLLQHSTHASCLSEQSQKQCTIFINNIVENFGSRATKFLYCGLRREETTNNMDDKDLWKLAGYAYNAFVMLDTKTVFPKGIQQSPELERTTRQVVESMRLPQGKPTPSAITRNPAPYLRFLHRTACAIDQHNMHDREKASGPQVKVTRRWCFDAIERIQSLQDLSRRQKSNVCVKMSAAINDNATFRHTNMAAERVQDIQNCIMETRQQIERSRAFLDPNQHGVNINDCFRPPIHLVVNQVAAFSIIPSYGYLRQHVGISMNVLMVLLRHSGCASLICTEEDGEDQHTLATRQFRAIFDLGAVRTNPDSIFTNRVVTDGVALGFVYAKAVKNSAGLPDLSMEDFDDYDLDQVFSLWGLDPGEKTIFMASDSFGEERHQLRSMTKKEYYEGMGLYRSLRLIQGYKQQRVQVERDHVAEQQQDPIDMDDNDHWQTEQHQSNDDDPFGLQEHNPTDVDDNGYWQMQQHQSEDDAPFGLQQQNPTDVDGNDGDHSNDDNPLQLQQQNPIDVDDNDGVNWQLRHQPSNDHDHWQTEQHQSNDDDPLGLQQHNPTDVDDDGYWQLQQQHPNDHDYWQIQQQHPCDIDDEEEQWRLQHQYAHSQDTIDMSIQEIESNLPPRRVSSQAQYLLYLVHLLRFLPLLLSHYDARYTILRWQRYQGRQRMQAELANILINGGTKYGKKVSKARRARRQGRGRRGRKKKKGKGKQVRVCEKKWRPTEYTQSPKIPIIAFGAGDWKLIKGTLPGLKGVLLRGLKKAEMQGKVVVAMVNESYTSKTCHQCHRRNLNNVRVPGGAYPLHSVLYCTNCNKIWNRDVMASKSIYEIADNLARHRTRPSSACLLLELGEIVYIMEGVDTELKDLNLSDQLRSNSSFMKIAATLFHYGNQSMNAAQLVTAVRALNLLPLRGETPKSTIQGIISTSRKQARDLKQPDPFTIHKENSGRQAKYSISDTVLNGVKVPEPLEIPDEPIILKPVESSSGSFTSSYSLGKRQRKSPKYYTPEALRKAKNRRARAAKLRRKNKEGFSGAESDSNSDVDVDMDEDLDFMSMASSDEEDSQVNTIPEEDTISGYSLLYSAPPADQDYIDPINFEDYGVASYFAIAQQKGYSYPRFRSHDKIKIPKVHCEDKFRVTDVISNATQRAIGRLFILADGHGGRGCSEYFVRNTPAAVQKLCNNYDPEKFDDKDVQKQFERDIKRMVEEIDTEYLALKRIQLGRHQAANNNNHNDNNSNSDQQNETATPNEELDNDGCTLILNLFFGKWLININVGDSRSVLISAPKPADTVQKTAEELNTHPLICGLDNDYKMDVVFASQDHKPYLEHLAREILENGGEFIDSVQDRVIRVDLDKLREDGNRQTKRVALKNARIRPKCYSSHEQQQQQQQQQQQQQQQQSPLLSSDSNTSTPGYAAQSAVRTTANHSPVSNATTVSNNNTTTTTTTNSNNNGGFFKVRSRDERIPSLNVARSCGDLDFKMDPKRKIISCEPDVSFFRISDSINTDPNSKTLLTSGPNKEKRRHFLLMSTDGLFDYMYEETPERQNRAVAKVLGPMIEDGEKVGHLLLEEEERVGGETIEHNPSPKNESETTTTNEEKMAEDKNDAPTDNNNNNNSNSNSNSNPNTPSAEPMAVDPVVKNEGEQQQSETKPESSSSPPPPSSSSSKETEQQQQQQQQQQQSSEEQEKEPAPPLPRLFRELNEDEAKTRKIRERTLVMAARYFANRESVHGFFASTLQDYDDCTIVLIEI

SEQ ID NO: 2082 - protein, 759 aa, unidentified
  REGION 1..759: note = Table 20
MFRQRIREKILSVIRNAPESNISEPSSTVTADTVGGNNKKRKQSFEVKQQKKAAKRRANDSDVVPNCKSCHQPGHKSSRSPLCRNHNPSKAEVLYDNLGGGYTCFTRKVSFEDIVKPEHRPLLKQRVTEACAFMEQLKLHMCLFVNYYCINRRDAPPSAVFKQNFWYSVSQMIMGKRITTSAQIPNDLLPAWDAFRRIHPNALLRRGMPTGMVSCISEECVIIATCFTNAIVEEFEKRVKSFLYFILQNRFVLIQPKDIHAVVDKFAYPYVGRGFAEWPSKPFVNDDFKATIKRMCTPLQSLVVSPATLENMSANPQDYFLCLKQVSVAIEEQHSNHAMDVRRVPPSRAFALLPTPTIRWPTVSLSCDAISSFMRKPRRRGYNQQLQLYYDIFDFSKLGFESIQELQGNGNNQVMFANLVTSDGTSANMVFHRRKPSQEDTLIRKHKLQMKDFTLDEVLTHYQPFFVDPGRKSLYTAVSPDFNYRERAALPSFTDFGSLQVRKMSTKEYRFFMDGGLHKKWLKRIRDANLELLLSQTPTPKTASSDAFNNYCAHQFNNFNRISEIHNAQSGKRLLGGYKGRQRAKQFAVNFMANGGKKYNRERRGKTRSDRRSRQRLQQASQTVKKRKFKFSRFFYDPARIPLVIFGSATLGKDHVPIRGLPSGSTNVLYQQLKERELNGDLLVVLADEYLTSQVCSTCNQRDLIKMPGVTGFSVLKCRNCHKKWQRDVNAARNIMKNAWSVWSGAGIPPVFQRRPPTN

SEQ ID NO: 2083 - protein, 791 aa, unidentified
  REGION 1..791: note = Table 20
MMYKAVILSKIRSAKEQRLSAAASNEESNTLEDAFTAALCKDCGDRGHFSKKFYKCKLYSSASADDVGTAGKKRKQTQSIRDAKRRAKRSGVASNNESNSICKRCQKSGHKSSRSAECEYHIKNKQETMLDNLGPNYQAFTRKLPFDTCVKNHYAQNLKARIISASRDIRNVVFRAQIFTNYYIMLRAEQPDNNEVPHCIFRQQYWYSICQLVNAKRVTNSTNLPENMIAVWNVFRSTYSSIIYNQALLSGTSQCLAEACTELATCYQNNFVEYFESRLLFFIYYSLQNIFKSMDSGTLRNIAKTYCYQYICRGEPIWPNTIVLPPGLTEEIFRNRVDQECEQIRALINQRVTLATLSYAPEIVYKCLKHILDKYEDEHFRHCPFDVRRLPLPRLFSILPNPSVHWRYVTISANALSAFVTIPFPRGYSNQLNLFQKVFNFNALRIDDLEPNGENKTLFGNIVRSDGFCVDFLFYRRATTENEDSALIENHDLGVDDFSIEEVSQLYRPSFLDPGRKCVYTATTGLNTTEHEIRRCSIKEYYHFTGSTTYSKRLEQMKNEAGIKAIESVTPTAKTARSIKFGRFLDHMLINMDRLFAFYNFKSAKNRFNLYQGRQRAKEMMVNLLLHGGAKYNRKKRFQKKKNKKRQQRKNRQQQYRRIGKWKPSKFAAEDKRKVPLIVFGNGMFNKDIVKLKGIRCGAVGILWRCLKKREAAGDLLVVPIDEYLTSQVCSSCQTRTLEDHGDVKGKSVLVCKTCNTLWQRDVNAAKNMMSISLSVWNGQGRPQIFRRSNA

SEQ ID NO: 2084 - protein, 553 aa, unidentified
  REGION 1..553: note = Table 20
MERSNVVKIVPYVYQYICQGVSVWPQGPAFTEERKRIVDETFLPLKHLIPTRVTLTSLSESPNNFIPCLLSILSEYEIEHSNHRAYDVRRLPLPRLFSLSPTPGMYWRFINISASALASFIKETRPQGFQNQLDMYYRVFNFKKLRLSMDDLTPNENNKILFGNTIKSDGFSVDFVFYRKKRMNNGSDVELTLEDFNYEEVHNQYNPMFLDPGRKSLFTAVVGVDSAKQIRKASVKEYYHLTGSTVYSKKLELKKKCSGINTIESQIPTPKTAAVESYDQYVKYMLTHLDKLLDFYGKDTAHHRFQLYQGRQRAPEMLANMLTHGTAKYNRSRRKRKKKKKGKNDKKKGKNDKKKDEGLSLRTDEKKLKWRPLPFQENKEKCPLVVFGAGVFGKDMVKMKGLRCGVVGKLFATLKKREAAGELIVVTIDEFKTSKTCSSCFFDDLKVVKTPGFKGKGVLGCCKCKKVWQRDVNAATNMMTISKPTGNNSLNRLLYKSKPVQIDEQAFWEIVKSFIHDKVSPPKKATDDDLTTWYSKFSDFSKMDNGISNDKGT

SEQ ID NO: 2085 - protein, 741 aa, unidentified
  REGION 1..741: note = Table 20
MVYIPTTESIVPTYVDCGLVGNYNKNYYKCSKYNPDTADSVGTSCKRNQSFEMKQEKKEAKQQKTNNTNVVCSNCKEVGHSSSRSLLCKNHLSSKLEVFNNNLRKAHQSFTRKIPFRSCIRNNESIIATTSSSVNPQSATTINSRIISACEDVRQLIFRAQIFVNYYILMHKDDIIPDCIFKQNFWYSICQLVNNCKATNGTALPSDIIPAWDTFRIKYPAIIYKVNLASGNIELFEAKVLRYIRYILQNAFMTMSPDHVAKVAKEFCYQMVCQGNPVWPKSIQLSEDVQVTLKLLSASPGKFVRSLAYILSEYEREHLAHNPYDVRRLPLPRLFTISPSPSFQKLPRGYNAQLDLFYKYFDFKGLGFKSIDDLRPNGLNNVLFSNTIKSDGFTVDFLFEKRGATALKKVKKDIENHDLVLEDFEYEEVERIYQPVFIDPGRKAVYTAAIGLDTSNHQIRQCSTKEYYNLTGSTKYSSRLQKLKDCKGLTSIETNIPTQKTCSSVLYDRFIQYIIILKDKLFAFYGKDTAKDRFFLYQGRQRAPEIMVNMLLNGDKKYNKKKRNKTKRKKWRKMKKAAKKSNELLDRKARAKKKINDNDASGTVGTHDVTKSNKWKPSKFEYDKSKVPLIVFGTGMVGKDSVKLIGLRHGVTGMFYRTLKKREKEGELLVVPIDEFKTSRICNIFKTDTLYKASHTRGFGVLVCKTYKTLWQRDVNASKNMMSIASSIWNQDGRPTSFKRI

SEQ ID NO: 2086 - protein, 1513 aa, unidentified
  REGION 1..1513: note = Table 20
MYKSLILNKIQAVKASRESGERPQPTCKDCKEIGHYNKKYYKCNLFKEDKADDVGTSKKRQTSAIKNKVIADPNVRCINCKGTGHKTSRSPDCPRHILSKLEVMNQNLGTGFQSFTRKLPFDTCVKERYRSVLKDRILSASEDVRQLLFRAQMFVNYFIILHSNENIPGCIYRQPFWYSIRQLVNNRRVTNSNVLPPGMLDDWNNFRRQHPTILYKVDLASMPSGVSYLFECCSRDFEQRLMSYLYYLVQNIYMSMKSDQVKLIVKDYCYQYVCRGEPKWPASVALSDDLKLRISNGCDSLRNHTTESISLKSLSASPGTYIRCFLYILSAYEEEHRNHSPFDVRRLPLPRLFSISPKPSCRCRFVNVSVNALSCFVKESLPRGYENQLQMFHRVFDFTKLRFKDISQLRADGENTVLFNNLVRSDGFAVDFIFNRKKQESIIGGHDLTLEDFTYEEVEGVYRPVFIDPGRKAVFTAAVGLGDDHQVRRCSTKEYYDLTGSTKYSIKLQRLKDERGITPIETDMPTTKTCQATVYLTYTTYMLLHRHTLFNFYGFQRAKDRFFLYQGRQKAPQIMVNMLVNGSSKYDRKQRNRRRKKRKRKFMRRQNANKKKIHVTTIAKRKWKPSKFQQDKAKIPLIVFGAGMFGKDLVKLKGNQCGVTGILWRALKKREKEGDLLVITIDEYMTSRICNICHEDSLRKVDGVKGHSVLGCQNCKTLWQRDINAAKNMLLISSLIWNGSGRPEIFSPKARGDLDHYSVKTVNHFNHQQTKAKLRRLTVQRRNETWRQFCEKMAKSEYTKAIAKFSRIRKNRSLKPIFSVAEGPQHAANIMANHLQQTFSGSLSPENGATSFNLTSQSSQPFSPDSYPFSIDSIKSAIELLPRNKAPGIDHIKSEMIQPLIGILSPIFFYMFQLCWQWSYTPLSWRIGQIVPIYKKGSVSDPRNYRPISLTSIFRKILEKCIQPHLVTSGPPLDITQGGFRESRGSLDQVLCLTELSQIYRKQNKCDPVLAFLDIKSAYDTVDRNKIWSSLQSFISVPLLSLLQNMFDNVSIEVLLENYTSKRFHPQTGILQGSILSPYLYSVYINNFPIFLRPSPLEEPDYANPTQLASKINCLLYADDVVLIANAEALQSLLSKCEEHSYALGYRWNPQKCVVVDSNPQTKNYYLYNNELPHQSFFPYLGIPIKQTGIIDTKALIQQNINKTLGTMRQMASIGVNRKGFDKLISTRFYNQIVRPQLEYGLAISTFNLRNIRELENCQNQCLRQIFGGRPYTSTKVMLHITNLPSIKDRIAILQAKFIYRSLSLPDDSLLMKMLPYLQSVHAKSKWSKIANSPFWKTLTDQANNLSPSIFKSKRTEFLRQSYVTKLQEKHSKLLACCRPELAVDPILRLPMTRIERDRCLRWRFGWLPLGKPQPCPFHPSELFNKRHSIQCLQMHTRLFLPQTIEDPLSFLLNKLPQKTKKIPKLSITAWLIRWPVICSILHEMDYLAHNQLPVPAHNPGNPFVQQLSTNSS

SEQ ID NO: 2087 - protein, 270 aa, unidentified
  REGION 1..270: note = Table 20
MFHRVFDFTKLRFKDISQLRADGEKTVLFNNLVRSDGFAVDFIFNRKKQESIIGGHDLTLEDFTYEEVEGVYRPAFIDPGRKAVFTAAVGPGDDHQVRRCSTKEYYDLTGSTKYSIKLQRLKDERDILCLISMVSKEPRTGSFSTKVTKRHLKPWRKWKPSKFRQDKTKVPLIVFGAGMFGKDLVKLKGNQCGVTGILWRALKKREKEDLLVVTIDEFMTSRICNICHEDSLRKVDGVKGHSVLGCQNCKTLWQRDINAAKNMLLISSLI

SEQ ID NO: 2088 - protein, 577 aa, unidentified
  REGION 1..577: note = Table 20
MSVRKCCEEFIPVDALQNVWTSLTRQHPSLNSPPQITLRRSVDALTEATVTLATTYSNHIVLNFEQRVKNLFETLKNALVWKLIEKYMPFQEMQPTNGDWPEDWPEDVSLIMVATVDYLCSQLESSIPRLLHQETLSASPGEYIPALKFMLRDLEFVNQQAEKDENFDPKDLPKLFSIGPLPSMGWRFISLSAGLLVSILPSIRAPQSSSDYINVYYEIFDFRPLRIRRGRKDSTDHVQLGFEDFTDAEIATYFEVAAIDPGRTQVFTAAYNSGQERHQIRRCSTSEYYSMTGSQRRNQKLQQEKKEAGIARIEKSWPAGKTCNIGQYQSYVAHLLNNFDELSKSYDISRGKMRFDNYQGVQRSREEIANMLINGGKKYSKSRRKHIQKNRRLRRRHRKNRKTIKISEKWSQIYSSDNDDIELSLRPLVNARTSYARTPIKHWSNEQFTRSDKLPMIVFGNAMYNKDSVPMRGQRVGVTNILWKTLKRRERQGHLAAITIDEYLTSQICNHCRNRTLQKVKTADGVSHHSILVFNHCQILWKRDINAAKNMYSIAMAMWTDGRRPNELARPQQEIAA

SEQ ID NO: 2089 - protein, 352 aa, unidentified
  REGION 1..352: note = Table 20
VEELKDSSVNRGVIFTNQILSDGFAVDFQFARKSAKKERATLDAELTGTDFTEEEITDYFQPCAVDPGRSQVFTATYGCGNSPHEIRRCNTREYYTYTGSPLGQKVIQAEKKQAGIEAIETDLETGKTQSLELYDTYVRCTFQHMNALFAFYGPSKAEERFRNYQGCQRAPEEMVNILTNGGKKRACPPESAVRSTLCKNKGFRKWKRARYQESEKMSFIVFGDGMFGKDSVKLKGHRSGVVGKSWKHIKRRERRGELLAVEMDEYLTSQVCNNCNNKDMKKITTADGISFHGILACKHCGVLWQRDINACKNIFSIALSMWVGEGRLQRFSRLPTPNNIPESNAGLPLGEV

SEQ ID NO: 2090 - protein, 490 aa, unidentified
  REGION 1..490: note = Table 20
MQLVLSKSVTTTNDKMPEDLESAWEAFKYAHPSLQVPPRTTLRSSDVLTEACVTLATSCTLSKKDSMAVASMYAFERLGRGSPCWSDSVEVTLPLVAITDSICDGLEAIPPKPATPQAISASPCYFLPALKHILNYEYVILERTEEPQRLSTTFFEALDFSRLRINSWEEFTKNPNCKFACKILTDGFAINLLFVRKAKDKLSSTELDLDDSSFNEVQTHFEPWSLDPGLSQVFAGVNGSGQTPHQVRRISSKEYYAMTGSTRRAKKLQKEKDRSGITPVETDLETCKTASSQQRNQYVACFLRHFPKLSAFYGPRMGESRFQNYQGMQRTQEELTSAEQEVACFTIHNDTKNTINSVWISYVREEQFKGDAREKTRSRKQMLENVKRRESSGELISVKIDEYFTSQVCNMCMHRDLKKVVTPDRIMHHDVLVCNYCHTLWNRDINAAKNMDYIVKSVWSGQGRPTEFCPPTTNIATPNVVSLLPRAAGI

SEQ ID NO: 2091 - protein, 602 aa, unidentified
  REGION 1..602: note = Table 20
MGHKSARSKEFSNYKATLDEALKNELGDNYERFTRKVYLETVIRPEYKESFTEKIVKLSAFIRNVLFRAQLFVNAYIVNNKGSVDLAVITQQNFWYAISQLIMAVHPSIVFSIKDNPIKGYSDALSAACVVLATAYLSYIVENFQRRVIYYLTVRLAIIYQDKPKGLLYKLADDFCWELLTNGEPKWPIKYFDLVTIQHIEQILPIYDGLQARLPTPPTVKNLAAFPTKFVPALAAIISELEQLCVEHEDDNAKMPRRFSLMPTPSMRWRYISINAKALQTITKHKSDGTYKGNVSLFYSIFNFKFGYESLDKIPESQNKFTCCIQTDGFGACFTFARKAKEEKSTIQLGLEDFSDQEVQECFLPCAVDPGRTHVFTATIQHEEGNLETRRCSEKERQCYTIETGFPSAKTVDMEKTNTYVTYALVNIQHLFRFYNENSAPFRFYDYQGKQRPSAIEKERVAWKNKFQYSNSIPLVVFGDGMKNKDTVAIRGHVSGVTGILQKELLQRSRQYKNVLVGINEFRTSKVCNNCKQKGLEQKKLSNGKKSHSILDCKICNILWNRDTNASKNMLDISWAIWRGEGRPSVFIREIAVENTVPSNRV

SEQ ID NO: 2092 - protein, 315 aa, unidentified
  REGION 1..315: note = Table 20
MEELFLPVAVDPGRKTVFTATITHSEDRKEYRSCSSKERRSFAGVDRRTQKVLKLKKASGVEGIESQIPTPKTIDLDRMKQHIGYMLNNIESLFRFYNFLSAPFRFYAYQGTQRANAEMANILLNGGKKYNKSKRRKTNRNKRRKRRKRKSRSQEHAQTSTSNYVPKESNHKSSKFEASAKVPVVVFGDGLKNKENVPMKGQLSGTSGVVQRSLYQRSKQLTAAIVQINEYNTSKVCSSCKKKDLEKVKLENGIEFFGILVCKNCGILWNRDINASKNMAYIAASIWNGDGRPSIFEKSENRRQGNGAPLVNKCA

SEQ ID NO: 2093 - protein, 316 aa, unidentified
  REGION 1..316: note = Table 20
MFLNNGYTRQVIFARRRVADSFNNVKLQITGFSSDEITDHFRPCAVDPGRRDAFTSYHGNDNIWRLATKEYYHASGSGRRMMLEDNRKRQADIKEIEINIPTAKVTNDQHYLERIIYMQNILNRLFDFYNFRVTEINWKTYRGGQKALDDCTNILVNGSAKYNKGKRKKKNRLDRRKRRRITNRWNPGVEDLPVVSGNFHRRAFQTGDTTKMPLVVFGDGLTNKSSARFRDLRHGVPEKIYKHLRLKEKLGELYLLDIDEFRTSQVCNSCKTRNLRHYQAENDKSIHSILICSECNIFWNRDVMAAKNMFYIAEQN

SEQ ID NO: 2094 - protein, 736 aa, unidentified
  REGION 1..736: note = Table 20
MENIQSSNNTEALRAQNSKRTGTKRKDTSDVIKAKKDVNRRRQAATSEASSSTSRIICSSCQEEGHKSARSRRSFYKSNLALIIKGILFPFLLQASVEIPPKKPTPWRRSRQYQLTNAYFEQNFWYTISRIVHAGPDKIKSILKDYRSRRKERPNEENLGVDQLSNSFVYLSSTTTNGSLLVEANGLRNYGQSLSAACETVATNYNNYYIENFKIIICNYFIYTLKRKYPNVKVGYFENLVYNYVYGEVLVRCEPSSIPNEILGHFDSDVASSLSSFLNLLILEMKNRMPTLPVPKASLNNGPFKILPILRHILEKYENLHMAQPFQIDEDSASKFVSPRLFSLFPNPGLGWRFIKVDAQNLTGIFSEAKQEKQINESPFDHNQRQFFQMFDFKKLGFRSWEELKNMPGQRGRIKVLPASTADDVSLELSDFTTDEVDKYFRSCTVDPGRKDAFVSYHGGTDVRRLSSAEYYGMGGTVKRQKLQQGRKKSLGIESIETGMSSPKTASIQQYMLYLTYILQHMDVLLNFYNFETAKLKWLNYVGSQKAIQESEKYEEEQKEKRRKVRRSAAAQEEHIPPIPQSERRKNKNRFEESDCKKMPLVIFGDGLKNKDHVRFKGLRHGVSNKIYRQLKHREGLGELLLLDINEYKTSKTCNSCLNQDLQNLKCRRGDGIRKIHQVWKCDTCSIFWNRDVMAAKNMLLIAHSIWNGQGRPNVFKRQLATSNVVASSHSGGALA

SEQ ID NO: 2095 - protein, 346 aa, unidentified
  REGION 1..346: note = Table 20
MFLNGLYTDGYTYRVLFARRVLPSSPEDNIRLELDDFSREEVNKHFRPCTVDPGRRHPFVCYHGGTDIRRLPSIKYYNMGGSVTRMKKQHKYKQELGIEKIETDIPLPKTASVEQFVLYVAYMLQHMNTFFDFYGFDTSKVKWLNYLSSQQVIEESVNILINGGKKYNKGKRKKTRANRKRRRRNRCSSTRAPRERNPIATVTRSKSKMPLVVFGDGLKNKDHIKFRGLRHGVSNKVYKQLQARERIGELLLVDINEFKTSKICNNCLKEDLENLKISHDNKETKIHQVLKCKTCNFYWNRDAMASKNMHTIATSIWCGNGRPQVFKRHTATSNVVVVAHSGESAT

SEQ ID NO: 2096 - protein, 219 aa, unidentified
  REGION 1..219: note = Table 20
MVLNALLSSCLGLKTLELSVDPGRFLAVQDVAVPPVSHLEQLKVDAGVISLRLYAYLREFCEEVNKHFRPCTVDPGRRDPFVSYHSGTDIRHLSSIEYYNMGGSVTRMKKQQKYKQELGIEKIETDIPSPKTASVEQFVLWSNYLSSQQVIEESVNILINGGKKCKTCNIYWNRDAMASKNMLTIATSIWCGNGRPQVFKRHTATSNVVVVAHSGESAT

SEQ ID NO: 2097 - protein, 821 aa, unidentified
  REGION 1..821: note = Table 20
MRIPIYPDTEGFIKLKKQHLYEKLQQQEIEGIAVHNNFKGEAKEKKGIKRKDTAEEKHNKSAAKRARNSHLVIAAAISCKSCGESGHSSARMSIPLRSFFPTSDDDAFNNTLNKIKSLSMFLRNVIYRAQLFINYYILKYPADLPNEFFQQNFWYSLCRLINENMSIESFKQKYISHIPHLEEIWTELSGLEGVSMLVKKEGLTNYGQVLASACENVATCYNNFYTENFENIVSNYFIYMIRAEFQDLRMSYIKSIVYGHILEILFNVQPSTLPENIGSSVNKETQDKIRKFLNPLIVEIKNRLPPAPITKATLNKAPFDIMPVFRHILSKYESMIEANQEVTTSIQLPLTLPQQSDLLQQTEDSNQSRKRPKKKKSSIKNKISNAHKDKEKRFQPPRMFSLFPNPSFKWRFIKIDNQNLHGIFGRRIRQVQEETPFSFAQRSFFECFDFRKLKINSLAELQSLHEKGRMFLNSFYTDGYTCRVSFCRKKKPVSSLENVTLTLNNFNSEEVQQYFRPCTVDPNRKDVFTSYHGENDVRCLSSSEYYNMNGVINRQKQELERKKSNNIEHIETRIPSPKTTGADNYKRHITYMFQHFEALITFYDFQTARIRWSNYIGNQKATDHAINILINGSTKYNKNRRKNTRRNKGKRRKLNSRYTRDLSNTKQSKKGKQVARAFKEKFEEGDKSKMPMIIFGDGLKNKSHVRFKGLRHGVIDKLYKQLKRRENLGELLLLDIDEYNTSKTCNGCLVKNLENLKCGGHKIHQILNCNNCNIFWNRDVLASKNMFTIATSIWSGNGSPSVFQRQSATSNVVAAPSSVTA

SEQ ID NO: 2098 - protein, 176 aa, unidentified
  REGION 1..176: note = Table 20
MISFYRKRYAASPVNETALELQDFNSEEIDRYFRHRTVDPNRKDAFMSFHGNTDVRQLSSAEYYNMNESANRLKLEQDRKKEQGVQTIESNIPSNCNNCLESNLENLKHKSGTDNRSIHQILFCKKCNIRWNRDVMATKNMYTIATSIWRGDGRPDAFKRQSATSNAVDTPSPSMA

SEQ ID NO: 2099 - protein, 935 aa, unidentified
  REGION 1..935: note = Table 20
MEEVQAQPHIGLLKSDFVGVTTALTFDSAQSFQDNLNILRGRRTERCQLLFDQVTSYCQSARSAQDVNAIGLVFCRDCGQEGHVTKVSQNCPHHSATAPMIDLTSTNPDVRSNIQAERQAGRQARRAGAANPQAVARGRLRPRKEAFYSDLMGPNRTRYTRKLSFNQAVPQSYHRRQAFLEMILRTSHHLREIMIRIGLFLNHFILTYPEELNTAILEQNGLSKIFALVRGDQVVTETFAGQLPEHLVDHFRLLQAALAELPGSPSLTYSSDVYALTVNQALKSMSTGYVDTISDHFDKKLKRYMKWRLDMAAFESSSVIPTWLKYKIVDITYTDFALHLPQSPIQDIDLVAGLDDIVWPAEVTAGMANIQRVANTVRRSVLKAKPAHVQVLTPKYIKKNPQQVVAMLMIALTDIETYLENPVEEVKVQRFAILPEPHWHLRYVNLVPENIHFYTGTRRVRPSTSQAATPDVDYSLPSALLPLAQFWDVFNFQLFGYNSAADLSFPLTHDPLEAVSTNGIEVNFTFSTMKLPTPIKDVKLTDLPPLDARGSQEFAISTIDPGRRVTISQATNVQLSSVNDLPGEQHGQQSQVTPGCSCLHPDSLDTRPTATRDLPMKRATSAEFTAQSGSKQRAKKLDATKTAMEMVVDGVTTTFKAFESSLPTKMTVNTILYLERVRLILTHIGAIATIYDINFSIQRFNGYRGGQRAVAFAANVVMNGGKKYTKENRNPSNTRRNRRSRRRKCRKKRRSKALATMHSAAQDWASDPSVPVETFLRQLESISQRTARPQPSPPMRRPSNVSSLRTNDHAMPLICFGQGMKGRMAPQGFRGHQPGASGRIYKLLKELSCRGLCLVADLDEFRTSRLCPEHHCRHQRLDPYQINGQSSYALKSCNICHTVLDRDVLAVRNMAIIATGWLQHQHRPLPWRRGGSITT

SEQ ID NO: 2100 - protein, 805 aa, unidentified
  REGION 1..805: note = Table 20
MTLINVPEPVYTNLTGNFQEFQANNGLTQEQAILVLSWAEKHRSTRDPDTAADIRRMVQQGAQQFQVAAANPNPPEVCPTCHLTGHSSSANRACPFHPTSRAEFMKRHMPGHEQYTRIKSFEAFVRKPFVDQLRQAVSVKSEYLKNVMTRLQLFMSDYAANHASDLTPFLLHQNGLYLVSQLIRGRRDEFVTKSAQDPRVPASLLRHWDNDYHVTLAPYDTYDQPGHTAELTMACKEQATANKNHISKNFEGRVKAFIKFRFAVDGELPNSSAMGAIKAYAYDNFALRQPDPSQPIPEEIPHHHRRLMNDVIIELREMKPSEEDITAQTLHADPAKYLPLLRTILDVVDDVNNEWHYGRMFSGVLRTDGVQMHVVFARLPTGPKPPLLYAQDFANTTYPMHQYALSGTDPGRRAVVTTSFGSGSEPHPIRRVSAKEYKTITKETVRQKHLNDRKNNVLLPLPGGTMATMATIESETPTTTTCDVVEFRQAVSHKLRHLTSTMAFYGSHSSKARFEAKKGQQRGAAACVNIMLTGSAKYCKAKRMKAKTRKNRRRRRKLSQEKRAIKQQIVRSDYVAVDTQIADVDNQIAVQEAAMDAIVSGIMDLDLSQNQAIQSALNTHVTAHELMVNTLEQHRLLLKNQKEQLQQKFLELNHSPKNPMKKRYHGSRPQQQGPSLVAFGAAMIGRDGARIRGHAVGRTDAVRNHLLERQSRALALACNVCGGQLSPVANNNNQQGIFGLKHCTACCMFWDRDACAANNMFWAALSTLEVGARPAPLARPAPGGPHHRRPTLPLISLPPQNCKEI

SEQ ID NO: 2101 - protein, 427 aa, unidentified
  REGION 1..427: note = Table 20
MFYGYILTDGVSLNFVFSRLPRPTHYDLYAPDFSRHSIQGHFRIAGLDPGRRDIVTTAGGVGDGIYPTRQVSTAEYRSISGVTKRQQHLENLKNTTMITELDGNIVPFSTFESNLPTLKTTSPEVLQESIRVRLSTLNQSLDFYDIRQSRNRIKAFQGQQRAIATTTNIALNGGKKFRHDRPASKRNQKLRKNRKAKRRRLRQQRQQAIKDKYDLVVEQLVVVNRQIKLMDDALLNLARLNSLISVESVDLGILHANSSQAQRTWTETLRQQLTDQKIELQASYLAEVGGSKMKQWKKNRHGSNDTTATALPLVAFGAGMISTNHNHIHGYPVGSTNLIRNHMLQRQRRALCIVGHTNEYLTSQICSLCESRMPNAVIDGQQVYALKSCPTCHRTINRDKNASSNMYKIMATSVDGLGRPLSLSRTM

SEQ ID NO: 2102 - protein, 313 aa, unidentified
  REGION 1..313: note = Table 20
MPWNLRFPPPKRLILSRTLPMSSMYYNMQIPLTIFTKTMWLISECAITWEDSGRMLKSSTCFSVAARNTPRKKYKTQRPYASDTGAKPAVPSQELAPKGCPMSNEGKATKKNGGGGVKHIQPFFFFPLSFSDWPYAILPWDQPEQGDQSSDGWPELKKRHDMKDSEDDGLRSEWRDNSRKWKPLGPCPNYDPLNLVVFGNGWRSFGRTAFRSCPAGLAKRAYKVFKAAAVNDLLFVAEINEHNTSKKCSRCWGELECVQVKSTKLHSVQACKSCRTVWSRDKNSANNIHRLSKYYIRDRKLPPPFQKPSHPLL

SEQ ID NO: 2103 - protein, 312 aa, unidentified
  REGION 1..312: note = Table 20
MVMIKRGREGPGRMEALVAPLLFWMVGVDPGKAYDFAFSEQGGEKITWKLSREDRARLERRDIAQAARLARKRAERATYSPRAGKNIDELLRAVKPSESCALPAYCAYAKRQLEADACADGYFHRRKVYRKDKMNEANARRRAKALVVQSFRDAFGGPDEVAIAMGDWNRARTSWLVSALVEAGYLVAYLDEYRTTKACSRPGCCGECHRFMDHGNGDLAWKIIKCDRCGVVYMRDWNEARNLFKAAVALQRGAARPPTLARPMPAGQVRLAAAAAADTAGAAADASDTANSDSGSDSDSGTGPESDGSDDC

SEQ ID NO: 2104 - protein, 1314 aa, unidentified
  REGION 1..1314: note = Table 20
MGNPAFWELLQRLQVTPKDVDPKDMDGVHVDALACYFYYITTMDYYITRRVFREQKEDEIVDDLQVKRIDRLATALDNKMAQTFDKGTAILHIDGQATLQKKHAHEERSAVHGEKLICLNEKVTTVTELCHQSLQHSPPTSTTMRKVRKAYRSAQKQWKKTMRIDLATRVALAEALKRRGWQMCHNDDHTGTCIGEADVCVGIIASSRQRELGPLVVATTDSDLLVYNNVSVLRQHPRQKSSYSLYVQDEVLATLNENRPKLKRGKKTVKRVQVLTAEVWRVLAVVSGNDYDANVRGFGIRKNWAILAEIWSRTRLDSEADLLRAYRREMSTRRNKDGPLIVPEFINSASVFLHLREDIQDDAPALTTNDNIMKTMRLYGQAVGAHNLAKVEKNQVYRARVVSARPKGYVRHFRTSGNAYTPKVIAPPSRHPPAAAPVAPTTLSTQKSARIDKGKRKAETEAAKTESKKPKKKEKKPKVRVVRSARWMREKQDHADREADAQAAGTELARHRRKTNLGQLINQAVGSKYETITMNVGTIRACLQGALPKCLETASQDTLSALADDIGKTMANLAKLNSDLCIIASLALQHYIVTVMAEHPSVNQAQARTEAFKPLHKGQSFFPALIKELYRPTTSYHTRATSDSRAGVDAARMFLIAYEDELAAPLAEIQQHLNHNAPKGFLEFVARQLSDKFRSHVDHYLVILKRRVLQRAPGWSRGEGSALLQSVDDKTGKSPDHDPISLLWIMNAALTKDLRISLYPKPGWRDSFVTLSETYLFQALIRPRDNAEEDKLVKLYHVMFKQDAIAESSMDEDENGEVNIFANHRGHLTRQLFLSGRTNFARHGAVGNPRDRTLPSVLDFSTPTYQQAIGALAGASSSDKSYAQCKKDFKALVLQDLGSRYPRPPSQADTDRKYLLCGTFCTDGYQVKLHAYHLDRPKKEDPSPASSSSSSSASSSSAPSSSSASTPAVSSKAAGYRRKTRYIREALKSQDDVESVFGDQQSCIVGAIDPGIHKPATFMVQDTLDPQHRLVIDVPRGDLTFNERLFRSRLERAKKRDKIHEVEQRIKGFRLAEPPVSCSAQPLSAQPLPDHQTATTPEPTAAAASLVQEDSPDRLSTTFSEAPINFEWHARSVLATSVQLRKFYGSDEYKRWLYQKQQGTRAEFGKAIKSILTTLQEPTHGQHPFSNNRAAIKSRKPILGIGDGNFGKLWSGKDRSGRFRDKLVAEAVGRGLPTYQLDEFRTSATCCNCGSVNKTQGRTVVCQGEACGVMKDRDHNATNNMGQAMVMWVSDFTWPEHLERVTTIKVEEIDHVLA

SEQ ID NO: 2105 - protein, 509 aa, unidentified
  REGION 1..509: note = Table 20
MTRQLFLSGRSNFARHGAVGHPADQSLPSVFDFETSEYQEAIEALAGASKNDQSYVQSKKDFKELVQEDLATRYPRPPAAESQDSPDRKYLLCGTFCTDGYQVKLQAYHLDHPKKNPSSSSSSSSSTSSSALPSTSASASSTSARSGYRRKAQYIQEALRTPDDVRSVLGDQHSRIAGSIDPGLHKPATFMVQDTLDPEHRLVIDIPRGDLTFNERLFRSRLNRARKRDQIHEVEQAIVGFRLDDPPAWCTAQPSPVQPPPAQPPPAQPSPAQPSPEQPSPEQPSPEHQPATAPEPTTAADSFDQEGSLDTPIITFATARTRFEDHARSILNSFAQLRNFYGSDEYKQWLYQKQQGTRAEHGKAVHSILKTLQDPTHAEHPYIKNKAAIRDRRPMLGIGDGNFAKIRSGADRSGKFRDLLVGEALGRGVPTYQLDEFRTSATCCVCGDTNKTQGRTVICQGETCGTRKDRDHNAVNNMSRAMVEWTREFAWPEHLKRNTTVKVTLPFPL

SEQ ID NO: 2106 - protein, 1273 aa, unidentified
  REGION 1..1273: note = Table 20
MGQSGLWQLLRDMGINGEPVDPKAVLDVHVDLPAILHGLLSRMDFFACKKLLRREGQFTTDDQIKAERLRRLTQCADKKLAEIFSKETATVHIDGAATIQKKHARDKRQAECQRKETDLQAKMALVETEIDAITKEGMLSAKRRRHLRLLYRRALAAWRTTFRLTPDLRVALAASLTGLGWTVCPCIGEADVCIATLAANAIGQGGPVHAATSDSDFLMYDNVVVLRQDPMKRSRYSLYPSDIVASCNEHLDVFNKGPKTVAMPPMTPEIWKVLAVTNSNDYSPGVWGYGLPTLWRTLAETWSALPKPSSPMTLLREFEARLKTRSEEAAKRGTPRALPDFRRTVSIFLDLREDVSPLQEPVDTSIEAQVSTMMKEFVKASRLLVPATRGSGSGSGSGTGNLPGGTMPSQPSVKSRKRKAKKDVKDQKDVQKPKTKKKKSTLNTSTKYTQQKEDAEEKARLAAAAGQAPTEIQGRKKSRGTWLKEALEANFRHSIQVLGPIEECLRKALFSNLRGNIEQFLAENTMCFGAQCNITSRKHAHLNVASENGDFVKPTINRLRLDIQQTLQGLAGVQKDLIWLGTLAIQRYVLSTFALYDSLSTAHARRRQDLFRPLLHNQSFFGAVVSELYHPTEDSSRFKADSRVGRNAARAFRVEFRAEFADVFTCVSAWLDGSIPNTFILFVGKQLEYTHRNHWSKFISELKQRALAANNAVNHPSFAAMLDSINDSGKSAVHDPISISWFIHAILAKDNRSSLFPLPGYGDGSTDITEGYLLQTLTRARMDQASKCLPVLYRHLFPQDDVQKRRGNMFMKLFYTGSGTNYNRQTVAIDSKLEPYASLITSVENQPKGSDARKAARKALADSTRASLLLSPVKSSKGKSKANQPQSTGRKKYVMRGSISTDGYQLNVHTIHLGHSRRDPTTSEGQISGTAATSATPSSMAPATAAASSSSSSSRVLRSSSSRVLRSSSSTSSSSSIRRRPGCSGRHRPEDVQREFGNQDSWVVTSLDPGTRQTASTATIDTLDTSRIYIHDIPTGDLRFNERLFKSRCNRAKRTSTDDILGVEAAAITFHMPDSPAAQRGSGAIATGVYSYRFSALTTEFVRYIRSVLSGFVPLRNFYSSTVMKRWQSQRKKDSRSEEDRAIQAIINTTNRPAKSTSNVPKRIPILAIGDGMFRGLRRVVDKSTGFRNKFVVKARVDGIKVFQVDEFRTSIRCSRCFEETEKRHRSLICSNCKHAGNEFMIDRDHNATTNMFQAVLSQIQTFSWPAHLQREL

SEQ ID NO: 2107 - protein, 522 aa, unidentified
  REGION 1..522: note = Table 20
ARPASSEQRREAEKYFKEALKQELIAVGDPERGTGPRIKYVLSGTIQTNGQQVKIQAFHLRHRWPKKKEGNMTKLASSSSSSSGPGLPSNFAEPGPSSSFSKPGPSSILSELGSSSSFAEPGPLGASMEIDNPASLASSFTPMSMASVPDEASMGRSSSSGQALLLSGDSNLSKPDHFYNFIEYIEKVIPDTDTMKKEFPDQTEFRVTAIDPGVKKTACSATIDTKKPGQAIIIDVPREISGSEGQTINQIEQKLQKFKLPPPLSSSSPNPATFGDLFNQAKDRMETHIRCLLSADENLRSFYGSAQLKYWRYQKEQGVRADTGKAINSILQTAQGGTRETRRGILAIGDGKFGSLPGIVDKSATFRRQLALEAGGRGLLVCLVHEFRSSRTCSQCGGLTKAKGRSLTCLNPTCGGKRTDAQNKMFCLDPSKGPMSDRDHNAAVNLTRASLQQAREQTWPVFLQRSKKIDLEEDVSAKFTVLETSGFNEAQYVSWEPELVGLTEADVTAALSLENVSSTAYV

SEQ ID NO: 2108 - protein, 1418 aa, unidentified
  REGION 1..1418: note = Table 20
MGLTDLFPMLKELHCDGVPTDPKSHAEVHVDVLSCFFGFLRSCDFGITRQLLKEHHSPVDLERLRIERLAAAFDNKLSKTFDKGATILHFDGGPTKEKEHARTLRATTSKQQLDRLGARLDDLETRCLQIKNSSRDKLVKSWKRSLRKSLRKMLQAWQTTFRINEDGRRQLADKLAASGWRLCGQNPVSKICVGETDLCVAQLAARESAKGNGPVIVASGDSDYLAHDNVVLLRQNPKRRTEYCQYTQQEVISTLNKNRPRLRRRTSRNQSCEEKYPLLSPNVWKVLAIVCMNDYSPNVKGYGPKKNWAILGRLYRRKGVDSPEALLAAYVKEMTKKVKDQQITVPDFAASARVFLDLKETLLEASSPCDPAPRHQQVLDAMSNFREAIQILNLAFFKTSTPHQSNTQQPASRPALLGPVHLEPSLPRHPIARPSSDPTVSASMPYTRHFRRSNNQFKPRVIKLPCFSSDDAEVTPIIPVQTRNPAQSSESKQPVVPEKKRVKTTVNKTSRSQRDAADQQRRMAQALAQGTELKIQQRSRSLGQVINDGMKGFCETVTLSKGDTRHLLSTCMMNNMRPAVEAFVGAGQASAFKKTSTDDQAALCDYVLSAMQEDILSTLTQLSQLSTDLGRICTYAVEHYVSKIMAEHPDISDCEKRKHELQPILQGQSFFRTLAIALYQPTRLSNNPVNNESTLARQVADDFEKDFTYVAQPALERIRSLLDGTVHLTVVEAIGRGISDTIRTQAQHYITTLKTRVIAHAPEWASSVGKPMLDAIGTKGDSKRDDLLSINWFLNTTLPEESRVALFPQVGWGDAFFCISESHLLNALQRKRLAPDMARMVPLYVHLFGKGTAYAGHRGQLIYDLFFGGAKTNYDRTTAVAMPVDPSRTPGAFDMTRTRLSELAGRVSQGGQGEEQRQLLRAFKEAIKEDIISRGDGIVHTGQRRLKYILEGTLQTNGQQVKIQAFHLRHRWPKKKEADQGSTSQGPDPPVSTLSSLSAPDHSHSYIQYIDKVIPDQVAIECQFPKQSHFVVTAIDPGAKKTACSATIDTLDPEHATFVDVPRESLSFSEQLYRKRLEYAKKTTSHDDRDIHTIERGLSTFKLPPPPRWVTHATAAATTDAAAPTVLNTTFAQAGLCDQSGDVVESSRRHVDHAEVEVVRSDDGGLNDQDMQAIDTAFEPVPLEMTTEGRPSSPPASFEKLFQTARTTMKNHIRCELEADPILRSFYGSQKLKYWRYQKEQGRRADTCKAISSLLATAQNPVHDRYPRQHLEEGRGRRALLAIGDGKFGAIPGIKDKSGNFRYRLAQEAKGRGMMVCLVNEFKSSATCSRCRGPTKAKGRSLTCLNKLCGGARTEDQNALFGLEPTTGPSCDRDHNASLNLARASLQQVQEQTWPAQMQRIKIVDFEDGVAEVASAGV

SEQ ID NO: 2109 - protein, 774 aa, unidentified
  REGION 1..774: note = Table 20
MGVAGAFRFLDKKNVNTTPVDLNHVRDVEVDQMVTFFSYIRVTHLRLDFKALRSGKDEDTPTKLRRILRQGSHAKKLWVAARVVDEDTKRVLAMELQKLGWNVCLCSGEADACIGRLAAEHPRQVVAVSGDSDLLFHGLEELIRKQPASHTFISYKLAGILETLKLPEQWKTFEKNVGRQSGCSLGGEQAILKWYGCSVSSASPLNYTHSVSVFIESVEIRDPTSPCNSDIDAAFKEIVEGISVFMKVYREAKRNTATGYPLQDQDVDINAAARSHLTHHGAMATNTIIAQHPSIHVTSEDIETYTWELRLRVQTWNAGWATSQDGSAFLDTIDDTGLSSSHDLVSVFWILNSKLPSDNRLAYVPMSGFNDAFSCISEMQIIEAVLRTKGYCKKTSKKTRMDLVTVFDTQTEAKQNTQAHPGELFRMLFFNGTGTNYDKQASVAITGDSPLPALLDLNDLDCQEEIRILQNDAPSSLGYPDAKQTNGCQLKIQASSLVHEIQPTRVADEIQEEASDYDIEVELDIETELTRAADETKEETGDDPDQQTSHKELIRTRTVNKRLGLKYLKARFPDSDASFQEFGDQKGFVVVRIDPGVKSTVTATRDNWREQCQSLRNSYGQHAQSVFNAESQLKEFYGSMEAKITRFRREQSATKETDCAVEGMLRTARSRATTEERKVLVVIGDGNFTGKGGGACRATKFLSVLSSRAKADRMAVCCVDEYRTSATCCRCSKAVEKVTRSVICQDPACGSRDGDHNAGHTMATAAIQWSQCFK

SEQ ID NO: 2110 - protein, 542 aa, unidentified
  REGION 1..542: note = Table 20
MKRIVVWEPTWASNEGSNFLESINKAGVSATHDAVSVFWILNTKLPPSKRIAYLPTPAYKDNFCVISEKQLLETLLRRREDSELRKKLVKIFGTVTVAKDNSQCHPGELYRKLFFHGKKTNYDRLSCVATPADDSGQLFHGLIDLKGPSYKSDIQTLEVEAANSSQYKEAKETLKANIKNDIIQKLHNRKAKYVLTGTLHTDGHQLKVHAHSLVKRRTKSKNKEASDVSSIDIGTFPANPASTSSCATNTKMEYLPAMIPDEAALQTLFNGQDSFPVLAIDPGIKSTATAVVVDSLSPEKSWNLSLSKGSHNWNSQRYRKKLERLKKEQRYSRDGNLMSVNDLEARIQAISSPWEEDSLQQSFQSLKESYKAHTTSIFEVENDLRRFYGSKQLKVGRYHKDQGETSEVVRAIESMLRATRGTVDQNKSESEQKTLAKRKPIVAIGDGNFSCRNPNAIRSKKFISKLQTMGTGKGMLVCCVDEFRTSIFCCRCHSRMKTRGRSVICQDPACGGKRDQAYDLAHNLDSKCGLERDRDHNAGQNT

SEQ ID NO: 2111 - protein, 1148 aa, unidentified
  REGION 1..1148: note = Table 20
MGIEGVFRYLEDEKVETAPADKALIRTADIDVLSVFFSYIRSTHQRLKYQSFRSTAQPTTPGSTDTVMTRLIHALHNKLRGTFDKDEVTLHFDGLPTTQKSKARERRRAKCDQDIRSMYDQAQKLQEMINCNNYSRSQKRKIARSLRKVKSSWASARVIDKDTKDGLTSGLRDLGWRVCCCEGEADVCIGRRARQHPGELVAVSADSDILFHGVRTLYRWDSCRRVFTTYDVCELIKKLGVTEAQWVVAAIVTSNDYSTHIRGQSFRKNLALLRDCDADDEQGVLDQYCRMMSVRRDMFEPSTQVFIDKVETTMDDQKSNGDIDQTMKDLASRVTQYFQEFKAANKEGVLKGVSESGAAGAEIACQEGMVIVEEAMSKSEAIKSDPRNAKRRPSAYRTSGHDYRAKEFHEPAIDLNRDDATASRSTKKRKRRANSKGKKKKAKVSKEKRHKSKVLRTPASRRARQQEEENKDSDTIKKGRKRNPGNMIGDVLNSNFATVTMNMGTIRHRLQNGLEQNYQANNHLKLSQHIESTIEGLVKINTDLIRCGSLATLNYINEIMAAHPSIDPASGDVEIRCKLFKYIAGESHGFFKTLVKGLYHWNNDLKGKGESFDSASAAIRSLREMPGDKNAMMQRVMEHLNGAAPSTFLEQTGQVLGDMARCHFRAFIPELQKRIAVWNPEWAMTPEGHGFLSTIDSKGKSSVHDVVSLFWILNTRLPVSKRLVYVPMPAFKDNYCLITGEDKLITLESLETSTPGYKQAKEDVKKAIKEHVLALESTTRSGKYVITGTLQTDGHQLKVHAYSLAKRKKRDMNENEEEEDDQNTGSCSTKPLTAKTDQQDDAGASKTKKKMRYLTEAIPGAAALEQEFGDQEDYVVLAIDPGIKNSATAVVSDSLTQEKAWNLSLPKGCHTWNSLRYTKLLDRLKDKGTVRDLEAKILPLECTDPREIGTVQQFQELKCSFQDHAESVFKVENELREFYGSRVLKIARYRKEQGEKAEVDRAVRGMLRATHARATIDDRRAIVVIGDGDFHGKNGRPVKANGFISKLKAQAEGEGMLVCCVDEFRTSIFCCKCHQRMQTKGRSVICPDPTCGGHRSPDYDKAHNLNPRTGFQRDRDHNAGQNMANAALQWVKEFKWPEALDRRLAKEQ

SEQ ID NO: 2112 - protein, 1516 aa, unidentified
  REGION 1..1516: note = Table 20
MSQEGSDFLRTIDDNGISSVHDAVSVFWVLNTKLPLAKRFAYIPMSAYKDRYCIISEMHLLEALLKTGIEKRFREGLVKIFGNLTKAKELSQTHPGELFRKLFFYGKKTNYDRQACVGYPNDKSLPHLLDLESLPCQVQLKALETHGPKTEAYLAAKHDVKMAIANYILALGADTRAGKYVLTNTLLTDGHQLKVHAYSRVQVKKKSDSQSGSDSSTTVPPSISLRNTDSSYSTKSKMKYLPALIPNPESLQKEFGDQRSHIVLAVDPGIKNTATAVIADSLAPEKSWNISLSKGCHTWNHDKHNKMLRHHKKHKQFDVAGELRSVNDLELMIQPILPKQHNDSQELKQEFENLMESYREYAKSVFAVERDLRAFYGSMEFKVARYRKEQGEKAEVGRAINGMLKVARTRAKIDKRKVMVVIGDGDFKGKNGTPVRANKFISSLQRQAMGEGMLVCCVDEFRTSISCCKCHQKVQTKGRSVICPDPTCGGLRSPGYNSTHKLNPKTGLQRDRDHNAGQNMANAALKWVKEFKWPEALDRQLAKKQEASCGMMQIHMDSESNLTISRRVHNLQEKAHKIIVENNPQSLASSISSESTKIPKLAEDYLDMSMILALRFCKVTFVLLPRFHPFQRRIHGAILRFIEQEASVFLEQLQKYCSGGTIAYWQTYRMRPTNSDILQETRNAQKQQVPSHMDNCENNSGDKGLAGSRSGKGSSQHWNPITQDHGKFESPRPANPGFAASSSKTNSSTKPDLVQQAQTFDDKVSAAFGTPPLGQHAFTRPPQITSVNYKTVASSSLAAPSITITAPTPTCGKPKGVLPDPPKTGVQHLIQRFNKPSKPATIDPESVEGAIQQWRINVYPVAPPMSDPVPQLKAASTPFSQEIKSRKPIGSTGYDMSSVSSSSVNESASCSENSHSNGKAAGLRVLSEKKFHNSSPGREAFRRRVDITLQRSAHTEDQFFNDIIEARTNATMTRIFGREPLHARDGADGYRVKDNSSGVRSSTVLSRAGSLPEKSVVNTMNEMKQANFTKKYKEDNEHMGTRNFGTGRDTSSRRQSSVTILPKEGARSSLVKSMVNRLNGVLPDSPMVPSTAGSLHENSNSARNSVSSSVTPRSSAMSSVTSSTALLEISELSPDSASVKGQHAQEPASFVGGSLAAVGSRSVSGSSRVKTGDGMSTITDVANGKRVNVYEENHGSKSEAFGSNFGVHDSKPKTSSPSFNFHYQSKRSPKSPRSDATLERKSARNIDGADCIESGDDRSDDGSLQYLDIDPHYEPEEWLQDNINDELDKNNEGDQDTAPSPTSTHSPWKRENDIHSVRVADALKTVRDNSSPSKPQQINPSALPNAAALAAETGDRFKKGPSHSPLIPPKGTGFLTNLMKSFSTKSQAHDNQIDMPEALAASAMTSSTNNYSSRKQANSPASTSSTSSTNSLRQPLSMPLRLQRQSQTASRSVQMSPFTRSNSTLRNYSVRSTILGTLETPIPATSNSTSLNVREATALVHERGLFRNPQSKTSRK

SEQ ID NO: 2113 - protein, 1786 aa, unidentified
  REGION 1..1786: note = Table 20
MAETSLDEASIVDTSIDETSIAGNVSTTVDISSHDSKAETKHKLCNKFKAKKFKAPALSTNCGDGADESTGSEPTKRRANNQGKSVNKKPKIQQQRPRKPRKEKIARTPASMWARQQEVKDTGAPITGRKRNPGSMIRDVVNQNYKTVTLNIGIVSRCLQRGLSNFKNDDRLSVHDYILSTIQDLVRINTDLIRCGCLASFNYINSITAEYPSINIESQDFITRKEKLQYLANEPHGYFKTLVKGLYHGGDNIRGEKDSFQSARSTIDLFMIMPGNKEDMLRRIRGCEGASSHFLEQVGQTLGNMVRCHIRAFVPELKKRINIWNPEWASNPEGSGFLSSIDEKGKSLVHDAVSVFWILNTKLPASKRFAYIPMPAYKDNYCLISEMHLLEVLLRRGIDEEFRTKLSNTDLSLPHLLDLKSLPCQVELNALETTTVNSKEYNAAKAKVKETIKTSILGMDATTRAGKYVLSNTLQTDGHQLKIHAYSLVQRKPKYDKSNTDGDGTQGKGIDPSSSTQPFPVNQQNASSSYSTKSRMEYLPTLIPSPTELQAEFGTQESHVVLAIDPGIKNTATAVVVGPLLPMEAWSLALSRGCHTWNSQRHKRLLMRNKKDTQSNVAGGMKNVYDLELMIQPVQFDDSKESDLSQQFTQLKESYHEHAKSVFTVERDLRDFYGSVPSKVARYRKEQGEKAEVGRAISGMLKVARARAKVGKRRAMVVIGDGDFKGRNGAPVRANKFIAKLQSQATGEGMLVGCVDEFRTSISCCRCHKRTKTKGRSIICLDPTCGGDRSTEYDSAHKLHSKTGLQCDRDHNAGQNMANAALQWVQEFKWPEGLDRKLAKKQEAPCGMVQNHMDLDKQGISYLPSLDIEARTTILATAAKTTLTQTFLNPPENGLIKELRYVFPLYDGASVVSFTCTIGDRTIIGQVKEQKKAAQGFKDAVNQGQRAALFKQLPDTSDVFTTAIGNIPEGAKVIIRIEYIEELKHDAQVDGIRYTIPTSILPRYGDHPSEISNGYNYSTYEGRIQVTVDVVMAQTTFIQQIQSPSHPIAVSIGNNSMEADAPPAMSKASASLSLGSAGLDKDFILQVVTKDVGIPKAILETHPTIPNQRALMATLVPKFSLTPQKPEIVFICDRSASMGGSNIALARSALRVFLKSLPVGVKFNICSFGRNYSFMWEKSQSYTKGNLETALEYVDAITANMGGTEMFKPIKATIENRYKDIPLEIMLLTDGAVWHHEKIFTYINEQVTTNKGAIRAFTLGVGGGVSHSLIEGVARSGNGFSQSVGEGEKMESKVVRMLKGALSPYVTDYTMEIRYSKANKDNNMDTDNEDDFFIVERVTGSLKVKMNITNKEEVSPQQDQNPVSLMKTSDNVGKETLASANDDSGEGKYSHLPPIPPPKLLQAPHIIPPLYAFNRTSVYLLMGPECNQMVPEKIILRGTSMHGPLELEIPVQALDTPGEMIHQLAAKKAIIDLEHGRGWIPYAKNEQDVLIKSSFESQYDEIVEREAVRLGVQFQVQGKWTSFIAVEAYQGGNTTLLTPLEYKVEPMESASQKQPHLDPTVSTKGKVKPKRRRVLEVGKMVKRGCAAIRKDRFSTDQESYSSANRNSSDSSISSRGKHESESSSSGSSSSGSSSSGSSSSGSSSSGSSKLACRPVGSSRSRFLAAADFDTEDEDESTLTPPLNETKLRILIDLQTFEGFWEWDQSLLNCVDVTSAHSEKLVKDNDGWDHTIVATALAVIFLEKKLVDYKDTWELIVEKAKSWLEEQLGNDTVVLVLQEAEKLVLQV

SEQ ID NO: 2114 - protein, 1168 aa, unidentified
  REGION 1..1168: note = Table 20
MGVEGVFPHLTELEVATPVVDMVNIKAVDIDMLIYSAEARYNAFRHGSYSNEATTTRLAHALHSRLSDTFTQNDSTVLHFDGAETSQKGLAREARRKLSSKNVQDLTDFAAKVHAIVAAADNTPISRTTKRRVLRLNRQVKQRWGLARIIDSATKSDLVAHLKDLGWETCHCQGEADVCIGQKADKHPGEVVVASSDSDMLFHRVKELIRKVPRSRTFTSYDLKDVLQRVRVSEVQWVVAGVVTNNDYTRHVQGQSFPKNLALVRECDAGDFQDVLDQYCDKLGVNSIIFGPAKDVFINRFEVREADSTSNEAVDIVMKELVNSVARCLKESKASNAIEIVETVIASVGTSIANVADGDTIAVGENSSRRSVAYRTSGNIYIAKKSTQPSFGAINDAITRPKIIKRKAKEKLTNQPKKQAQKVRQNKLQRNPASRKARQQTEKDTGVPKKRRKRNPGNMVGDVLNGTFKTVTLNLGTTDHRLQLGLQKNFNFRNCPEVQQHIRSTLQDIAKLNTDLVRSGCMAILNYINTVISGHPSISAGSNDIEIRRGQLEFIAYDKHGFFKTLVKALYYGEDIRGTGPSFGAAIKTAVSFGDIPGNEGLKKRISKYLNSAAPSHILEQIGQTLSDMVRCHVRAFVSELKKRAEIWSSEWARSRDGSAFLSTLDDSGISSVHDPISTFWILNTALPSSKRFEYLPMPAYKDNYCVVSEMQLLDTILRMGHDKSMRGLRAKTNYDRHACVANPSNKSLPHLLDLELLPCQDNLLSLETEEASSLVYKQAKEGVKSAIKQHVLALDGTTRAGKYVLTGTLLTDGYQVKMHAYSLVHPWRASEDRRQGSAACLTIPLTSTNRPGAASSRTKSKMRYLSTVISTPEALRQAFGDQDGHVVLAIDPGIKNTATAVIVDSHVPGQAWNLAFSKGSHTLNSRRFALMLEHIKEEKHYGRDSMATVYDLESAIRPFQPNDHPENGLESRFSDLTKSYQEHVKSVFAVEKDLREFYGSRGLKVAKYRREQGEKAEVDRAIAGMLKATRERASIAERRGLVVIGDGDFRGKGGGPIKANKFISRLQSKATGEGMLVCCVDEFRTSIFCCRCHKRVITKGRSVICLDPTCGGNRALEYDTNHLLNPKAGLQRDRDHNAGQNMANAALHWLKEFKWPEALDRQVAKQQ

SEQ ID NO: 2115 - protein, 1177 aa, unidentified
  REGION 1..1177: note = Table 20
MGVTGVFQYLDEKGYVPQPADTTSIRGIDIDLLSLYYSYIRSTHQRLVYETFASPPLDASQVLPRLTDRLNKKLQENFAQCPDTTIHVDGQETIQKTKTRQARAETIEKEILKFRDAIDATDEIITSDGTSPRSKKDKVVAKIAKAKDAWAKTRILDFATKLSIARGLKDLGWSVCCCTGEADTCIGKKSDTHPGLVVASTDSDMLFGGAGALLRKEPTSRSYTLYSLNDVLQKLNVTKEQWTVAAITSNNDYSANIDGQTFEKNLAIVKRSNAKDTIGILSEYCLSMGVESNRYDMAKQIFIERVETLAAETKNNQAVDQMMQSLVVRVNSCVQGLKLIIKTSKRKAKAVEPASVTGADVNAEAGTSSAQPAMDDQLAVTPVRWKRERSAVHKKNKRSKSESPKKQAMIRNPASRRARQQKDGQTEAVKSRKRNVGKMIGDVLMGSFNMTTQELGTVHRRLEHSMQCNYNTPYLEDIITHIETTIEELVKSNTDLIRIGTLITFNFINTIMAQYPLIDDADSIVSRGDTFQYLSKEKYGFFKTLVKGIYHGETGISGQGPSFETAKQAIATFKAINNMPTDAMNEVTKIMDGALPSHFLDQVGQTLSDGIRAHMRAFVSELVMRARLWNKEWTDSPQGSAFIATIDENGVSNVHDEVSVFWVLNTHIPTKKQFAFVPMSSYKDRFCAISEKQLTESILRMTPNRTLRNRMVDIFGKSRASQDRTQIHTGEFYRKLFLDGKSTNYDRQTLVANPNDDSLPRLLDLDDLPCPYKLEDLDEPDASSKTYKDAKAAIKAAIKEKVSEIALNDRERSGKYVLSGSMSTDGHQLKLQVYNLTKPRKVAGDHGSNAKRDESSSSSAQPIQVKKGYDGKTRSKMPYLIKAIPGQAARESIYGNQDEHVVLAIDPGIRNTATAVIVDSTDPNTAWNVTLPRGSHLWNNTNYTKLLNRLKKDRGINSLEATIIPFKCPDPHEVGPAKQLEGLRDSFQLHVVSVMKVEKDLRAFYGSRGLKVAAHRRKQGSRSETDRAVEGMIRPALQAAGPRRATVVVGDADFRGKKGGPVKSNKFISTLQTRATAEGMVVVCVDEYCTSITCCRCGSRMSPRGRSMICSNPICVGVRSVLYDQARGLDPKKGMIKDRDHNAGQNMADASIRWIKSFQWPEHLDRNRAKAQESSNA

SEQ ID NO: 2116 - protein, 917 aa, unidentified
  REGION 1..917: note = Table 20
MNSFLRFMRDRKRPDYLSKIRHHDRTAWSESLPPGWSRNEGPVGLYDQSIGPPKVHPVAPNATHTSNSDNQTGSAPLATDLVNQNLEGDNPAGSSSIPTASTSQKRPLSQEASQKKKKKTNEKKAATSKPIYNRSSRKARHAVNKQMGDLTPSAGSVTATRREHDTTHIKATLETTFSQVALQPGTLCSTLYKGLESQMKGSTLLEVQDTYRSMRTMMMDLVKANSDAVWSAIAVLQDYALSIFKSHPTLDEDDVKKRKDALGPVYTSQIFVYHAVRALWRWSDLTDATLTQLKCEGTQRLAFTVVLEFKKKHSNQQAGGIPFDPFTKRPEKAVSAKFLESCARSAHDLICSLVLRNVGELKQRVLVQQIQFSKSEQGRLFLDSIEGTGRSKLHDPVSVHLLLNALLRPDSQVALFPGQWSQLPGNPPPTIANIHTTSGSISNALKSMEVELQRLKDVLSNMSATQQRQLRDVTLHGLHAGSSSSAENTPRRHYVPTGVIKTDGHNLHVLAFDLTTLRPKKNTKSKPSPTGSGYQHNIPAVAPEEGFLALPSALPFAASSALPSSLDIYDSELWTSPDPVLEESLPGSETENPNEGPSVGHGNPGQGQVAQPNLAGVKTAAVHAKALPYVQDLFSTAQRVQSLGGPHFIGIGVDPGRAKPTSVVAVHTKYPDFSQTLDITDTVAKDIQKRYMGCLNAKKKTHGIDKLENTLIADVAPIQVKVTQENGTAVCDWRAAASALYSNHLDWLRPRLAAFEKLRTFYGSISFKKDLYDMKTAIRSDRSLVCAAAIKMAHIPHPNIPPTEVQEYRETPAVLGIGDGDFDGRKEKTLDELARTANANGIPAVKLPEFRSSQFCSRCRFRAVQKGRSILCENCSWDIDRDHNAGENLARCLGTHLQTQTWPAPLDKALAKVHSRE

SEQ ID NO: 2117 - protein, 1598 aa, unidentified
  REGION 1..1598: note = Table 20
MGVVKAFETLKDCEAVKRVDVKSLGGCHIDGSAVSYMRLKSTEGRLLLRALKTQAKKETIATTASLLPLGRWVGGLWSFPVPVSDYGSIHLGMSPFHPSTASTSTNIPPINNAALQLSPLPSTSASFGPISSLKDAASTSDTLPDFSDLHNARMEAWPLLTRSMDRMFNTHYNKSADFIHYDGGPTVQKAFAHDRRLKANEKASMKMSELLASTDVRLSVMESKSTLSNKQLSRLKRHLNCVVFPHWMKYRGVDPRATVFVSRELHTSHGWKSHICHGQFDICAGKLAKKDPNITVVTTDSDLLFSGVKECVRIQLRGTSFYSYPIEGILAHCKLHSHEQWVAAAVVSLNDYDPSVGRTSFKTAVKEMEKLHKTFPRNCRTNLKAKDYVKEFCKGKHVDINSVERSLESFVDLLETPVEQLNPQNDVLDDSIRRIVYRVEMLTQRCRSSRRYPTSSEPISSLATLEVDDLRPVSLSKRGKRERRPGFRGYISGHVFRQKAFAPVFTHPDKNTDPIGCKNMTIGRPVPGAPVLVADEEDDFPDDDDPKSPMPAPVPAPVPSPASASKPTLKPAPEKTTALTTGKASKKRARAAIVFAPAKRRSRDAEMQQREDTKSKANVQQGEEVQAEDEKKRRMTNPTNMIGDVVASRCQMAAMRPGRLESCLRYSLKNSFPMLSKEQHELLLRHITGIIRTLARVHSDLLREGLLVTELYIASVFKEFPVVDGDLGQDHAGERSGLFNNILLKKHRDPFFQRLLKRLLKWDWDSNSTNATSQGSMAADKIFDDYFKLTQSQRKEAPFKKEDQDICDKTFVEQCARTLSDMVGEHVFKYTLELKSRVILHNPSWSSSARGKIFLDSVNEKGVSLMHDRLSLHAIMNWLIPAGAQIKILPQVGFTDGFFALTERQLVSCILKGIRVANPMYRTLNNVFGNKGGAEKNTQDEVGRLSFFLFLNGRNTCYRRGTNVLWAKDYSGTSSSNPLPTLQQLPLRDMMFFKSDAIAEFEQASEGLGTNANAPGYEDRKKILKDVIGKGIHSPEHYQHLIDIAAPKVKRPKYVLTGDISTNGYDLRVMAYKLTEKKRRALPAASSTPNVADPATSSLLAIEVGANASSELFTDPDLISRTPALDLPPSVEGQSSSEMLPSVSMPDVTSTAAPAWSTAPSLEGWPYVAEAFNSQEKINKLYRDNAGPQTGIRVLCLDPGVACTATGTLVHSNYPEVAINLTIPRGSRDIIDNRYRKEQSARKIKEGIPDIEARLVALKPVEARLVLVKPTDVKTTDPNNLDQGMKDVPVAASVKKDTDSLNTAMKAAVHEYEETVKAHIISQAKESSALRNFYGTKKFKRDKYDYREAIRHDLDKSSTAILNMRHCVPHPQATDADLLSIISAVQEDFEGARHTVSKLPRGKQFDWSSYSRVMDNAGRLQGDERSTFLASANATKDLVKTAQSLYKVGYMSKNQLSDEARREFLESPLIIGVGDGDYRKWRGQSRGCGQLIKNLIRQKRDLVKDLARGNTKSPVIELVKIPEFRTSVFCCSCLFRGKEEGRSIICKECDKSRDRDHNSATNMSNAVLNLLRGEEWPAPLDFAKAKFVDKFSTTTLEV

SEQ ID NO: 2118 - protein, 428 aa, unidentified
  REGION 1..428: note = Table 20
MQGWSYVSKKFDSQEKVDSLLRNTNGQVGVRSLCIDPGIASTATVTLIHSSYEKDNINLNIPRGPRDDIDRRYRKQQSCIKIDAGITEIEGRLVQRKPVEAKLVVGDSDVSMEGDSGITSNSQDTITPSTKAVEKAIQDYESAVKVHLVNVANEASTLRSFYDGARFKQDKYDYREALRHDLDKATTAILRMRKHVPDQQPSDEDLEKVLYQLDEDIDCSMAVVNGLPNVKEYNWASYLRLMDEVNKLSGIERETLLKSKSLTRRRKKIARSLYKRGFLNLNTLPDDKCNAFLQSPLVIGLGDGDFRGWRGQSRGGSKFTKNLIRQTRNLVKDLARSKKKMPVVIELVKISEFRTSIFCCSCHFRMRVRGRSVICDECSWERDRDHNAATNMSNAVLQFLHDGQWPAPLDYERAKLVDKTTSTTIMTL

SEQ ID NO: 2119 - protein, 1654 aa, unidentified
  REGION 1..1654: note = Table 20
MALTLLVVVVLVSIPVTLILSINSNLFSRYLSVSRMGVTKAYELIKDCKAIKPVDPQKEGPCEIDGSAVSYMRLKTTEGRLLLKQLKKMAKEDVSIEIPGPVLPLGHWDQESWSFPSPVATKGLASDLSALDLSTAPSLSLTCNTSSTNSTTTQQVSSSSSLLYSAPALSSSALPPHSHPPMDVYHKLNSARDVVWPLLANVLNKMYSKFYKKSEDFIHYDGPPTTQKAFARKRRQLATKKQILKLSEYLRTAETRLSQMEAKPNLSNSQVSRFKSFLNKVLFPCWIGARGVDPRATRAIVNELQESHGWKAHLCAGQFDICVGRKARENPGLVVVSTDSDLMFVGAERLFRLQPKGTRFYCYPIEDIIRHCGLNTPEEWVAAAVVSLNDYDPSVGRTSFSTAIKDISTIRKDWFGKKSKDRSVDAYVKELCKRKNVHHDVVKKSLDSFVKLVETPLDQYTQGDDEIDESIRRIVYRVEALTLRSHWSQKSRPSQRPMTLTPINSIPVQLPATEGKDNVVEMLALPQLQSGSTTTPHVALPVARMAFSTGTVTRNADSIVANGFRRYTTGHKYRPRAFTSAFTSQHKNTQPVSVKDQTIGRPGSTASVLVDEEEDDDDDTFPDNADISNDAAVVNLPAPLAVSAEENLALEENIMNGNESEDKSDNNSDDSSDDNSDDNSDDNSDDNSDDDSGNGGDYEGDQQAEDQPIDAERPKKRAFKKITYAKSSRKARDADVLLNENAIPRKINPTNLMADVVASLHPIRAMKPGRIESCLTHSLKESFPRMNDQDRSLLSSHLLETMHTMARVHTDLLREGLLVTNLYIARTFGTFPAIDGDRGREHGDKRMEHFENILLKGKRDSFFLRLLNRLIRWDSGDSDLRKATSPALVASDKIFHEYLQITSQRQAPPFRLKDRDVCEGSFMSQCARTLSDMVGGHLYKFSLELKKRALMHNPSWASSEKGKAILDSIDNTTGRSQEHDCVSIHLILNLILPAKAQIQILPQIGYEDGFFCFTERQLVSCLLKDFRMNQRNRLTPIAKKMRRLSSAEQEKQRSLAKVLADVFGSKASAEKNTQDEVGRLSFFLFLNGKNTSYRRGANMLWAKDSWDPASSSSPSNPSSALQQEHLEAKVVFKSDDVSAIKEARTALEKMEAQDPRYASSKLEFKDLIRQSLQRPEKYQEQIDKSEPGQLRQKYVLTGNLSTNGHDLRVMAYKLTESRRSTPPTTMTDAGIAESGSAFSEPAMPNPTVETQPKSLCLNNDRSSAARPPGSTEGQVLSGELLTIASSTSPSVPTSNAVFPWSTAPMIQGWSYVSKKFDSQEKVDSLLRNTNGQVGIRSLCIDPGIASTATATLIHSSYEKDNINLNIHRGPRDDIDRRYRKQQSCIKTDAGITEIEGRLVQRKPVEAKLFDGDSDVSIEGDSGITSNGQDTITPFTKAVEKAIQDYESAVKVHLVNVANEASTLRSFYGGARFKQDKYDYREALRHDLDKATTAILRMRKHVPNRQPSDEDLEKVLYQLDEDIVSSMEVVNGFPNVKEYDWASYLRLMDQTRDLVKDLARSKKKTPVVIELVKIPEFRTSIFCCSCHFRMRVQGRSVICDECSWKRDRDHNAATNMSNAVLQFLHDGQWPAPLDYERAKLVDKNKINNNNDALNS

SEQ ID NO: 2120 - protein, 1099 aa, unidentified
  REGION 1..1099: note = Table 20
METSSVVKLNQPTAEAMLISGSPNSSAKNQCSRLKGFMKYVSGHVYHPKAFTSAFMNPNKNNSPISFKNKSIGRPELHHVSSEHEEDEFDDDDDDDFPDDLAPLPVASTEESLVTVDTTNNGSSEKGTSDDEDEETDTSIGKKTQKSRPKKMVYAKSSRRARDADETVNKDAKPRRTNPSNMIGDIIASRHPIRAMTPGRVHSCLSSSLKNSFPGMNDKDRTSLQEHISDVIRTLARVNSDLLREGAMVTELYIADVFQQFPAIDGVLANDHVKERRLKFDILLKKGQRDAFFQRLLKQLLRWGCKDSNLAVTTSPSALAADEIFHRYTAITSNRPGPPFRPTDHKTCDNVFVEQCARRLSDLIGGHVFKFTLELKKRVRLHNPTWSSSTVGKGVLDSIDDRTGASGSHDRFSLHLIFCMLLPSQTRIKIIPEVGYKDAFFSLTERQLVACLLKPFQLVKGNQLQPVHKKIRLGGIETEKENLARILGDVFGSKTLADRNTQDEIGRLSLYLFLNGGNSSYKRGSNVLWAMNDKTRGDAKGLLHQQNLGTRALFDVDMLTEIQRVRSVLEGMQANDPQYGEAKDTFKKLIHRAVKTPQEYRDQVQNAKPNTIRRKYVLTGDLSTNGYDLRVMTYKITEKKSPTKPTISTPAPPTTSAPTSATSSASSISTSTTTPQTTFPWSTAPDIEGWRYVTETLSMNTTYHAGVRSLSIDPGVASTATGTLVHSNYPKDCINISTPRGPRETIDKRYRHEQSQLKIQAGIPAIENALVPRKIVEVKYIDQGQQDQARENDSGRLVSEPEALTRAMGKVADEYQSSVMAHIASQGQASLVLRGFYGGIRFKEDVYHYQEALRHDLDKATTGILNMRKLVPDRQPTEDDLLDIIRSVENDVEAAKQFTEELPCAQKYDITPLLNAIQEAHELSGSERVGFFKSKHMVNKARSLYKRGYLNRNQLPDDERDAFLASPLVIGIGDGDFRGWRGQGRGTSKFIKNLVRRTHNLAKDLAMNMNQRPAAIEIVKIPEFRTSIFCCSCHFRMQVEGRSVLCKECRWKRDRDHNAATNMSNAVISFLRDGEWPAPLDYHKAKVLVDCDNNNNNDA

SEQ ID NO: 2121 - protein, 975 aa, unidentified
  REGION 1..975: note = Table 20
LQRYTTGHKSRPRVFTSAFTSQHKNTEPISVKDQTVGRPGSVAQVPADEDDDDDDHDTFPDETDPSKIATARDTTAEEDRFEVEACSDNEDNSSEDSEEEGAFGEDATGETSDQKNPVEDKAIDRKATKKRSRSKITYARSSRRVRDAETPQNPNAVARKTNPTNMIADVLAAHRPMRAMTPGRLKSCLTHSLRASFPDMNEKDHGLLTDHILDVISTLARINTDLLREGLLVTELYIANVFKEHPSISGEHALDHAGNRKDRFDILLKKGPRESFFLRLFRRLLEWGAPGSDLHTTNACGAKAADAIFHQYAELTAHHRQPPFKSSDRNASLHSPAWAESNSGRVLLNSIDDKTGYSTIHDRLKRQLLNCMMMNLTVTENKQAPSSKKPRMGENSWDKQVRTARILFDVFGSRSSADRNTQDEVGRLAYFLFLNGNKTSYRRGANVLWAKNESDAHSEGALQQKDLKAMVMFEEDDRKEIEMARVTLGSVQANDPQYATAKASFKDLVRNGIQTPDYYQRQIDRATPKSRRRKYVLTGDLSTDGYNLRVIAYKLTESKSARQSTTYTASVTAPLTSLLNPTESSQQSSSTSTSAPTPPISTSTSASTPAPQTSFPWSTAPLVQGWPYVTEKFRSQVTIDSLYQHTAGPENGTRSLSIDPGVANTATATLVHSGCPTDQINVSSPRGPRDTIDRRYRKEQSLLKVMAGIPEVEARLVSSNRMDKTAQEHESTVKAHLISQAKGSSILRGYYGSTRFKQDRYNYREALRQDLDKTTSAILDMRNHVPDRHMTDENIEQIMQSLEDKFEEAQKFTAGLPSSMKYDWAPYMRLMEEGSRLSNSERDQFLHSAVVVKRLKKTHDLIKDLSRSNKKKSAVIELVKVPEFRTSVFCCSCHFRMEVEGRSVICKECNWKRDRDHNAATNMSNAVLQFLRTREWPAPLDYEKAKTICDINNSNDNNDNNDNNDNNDNNDNNDA

SEQ ID NO: 2122 - protein, 513 aa, unidentified
  REGION 1..513: note = Table 20
MDARSRKSQARFVCTRCDMTLNADINAARNILAAGLAVTACGDLDNGRSGKQEPAGTVRNYCLRPSRCGDFRVHSWEDCQNSSSSLLASGTVRGGRIAGMKRLVVCCDGTWGSESNPTVSNVVKIAESVRSSAVTDAGDHVGQRVFYVDGPGSHGYLADKLLGGAFGLGLDANLSTMYWQLALNWEPGDEIYVFGFSRGAYTARSLVGMINRLGLLTADAMVERAYPEALKIYRQRKVDPDGPDRPEWIEFRERNCIYPVPITFLGVFDTVGALGVPLLTSWRYRFHDVRLSRNVRYARQALAIDERRRMYAPCLWEITDDPEGGPSGADRVQQVWFEGVHTDIGGGYADSRLSDITLRWMVEQARTAGLSFDDERIEQLLNRPAPAVSAAAPEPAVAVPDSPPRAHDSLTVFYRVLNRVGWALHPRNPRFYADSWRRLFAPGDRRVYLADCAAPCATYRPPNVVRWAEELAGPLPTLPVGASDDSIDDHPAGEPVAGGQHQAGSGSVAGTAA

SEQ ID NO: 2123 - protein, 503 aa, unidentified
  REGION 1..503: note = Table 20
MSDEGRLILASIDDEGVSDMHDPISLFWILNSHLPASKQIVFLPEGGFTDQFFTITEDTLLMALLRRESKDWLKREFGSQEDARKHAAEHPGDLMYRLFFTKRLSYTRGSSLINPGANIPSRLALFDLEGDSKSMYDNHITNMHEADSSTYPAAKEAFRGYVMKLLADPMEQKLAIDQGAAWRKYVLTGSITTNGHELKVLAHSLTRAAPSPSARKRPNTTRAKLNDVKTMLATKDDIKEAFQDQSSYMVVGIDPGIKSTATCCILDSDNMDRPKNITISQGSHAFSTRMYLQGLEHAKRKAGIHQLENAITAVECPSAEVGQQGAAWRQLQLSIQGHIRSVLQVQDRLRRFYRTKIFKIKSYQRKQALSAVTNKGIDRVIAATGCKGKPKEDSVRALFVVGDGQFGTNRGETLHQQFISLLKKKVTALGLRIMCVDEWRTSLTCCQCKVEGVLDGRAIKCKKCGQERDRDHNGAHNIARATHHWIEHQAWPEELTRPQLQVQ

SEQ ID NO: 2124 - protein, 824 aa, unidentified
  REGION 1..824: note = Table 20
VSSASSSGSSTPSGASISLASSEGDAVQTTYTQFMSSNTYSVHTYTRPPPAQIQTPTTAKRSKSKRAKRKPQPIYNPSSRRARATPAAAAGQGGNPKSTTPEAILDSLLSSRRATISMNCGTVPTRLKSSLRYKRDLDDIERESLAGTMINLIREMARIATEATRRAQQAIAIHIAETMENHTGMDNASIAARRTALVHYSGFHNDTFFRNILQDIFTFYEQGPPRGRPRNMTKPHNIVVEDIIFEYRYFLFNNDLEPSPLNDNIQTGLSHLFALAGDRLGDQVQTHYHRNISELVSRLRRYNPAWCQGAEGTNVLGTINNGISTVHDQVSLFWILNTRLPQRAQMAFFPESPFRNSFFNITELMLVQAVFASDAGAALDPIKDLVGATVTVANKFVAEHPGELIHYLFFDKKLDYCRSTTVLATSPIRNNLQGRPVLKLSKPEKKAKRLLLHELSDNPSNADNKHALWEFLDEHLITPAQQKEDLDTGLTRNKYVLTGTLSTNGHELRVLAYSLTKPRPPAIPGPNTTRRKLEDVMTLNTQTSVMNVFPYNESFTVVGIDPGIHNTATATIIKSENENIMDNLSIPRSADAFCIKAFQSGLSRIKGDWVAEVTLPPGHPEGPGDEFLTVSEMEQAITPVVCTQAPTGRRQTWVNLSASIRAHVESVVSVQPGLRKFYSSRTFEMKRMHLKQARTATLDKGVTRLCHAAGLIKKVDNISPKPLFVVGDGHFGSRNTPVLHQRFISFLKSKVQALNGEIRCADEFRTSMVCCQCQTVGVLVNRAIQCPGCNQARDRDHNGATNLALATLSLLRGDGWPIALQRAA

SEQ ID NO: 2125 - protein, 642 aa, unidentified
  REGION 1..642: note = Table 20
MSTTLTNAVETFDELIKSTGAELPDLKGRAEGLSVFLQLVSDRLMDEVHTHFLRNISELISRIHRYNDEWISTSDGIMVLDSADLESGQSTLLDQTSLFWILNSRLPSEQQMAFFPESPYHDAFYTITELALVYALYANPDKACLKPLKQLLGSTITAAAKFLSEHPGELTYLLFFDQTLDYNKYTSVASPSPAVENVCGRCFLRIPKTDKDRYRQLQRRLRRHPNDKKKQRRLSQFIKSHLRSPDKHKHDIDTGITKIRYILSGSISTNGHLVEPLAYSLGKKRPSKWAPKTTRQLLKDVRDVFKTPDDVNRVLPFNNGVYWMTAIDPGDHCTATSTTMLSTDTSTMENISIPRTAHTVPNTRYLQGLTHAKQKTSFTVDLDRLRQLVTVEEKDSPSSPSTDPASQLTEPSVHSGQSAMDLDNDMDPRQDISHVDEKKKVSIFDLEALVQPVQCGPSSDSLDSTFRTLAISTKQHLVSILHIQGYLRSFYGSRIFKIRSAHLRQAKRAALDKGVSQICSTAGLGTKVGAGARQPVVVVGDGNFGCPRRPSLYMQFIKHMKNKVLALNGKIFRASEFRTSRTCCQCRVEGELVGRNLICPSCGMTRDRDHNAATNMAIAAISQIDQQSWPAHLQRNSQQSSL

SEQ ID NO: 2126 - protein, 1657 aa, unidentified
  REGION 1..1657: note = Table 20
MGVPSTFILLDRRGLQGTPVKPALSANHIDVDLASLFYGYITNTHDNMVLAYFRQNTQQDEHPTATEVRMSLVEKLASALNSKLRRSFNRNITIHFDGTPSAQKSKAHAARAKEYKNNHKRSKRAIRRATVLLDLQPRDQVATKGAIKKILRLYNAALQAWRSEKLYDSETKNALADMLEHKYQWQVCYCKHEADCCISSLDEPDLTVATTDSDFLFLPVDTVLRQDPQDRSQFLRLDRQEVLNTLDVNEDLWTSVAITSGNDFSKNIPGYGINRNLKFFKVLPDAKGCDIRDFMGAYKTAMSHKTGTSYDDLDQQFSAARDIYFLQYETSAGPTSTPNRSDEALWTLIQSVNEFFRNNRKQKKMKRKGKSSDTTVAASSTFSGQDQDSASTSSHPDNSDVALVTTLVTASTADIVEQDEDSQCTANKQHQTSHKGRPMLSFRDLGANHKFRAHQYEAPTPTTTDNTTEPSASMELDGIVEDEAADTGADSEDEGSSSSSYESNIDSDSSDESDSASSLSDESDETSDEFKRSESESDYCGSDTSSEEDEDWYFDEFTGGTKVIKSEDHSHASEDNFKSKNESADGSLTQAQQSFIPDNLVDSVIGKGGSDISEMCLVSGLHIENSEPLTHGSTSNEHLVAIAGAPELNQMDADMDGTGSEEDASNRGSIQSMDINSGQVIAAGEHTDFEDVDSVSSSSYGSETEDERPKKTSKKRKKKRQMKARKEKQKFNPASRAVRSGFADHTMKSSKQAEPEDGSCQGTESGSTENSGEVDVSLGKGSVDVEMVDAASPSVGRLNDAGSSGTRSSSGSDDPPPAGDSVEGETKEKGTPKSVAPTRMINEALKSKHMMGPLHIGTVRARINASIAGNLGCDKDDILEIDKSGLPKTVTDIIKTMVSVAQDATRGAQQLIAHHILSTFESHPGLAESDVAYRKLELANYTSSRNKQGFQASQTFFRCLVTDVYLWHHRSKPRKGRPRAVTNSTTVLTRAVEAFDNFLQRIGVSMPDLKGRAEGLTLFLQLVADRIMDEVQTHFQRNITELVSWIRHYDDHWSTTADGTHILNSIDLDTGQSTLVNNVSLFFMLNVRLPAHYRMAFFPESGYHDANYNISELALITALYANANKESLQPLKNVLGTTTMDATTFLSAHPGELTYILFFNPSLGYDKYTSVASRHLTLEVLEGRRILKIPTEHKDRYNMLKRRLKRHPNDPKKKRRFRHFLKAILKSPAQHKHAIDAGHSRIHYVLSGTLQTNGHIVNPLAYCLTKAKPPKTSVPNSTRYILRDVRKVFTSPQAVQDTLPYNNGLYQVTGVDPGIHCTATSTTIYNRNVSKQENVSVPRTAHTYPSTQYQKWLERAKKMTMFKISTASLGRKGSITEPGRAESGDIQETFEDVTLGQDDMDIDSGLVVGDLDMEEGPIVNHDEQPPDDQVDTPASETDHGLPVSTVSIVELPDASNELQKMTIHDLEATLTSVDSGNSSGALDSIFKTLAESTKQHLASVLLVQGNLCSFYGSDLFKIRGTHLKQAQRAAMDKGVSRICVTAGLGTKIPQGKSQPVIVVGDGCFGCSRGPSLYMQFIKFMKKKVVSLNGRIFCAPEFHTSLYCCQCKVEGVLVGRNLECESCGMTRDRDHNAASNIAQAAISQLEHQSWPNYLQRPL

SEQ ID NO: 2127 - protein, 1296 aa, unidentified
  REGION 1..1296: note = Table 20
MGINSFYPFLEDQGITGEEVDVASLEDMIQVDVLAILRAYISATSKSIWVSENRKAARKVNQPSPEALQRTCLESLARCVISKLGEAGFRPSQCVLHFDGAATSQKERARQERVSEAEDSVKLTKEAIQRTMAIIQVRPAGLPPSLFHPEPSTQRINRARKERAMSRAQESLLAFKRSNILSRDLVHELARTISEKGWTVHICAGEADVCMSMQDSVIATSDSDLFFHGARAILRQNPRTKSKFTRYTVDEILRKLSLTSDAWAVLAVVTPNDYCYCVRGLGIKTNLGIIKSIWRHRSLSKEELLAGYCAKVATSRHIPDLSPASYKQATDIFFRQHEDLIPYPVIGSGLEQDVAKLIQEVERFRRTYRLQRHQPTPIPAAAPILGPAPFAAPTLTPLCAPLPTPAPALGAIASPTLTPHSFAGPLYGDVSALDGPPAPEIPDILPGPVIAETPVPAGPALLEIPAQAIAHDFQRVELKGDQSEPGRASDHQKRRPRSQIEIAPPQVATQRPHQKIMSGNRFKVTTYIQPAITTMQPQPSESTQRTRKKTKKTSKHKAVYNPSSRQARQVGQEPPTRMRMLRPATVMDSVLSNRFATVTLTCGTLHKQIKSALLTNHIGDEGTRDQMANDMIKVLREMVRVATEVMRHAQLAIACYISSTLEAHPSQSEADITARRKKFDQFCGFHNNAFFAKMLQDIFTWKEQQRARANTEENQCLEAILYSYQQALLQAGEDVPDLRTNLTQGLANFFAQCGLRLADQFQCHYLRNTTELVLRLRQYNPGWCEGEGEAILSTINLQKGTSTVHDQLSLFVILNSHLPPSHQMSFLPESGLQDQYITITERHFVEAWFAQDEVKERGYPGQLQDALDDISDHPGDLFFQMFMGRQNYTKHTLLMSPNPECDATYDRALLSPHGEALEELQAITEQRKDRERHKEARESLKDFYREQIPPPIVYKDLVDNQETDSKYVLTGTICTNGYDLQVLAYSLVTPKPPSHPQLNTTRAKLEDVAEAFADQEVIDRVLGEHDDDYIIVGMDPGIRNTVTATVVDTRHPRHFKNITISEGAQKHCTTRHMRGLEHAKRKVRYDVQYAGEPGATSRSVQEIETHIKSIECPIAQEGDQASAWQALAASLQAHVVSVLQVQPHLRRFYTTGLYKSKAFTHKQAKQATKNVAVDRIISATGQTGKWRPGSGPRPIFVVGDGSFGTKRGVVRCQDFISLLRKKCQALNFIVLCANEFRTSITCCQCHTLGKVEGRSIKCPGCGQSRDRDHNAATNLAMAVLMLIREHQWPPWLTQGC

SEQ ID NO: 2128 - protein, 1361 aa, unidentified
  REGION 1..1361: note = Table 20
MSSSSHSTHSSSNVVGVHYRVGKKIGEGSFGIIYEGNQQVAIKFEPRKSDAPQLRDEYRTYKILAGSTGIPNAFYFGQEGLHNILCIDLLGPSLEDLFDMCGRKFTIKTVVMVAKQMLCRIQTIHEKNLIYRDIKPDNFLVGRPHTKHANLVHVVDFGMAKQYRDPKTKQHIPYRERKSLSGTARYMSINTHLGREQSRRDDLEAMGHVFMYFLRGGLPWQGLKAATNKQKYEKIGEKKQSTPIKELCEGFPEEFGIYLNYVRKLSFEETPDYDFLRDLFTKALKSMNEVEDGIYDWMLLNNGKGWESEVDGMGDIYADNHIQSASQQYSSNPLHPSGHHHDRHGRDPQSQRQHGKLQQPGALVHSNSKLKHKQSHSRGQGGGTGEQDLLRDHAYNRAAPNNGNLRAEDGQNADGSQKKRGFWEKLIGVITCKLAAYRISPLSDISTLSVFAFDSLEENIQETSVTTNRLDQELTDMIKDVETFKRLHRLQHQPAGEVPKAPRRPHETYVSSNKLKITMYNMPEAGVVQDQGTSASAVSKKKSTKRKRKTLYNPSSRRVRQDTNLLQDVFCWHDQRQVRLTSKQMTFFPESGLTDSFVHITERHLIEALYANPNMPLVFGEKAEDALNHLTDHPGDLMYRLFFSPRLKYLGSTVLTSPDEDCAATAAKLPDACAIFTSQEIIEDLLPDPDYVIVGIDLGIYSTVTATVIDTRTPGILKNVSVSQGSQRHCRMTYLSGLQRAKRGKTIAVQLQDDEHPKARNIEELESTTTPVSCSVPINEAQGPSWLLLSQSLLDHVQSLLLVQEHLRSFYTSRMFKIKGYHRKTALKATLNRAVDRIIAASGLTEKWDPDKGPRPIFVVGDGNFGSSKGPILHQQFAQAMNMIVVCVDEFRTSKTCCHCESVCDEQGRSLKCPGCGFQRDRYHSAATNMARAVPCSSGKDASLTSSVEIMTWSPVSFHNHKHTPKRHVEWLHCLSDSIGKALIAHERRAAPARSALKAAVADFIICQLSIHWLGRLNMIGNKNIPKVILGTMTFGLESTSLATSAVRVRGTKDIKLFLDKFHAYGHVELDTARIYCNGDTELALGQLPTEDFKIATKVWPTIPKAHDSENIKRIFRESLTALKAKKVDILYLHAPDYTTPFEETVQAVNELYQEGLFERFGLSNFAAWQVTLIHQLCKQNGYVLPTVYQGMYNAITRDAVRELFPCLKALNIAFYAYNPIAGGLLSGKYKFEENEGEGGRFDTKTGFGKIYRERYWNTLFFDAVKKLETITKEHNLTLLESSLRWMSHHSGLGPDDGVIIGASSLHHLDENLKDLAKGPLPKEVVDAFDDAWEYVKVACPSYFKTAESAGSITAANLDSK

SEQ ID NO: 2129 - protein, 278 aa, unidentified
  REGION 1..278: note = Table 20
MLPGPDYVIVGIDPGIVSTATATVIDTRTPEQLKNVTVSQGAQIHCTKTYMKSLHDAKRKATFNMRLSGEAEARSWNIEELEGTIEPISCSIDIGQSLGPSWKQLGKSVLNHVHSLLLVQEQLRSFYTARMFKIKGYHRKTAIKATRNKAVDRIISASGLTEKWDENKGPRPVFVVGDGQFGSSRGPVLHQQFAQALNMLVVYVDEFRTSKICCRCDSECKAQGRSLKCSGCDFNRDRDHNAATNMARAVLMLIQEEAWPDALCRDFDLETREFFSTQ

SEQ ID NO: 2130 - protein, 765 aa, unidentified
  REGION 1..765: note = Table 20
MELKGDQSEAGRASDYQKHRPHLAYMSSNQFKITTYDKPEVMNVDAAGSSAPRKKKRKTQKRKAKTLYNPSSRRIRMDEPKAGAETTSPEWNRKLNPAVLIDQVLDKEFSTVSLDCSTLAAQVTAAIQQNEVGDGEDWTSLAKTIVSVIQEMVYIGNEAMRCVQQAVACYLADVIIEHGTLSSRDVAKRKEKFSEFCKFKNNTFFRNLLQDVFCWYDDEDRPKRGRPRKETEANASVKEILGENSAYRRALRKANKTVPNLKRSLTEGLTDVFSQCGDRLADQFQCHFLRNTAELVQRLEVENPAWVAGEGKAIIASINIKKGTSSKHDQLSLFWILNSHLLSSWQMAFLPESGYADNFMHITERQLIYALYANKDCKQAFRATGQYAEDHLSSHPGDLTYRLFFSDRLQYRKNCVLMAPDRDIPAAAHNPLFDLFERELKAYEKLVEDLKGDDHVATRKKFKVLMTNHIEGAQTYKTLLDSGMPTGTIVTNGHELQVLAYGLTKTRPPSTPAPNTTQAKLDDARQVYAPGQPIEDMLPDLDYVIVGIDPGIFSMATATVIDTRTPEQLKNVTVSQGAQMHCTRTYVKGLHNAKRNATFDLQLLDELGESVLDHVHSVLLVQEQLRSFYTSPMFKIKSYHRKTALKATRNKAVDRIISASGLTEKWDESKGLRPVFVVGDGQFGSGKGPILHQQFAQALNMLIVYVDEFQSGRSLKCTGCNYERDRDHNAATNMARAVLMLIEEGVWPDVLCRNYDLEVWGGTHS

SEQ ID NO: 2131 - protein, 1222 aa, unidentified
  REGION 1..1222: note = Table 20
MGVERAWDFLKKRGIEGTPVDTKASASQIHVDFLSIFRAYLLATEYFILKDLFWKRTRAMRSPYQDADILNDEYLDETRAKRLYTRLHNRLLHYFRQSNVLIHIDGAPSKQKAHARLQRQEKQDVASTKLQHSLEKVNDLLEQVSQADSVARSRKDKIVREARTVQQLWKPARTIDGNMKKELAQELESLGWKVCRCDGEADLCIAGQHGPITVATTDSDFLFHGVDTIFRQDPQNKSSFREFSVPGILDALDIEQEAWTAVGVVSGNDYCKNIPEYGVFTNFKAIQPIPVAETSGPWEILDNYCSQISEMTGKSYKCSMFQRAFDVFFDCHEDLEDNPVESTVFDYDIMDTLTAVEQVLQQYKKSRRPSEAASSTPIVDTDVHMTSAQGDVSDGTQEDASDGTQEGSSDGMQIDDAEESTLTGAPPPRPRPHKRLMPNNVYTAKPYTKTAETTPGSTTVVPRKKVARKKKKKPPKAALASCSRESRKDPLSQKAPSRKNTRKPMTIVQDKLSEKYMTISMDCGTLSRRVKEGLETNFPDLDTSDRSAIAKAVISTIREMVYIGTEATRMIFQAIACYVAKIMTDYPTTEEADSNERKEAFRQFDFFENNAFFANLMTDLFCWHDQSKRRGKPRADTPANRCVSDIINHYRTILDAAGKAVPLLKRQLGGGLGAFFQQTGQRIADVVQSHYRKSNLELVNRVKQFNEEWFFGDGSSIVDGVDKEKGTSDTYGQVSLFWLLNSRLPPEKQLKWFPESDFTDQSFVISERALLDALLAGRSDDIVKKTFGSLSDDVSEHPGDVAFKLFLCEQVDYAKTVCVVNPTIPADAEFEQRGILPLLNQTEQEFTDQVEAMENGSDAAGAKATFKAYLNTHLEDPSEYKVKIASREQEIACRRNVISGSFSTNGHELQVLAYSITEPKPRPRPKSLLGRTNQTRAKLPDVKEVLMTSEQVESQDLDPESYVIVGIDPGVRKTATATMITSAHPDTYWNLSISQSSQRVASKRYLHGLQRAKKTTYPMSSSLEMNVCDLESTIQPVEPQQAKDSGLLPVWQSLRTSIEKHVISIMHVEEPLREFYSSMMFKIKGRELKQAKTATHRKGIDRLLAQAEDLKQEAGAARTLVIVGDGSFTSRNGTLHQKFISDLKKRAQAQNVLVTCADEFRTSMTCCQCGTVGQLDCRSIKCGNCHQERDRDHNGASNIARAALELIKGAPWPKELTRKEQK

SEQ ID NO: 2132 - protein, 1160 aa, unidentified
  REGION 1..1160: note = Table 20
MGIGDTFQLLEEKAFVPTPCNPLGFVPQGNKTGHVDVLAWMRQYLIATYCNILFKLFKEDRLAGRVDWNRSLEDDVARIASERLSDALKKQLTKTFIPGNVLLHIDGQHSGQKAYAHSIRASNSDKDKRAFYHNMAKVKTLMGPFYGRNIPKPRPRTPGNTRDDDDDTPTDRRVPYSARHNVFRRSTKDKIVKIRKTMKALWKKAHPMDDNIKRVTCAALNNLGHNVHSCRGEADVCISTQGGEIYSFSGDSDFLYHPIHTFVRKDPKDPTTMLAYPTQEARASFNLTPAGMAALAVVSRNDYSVHVRGYSLKKNLKVFQSINGAKPSDAIHLSSEVLGWMSSNKYRIRNYTIPSGPSPSADGGDADQHQNQKKKKKKKGGRRTNKKQKTEEEKLKEEAVKREKAAARRRPDTSKKGRTEPNPNATPKNDDPATILDRVLKGKYALNVLEVGTVGQRLKDSIAFHCRKNLPEVRERIFNDLNDFFLALVKIATDVVHAARIALSCYIAKVMFDFPANTQAEIIARKNKLQDIGDIGGKHWFGSVLNAIFRWDQGRTEKQVVREIVGDYRALYAQAGLVHNRWTDLISGGMSSFLRQVGDDMESTIQGHFFGNIKELVERVKTTNPTWCQGEGAPLLNDMYVDPTNPKNDKHMFRNYGIVAAFWTLNAHLPSYRRFALFPKYKHKDLYVTITEKHIMEALPFRPNTSPATLAFLGPFTVRSVIAHPGELVYRLFMTSTVGYKKTSCLMNPSQSGPDFPPFFLPPSVDCDDFQDAYDALQSEYEIRGNRAATPAFSQAKRNFISAIDKAIMEAKDIRSAINDDDKNKERHRRMHILHGSIQTNGLDAKLHAFHTAQKKHLAGTYVPKTTKSLLGDIKTKYPSRDELLRNHLSPEVYRIVAMDPGLANTITAVILDSRSPNRVRNLAISSASQKEPERHYRRGLNAAKHKRGINFLENSIVPVEFPQFRNTGDDWVNWLCLRDSIRLNCVSELGVYKRLRAFYGSIMFKVKNRSLKLAQNATLNKAVGVIIRSCGIKGKWREGDNKVRPLFVAGDGNFTSRPGRPIRHLQFFKKLKTKLEALGYVIVSADEYFTSKSCCQCHTKSEDHITMDRRSIQCTQYNRARDRDHNGAHNMARAALQWMTVFSWPQELCRPTPSSQPQP

SEQ ID NO: 2133 - protein, 1720 aa, unidentified
  REGION 1..1720: note = Table 20
MKFLSRRLATLVAIASVTCLISMRSVLGQAAPDAVDNADPSSQDFDALNHGDKPHKHHHKKPHHKWPHKKPHHHKPPKVIIDREVNLVCDGFIIDKLKCPLRPIPLAMESAENQAPFDAMNNGGGIPVEQRYVGMSSPCSKDLPANCTAARAMAAAQAAEESTETVLNKRATEFEATNNGGKHHHHHHRHYRHHYQGKHHHVKHHHVKHHHVKHHHGKHRHGKHHHGKHRHGKHYHGKHHHGKNHHGKHHHVGGDRNRHPYKNLCVAIGDFCGSKLYGCDFDKTYYRCAAIGEPPFVNLVDAKVCGGNNEGESDCKCPGDGKTPVCDSQLPAACNADPTMVYHCLGGADSKPEVFKRCRPGTVCIANPGQGATCGFETCDCDGNQKYCSSQFLDRCGLNKNTVYSCVDGKLTERKACSDDQECVAVSNGAYCGSKDCKCPDDGTICGEIFPASCRLPATSLYTCKKGESPTVSEDCLPGYCTASVASISAAVVLRLWPKTSALTNALAEALACGSSFAPRCGLDPKTIYTCTGSGSKPTLGEQCENSCLVQAGSSICAKSDCTCPGTGSDPVCGHGLPASCHADANTICHCPGGKGSKPEVLFDCKPGTKCLKRPSPEGAVCGGVGCDCEDENEICSNQFDENCGYEKSTIYKCTPGGKPEKVKTCDSSKTCVSVSDGAGCGPNDCKCTEDGTTCGEIFPLSCRIKTIALYTCKKGEAPIFLKDCHPDYCSASKAQLAAAAVFSSTANDKCTDKCTCPGKGPVCGSTFKPDCNMGPSTLYNCDGIGGTPTPGEVCGQGGCTVTNGNDKCNPIDCTCPGTGNVPVCGSELPSSCNALPNTIYWCPGGSGDTPKVLSQCKPGTMCMKKPAPEGAVCGAPNCNCIGDGEVCSNQFPDECNLEPNTIYKCTSNDNPEKVKTCDATLACINLGDEAACGSPDCKCPEDGVSCGQIFPLSCNLKTTALYTCVKRADPVLKEDCYPNRCIASKSQLEAASIFLSTAADVCVDKCTCGSKGPACGSTFLPECKLDPSTLYNCEGNGKIPVAGEVCKEGGCTVHNGDDKCSTSQCTCPGTGLVPVCGAELPKECNAAANTIYQCPGGSGSQPEVLSVCLPGTMCIQKPEGAVCGGVDCNCLGDDEVCSNMFPDSCGYEKNAIYKCTPGGTPEKVENCDTTEAWSQANDVRSTLGGSLAVVPVPTVPNIAASASAPVAPATLPPGPSFSLDGVFTTSLTKIWEVDPMSPSPVVPAAPSRAPLFALDSMFKKSLSIQTSQSRLVGSDIYAAVLPAASESSLAHPPPLSATTQASQSYSVSRSTIPRCVPENCFTTSLSCKPHAQIIPPALGGDPLGKPTTLSPAEVQERVRRKRARRKRRKKEKAPHMPFMPSNAFKASVYHHTSAPIDEDPVEDDSKSRKPKTKRAQIYVAVPRTRRTTSKNKDDDGDGDDGDGDDDEADDGTGAGGGGGGNGIKRLTVASLIKGTLKGKFTETALNIGTLLVCLENGIRANQLDGTLDYKTIAKEVQVCIAQAVRVASEARRLVLLAHFCYVAKLIADNPDPLNPDHIRSCKDPRAFKIKTRLLKVATSATKHRGINKIIQAAGCVDRWEIGQVRPLFVVSDGDFRAKKGPTLHLGFVGLLKKVEARDMIIICADEYRTSVICCQCLTSGTLEQRAIKCTNCGQERHRDHNAAHNIAQATLQWLSLTRKPRQDEDEDGEENEEESVTNA

SEQ ID NO: 2134 - protein, 938 aa, unidentified
  REGION 1..938: note = Table 20
MIVVSTDSDYLFRSRDDVSLVLLRQNTQKRREFTRYDAHAVRTATGLSPAAWRILAITSGNDYAANKKHFGLTRNLRLIRTICNEGYTLELDILTQYCQRTNMSVHHFGHAVTVFIYNGQTLLPPEVATTDLDDYLLASIFAVGFNLQEYAFMDTRHARVEAAPQPVYGRPAPYMRFMPRIKYRPKPFPRPGWQGANAAPVEVEDDDEDDDEDGDEDDEEDEVEEEEEEGEGDEGEGDEGEGDEGEGDEEKEKDDKGKKKSGASKSKKPRLEDKPKKDPVRRMPTASFINNYLWGRFAQVTLDLGTLDRHLRDSVQTTYPHLDNEQQLVVVQEVQMVIRDLVNLNTDLMYHGQRAVALFTVYIMQRNPDLNVADVAMRQTVFRHFAGESPAFYRALMTGLKDWARGDSGAETSLVSAGGSTTAATWSAQTCATLALSLYKTVFDEAGPAQPVNTQLAAGLGHFIQQAADQLHTQMVTHWTTKTPELMKKVKEENFEWAGGVQGISFLEILMTKESRTSMTRQLLVSVFGTQTDARKWCHYRPGDIVNRLFFGSNSSYKKGIGLVSSALTLNAAETATFDTLRQAIDMATHVDGRYIRNVEQIKTLIQKGLKTPDEYRRMPVVGRRHILTGTIQTDGFQIRPLAYKLTQRKFQKSDKFKSGLPVTVKAGYLTKRLPTLAKIRETFGTSLITVAAIDPGVVKTAQLCIIKETSGHYNDITRLTVPRTAQTTSTTVFQKELQWHKDQEGIGIQESTIRPLGVGSGTSFTWESYRDALVAHIKSSLMVFENLRAFYSSKKMKAIHWDRKCASKTEMSRAVGCIVKAVTEDPNNKPLIVMGNGKFSIKSGVVYTDKFAKALFSAAQAAGIPMHYVSEYKTSQLCCVCRHKTKKKGRLLDCKHCGGTRDRDDNASQNMGNLSLDWVRFQQWDPAFQRAPAVQQE

SEQ ID NO: 2135 - protein, 1140 aa, unidentified
  REGION 1..1140: note = Table 20
MGVAGAFPFISQRGYIAESVAPNNVPGQKHVDVLALFYAYIACRVKTMLGAQFRKEYWESRTVNSSPSSQPSHLSVENLKKLAKELDLKLRSVLNPDACILHMDGQYTQEKAGQHDKRRERKADEEAVVLRLIAKTESRSSRASEKDTVLSSDRTKIVALAKSATSQWKSLRVVHAYVRSGLTLELQLLGWTIHQCPGECDTCIMKNQTDGETLVVVSTDSDYLFRGNGDLILLRQNTKRRQRYTRYNCKDILDHVGMTWGAWKALAITTTNDYSRSKWGYGMKRNCELIQAVCQAQPSLDADTIAIVHVYSAYVGEDLTRYKDALAVFCMNEETLLEETPATPDRVDDHYRSMIFTVGRQLSRYRARRKQQRDQVQKPRYTRAAPYMRYMPGIKYNTRPFPRPGAPMQTNPDHSEDGAEGEHQEQDQDQDQDEDEDEETDDDVGDDDEDDDEEEEEEELEIQTSAQVATALQASESTHQSKKPKGNVAPRRDPKLRQRAATVVDKALAFRYSQVSLDFGTLKRHVDDSLKVFKTLDDSTAALSEADQAVVSREVLATIKNFEKASSSATVTAKACARDVVQGYQALFTANPVSELKQNLTSGVASYVGQIASHVQSQIRTHQRTMISKLISKIKEENYEFVTGPGRELLASIEEGDFSVYDLVSTFFILNANLPATSQIQFFPASGYKDQFTYIPEADLMQAVLRKRPEDKETRNALVRAFGSSTMAQAHAHLFPGDITRRLFCGVKSSYGKGLGSVSPYAPKCVVDLQGREREQFLAKAKAVDNATTIDDAYIRTLREFEDLVKEGLKSPAEYKAMPPEGRRHALTGTIVTDGFHLQALSYKLTARKPFRSKKFKSGLPIRHQVGYMTTRLPTRDHIHEVFENRDVLVAAIDPGICKTAAVSIVNSATPTSAQRFTIPRTANTTATKRFMKEMETQKTLHKMQELEVTISPLKFEQQLNNEQYWTAFKKTVEDHIKSSSRVEASLRTFYGSEKFKAMTWDRKRAAKAEVTRGIDRLIDIVKSPPDSTPFIAMGDGKFGIKRGPTFTDKFAKTLYTRSQGAGVRMHYVSEFKTSMLCCRCKSKTVKKGRQVLCKVGCQGAKRDRDDNASQNMANLTHHYVDNLEWPTEFQRPARLPAAN

SEQ ID NO: 2136 - protein, 1274 aa, unidentified
  REGION 1..1274: note = Table 20
MGVAQLSQRIKETGGLEIDIRGAGHVVHVDLLATYFSFIQKKCFEIFKAHCKSIASVGDDFAVQTNAGTRKRKATDQSSANTDTELGKYKSVGYALDRLLGKILDQETTIIHVDGAPSQQKRQERQSRGASLRTELMNLRSLVDSDPLKGQKQLYRRCGNAYRVPRDILKTEILQVLEEKGWTLHYCQFQADTCIADANQRAQDPAHIKILTRDSDLIVYEGVHSITMPIGRRHILTTFAKADLLKELDLPSEKHLVLVGLVTTNDYVKNIKNFGLGRNCDIIREMDLSSIEPIGSTTANAARAASFYPLVEDYIRRVNASIAAHPASLKGKGKSNINLERPAHSDSPSESNRQRSSVVVDPSYYSHALTAFVERVETPIQGSEQPADISPSAHDALEEILNTMWGARTQRKRLRLSASDPRGAQNLVVSAHQSDSIECGSSVQAAPGSPGQDRQKMHMSRKGLDLRRTRFRTFHAKRKSDAVYRKWRMSRFKSRTDLHPRHAARHVDLLSARRVDPEELQTMTPTVHRPRAIQAEQTPEQATPTKAVKTTTKRARKSRKQREPAAAQKKAFSRTFATSTQTIGCAQGCLVRAGHGLSREDIQLLTDRLQQAITTINSAKIYVLKMVEIVIYGDLLSMASASDPATVSGSQSPLDLLLTKATGTLILRNLFALALNGQTGGGRPAQKAESVQGRQIAEHAYATFLGILPSFEPINKDKVPLSIIQEDAADELYTALRGHFKKLPSTICNRMTKAGRSKEDIPEIEPVNPEGEQEEDAEEDDEGGEDEKRFPPGHIREWWHHYQTLPQNGRPAFLPATGFSDSFVRVQERALPAIFWTKRGNPAQMAAEKIMTRKEAEELVKVDFGALIMVLFYGNVKESALPQTSYDKRTKTMRLLAEEQPWSFGTEELERYLDQKFAYAKACKEHSVPPATAPPPLPPNNNHVSRYAISNMLSTNGLRLNVLVYDTSKPFRGKGRSSFVKRIENAFPTAESVEAVFSKPSKHVQVVGVDPGEKNTAAFCALTREIKENGLGPSITAQNLVISRTSLYAPMLARRTRMQELKSQRIRIDSGSAINGALSASPSWHSGIGLPTINDIEGLLLPRYYDTLDDMELGLQRFALVEPILHDFYSDNRIKRLQWEQNKSSRAEQDWAISAALKGCKECTLFAYGNGSFRTGLNLGSKHETFKTNFAAKAVAEGHVVVLVDEKYTSAMCPRCVELGFATRVAKPNMRTCVCPVCGVWMNRDSSGSHNIATVGDHWLSFFNRPVALEHPAR

SEQ ID NO: 2137 - protein, 1786 aa, unidentified
  REGION 1..1786: note = Table 20
MGVTNLPKTLKECGGQVETRFKNPGAMTHVDFMSRFFRLVQVRVFNIVQTRIKNDIPYQPDSQKPNQPHDTYNFNATNKRRILDEHQPPTAVPNHHTHVPYDPTLTLDQLIELSIQELDPTALYAHSDGLSTSPKEENKLEYRAVAFVLDSVLSKILVKDQTVIHIDGLPSEEKREEHRRRNAALGRTLTKLEQDVSKTNCKPGRSLLKRCRNAYRTPRSTMESEIFLGLTRLGWNLHQCLHQADTCLARVCQVSPDPSLLILITRDSDIIVYEGVQSITLPVGKSHELMTVTKDSVLRCLDLPSEQHLLLACMVTSNDYVRNIPYFGLMLNCEIVRSMDLSGLSPLGEVYNNKKRAKEIQHYIQQYIELVNKHLSQQTRWKSGKGRKRQTTVNTGVDHYRHAITAFVERTESDVLNPIEPIDNTPPAHEIVVAILEKLHQAGKQQKQHEADIADTTTFDSVSSTSERQYRVSIKTEPEPTSGTDRETSKSSTSSSIPSALSAANRPPGKAKRKRSLRQQERQMERRRQHRKKTSKYRTWKSSKFKSRTDLDQRYSVRRITIADATMVDPAELAKMTPAVPKLKNTPNKPPSNTGPQSSSSSSSCTPPSHSTESVAVTPSTATPKATSKKSRKKPRKPRKLKAPAPAQKAAFGAAFAVSTQRLGSLRGCLRRALLPMSEGAQLPLYATGDRKTLEDADFTALAMRLTDAVDVMNQASAVVYRMLEITIWDELLRGSNGIAGDGQPEPDCVIGEVTLSGGKATVVSGSSEAGSEEFDILDLLLQNSAGMALIKHLYALALNGKMDNRGPKTKKSASKAVKAIAQRTYARLLRIVPGYKPTNTNHIQMGRPIVAAAKQVIVCLRTHVRQMPFTIGSRMLKCGWVKETLPEGSFKDDEASDEMVDPGADQGDSDVMDDADNDNDDDAEVGVVDEDPSTSFSTGYIYHWWRQATHLPSSARPVFCLRRPFKSCFVMLEERALPQILWGTSQKFPNPARASADKIMTTKMAHTLVDQEYGHLIKILFYGDRQRIRDSTSVWQTSYGKRTSTMDDLSNANSGVYGTVALQSYLSAKFDYISYASVCRDQDRACDRTPPPLPTDTSTDRYALSNVILTNGLQLHTLCFDTSKPFRSRTSFAPIYRIERQFPTLQSILDAFGVDSVEELDVWGVDPGEVNSATFCCLERQIQKSSGATTNSSKDTVDRPEDEVDSLILPPSVVANNLVVSRLALYSPIIAHRNQLNNIKQHRPVLLPGQETTPDLWAKADLDRDKTGISIPSIKDVENLVLPYQYDSKEDHEKALQRAFLVRSVLQGFYASDRIRKLNWELTKWKDAEIDWAVDGVLRSCTRKTLFCYGNGKFRTGLNLASMHESFKGRFAQKAVAAGHIVVLVDEMLTSTMCPTCVELGVTSRLAKPTMRSCACLSCGRWLHRDIVGAHNLAIEIWEGFLSSQKGHKTTVFTASSTSTAMDNISPPQDLQHLPTPTTSANQPSRKSPFLGFTDNSKQDEFLVQALAHHNPFKADHGEKGATWDRVLGYLMTIDEVRARHGQASMFAGVTTKTCRSRWEAIFARHQKRIETVLEKAGSVPIETDHDRRVDNLYNDQVENDKAKSASKEMNEKKRKRQQQNRALGAALRRASLDKACYRFSPSSVDDGGFTSSASSPAQVEGPSTFQPTESSSSRSSDPQSSHSAGFSQTARSRTVATGKVRIESDYKRRKRITEDVKKMRSNIIKDDIKRHEDTETKRQQQTDDIVRTIQEGNRGLIMAMEENSAKQNKVLDTMAILLQKLVEK

SEQ ID NO: 2138 - protein, 571 aa, unidentified
  REGION 1..571: note = Table 20
MPFTIGRRMLKCGWNKTDLPAGSFKEKQKAPPVGGDQSTPDTAMEERLNPGEDDEEDDQDKESEDGDNEEDPKMQFADQHIRRWWKEARSLPPSMRPVFCLRHKFSDPFITIEERALPQVLWSSKGKPNPASAAALKIMTAKEASTLVESKHGELIRILFYGEPNEIKRSRSVQQTSYGRRSTTMDTLANNYPTIFAPTVLHSYLDNWFSFLNYAKDCKEKGVACNRSPPPLPTSHIPQDPTQHPQRFALSNTFTTNGKELHVTCYDTTKPYRSRTAFVPIYRIENRFPTLESVLREFGVSSVEDIDVWGVDPGEANPAAFCRVLRACLDTKSSGDQSLPHPPTSSNRILTPAIEVKNLVVNRKALYQPVFAHRYKMEELKHSNILRSQQHEQVKDLETSTGRFFQVQGLLHGFYGVNRIKSMNWSLKQAKKAEVDLAVDAILKACTKKTLFCYGNGSFQTGLNLPSPHEVFKATFAHKAVAAGHVVVLVDEHLTSTICPTCPEAGVTCRLAKPTMRSCVCLNCGRWLHRDAIGAQNIAAAGETWIKTFTRPLPLCRTGQSPETPYLHNSN

SEQ ID NO: 2139 - protein, 979 aa, unidentified
  REGION 1..979: note = Table 20
MIDRYKVRTVELASAPKVDDAEVAKMTSPKSKKATPAPGKTASISTTESSKSLTTSNQKRAPKEKSEVIQLKSDFKSSYATVAQTVGSVQGCLRRALLPGPRPGESYSDLQEEDIKLIADRIDKTVAVMAEARMFVFRAIELLVLGEHLATPKAADVDDSMDTVTTSTDESKDGELVDVLDLLLVKTAGMAIIKHLFSLVLYGDLSDGGPPTIHDTSRQVKETAKEVYARLCRILPALVPLNSDNITLSNLLLEAALLMIGVKKEDLPPGSQKVKSNEGTELDADADGEDGEGGRTKFDKARPNPAAKSAEKIMTKKTAQERVKNHHRELIRILVYGDSEAIRKSRKVMQTSFGKRTTTMQELASSHPDVFGAVTRKEYLDEKFKFLNAKDKTGLSCPPLPTTAFNDSPNRPPRFALNNMLATNEKNSMTRVLNPIRRVEKQFPSTQSVLDRFGVSSLDEIDIWGVDPGEVNTASFCSAARVSAVENLVVKRSSLYQPVLSHRRALERLKEQRIQHAPGQTVTGDCWAKPVQANTRLSLPSINDIQNILPEQQYVDVEQLESSTVKFYQTEGLLHGFYGSKKVKSLNWARKQSKKAKVDMVVESILKQHQGRKAMFFHGNGSFRTGLNWASSHESFKTVFAQRAKAAGHGVVLVDEYLTSAMCPICTENGCESRLAKSTMRSCANQSVALGRAGANVYHAGKIGKDGEWVRKIMEDAGVDTTYVKVSEKEATGRAIIQLSQESHDNSIVLFPGTNHTVTLSEARLVLTHFGEGDWLVMQNEISSGGDIMRAAKEKGLTICFNPSPMTAELPKEYPLHLVDYLLINEIEAQGLYSYLKANKSDADSVSSSSHITASESFPVLEKAYQQVSGIIITLGGDGLVARFRIHEDDVELKEFRMGIVKGNVVNTTGAGDTFTGYFIANLARNQQLGKRFSPDELRAALEEASHAASLAVGKEGAMDSIPMKDTVDTAIRVKAKLE

SEQ ID NO: 2140 - protein, 1375 aa, unidentified
  REGION 1..1375: note = Table 20
MGIRGLPKELHESEGIPGGSCKDAGKSTHVDFLCRFFRLLQARAFQILQQRIKAGSDSATITPAPELQLETEVPARSRKRKNIAEHNSTPNTPSLDVTIPFDPKQTLDELIEDSIDRLGYKNLFLNPEGLSPVDKKNLQTFRAVGHVLDDILSKEFDKELTIIHVDGSPSEQKRGEHRQRNATLKRALDKLQTKVSGSTRSTKQLFKACKNNYRLPRGSLEQDILPVLREKGWQIHLCPYQADTCLSRVCQDAPDPDSVMIVTSDSDLIVYEGIRHIMMPVGKTRELQLFDKTKLLDRLDLPSEQHLLLVCIVTSNDYVKNLPYFGLHKNCDIIRDFDLTSLGPLGGSGDNDHRAEALMPFIQNYLDEELYSRKSQQQQPQQPRNDTHTFTQHLPPERVPIKLSSTKDMGMDTDTNIESAPPSTSTQYDSKTISECTRKRKRSLKHKQQRKDRFKAKKLEAKHKQWRESQFKSRTDIQKRYSVRTVNIHDAPNVDEAELSHMTVPKPRSQKQSSPSINNPVSDNNAKDTSKTTSGSSSQQKSSENSQQKKKKRKPRKRKPRKPKSEVAQLKSGFSSTFAISTQTIGSVLGCLRRSLLPARETGRLAKLSDEDIKDMAVRIDSAVATMAEARMFVFRAVEIMILDQLLGGEDISGALDAVAGEEDAGEPFDVVELLLEKAAGTAIIKHVFSFILNGEIERGRPKTVKEKSKAAKNISKAAYDRLRQILPGFRPVNKDSICVGRLIVDAAAEFSVQLRKHFRDLPFTIGARMLKCGWSKTDLPAGSFKEQPGSQTVGAIQQTTAEERDDDDDEKDEDDDEEDVEDEDEEEGDNDTSMRFAGGYIRHWWKEAERLPPAMRPLFCLRHNFTDPFITFEERALPPILWSTSKKNPNPCAAAASKIMAAKEASALVELTHGELIRILFYGEPDEIRKSHSVWQTSYGRRSTTMEALANNHPAIFDPNILHSYLDNKFRFINYASDCREKGIACDKSPPPLPTSLLSQDPTLCPQRFALNNIFSTNGKELHVTCFDTTKPYRSKFAFNPIYRIENRFPTLQSILDEFGVSSIEEIDVWGIDPGEVNTAAFCRILRTYLTSIDTNVATDDDAEPQHRRNDQASTNSILPPGLEAKNLVVSRKSLYQPVFAHRHKMQDLSTTRITVSPGQTIEGKLWAEQKDGQADGGTSIPSISEILNVLPSRQYQQVADMEQSTFRFFLVQDILHGFYGSARVKAMGWDLKKAKKAEMDLAIDAILRECTTKTLFCYGNGSFRTGINLASPHESFKAAVAAGHIVVLVDEYLTSSICPTCLESNEVSRLAKPTTRSCVCLTCGRWLHRDIVGAHNIAAAGEVWMRTLTRPTPLSRKSPSEQSAWSPDLHNSN

SEQ ID NO: 2141 - protein, 391 aa, unidentified
  REGION 1..391: note = Table 20
MGSIADSMPEFGYPALQGYVNRRIAFNKAAASARDRGIPCSQAPPVFPMNSHSSSRYVINNFIRTDGMELQVLAYDTRHRYQHASAFDPVMRIEKVLPDHATIMRIFNDQTPKCIGWDPGELVSAALCMIHHADNWDRQPEAQDPPLSNLLIRRSALYSPTKSARADRERLKNRSPAVQAKEAITGDLWVQEQDSTAATLRLPSISDMESALPSKEQYTVDEFEQALLVRLSMEPLLREVYSTSRFQKDRWAEKRAKRAELHMAVDAILRMCGPEPCSIAVGNGTFRTGFNLASKHECFKTHFAKKARALGHVVVLVDEFLTSTMCPSCAAHDVRSRVAKPTQRSCVCVECGRWINRDSVGAQNIALIAERWMTDQTRPLPLERPAQPSQL

SEQ ID NO: 2142 - protein, 1576 aa, unidentified
  REGION 1..1576: note = Table 20
MADFTSFCQQINCSRARNLATSVMGVNGLPGEIKNATGIAPAKMNGKEFHVDMNGTYYGLMKARAYSVVQKYTTTLTRDTEPANLHMPQMEDAPERPESTDSASPDPNDAQADLLRRANMLFGLKDKLAMVTSGPNSPDSVVVDKDGMLQDGTDQQRVMFFGHIADELYRKLSQFCTPEDESVTLHFDGEPSIQKQAEHRARDDKLRKGTDALHQAIEQARVVGGSRRKAAYKRCRNLYKPTTVIQGEVIAELIKKYDCHVCLCRFQSDTCIAKLCAQSPNPQDIIVVSGDSDLICFGAVPRVLYPIGKSRELTLFEKDAILEVLDLPSERHLLLAAVVTGNDYTRGVPYFGIKKNCEIIREMELPGSDVESFRWYVHEFLVRVRHQLLSERVPRKKRKRIDSQLSATVEDFDHALSAFVGVQEDAVSSVDQSPHPQPFTSQQHTSIEQGGQRGCNAHEIVMRALLDLEYQKVAEVQARAAMGFTPPMEDKRPAPKKNVNRTRTAKTQRARREAAKRNRKRKKWKKSRFKSRTDNQVRYSPHRVSDPSTATPVSDNQLSTMSPSQPKKRPVDKQPKAVEDSPSASSSSSTDHSSKNKRRKASSKKKLARPRDIDATPTAPKLKDAFKFAFPTITQTVGSLKGCLRRSLRPLGISDDQVDTIASRLEKATSLINEARPHVFRMIQLFLLEEVTTAFSPQGASGETNVDLLDLVMNKASGQMFIRGLMSLALNGKIVEKKCKKSESIRARELAQRVYARYKTIIPHFSPINTTDIPLGDMQMEFGLATMMVKLGWSKDIIPLVDGDVPPEAQRQQDNDALDESPTTAPLGSDEYAADDDGCYKFKAGFLRDWWDHLLSLPAEKRPVFCPQPKLRDAFVMIPERAVWRILWGGTARNNPAKTIVETILSRAEASDCVDSDYGKVLETLFYGRRRPVGHDNDGGPDLRRTPYAKRTTRMAELAEGDPSRFGYRSLQDYCNRKLAYLRVAANCRDEGVPCTQSPPEFPANPCTKSRYALNNMIRSNGLELQVLAYDTKHEPHGALDPVMRIEKVLPDEDAIARIFQGKIPKCRGWDPGELVTAALCLIEHEREWNGAPDPGDPPVTNLMIRRAALYSPTTAARSERERVKNRKLRVVPGESIDGGIWARGVDPKGARTDVQSIQEIESCLPPKGQVTVEDFEDAVRVRVSTEPLLREFEGSLHMKKAAWEEKKAVRAELDMAVAAILRLCGPEPCLIAIGNGKFRTGINLASKHETLQSHFAKKARAHGHLVVLVDEYLSSTVCPACTARGETSRMAKPTSRSCVCLACGRWINRDSVIEDVPHSDYFKGLKPAEINHIAYFKHCDASYTQKQYHQNLWMGTILPIIEGTTIQRVADQHTRLNQEWKVKAETDRFWSSVMNDELEAKARANNKRQITALREHVVNQLENTYGYYSKRTRILNSFKGTESTSSSTDPTFNTDDLSDRSTEEDDAPVTLSRLVGPGTLSSKLSRKSLYYKGNVCISQKLMTYRHKQVEDESFLQDPQVDNILALNFIFHAEFPRDLRASEKARWECTLEQADMTLIMDIAVMCSMQERAEALK

SEQ ID NO: 2143 - protein, 1265 aa, unidentified
  REGION 1..1265: note = Table 20
RLLETQPSQIRFDESGSLTATCAQEQALDFRSVGVAVEKILSSRLCKSTTMLHMDGLPSVEKESAHDKRDQKLSRQLETLERDYADGKLHNKRQLYKRLKASYRAPPEALRAVLEVLTQSGWRICQCLNQSDTCIAQTVNNAAVPGDIRVITKDSDLMAFESIMSVTIPVKNTWITFRKDELLEEHGLPTPAHLTLAALLSSNDYTNGVFSYGLSSNVDMIRQFKVADLDGTVGQDRVEVFRVCVRRYLEIIHQKARTIKDAATRSAQRRLRSNPNPTVKAHDKDLRRIETADRQLGVDVTEFDHAIKAFVCCEETTLGNNRISPAADAHTRLMAIIEEVEVKKAYNDWSRFSASRTRSSPPGPQVDPVSRRTATHAETAPPPPPTAPRTGPSVAAQAEPKAGSPPISQKHGPAGHPRSHKPKNKKKCRRGSRAIQRRRQKWRRSRFRSRTDQQERYVPDTVFLASASPVDVVELSGLKPSTPRPSKQKDQTARIDDVPAPAPKKKKKKPLRDPKSVTGPKALKKSFKSVFATVTLTTGSLQGCLERSTNLSKAEIAQLAQQVDLAVTTINSAKHIVYKLIEMRILKPLLETRLDQGEDGPDKNFLEKILDSEWAERFVQNLLSFVLRNSTAPQGRPPASDKSKDAVAQAISTFNEFKKTLCPGFRALNSSDLALSNIIADLAPKMVLDVKLHYRRTPETLRTKLSKLSIDCDGLPEMDQVDTDTAGDADAAGGDAGAADVDEDVDDEDALKQSKKIIFKPGHIQLCWQYFLRLPSSKRPRFCTQAKMSDSFIDINEEALVALLWGEKSRQLDNVWEGTHYTHNWAAAKQRSSYGEVIKELFIGDRNAVKEARNKKQTTYGKRTTTMAERQEAHPHIYGQLELAQYLTRRINFFREKHNASLTASTPPLSPSTSSSSTASAPPPLPTPPQQPRSYRYALNNYIRTDGQQLQILAYDLTKPRQSSSHKEFLSRIEKLYSTRQHLIDAFGDDLDSVIVVGIDPGEVVSGAFCLALPGGKVINLLVKRASLYQPTLAFRDWEQHWKRQHPTAGPGDVVDSSLWTQIPDLNKVTTLPSVHDLENSLPSTDYDSLDALTAAHKKYYELEPLIHGIYASRDWKEAAHEHRMAKMSEMDLAVAGVLRMVDEACEGVPVDQRKVLFALGNGTFRSGFNLSSVHTTFLRRLLQKSAALGYKAALIDEYLTSTMCPTCVVENRATRLAKPSMRTCACVECTRWIHRDVVGAHNIALIAEEYLKSLGRPEPLARPT

SEQ ID NO: 2144 - protein, 1313 aa, unidentified
  REGION 1..1313: note = Table 20
MGIKGLTPFIKACPGVVEDLKTKTCHIDFPEMFFALLNARAFYATVSSEAKKSRKRCALERIPNAHSEGVISKRPGTSMQTTDFDSNGPPSKHARLSSPEADSNKACDDNTLRAAGSEELISTFKGSDVEAAPSSFLETMQRLLQEEPSQIFLDSDGALTTTQDLNEDIYYRHIGLAVHGILLNHVSPDCTTIHQDGPRSVEKENAHQKRDNDLHRRMEKLREDIEKGRLKGTKKLYRRLKSLYRAPLYEVCMSVTLPVGKEWTTFKKADLLEQLQLPTSAHLLLLAALTTNDYADGVPFYGLVSNADIVRKLQIERLESIGVEEKLLDFKNQLSHCLSEIHSNALRVRDAALENRKKRKQKVSASKADRKDEMRIDKAQRQLDVTINHFDIAIRVLVTTEEHPLTNTTADPSPSMPDICSTLTTLIRDSEMAKASRYRYIRAQAPDVEPSVSNAHQPMDVDLSPEAANLAPPPITLASPPIKRSGKRKKRNSTRAQSKRKQKWRQSVFRSRTDLTDRYVPQTAHLSAASPIDDANLHGLEPAAPRTYKPKEKTTNNNQPVPPPQKKRKKMLDYRKENASPAALKKSFKSVFASVTLTTGSVRGCLRRATDLSMADTELISQRIDMAVSIVNTAKHYVLKMLEMRILRELLSGSPQTTHSPAAVREMAQGTVMSDEQANQNAPATNRSAPFLEKILDSDWAELVVGNLMSYVLRNSTSVRGPKAHKPTSQDALVEARLIFEGFKELYPGFKAVNPSDIPLGVVIDDLAPKICLDIKMHYRKLPKTIRAKMEKLGFDDADLPQTEEDAEDDSNVDAAPPEGDEEDDEDPRQKSKKIVFRPRHILTCWSDLQKLPTPSQPQFCIQPKMTDSFIDIREEGLMRILWGRDAGSVGEIWEGGTHSHQWAKSQLSTAVGNIIKTLFIGDRESIRLAKKQQTTVRHNESILTQSSFSSSSSSSSVVTPSLQSSPPSLPAPRQSRTRYALNNFIRTDGHQLQLLGYDLTRNRQAPGHKSFMKRIENQCPTRQSLIDTFGENLESVVVIGIDPGEVVSGAFCMRLDEDTVVNLVVRRASLYQPTLAFRTWEENWKRQYPQAGPSDKIDTELWTRRADGQERPTSLPSLYDLQNALRPTSYDSWDSLVAAHQRYFELEPILHGFHSSPDRKKAAHQHRMAKLSEMDLAVAGVLRMVDEALEGIPVKERKVFFALGNGTFRTGLNLTSLHTTFLRRLFQKSTALGYHAALVDEYLSSTMCPTCTAKDEQTRLAKPSMRVCACIQCSRWIHRDLVGAHNIALIGEQYLKTMGRPQSLARPQVQSL

SEQ ID NO: 2145 - protein, 480 aa, unidentified
  REGION 1..480: note = Table 20
MTDGFIDISENELKRILWGRDAGQVGLIWSGGTYTSQWAGQQLSSSFGNIIKMLFIGDRNTVRHALKQQTTYGKRTTTMDQCATAYPNIYGQRPLALYKIDRINYYRARHNASIPARSSSSSSASTTPLPLNPPLPTPPPGAGFFRYALNNFIRTDGHQLQLLAYDLTKNRQTPGYKGFLKRIEKQYPTQQSMTNAFGQNLESVVVVGIDPGEVVSGAFCVCLDDTTVVNLLVKRASLYQPTLAFRAWEQEWRRQHPTAGPADSVDASLWTRKMDDRNRTTFLPSIHDLENALPSTSYASLDAVKSAHQQYFELEPIIHGFYSSSDWKKAVYQHRMAKLAEMDLAIAGVLRMVDQACKDVSVDQRKVLFALGNGTFRTGFNLTSVHQTFLRRLQQKSMALGYKVALVDEYLTSTMCPTCVSKGKKSRLAKPSIRACACVECTRWIHRDGVGAHNIALIGKQYLKSRGRPEALARPPPKSP

SEQ ID NO: 2146 - protein, 989 aa, unidentified
  REGION 1..989: note = Table 20
MVYEATTFITLPVGGQWKTFQKQDLLDKYDLPTPAHLLLGILTSNNYTDGVPSYGLLSNAEIVRSFTLNELQGLDDQGRLNQFTDYVSEHLDTVHGNAKAVQVLAQKSLLDRVRRGVQDGKARIKDLGRIENAEYQLAVEVDQFEYALQAFVMCTENPLPVSETETASCTPDTHSPSQVIIQQIEIKKAKSNWERFSKTRTSQAGPPAPVPVAQEPTFYKKRDQGTKQERRHSRRARSRRQEKWQRTEFRSRTDQADRYVPQTVHLDKASPIEDIELSGLKPSTARPRKPKVSTSGVNQPATTTPATTPATKRKKKKLLPHPAGKPGHANLKKSFKSVFATITLLTGSIKGCLHRTTNLSPANVDLVAQRLDMVVSTINAAKHVVYKMLEMRIFRELFPNPQGQVVASAQTSFLDLILDSDWAETVVGNLLSFVLRNETNLLGPAARNPNRQQAQAEAQSIFDEFKKLLPGFTALNPSKLPLGITIDDLAPKICLAIKLHYRRLPQTIRTKMEKLGFDSTLLPKVEQEDKDTSDDDDTTPDDDGTTPDDEADDEDVKKKSKKIDFSPQHIQSRWGYPMKLPAANRPRFCIQSKMTDSFIDIREETLFRILWRKKSDTIWGGSTHNFDWAKRQVNISFGNVIKMLFIGDPDTVRLATKHQTTYGKRTTTIDERATAHSTMYGQEPLARYQIDRINYYRAKYNASIPARSSSSSASTTLPPPPNPPPLPAPPGPRLFRYALNNYIRTDGHQLQLLAYDLTKNRQALGHKVFLRCIEKQYTTRQSIIDTFGQNSSSVVVVGIDPGEVVSGAFCMRPNDNTVQYFELEPIIHGFYSSSDWKRAVHQHRMAKLAEMDMAVAGVLRLVDEALKNTPMADRRVLFALGNATFRTGFNLASVHTTFLRRLQQKSIALGYKVALEDEYLTSTMCPTCVSAGVTARLAKPSMRTCACVGCKRWIHRDLVGAHNIAIVGEHYLKHLARPSSLERPQSQGS

SEQ ID NO: 2147 - protein, 1181 aa, unidentified
  REGION 1..1181: note = Table 20
MGVTGLAALIKATEGSPATGLKDKQVEVDSMSLFFGLLKTKSYYGFEKDIKANARLQGKRSMSAKDAPSKRPRLSECMTSRNDNTDVSNTPEASSKALDTDTNAPYKRIAHRIDAILTTHMDKSTTTLHWDGAPSIEKSTERANRQKQVDEKLAKLDQDVTKAIEKKGSAPARLYHECKSLFRPSRDILDVVKAELSIIGWTVCNCEYQADTHIAQVCQQATDKDKIEVISGDSDLLTYEHIPRIIMPVGRKHELTVFSKEKLLESLSLPSPRHLLVTSLVTKNDYFGGFQGMGVKRNAGIIRKMPLAIDRPLEQVVREAIDTYLATIESDKNIETFTHAISAFVLVQEQGSPRAVPSAVTHDRIGSFLTSLEEHRRNRKLRTNPQQGGHPQHQQEQHPNRRKRRRKHRPRNRSRKKKARKPRRQKASHWERSKFKSRNADCNPRYSPHTVRDVSKAEKVKDQTLRTLTIDEPRRPTKAPNAASDISNATTPATTSLTGKEIKLGKRTEGDGAAPLKTLYKKTFATVTLTLGSIAGCLKRATDLSADDANQVASQIETAADILTNTRIWVYKCIELFLISRLQRMAMDLEQEPDHLDLILDRKHSPREIALSAYEDMCKALPDWHPTAASYKIPLSKPKEALAVEIHTAIRTHFARLPGVIVSKMKKLGWDDDLIPELNQDDNEDDNELEASDNQGQEDGAGDLEFTECKAKFDSGHIKVWWDHLMKLPSETRPIFCPSSGFKSAFALFSEEAMMSILWNKGPVGKIMERICSRQDASKMVRDKYGELYHRLFVGDAEGIRADKAKTQTSYGRSTTTMDRITTSAPLTHGREALRIFLLTHYGYLQQKKEWWALSHEARSSQVPPSPPKRPTPPSKRDRYVLSNLIRCDGLQVHAVAYDMRKPRRSSKARSAITDIEKAFPDQRSIEECFPDKSDTVIVGVDPGEVVTATFCSIDPRNQAQVKNLTVKRSALYAPVLAYRTELGKKKEASHITDIERSLPTSKVESVEGCKERLQAIFCSFDNLSGFYTSKAYKRMNWERSKAFRAEKDWAISGALSMVDKDRPCLFVFGSSNFNTHTKLASLHDSFRGYFHVKASSMGYTVVCANEFWTSTKCPNCVAHGRDNRVAKPTMRSCVCLYQDCRTWIHRDCLGAHNLAVIGRQWMDQLTRPAALSRPAQPLQT

SEQ ID NO: 2148 - protein, 1238 aa, unidentified
  REGION 1..1238: note = Table 20
KDTTNQLGSVEGTANEPESAATRKRGAHTSSLAEAPAKKRKEEISGIGSTLQHEVESTANRLYPPTDLYLDTDTMTLTEDRPVLTYSRIAHEISESLGTLEKKKTILHFDGAPSIEKSGERERRRLQSKKQIDEISSEINRLRQTKKKIPAKIYDRIKNVFRPPPEAFQQIKEELSRLGWTVCQCEFQSDTCIALHCREKQAGNDTIVLTRDSDLICYDEIETVAMPVGRKHELHVFTKSGVTEYLGLPSPLHLLLVAIATTNDYVQGIRQCGIKTNAKYFCHLTLDEGLHNSDSDVDALIERRVKMIKVALSDYIGNRRKSPEDFNHAIEAFVRCQEHSSIDAVPSAQTHELVEKLLESLKTCDQKHSSLNQRQASSSSNRTSRIESQPGSRQLKRTIWRKNHKNSPNYKSKRQQYKKNYNKKRKREKSRRPTSWNSFSSTDQGRYSSHIVRDLTKASKVDQESLSKMTESAPRPSKPKSINTKSQPKNSKGNLNKKKRRGGKAPAVGSTKELKSLFKNSFRYVTETLGCAKACILRATTLTNDEALAVSNLIEEAVHILNTARILAFRALRLFLVSRLEDTSNIISEDSTSDVANTIDPLDLLLTKKHGRTIMRNLVTLVVNGKIQNTGAAPTDENVLKDRSIAEEIYAGLKEAIGNNNPIKTRKLTLKIPQKAMAHKMADCIRFHFRKIPSVVVNKMKKCGFPEDVIPNIEDEDEDESSDLGIVNEYDEDDDDDDNDGGSFQSGHIKLWWQELCRLPKSSRPVFCPSTGFSDTFLEFAEEAIIGLLWGGGKKGLNHPTRSIMESWMKRSDAEAMAKEDPGSLFHAMFIGVQIEVAEKAGVRQTSYGRQTTTMRALSAPPTGDHPGHVELQLPRLREHVRSLLKYRADLAKFKKSPLSTGGIPPERPFILKPNGAKRYASSNLIATDGLRIHLHAFDLKNPSNSYYNRVDLKNITAVYEGNPLSNDELQGAVVVGIDPGEVISASFCALDPEVPKGLKNLLVRRRTLYEPTLKYRSLLQKMKQHRHTKTVENSQGIPVDINTPSISELENCLNVSNISDSVSEARESLKRTWYIFSEVRSFYGSHKVKKLNFAREKAKRAEFDLSVAAGLSLVDPSAGCHERSERRAVFVYGNGKFNTRTKLASLHDSFRGYFFKKAQGLGYEVVIADEYLTSTICPTKACGLRLAKPTTRSCVCLNTTCQRWMHRDSLGAHNIAIIGQCYLETGLRPGALCRPSE

SEQ ID NO: 2149 - protein, 504 aa, unidentified
  REGION 1..504: note = Table 20
MKKLKWQDIPELPSGPSATEDDDSSNGSESESESESEIEIEGRNNDRHRFDRNYIKSWWDQYLRLDEGNQPAFCPSGHFASLFVSLSETDFVAILWHRSCKAKQALEMKVCSKDIANTLATTDYGALFHKLFVGDRKAIKHSPRKAQTSYGKRTSTMSKISSTRPSTHGNSALREYLRSWYHYLRDKKVAGSEAIAPTFPERPETCRRYAISNILHTNGLELNTLAFDTWKGRQGRKSKVYIRDVTKAYPDMDKIEETFRFTPHDTVVVGIDPGEHITASFCAIDPRDPDVVTNLLVKRKALYAPILAHRSQLQQLKTNIGIDDIECSLTRCEGVDYEDGLANFYDTFEQLHAFYNSKPVKKMAWERRKAFRAEKDRATSSALTLASQLRPCLFVFGNGAFNTHRNLASLHQTFKGHFYQKAKSLGYEVVQADEFYTSTKCPPCAARGIDVRLAKPTRRTCVCLEPGCRRWIDRDSVGAQNIAQIGHAWLTRMERPVALRRPAQ

SEQ ID NO: 2150 - protein, 272 aa, unidentified
  REGION 1..272: note = Table 20
MKYESAGQPAVLKLRQAQPPPQSTYARETRAPIPKVEDLYSGGKTIDTVFPTYDKNKDVIIVGLDPGERVTVAACGIGINPDLVSQNLEEAPTPVSNLVVKRSALYQPILRHRLAMEALKTPFDLPVTLPQGAPPIAASSVVYPLVTSVLCHKAEKKPAVLFVYGSATFSTGTSLASLHTSFKSYFFKGVTALGYNVMSVDEFKTSSVCPTCDSEADKPTMRSCYCLGQGCGRYIHRDILGAHNIARVGHGYVTCTGRPTCLSRSSTGSSTE

SEQ ID NO: 2151 - protein, 1016 aa, unidentified
  REGION 1..1016: note = Table 20
MTSDEWLLLGIVTNNDYNIHFEGNGISTNREIIRDLKSRLRGNGNMTSKVLTYIREVRGLSAPSTSGQASTAARQYVWDFRNAISVFDSMVETPETGHPLAAPGIDYNARVQNRLVQLERYKLVQRRNRALQQQQPQPQPQPQRPFTKYKSVRKTGERPRYNPRFIRDFNNCGSKMPAAYLATDLGRKIKVVRPKPPTKKTTAASSKKKKARGSAKKAPAAPTGPKRVFKSHTIMKKKLDSVFMTSTLSVGCLKAQLRFTTDPRKRALLSDAERKEVAFLIQTLVATLNTIRQHMFKAILLYVATTVHQFPATGAGTADKNSRSRWLDPLVNKARMASICQNLCSMLAGTSRLLSAGQGGDSDGDDGDGGDGTDGCDDDGGDSDDSSTSSKRRRIAAAGPSTSGPAQAVSSRGRGASQGAASGSAPGSRQASVTRARKTPAKGKGKARAESPAGFKVDIRAREQMCDNVADLVSRHFVELWPLLNDKAAEHNQVNFAGTIDAQNVSKDDLIFMFWTMNGTLPVNARMAYCPNAALTNTFMMLSEESLLHQLWPKAGRLDLTPNRTRVRLIMDKILSRGEAERLVKEHGTLTRILFFGEPAATANRRPPVSSYCRKLITTDDLMRRMNSTGGIQYPLSPESLEAHKTEVIAYNKRRKTAKEAGAPFDEPLPALPSDPTLPQFYVPTGMIRTNGLELQIFAYDLRKRCPPPSKYRVPETSAGIKDIRQWETAADIQAALGNAYLSMPVVGIDPGEVVTAAGCGINILPWRPNTVSNLTIKRTALYAPLLRARYALNLVKKEPLPVTNLQPADQGPLTAPSINDWQNQILGLADGSFQSAVNHVAAWGSAYPALRDFYGSNAYNKNNCARRKAFRAEYDWAVTGLLKLGLDRHNAVEMRGVHMKVGVGGGKKTLFVYGDAKFNTRSRLASLHTSFQGYFYKKATALGHAVVVADEFRTSSICPSCDAWVAKPSMRACFCVNAGCNRFIHRDILGAHNIARIGRHWLLHQQRPAALTRST

SEQ ID NO: 2152 - protein, 503 aa, unidentified
  REGION 1..503: note = Table 20
MFWRMNDSLPVNARVAYCPQASLNNTFMMLSEETLLEQLWPAAGRMDLIPNRTRLRNIMEKIMSRSKAQELVKEHGTLTRILIFGVPAASTSRRPPACSYRRKMITAEQLRQHMDSSSGTLHPLSPDSLRAYKTRLINYHKSRKKSREDNEPFDEQPPALPSDPALPQFYVPTGMIRTNGLELQIFAYDLRKPCPPSSRYKMPETSTGIKDIKEWETAADIQAALGDSYRSMPVVGIDPGEVVTAAGCGTYIVPGSPNTVSTLTIQRTALYAPILRARYALNLVKKEPLPITHVQPSGPGPHTVPSVNEWQNQIVGMVDGSRQSAVNHVAAWGTAYPALRAVYASKASLKNNMARRKAVRAEYDWAVTGLLKLGIDRNSAPEIRGVHMKVGQGGKKTLFVYGDAKFNTRSRLASLHTSFQGYFYKKATALGHAVVVADEFRTSSICPSCDAWVAKPSMRACFCVNPGCNRYIHRDILGAHNIARIGKQWLNRQQRPAALTRST

SEQ ID NO: 2153 - protein, 707 aa, unidentified
  REGION 1..707: note = Table 20
MAIKWYNIYHSETVYDPEMFVGAQRLLLERRNSYNLLIQDLQALNSIDTAVRGELEAAYLGPRVYSDTLDADAREGAATEALCEGHIRNIPRIAQITAGYLQAIVHDMSRWYHWIHHALCLFVASIVWDQSQNKTQQQMDQDQEDLRAILHPTRGRNIVRWTGNYLSGMDSSIPLDRRIMDRGRVQRIALAAAALLRACCPDLVLPPIPAGHRERYADLTETLSDKFAEFFTTSLSALQEETQTKTEDLSGNNAITQYMALNTARREEERWSFFSPPAMGDGWIKFSSKGLRDALMSTDCHTRSTMALLFTADEDLPQELFFEGTRHRKVTMSMQEYCADEDGLHTNLKRQWDERSQRQAAKEDVERGPRKQKARRPKRYKVTSGAITTNGLVVHGLVFDTSQRKPGPVKAGSSPMIGVPLLGGKKELDANVQAHLDAHQGTLHVAGLDPGEVITCACTTLPPSPQVKTATNSLVSRASLYQATNNFNRKLQARKAEKTILNDAAYPSVNEIEALAPHRRMIGLEPLQQYIKWYSAFERMLNSLYCCPWYKRRQWERTKQDRGDYERAFDAILRSASATGPGSATARVPAMQVDPNTGYSMNLTIVIGNGEFASGIGRSSRHRTLTAFIVKKARGLGILVFQLNEAYTSSRCPRDHSPLIKYARSVECCTCSILIHRDSAGAHNIAYIGREHIHGRGRPSAFQNPAV

SEQ ID NO: 2154 - protein, 1135 aa, unidentified
  REGION 1..1135: note = Table 20
MGIAKFGDFKARQKLEGRKTTATDLSGWCIEVDFGYYFYRAQQKLNSLDHVSARRITSQDGAASHRTVLHATETFQLSPTPPETSGCCASIVYMVHKDLQRLGVDKSISTIHIDGLRTVQKAKAHKERDKAARDKRQAANEMLRKCEELAPLGKTCRTKSFYKLLNSTRIMSAEEKEDIRDGLVTLGWDAHICPGEADVCIARRLNNNTSPSSTAVLTRDSDFIFHRPVKNVLSPAKGGLQLTTREDVLKAFQMDEDELQLLAVVSTSDYAKSVRHHGLVRNHKSIKDLAVPPGPDRVQRMRDKYLATVGDMDYRNSWSIFVDRVEHLISGAPNDRTYQADTERHDSLISRMWRARDLKRRRTAKKKDQKRDVRPRISSRAVRAQKYSIRASAPLPEGSSQQEQAAIPANDRILDASRDSQGNSQGEGSCTPPKLTSDQTDGPFDTGDSQDEFWGALSDDAVAELLDSLDVASSMSNPNSVRIDTPSKPKRKQTDWRNLECHCDMVTAELGSLKSLLKRNLGPRIRDKSEQHVARVQNTLMELSATCQRHVRSLSLSKDERSRAVVEAAKNEIDTASRLYNQAIKELETFGPIDPPAKTNMEQAYTRYYYQLVTHMESGCSEIRDELALAQDQLQTAVKQLRDGQVTNVVEATVQHLQGVVRDMSDRYQWTHLALCLFVAATIWGPAPESAEEKQERDEDLRALLDPQRSLGIAFWTGKFLVGEVMDTTSQPRNTMIDRSRVVRIAQTAAQMLRDCCPGLYLSPVPAGHSAIMLHVSSTLSNNFAEFFTTSLSALQTEPRTQQQRHHYKRNVSSGSITTNGLVVHGLIFDTTRRKTPKRAAKKGSNSPHVHVPYLGDETPLAPAMQIHLQKHQDRMHVSGLDLGEVFPCAATTLPPDPAVSQAHNVLISRRSVYDGTEALQRELAARKAAPVTRENEPGVYYPSINELEALAPARGTPGIQALENYIKYYRAYEELLGSLYRSSWWKRLSWENSKAQKAESGRMFDAIVRSTGMTRSAAMRIDEETGYCENLVLVVGDGDFSSGQGKSSMHNSMLRRVILQARGHGILVFQVHEEYTSSRCPRGHHELIKYSRSVECRTCHICLHRDSAGAHNIAFIGREHVHGRPRPEGFPRIN

SEQ ID NO: 2155 - protein, 864 aa, unidentified
  REGION 1..864: note = Table 20
MFVHYTRTNVCNSLGLLRNQMKLLAIVSKTDYFTNVKGYGLHKNRRIIQAIPDSLLFFMELRYMTKVKVKTLKNGHAKSIFLNRKEDTLKNNAADAYQLSMQNQLNSYRRALGQMLNAQRLRARNFLPQPPPPPGQLPPPPPGPAGHGKRYSARTITVPTPTPVSGPAPLPPAYYQAKAARKAAEAAEEAQRALKRLKSSTSSVSVKSTSSQPQDDGGGDGDGDGDGDGDGDDGESGPADPAPLARKAMKRRHGIVSLEAGTLRANVRRAIAARAVQPSLSSQEVNIFRDGITQKIIDTMKFMTQCRRWMHWAIELFIADANTTPADYVQLMTWTSAQTIVYGIGRYLSMAREQVNADARWPMSRRIVLQALDALAARPLMPLGNILSPPPLNSVQIYTLLVKSVLGGTPATPSTTDTITNFRQLNQTLPFDDQWRFYPQISFQDANIRMSGAGLRDILYATDTPNLRRDMIRVFGPRNQCTDLAYQLFVERTNYAQTTMSMSAAAPYYMTPAPAVGTSSSAAPQLPGRRYRVTTGSIITNGFEVRVDAFDIRTRRPPPYKREISPLVRVRRIENFQADDPATWQRLTNWATVNGDLKVIGIDLGEVVPCSATAMTQTQPNRVTNAIITRKSMYDSAEGFLSALNERKRVPIRLNPSPTSTLKVSMVVPSIVEHEAAMPPRGRSDTVSILDFGAWMRVCEYPMMDFYGSFWFKRKQWDNERGFRGDYERAFCGMLRTAGINTNAPIGPNEHVVIAFGNGYFNTHTGRPTLHTAMTRFFIKKARALGIILCQVDEYKTSSVCPRCDSVDVEREMRTFHCTPAIDSVGAHNIARIAMDYIQNGARPVSLMRPAAVANLGHLPSLEG

SEQ ID NO: 2156 - protein, 1414 aa, unidentified
  REGION 1..1414: note = Table 20
MGLRDFFPFLSEIGVLGQRQSNEETLQLDVELDLFGCYYNLIKYWLAETDVKELEKELQLKQEQQQQQQQHLVQLYFDPSDTLKLTDVPPLTSTHHPVVCALHSTLCKSFSQNRTRIHAGDIYSTLQKCVGQEDRAKQRHIQLEKLHREVAALPQQRGRARGRALKKLRKQLTVCRPIQHSDVKCIINGLRQLHWTVCECPGESDVCAARHVSGPNSVPVSVDSDLFMHSTSGCVLKKATKGGFFLYRMEDVRRKLDMSEIQYLILGLVAKSDYSVNVPHRGLTRNRQSLQLLKPSRFPEGHVRHCTVLHRLLDQAQTLVANEVPSFKTLENLQQAIIVALYHMDEIHSNVMVMVSSDDTNCTLDLGLISNMHQRLASVANKISDLAGSFSNDSPSQDSPPASLPQEPFSNSPSPMDTELATSDTLKLIELELSPLVDDAKSLLDDVTCSLRRLLQDYKDTVGSQEDNSASWDVYIEQHEDRAPQSEQDQRREGLERGLESYKKDLNSFVAACAILDSTTYEQETAALTRPFPRKMYAAHTVHLAESSSTASSSEPPPPPPFPPPPPPDGETKVEQQQGRQIKQKKLTKKQLLAQQERERKKEEKARKKQLEKEEKAKKKLEAKKEREKQRKKEREAKRKAKPLKRSSKRMKYNKSGKGARYAKLGGIFDRPASVPKKKRTLTTTTRVKMSLKRAHGVVSMETGTIHGLLEKNVAPLRNVQCQRHSLEPLTDTDLMEVTRSIDETLQRVVSYLNNSRRWIHVTLELLIANEVKAKKEAASNRESFTLLALLHQTKCQNIISNIGTNLRKSWDDLVAEEEVARAEQEQQGVGAEGGSAADFDHRSVARTAVMDLYRCLEFSGGDTALRSPPCTVHDAYNQMVNEIASEFGQFYTKLEFELMCKVNDFLKRDGKEERETHSDEKDKISLWFRRNLMLPPGERWKFYPYMAFSDGYITITELALRQILWSRDGETTRSMKKVFGMRDDVQDLSFSLFVDRTNHSRRTMPLQEYIRLKEKPEEELTDGQKRLLEKKFQVASGTIMTNGRVVKALAYNTKRAATKDDGNSNIEETIQTPSPNLKQESAPKRKSILDQIPYLHDWRQNEENMQRYFPGGTSDVRVVGIDPGIVVPCAAAALHAPTRHVRVSNAIVTQKSMSESKNRLSSSLRSSKSKPISSDELGGEQADAVRKAIGAAIMLPSIQDYEASMPSHQSPDPGGVEDYARWFSAHHLQLYHFYQSPAYVRKQWANNRGLRAEYEQILNVVLMTVGLQPHNLQEHNMTNVMVVVGDGHFDAARGGSSFHTKVIEFLFYKLTALGIPVTKVDEYKTSSVCPRCDQELVKEMRRVTCTTCQVQMHRDSAGAHNIARVGMDEFLHNARPASLRRPPRSTQPFTAPEAGPMAPPEDLDVDLGQIQAA

SEQ ID NO: 2157 - protein, 1493 aa, unidentified
  REGION 1..1493: note = Table 20
MGLHGFFQFLAESNILGQRMSAEETKNHAVELDLFGCYYYLIKHWLVEEDMRNLKRARQLQHFQQQQPNLPRLYLSEDDPCKLMPVPPPASAQPPVVYALHRTLLKNFSPDHTRIHAGDTTATTQKNVGLEDRVKQKNTNLQQLTAAVGQLEGLQKRKRRAAFAADGLPAIRDSDVARIIAGLEELGWQVCACPGESDVCAARHLCAIDAVPASVDSDLFLHSTVDRVLRKVGRSGFFQYAVDDVRRKLKLSELQFLVLGMVSRSDYAKNAPNMGLKRNCKAIQLLKAPALPNGYLRNLTILHRLLQVQALPLCQDNAAESESPLSSLRDVIEVALYYIAQIQDSFESEEAPASEEEDTVMEAAEAESQWKSPEETIASMRSQLTNVMSMLGRQLEAQPLSTVIDNDTAMTIQRSVFHAEALLKEAKNILEQLLKDYKKAVKTNVDTKAGKDGIEKQYEVYLDRLDLVVPMGLDEPSADHAETSELSRPFPKKTYAAHVVDLTKAQGGAPASVSPQPPPGPPSPSPGGSKAKPKQKPKQQPKEPPKRKLSQKQIAAQQAREEKKKEKEAKKLAAKKEKEAKKLEAKKEREAKKLEAKKQREDERKKEKEAKRKAQPLKRSSKKMKYNKSSRGARAAKTGGIIPTPEKAEKDKRKLGEATKTRDTLKKKHGVVTLETGSIRGLLAENVRVAHKLYSQKHNLDGASVTDLDNISGRIEQTLEQVVDFMNNSRRWIHLTIDLLIAMEVKNAEGLGADHESTVLIALIDPKKCQKIVGRIGIYLRMSWDELVALDEELPPREATDQPQQEDVEIEPTEETEDPPEPEDAEMKPTEETEDLPESEDVEMSVADPSEARSPEASETGSPQPSSEDESQRDSDDEGQQDPEAEPEAEPEGQHQQDAAVDPSKDHWHERVALDAVMDMYHSLGLMASDAILPKPPCTVNTVYYTMAREIADEIGQFYCRLEFELLLKVNDFHRRQDVEEREEHSEQKDKIGLWFRRNLMLPKGERFKLYPQVGLQESFVTFSEHGLREVLWARGGETTPLMKRFFGESDDALDLTFHLFVHHTNHARRTMPLHEYMRLSNMPAENLTDGQKRLLVKKFQVATGTFRTNGRVVQALASNTKHKAKKTDKRGAVAAKTSPQQPSKSDEASASQQTATAPKRKSVLDDIPYLHKWLAVPANRTKHFPVRPGNATGTAQISVIGIDLGVVVPCAVAALYAPSQGHEVVNAIVTQRSMYEPSNRFARSLQPSKSKPVNSDNLRYDRPAMVRESFGPVALPSISEYESSIPDRQSNEPEDVVKYAKWLQVHQLALLSFYQSAGFKRKQWANRRAMRAEYEQVLNVVLRTIGLRTGDVQRHTVLDVVVVLGDGQFEGVRGRSSFHEKAAEFLYKKLTALGIPVVKVDEYKTSSVCPRCDAAVRKEMRRVTCTACNVPMHRDSAGAHNIARIGMAHILGQPRPMSLRRPTQSQSAAQPTTAAEVAAQAEQDVEGDFGLD

SEQ ID NO: 2158 - protein, 404 aa, unidentified
  REGION 1..404: note = Table 20
MPLHEYVRLKEIPPENLTDGHKRLLLKKFQMATGTIRTNGRVVQALASNTRRKAKKADSQGAGSAQTSPQQPATSGQASTSQPTVAPKRKSVLDDIPYLHKWLAVPANRQKHFPARDGNPTGTGKVAVIGIDLGVVVPCAAAALYAPSRDREVVNAIVTQRSMYESSNRFARSLRLSKSKPVSSDNLRYDRPALIRETRGRSIEFPSISEYESSIPDRQTSEPEDVVKYALWLKTHQLAMLSFYQSVGFKRKQWANRRAKRADYEQMLNVVLRTIGTRTGDVQRSPGLDVVVVLGDGQFEGVRGRASFHEKLTALGIPVTQVDEYKTSSVCPRCDAAVRKEMRRVTCTACNMPMHRDSAGAHSIARIGMAELLQEPRPVSLHRPTQAQPVAQAEEEDEGDFGLD

SEQ ID NO: 2159 - protein, 509 aa, unidentified
  REGION 1..509: note = Table 20
EMIKLWETQIKSMEKKLSKDKDTESMSGNTTPQSNCLKHFMNLRNQLPVHERPVLCPSSPYCNGFIQLTERELLLTIVNTHKPEVSAALGLVETEQYVSTYPYLLSALPPGQFLSNLMVPIGYKKGYRKQIGICSIIGDSIEATGKTWVLSGTFMTNGLELRVLAYDQRVFKKHEPEAAPGRTDKKTGNTRYLSEIRNVFKTPDDVASTFPNPPASLQQGEDVCIAGVDFGQVCTAAVSLFIPSCYNPNRSHDLMRTLLVGQKALMQPSFKGRRDMQLRKEEYQLTDSDHKGEVQELEQSIPPRKGVQDAEVSSNYLQKATAVHPRLHQYYNSNYWHRRTAWDMKKGKEGEYHVAIRSVLAMVEDVPKEKVLFVIGLGKFGTKSKLTSLHGTFGSLFVKTLRSLDYAVVGINEYYTSQKCPRNKPRNEQDPCDHGFVARVNTRQSYCRKCQVYFHQDLLASQNMIVAAKDHLTVDASGTSLKGRPLYLQPLNDDGTPRWTNGLPSASGG

SEQ ID NO: 2160 - protein, 703 aa, unidentified
  REGION 1..703: note = Table 20
MAGTHPHLATVINELVQIWNCYKRHAQQAFTLFLAEQNEESPEFITLMATFDLPRSSLSSKEGHQAMRSNLAALLARLLLRLATGIETYSKSDKWTTVLSSIYHNYTRIANNISLDNPKKYALSCLFVPLATKMSKEIVCAWSRQVEGMTEKLDKILDTKLLESGLPSNLLQRFLSLRALLDEHNQPALCPISPVSYGYMELSELEFLKTIYDSCKDDVKRGLGITFNPMSKYLYINLGQQAPGLFLSRLLVPVNSHERGYRSHLQVAPLGQEPVTSPKRYALTGTFRTNGLVLQVLAYDLQIMKGRDLQAAPARMDPEVGPGRWLKEIRHEFATQDDVEHTFGPYFESSDIGKDVWLASVDFGQVCTAAISVRIPPLVMDQALAVDDHATTEEENFDGSLSPPSETEDEDRMAQGSSFWTRDTQASVTNSFKEDEDFIMYESELPPVLGSDPARDIDSPSTVPRERFRNLVIKSKALYQPQFRHRRYLESSKPDEMRASEHSINPHKGIHDDKVLDFVESRIDASQTLNHHYNNTFRHRWHLWEFQKAKEAEYSVAIQAVMDMLFDAPKDKVLFVIGLDKFVSNSKLTSLHGTFGAQLIKSARVCGFAVTGINEYYTSQKCPLDDPVDLANPCEHGFIARCNTRRCYCAKCCMFFHRDVMACQNMIRAAQGHLTQQQRPLYLQPMDDNGDPVWLQDNEARHQ

SEQ ID NO: 2161 - protein, 1111 aa, unidentified
  REGION 1..1111: note = Table 20
MGIRDLWALLKDKKFEPGIAYRSTQPAAQSKRLVDLQACLFAHIRWAYMTTTVGSAHANIEKALCRKLGDKHNVVIHIDGAPAAEKDATTAKRQDVSMKSENAAGSLMQQMVELVEQERWPAKQMERSFLAALRECFRLSPDQKRALAEFLRSKNWIVIEAEFEADVRIAQDCREQDIVVSVDSDMLAYRSVKTIWRPICGNRFLVYSLERVLEHMNLSRNQLTVLAIVSKNDYSANIKGLGSKTNLTIVKSIADQQDIRSMIDDYLGRSEVVNLNFMDISFDTLEQVFEYMIETPSALPSWNVSGYDELRTQYSDLKARPRPATEEETDSETDDDDEEDPELANAEPAPVAATATSNRPNTVTPRVSTKRDLSRRHPTRSLPIGSLQRNCILASGEAPDLTAASTSTAHGNSPTQRPPIVTAICELTHIWNVTKRLGQRALLYFFSVDPLPASHAEDRALLIAALADKDKKAAKGVLRDILSALLLMLATSKIASGRSMNTRIAIAVYETYKGRFTQNTQIPGSNKYGLSALFEPLAAAMAKELIDHWSHRDAIDVKELPKNVLTAFTQVRAIVEQSKRPAMVPISPIRHGFMTLSERELLLCIHRTYREEVIHALSPPANKKDLVQLLLYDLGQMSPGQFLSNLMVPRNPAQKIRGYRTSLQIVAPKLEGADYIYDPTKKYALTGTFRTNGLELQVLAFDTRVLKGFRPDATLAPGRTDPRMGNTRYLTEIRNVYKSPEDVERAFGPFIPLEPSQEKLPLDELWIAGIDLGQVVTAAVSVRVPPNFEITDSDTDTNMDMEMDEESDADTDMKMEDDEDTDSDTDMRMDEYRDADMDMHEFKSSSSDNGSDDDFQEFATQLQEDKNAENEVLDLLLQGGTMRNLKIKHKALCQPDFRFRRALERRKTEQVRDAEVSILPRNGVSDEGVVAFLESQEAARSVLDTHYNGSFTHRRMAWDLKKAKEAEFDTAISAIMDMFKEAPRDKVLVAIGLGKFGSGGARMPSSHGTFGGKLVKTLRAAGIAVVGINEYYSSQRCPLNSPVDPANPCDHGFVARVHMRRSYCSKCHMFFHRDSLACQNMILATACQVEFQKRPWFLQPLDDDGVPVWDR

SEQ ID NO: 2162 - protein, 444 aa, unidentified
  REGION 1..444: note = Table 20
MLASADTDLTSPSTSIAYGDTTAQRPRIVTAICELTRIWNIIKRLAQRALLYFFSVDLLSTHHTESRDLLTAALAGKDKKAAKAVLKPILSLLLFMFATSKVTSARSRSTRIAVALGDAVDVNELPKNVLAVFTQVRALVEQSKRPVMVPMPPVRYGFMTLPLDHLWIASIDLGQVVTAAVSVRVPVDFQITNSESDTNTDMDNDTDMVEGEDSGNGTDMEENEDETNKIEDDHLDLVLEGGTMRNLKIKQKALSQPNFRFRRALESRKTNQICEREASILPRRGVSDREVVEFLKSEQTAHSDLDTHYNGSFTHRRMAWDFKNTKEAEFDTAISAIMDMFQEAPRDKLRAAGIAVVGINEYYTSQRCPFHSPVDPANTCDHGFVARVHTRRAYCSKGHMYFHRDSLACQNMLRATATHVSLQKRPWFLQPLDDDGVPLWDELD

SEQ ID NO: 2163 - protein, 1321 aa, unidentified
  REGION 1..1321: note = Table 20
MQATYFGQLRSYYGYHTTKKWEIGHQKVLALINHFLQTSGVPKSSVVLYFDGKPCEEKQATAKSRHQEQQKSLIAAKATVEDIQQRALHDKRISKGLFNKAHRLLSSAYYFPAEIKSNLVQFLIQQGFDARVCSFEADPEIASDCQTHDVVVSRDSDMFAYDTIHTVVVPISKDRFLVSAVEKVMSSLDLSRVQLTTFAITRLRTLGSSRWLNGSFPIVFLAAKNIDPQMFAGSRRVFVDKVQTAAQAPTDTLLPFTWVSVCKDLEEIKAGLEKRRRDARLSGQEQAISSLYPSSKRHGSKQTFNPFRTIDRPSAADVSLAKNRHIKPRYSYHERQAKDHGPTLEAEQYYWKSYQKPAQEEESSKEDEDEDEDEVENDESGCAQEGNTVVDNAAVDGTKRRVHPREQMQRDLRRHHPFVTAKVGCLKANILQACKKGNYGQTVVDCLALAAKVSTAARRQIERIFGRYIEAVLAQSVVDNKDRTFLDLICPRIPGSEGTSPDVSSVSASSGSKPKKRKKVNNSQQRNFLACFARFLISENPGTTEALRAFRERLRFYGIKDRGFPYQSENCPYSATVLVEPWLRTVQGQIQRHYINTSLAIKEKLEEDGAQIHGEDHSIRENESAIENFWRLNILDGKTHVLFPLTHLSDPHITWTDHQLAQLFWYHADLKSRLQEMVQGDFGGAGLSREPTLEDTKSWVGRQSPGAIVKEFVCRIGRNNFSRRERKKRGMKAKIIDANTLELEAHLQRLGSEDFDPNAYEDKGYYLQGSITTNGTKLHVNVFKIRELNMVKYKRLPSDRMPVSPTSTIRGLDYFPSEIRHVFKNEGDVQRYYGDCSPSDITVVGIDPGDRFIVGVHVLLPESASSPSVQDPTISPSFRNLTISQKAAYQPILKHRAWLEEESKKMLRSVPLSAEAPLITASSAISPVSLPSLISPALLQSFSTPSVEGASTSSQASASNAQALSTAATNPRAHTTGPPDPELSTLLPTDAKALLVVKMNEAAELVRQAQFRLENHSRSQPMAVAPTNVAPTNVAPANAAPANAAPANIVPIDAEESIADILRRLPPLHGPQASFTKYMQEMEKVAEKLDAFYGSQKYKKRHWDLKKAMEAEFAIMADRIMKSFGGSIGRRRRPDEKVLVAIGQGGSRYNKGLESMDSTFTAYLIRVLRSLGYVVVLVNEYYTSQKCPRRHCHRFLFRINMRRLACNHCGSRVHRDVVGAHNIANAARHQMTYFTRIDYLQPTDREGNCQWTPGVKTSTPDPVKELNQRERDILERLNNLPPSERPLSIQCKREQPTPQTEAKRALQQRAAGGRDKRARTE

SEQ ID NO: 2164 - protein, 589 aa, unidentified
  REGION 1..589: note = Table 20
MKAKIIDANTLELEAHLQRLGSEDFDPNTYEDKGYYLQGSITTNGTKLHVNVFKIRELNMVKYKRLPSDRMPVSPTSTIRGLDYFPSEIRHVFKNEGDVQRYYGDCSPSDITVVGIDPGDRFIVGVHVLLPESANGPSAQDPPISPSFRNLTISQKAAYQPILKHRAWLEEESKKMLRSVPLAAEETLTIASSTISPVALPGLISPAHLQSFSTPSVEGASTSALASASNALALSTAVTSPRTHTTGPPDPELSTLLPANAKALLVVKMKEAAELVRQAQLRLENHSRSQPVAVAPTNVAPTNVAPTNAAPANIVPIVPIDTEESIADILRHLPPLHGPQASFTKYMQEMEKVAEKLDAFYGSQKYKKRHWDLKKAMEAEFAIMADRIMKSFGGSIGRRRRPDEKVLVAIGQGGSRYNKGLESMDSTFTAYLIRVLRSLGYVVVLVNEYYTSQKCPRRHCHRFLFRINMRRLACNHCGSRVHRDVIGAHNIANAARHQMTYFTRSDYLQPTDREGNCQWTPGVKTSTPDPVKELNQRERDILEGLNNLQPSERPLYIQCKREQPTPQTEAKRALQQRAAGGRDKRVRTE

SEQ ID NO: 2165 - protein, 992 aa, unidentified
  REGION 1..992: note = Table 20
MGILGLWPFIHHKGYIADSFKTIAAAAGDVQATHPRYLVDVQATFYATIRYAYTHKEITMAHNILRHAIEKTGLTTSAVLYLDGAHPQEKQQTHEDRAVKCREALKRAENAMATLQDRVRTGKRVRRHHFGNVIQNAKDGFRWSGEERRDCTPNDIVVSIDSDYFGYRSVNAILRPFRGEYRKYDVAQVTAHLGLSRDQLTALCIVSKNDYTSNITKLGPETNLKLISKLRADDASAIVDEYLGDKCVRRKNTSNESFAASVRVFVRLEQSAVSALAHQGNQQSFRDLLRELEAVKQEYNATKQLGVFRDGNAPRKLSSDEGPSNIFWTVDQPHERRSMPHPSGRPYTYRRRYSCKFRTPKIKHAPPDTLKMHQWKKPKDETNPEAESSSKTNKGRSKKRKTSKYEKKDPEAMDKKGLVYTMQHEHPTVSLTVGTVNCNLKAALERSSRDEQVRNAFDSLVAPETATAPTLTDLASSIKKCLKDVVRLASETKRICQKAVAVYVQRVSKNGVSEQDRRVLDKICGRVSEDEQDDEDENDSSNNADADDDSDKPEVAFMRALLNCIYNRRPPPDSKSSADIKFFIEQVKDVLPSMSDSGTINERMPYPATTVLRSTATAVATSMRQHFGRGTKTLAERVCDGFQLQLLAYKTKVLHSVKYRRLDENKLPPRISTTVGGTDYYMTEIRNVIRSAEDVTRLWNCKPEEVKVLGIDLGKAFVVGACALVPTGDPDKDEVKTLNLAVNQRAVYQPVFKHRRWSEHKKAQKTSAGVSIKEIEDDLPPLRGNEADAEAYVARTKDVESTLVKFYSDDDRESWKRHKFDLKKAFDEEFRVVADSLLQMVGGTSSAPRDENNNVLIAIGLGDFGSNNKLSSLHSSFSRYFVELARSLGYVVCGINEYYTSKRCPRCKNFVGQVTIRRLYCPSPTCQSYIHRDVLGGNNIAIIAKHRVTRLERPLYLQPIDAQGRYLWTNSGETSSSSGGEARAGNKRRRPE

SEQ ID NO: 2166 - protein, 600 aa, unidentified
  REGION 1..600: note = Table 20
MSSVVASGSNFYATTPYLDMQAPVSVYPSHETFESDPSKMQQQDRPPVSAHGIMAEDSNGGNVAGYSRRVTYPFVPALETGTGMVMSNVLPSEPSGSSPMDSPFAQHGALVGSNSVPVQAMPRASPVVGYMDALSLQQHPLHAHSQSQGQAPHSHHGQQTPQAMHPVAWSQDGSDMASADGSVNGSKVYSFVPLSGVNSKKRPRRRFDEIERLYVCNWGDCEKAYGTLNHLNAHVNMQKHGPKRLPAEFKELRKAWRRHKRAEEEAAKQAAAFHHQQNQGQQAPMQTLCDPNRYVLRGSVKTDRFQLQLLAYKTKVLHSVKYRRLDESRLPPRISTTVGGTDYYMMEIRNVIRSAEDVTRLWNCKPEEVTVLGIDLGKAMGDKDEVRTLNLAVNQRAVYQPIFKYQRWSEHKKSQTTSGGVSIKEIESDLPPLRGDDADVEGYVSKVKDVEATLVKFYSDDDRESWKRHKFDLKKAFDEEFRVVADCLWEWWARSLGYVVCDIDEFYTSKRCPRCENFAGQVTIRRLYCPSPTCQSYVHRDILGGHNIANIAKYRLTHGERPLYLQPIDSQGRHLWTNSGEISTSSGGEPVTGSKRSCPE

SEQ ID NO: 2167 - protein, 471 aa, unidentified
  REGION 1..471: note = Table 20
MTKPPGYITTQFPTDVGRTETAESKESHGFRKTTRMMDVTSMKSHLQQFTHPDFDAHLYNGHGYILKGSIKTNGHLIQVLAFKLHELQCVWYRRLPVDKMPNPLTSSIGGTDKYLTEIRNVTCGPDDFGAIWGCPPEEVSIFTLDLGTEGLVEATVLPADGITFKVASNSKTEPTIKNFDLVVKRKAVAQPTKKLAHWIESQKRIIKVGADSTVSGVESGLPPLRGEGASVQQYVQARRAVEKDLDTFYNKSNYVKHVWDAERAQEEEFLRVTNSLLKMVGGSIDERIREDQKVVIAIGLAKFVSKNGPPSLDGSFQDFFMRKACSLGYTVVGINEYYTRQRCLDCEGFVCKTNEWRRLYCQPCKKIWQRDVMASKNMCHAVKSHLVHQRRPFYLQPQRVDGTFLWMECSSLQSAVGSDEGGSGKSSEDVGQEGSSTSDESVRIRKRQISDSDSESDQAQPSQSRCKIASK

SEQ ID NO: 2168 - protein, 411 aa, unidentified
  REGION 1..411: note = Table 20
MDIDGKNGNEGPRKHLGRLRAEEFGPKEWHGRGYVLKGSIRTNGPSIGQYRRLPKNKLPNAFITTIGGTNSYLIEARNVFATAADVESLLGADLSQVGILSLDLGTSCVVGATVSLPPGQTPATLAQPHRKEGDEKLKKRGKTRRGKRKPGTIQNLESALPPLRREGASFREYVAVRRASEEDLDGFYNRTAFWKHKWDSELCRKEEFYKVAEGLLNMIGGSVGRPRMPHQRTVIAIGLAKFTSLHGPPGLDGTFQVFFINFARSLDYLVVGINEHYSSKRCPDCHDFVCATSDWRRLYCEICKRFWQCDRPLYLQPQRRDGTYPWMDVTTASDGGGGGAGDGAGVPSEAMDVSMDGAGGDSGGEAAAASPSIVSAANVHGLARKRPADIDPTVDTPGPSPIHIKSTPRKK

SEQ ID NO: 2169 - protein, 538 aa, unidentified
  REGION 1..538: note = Table 20
NKDTDPAANKDTDPAANKDTDPAAKKDAEAVDKKQDADPANKKKGDVAVEAPSIINSSLPAIANYMLLNKASGGTRKIAPISPLSSRYVGFSERQLLPLFWHWPTLKSRIQRMISEDGWFQNPTTVPALADAQDWLTQVAPGRIITTFVSDVGRLPAGQHNKGFRRSTMVMDFEGLREHLGRLRAETFSPKEWTEKGYIHKGAIRTNSNLLQLLAFKVKELQSVRYRRVSDNKLPNPLSTAIGGTNNFLTEARNVFKTTEDVENLLAADPSQVSVLSLDLGTSCVVGASVSLPPGQTPATLRRPLDKERDKKKRRTRRAKRKPGSRKRRRERKKACSLAKQPTAPRYFDLVVKRKAVSQPTHTSEGDLDNFYNNTNFWKHQWDSEARSLNYLVVGVNEYYSSKRCPICHDFVCATSNWRSLYCKTCKTFRQRDVMASNNMNAAVRSHLADQQRPLYLQPKRQNGTYAWTGVVAGIGDEVVGGFSTLAPAAGTAVQGPSETTTRKRLVQEAQDSLSTPSGTSFEPVVALTHLDKKSRTA

SEQ ID NO: 2170 - protein, 1316 aa, unidentified
  REGION 1..1316: note = Table 20
MGLKGFYPWLRKKRDYHPTLRHPMHHHLPDGATIRVDVLSFFNNIRGIYTRHADNKTRAHAILFEHLKKYGNPSRMVFYVDGAPALEKKETHHERNEKRVKALKTAKVAVETLSNRVSQGKPPTKQMFKNVEKSLRGGFKWSLRDREDFINFLQGQQLDARLCRTEADIDIAAECQPKDVVLSQDSDFFAYDSVTTFWRPVGKRYEVKVLEYNMEAVLAQIKLSTTKLTALACVSSNDQNKNIPSMGIATNYSIIKDLPDADVPSLVKEYLESPRVVCSYQEGIDFTASILVFTTMTQEIAVPAGVSSVSLPSSQPATPLTTSPASSLSYELLCQQYKSVKDQHARAKEQKSQGNLGIKSDAKPNRQGKHKEFRRHRVIDRPAHQPGVSRQVHRPRHSYKTRPEPQQHEQPSICKQYQRKPYTAEHEARYRQSIAEAKGKKAKKKQQREAQRLKKEKELAKKPPLKIDEMDKMHLINAMVWEHPLVSLPVGTVSANSKRAAAAATTNASQLLSSEQQQQHQQQEVFACILEVVGQARMTKRHAQEFLGAFIETVFERGLTEDDRTILSFLCPAVESKIRVMPQPNQGSQATSSSPAGTPTGTPAEDEDEGDAEILLAHIYSRKIKSKTVAERQVGQLLARATSLDITLPPVPQRTVSYPTTGLLESTTTQLYRSIKMMYRNGSVALEKKINSQADGQPGTVLPKIDSKLPAIENYLLLNKASGGSRRIAPLSPLAARYVGFSERNLLPLFWHWPTLKDKIRRMMVEDRYFQDPAIVPSQADAMEWLARTTPGRLVTTFLTDVGLPPDKHDKGYRKVTRVMDMDGKEGLREHLGCLRAETFDPKEWHSKGYVLKGSIRTNGHLLQLLAFKLKELQSVRYRRVPEDRLPNPLVTTIGGTNRYLTEARNVLSTTADVESLLAADPSQVAVLSLDLGTSCIVGATVSLPLGQTPATLKRPLGKEGDQKKKKKKKKKKKKTRRAKRKPGDRKRQRKRQKARKLTKQPQTTRYFDLVVKRNAVSRPTDSFSNWLEDRKVNTTGASTGRTIQDLESALPPLKGEGASFCEYVAARRGFEGDMNDFYNNTNYWKHQWDANVCRKEEFCKVAEGLLNMIGGSVGRSRMPHQLVVIAIGLAKFTAVNGPPSLDGTFQTFFVNLARSLGYLVIGINEYYSSKRCPDCHDFVCATSEWRTLYCKTCKRFRQRDVMASENMNNAIKDHLIHQQRPLYLQPRRQDGSYPWMDVTAGGGSGDGGGEAGGPSAEAMDSSGNGAGGSGGGRAATARRRRAASIVSVEAPNTDVNPTANAPNSSSSHTKKKAKM

SEQ ID NO: 2171 - protein, 1097 aa, unidentified
  REGION 1..1097: note = Table 20
MLYAPQAALAKLKEGAKQHVDILGSIYSTISYAYSTAQHSNKAHAIVARRLRQFASLSTSILYFDGEPALEKRDTHEAQANIRSKALTAAAKSVDYLLSLVENGLRVRKQHFVAVKDNLRKAWAWSPSAREELVKVPKVWRPWSQGCFLQYHVDNMLKTLCLSQVQWTTLGIVSANDYNKNVYGLGIPSNFGIIKGLKGSDVPSLIQEYLQSDRVAIKNVDSTKFNAAIKVFVHCQQTPVPKDHIPVNDIPVDDVPINNIPMDHEPIDNVPVDDVPVDDIPVDDVPVDIVPKDNIPSWESTWTNILKAIGDTAVAADVLHCLRKAVQVAADAKHVCQKVLGLYLETIFVKGNFEQSDKVFLNHLCQRVAPKASGRSTNVATDQESDQDNSHDDLAKCAKQEQFIAMLLRHLISGEPPHKTALGTICNDFIVWLRSLGVQFDQVRNPMDFPAGVISRSVAKQLDIEFKNHFGNGSHDLCEKLLKKQEKGVISSNADIKIYANIMAIENFVSLNRINKSARTDGFRFSLLAFKIRELQSVRYRHYPAQLLPSPLLSMTSGTNGFLTEIRNVVHSQQDVQDVFGCPLEQIKILGIDLGHACLIGSFLLLPEPEMSEDGQQQPKEYNHLAVKTKAVYQPILKLRNWMNKAKHRLLEDVPSGAKVEIPESKVEQSSSAQIQSASANSPNVSVREVAKSTPNTGLLENGNKDMDNRMSINAIESQMPALCGDHADIPAYFAYQQTHHDPLDSFYNGNKYQFNIGAKRDPNNKVIIAIGMSKFDWNKGLSSLDSSFQSYFINKARSLGYLVVGVNEHYTSQKCPTCQNFVARVGKSYRRLYCETCHKKLHRDTMAAHNMCNIVHEHLLHQRRPLYLQPKREDGTYPWMDGAASLDNTATNSNLTSKGDSTVAVGSSNTNAGSSNTSAGSSQKKPRSSVPSSNEVQEANTTASGSITAGTGTTGSKDESKAHSASRPKHPHASGKQKATKDSTKRKANSDDSTEPKNPRAAKRVAKAAREDPVAMAGTTDKANNSSASTSLARNARLNQVVQHTTACVSSKATKAMDNTLGTSTSMSPGPTANTPRSPADHGKCKAARIGIHSEA

SEQ ID NO: 2172 - protein, 638 aa, unidentified
  REGION 1..638: note = Table 20
LWPPRAILDHVNSLRDEAFDSASYRIKGYLLRGSIKTDGHKVQLLAFKLRELQSVRHRRYRVAKLPPRLQSTVGGVDYYLSEIRNIVRSPEGIVRSFGCPGNKLKVLGLDLGQACVVGASLLLLEPEPGPNGVQNPEAFHNQAVKTKAVMQPIFKLRRWMDAQKHRPLDGSTEDTHDDASPAQPRTIKQIKSTLPSLKGAEASVSSHIKHREKHYEALNNFYNGNNYQFKKHTWDARRAKQEEYAKVANALLKAVGGSIGAKKADDNHVVIAVGLSKFQTKAGLASLDSTFSKYFIQMARSLGYISIGVNEFYTSQKCPRCENFIGRITVRRLHCRHCRRRYHRDAMAAANMCHIVRSYLNGNGRPRYLQPVRADGTYPWEEQTSVSSGNNGGSSPSDSGGGGGGNTNGGTMGAAPGNNGNNSNGRSTTGSGKRKATSKEGGRRKKAATAEPSSPMDRALTRTRVMEYNDDDAAGSSSSWVATAPTPAAIKRRTTSQSQSRATKKPAMRAEMTVMGSGLTSTNIQRTTSSTTTITNNGNSRRMVLKSTEPRAAAQRPARPATVQPNSNSDPSSADTAARPSENKEPLQRARKAHDDVFYASGSDAMDEDAPMSSNRAGSPVVQASVDPLPVVPEASVC

SEQ ID NO: 2173 - protein, 1270 aa, unidentified
  REGION 1..1270: note = Table 20
MGIDGLWPWTKQRGYVPSELILGFTRLPSGVNRRVDLAGAFYPTIRWAYGSNILDDAHAVVEGQLKRLGEKDDIIVYIDGAAPEEKQATHLERAERQSRALDMAKRDLDLLDQQISSGQRITKHQFSTVEKHVTNSFSWDPEAKDSLAKYLRKNGWHVVECETEADVEIARDCGPEDIVVTRDSDFLAYATVSTIWQLIGKGRVLEYSVESLLTDVKLSRTQLTVLCIVSQNDYSKNLYGLGPQTNYKIVKALTSQDVPNMVLAYLGDDRVVRANTARQEDFQAALNVFHHRRQTRRSATASPDIGTRINSSNDKSCTPTPSTEPDISMTVDVDPACPLLPEPDGCPAERPTPDPTSAITTPTFRSMRERFDLLREQVQLRKRQFWESKLCSDKGYNRYRTPPPRHGKPADGKPVKHRPPYVFKSRTQRIEHDLPEAMVQLKRKEYKEPPRLVKPSTPPKKKISIRKPMTGRTNKKSLLNQLTFEHPTVSLSIGTLQGKVNEVLTGTPELRNDVIDCIRIAVQLAWAVKLRCQEVIGRYLEMIFSGGCQAGPTDRTFLDALCERLPAKAKDADDKKKNADNKEKDADNNERDADNNEKEEANEENEENEDDEEREEDEDEQTDLGAKGGEQLRFLIAFTTFLYSGTRPLMRGDVSILVNGFITRLEGLGLLGKEPISRSSLCGHEYPASSIARTVAVQIKAELKRHYHYGCKMLVEKIRKQQELGVLPKDPPLETDPDVSCIETFVKVNRLAQSPRKLSPLSQVRTGYLTFSEPELASFFWKRMHLRAKLQEIAAPYFNNPPARGLPLIDIQESLPVGLVIKTLMADVDPQGLSSRQRTKKCVLAATRLWSTQATVDHINSLRTSTFDPSTYSTKGYLLRGSVRTDGHQLQILSFKLRELQSVRFRRYPEAKLPPRLTSSVGGIDYFLSEIRNVVKSPDDVLKIFGCLANQIKILALDLGQACVVGSSLLLPDSDPAGEETFHNQAVKTKAVLQPIFKMRRWMQDQKTRPLDGADQGSGASGQNMPRSIAEVESRMPPLRHRSKYNQQLDDFYNKGFRFKKHTWDASRAKQEEYNKIANALLKSVGGNIGTKRAEDNHVIIAVGLSKFQTKTGLSSLDGTFGRYFLRGQPANCGTHLVFKARSLGYIVVGVNEYYTSQKCPRCQDFIGRITYRRLHCRRCKRRYHRDAMAAANMCNIVRSHLDGQGRPKYLQPMRTDGTFPWEDRGRPSSGGDALATRPKRKAGPAGTDRGTKRLTRGGGGSSGGEMSSH

SEQ ID NO: 2174 - protein, 1138 aa, unidentified
  REGION 1..1138: note = Table 20
MANQVQRRLDNNQRLRKTHLNKPQKLLKKAFHWNLEDREGFYQHMINRGWTIKLCPTEADIAIAADCQPEDIVVSIDSDLIIYRTVRTLWRPVGYKQQTFRVYDKDSILDALNLTDAQLLTLGIVSRNDYGNNVPSLGIATNCKLVKDLSDRGVTDMVAAYLQDDRVIRKNTGREAFSNALKVFATMTQTAVTSTDCTPQNVVTYTSLRHKMDTILDQLKRNKKQRYENHKVKKRDSAETWVPRHKSKQQPLRYRTIDMPPQDRSGSKPSPAGFRSRYSYKERFEPVTKQDPPDVMLQHKWKPWKPKTDDPQPQAPTKSKKTLKIRDPLHDANKKKLLEGLAHEHPLVTLDMGTLRANVSKAVAPSEESSVPSGESSAMSDEPLATTVIACIQGAVREASVTKRLCQELISRYFDEVFSRTVVSQKDQDFLDLLCPRLSDSTSDDDSTIVTNDHDSPTDKTETFIHSFMAFLYSGNPPSSMRAGIASSVNDFIYRLRHYGILPAFDLSTAGNPKNAPEYTPYLLVRSVSKQLAVELKQHYKRGCQKLSEQLLKQQEARSQPLLFNFNMEQRKHIPTIESFFFFNSLVGHKYQVTPVSPIEHGFMTFTESELGAFFIKKPSLRKHLRSLVEQDTQVSGEFKLVHLNSWLPRQAPGLLIQSFISPVATTDGLSSRQKGRAGHVAAIKLLNLDEIKSHVNNLRDSSFQPCLYDDKGYILHGSVKTDGFRVQLLAFKIRELQSVRFRRYKEQLLPDRLVSTVGGTDHFLQEIHNVVKTDIDVKKIWDCTTNQAGDITYLGVDLGQTCVVGACALLPSHKQPRGWKKKNRSKNRKKRRRRRGSKEGKKATVESNPAAGSRSTDRARYLNLAVKQKAVLQPMFKHRAWIEAQKTAATVQSSTGAQLSTSTTEAAQDQQRLLSILDIETNFPALRGENSSARDYFEHRNNYMAELDKFYNGNHKFKKHAWDHARAKKEEYRRITDSLLRMVGGCVGAKRDANNKVVIGIGLGQFGSDKKLSSLHTTFEAYFIKQARSLGYVILGINEFYTSKKCPTCHHFVAQTDSLRRLYCPHCQKTLHRDIMAAHNMCAAMRGQVEFLQRPLYLQPVDENGQYPWMMQQGGSSKRRAALEAGGRATKIASVPN

SEQ ID NO: 2175 - protein, 991 aa, unidentified
  REGION 1..991: note = Table 20
MPRHQVRQMALAKSDSAISNLEIRLAEKRRVWKFHISKANMPLQQAFHWSLESRKSFVEYVTSKSYDIVLCLTESDVLISAECQPYDAVLLCDSDLLFYKSVHVVWRPMGSYKLLRFVSYEEKAILEILGLSSVQLVALSIISGNDYAANVPHLAINTNYRLVKTSKGRKIIAFISLPWPSILILILEQRLFYEKSIIRQYLAHPNVKRRTDNGAAWTEESYNNAFKVFVNMEKDFSTGRFCRKDLRRNAHDAEFSQCAEAKPMNPFATIDKPDPAMKHRHRLRYSPKIRYEPRIKQPALVVMMQYSLKPWKKPPEKPIAPQPTKAKPAAIKPEISEVNGFGRKEMMNALSFKHLTVTLDLDRLSTNVRATLDDELVCKAIVECIRGAVKVALVLDPQCLSQPSARKTRQSSTICVLLLDDDNNCFVKDGGDNGSNALFVKGILMLLYSGNHPSGKLGLAVNTFISRLQELNRLEKLNSTSADLLRNIKDYTPSFVVRSVASQMSAELRRHYKYGIQKLYISVEKMIEKGQLAASQAVNLESEEPTIQLFVKVNAVAVGFDAFHLSFVEHGYMTFTEIELAAFLHKRGELHPVLKKLIGHTDQQRRLIQEELTRDWLRFQTPGLLIQQFIAPVDPKASNGEHLHGGRRRNLVLQLPLGLSILKKFVHMSTSFAVLSSILAHIMRRDTSYVDPSKSTGIVYNFLNTKTPADMERLLGCTPDKTDQVSYLGIDHGQARKKKRGSRGRRKRGSGKISPTISHTLTSSMEAATAESLSVSAIESSLPPLRGATACFTCHVEHCKANNKYLDKVYNGRNIWFKKYKKMSKEAWAKEFHRLADSLLRMARSLRYVVVGVNDYYSPKKCPTCEQVVAQPESILRLYCPNCRKYLRRDTMGGHNLVNILCAQVEKQERSLYLQPADKGGRYPWKEREDESASSPKVAAGPSQQAGSGGDGGKRKQTKDGRAGKGKSSKRIKATVKVKAIKGRGNNLGDW

SEQ ID NO: 2176 - protein, 1269 aa, unidentified
  REGION 1..1269: note = Table 20
MLVDLCATHNTPIRLFYGSGSNLDDAHAKLEQLLLRMGKKEDMRIYVDGHPSSEKEQTCTLRNLARRKALLKAYESVRILEARLDARQRIRKHHIANANKSLRQAFHWPLEQRRSFVRFMAGKGYHVVLCDTEADVRIAAECQPEDAVVSCDSDLLFYSTIPVLWRPLGSYRSRRYVPYEKTAVLEALGLSAIQLTALAILSGNDYVPNIPHLAFETNLKIIKGLPAGNEGEVGIVQQYLAHPQVKRQTDKEITQWTEHSYADAINVFVRLQQTVRSSVPADGDANSVEDAYASLSKRMSQFMVAFGVFKKEQYKSRRDKRAAHGEESRRDTVPERTNPFVAVDHPNPARAHQYRRRYTPKVRYEPTEERPPPDISLQYVLKPWKEGTEKPVQPHPAKKPTPVRPVIDVADPFERKKVMSELGFEHPIVTLNLGRMSKNIRTAIKEEIQTAATPIEFDEGRITKSVIECIRGAVKVAWETKIYCQQLIGLFLEDVFYPRSSPNDPRPLLPVTTLGLEDQAILDSLCPRLGQQTDENSGSIEDGTDDGSNAPFIRGVLMYLYSGNISDKGKVAAAIKAFVRRLQDFGHLAKDALTNGQLARAIKKYTPGLVVRSVSSQLSAELTRHYKKGVDTLSEKIETMVTKGKLSSNHSVDLTARRPAIQIFVDANAILGRPWCLAPLSSEEHGFMTFTELELAAFFHKRADLLPFLQHLAGYADQSRPMAQTYLTNCWLPLRPPGLFIKRLIAPVDPKTTTGERLKGRARKDAGIAAAVKVVERSEIRSHINTLRDREFDPRSYEEKGYFLRGSIRTDGYQLQLLAFKLRELNSVKYKRYDPSLLPDRLLTTTAGTSDYLTEVRNVFKTMDDVERLLGCSSDELDKVSYLGIDLGQAFVVGAYAHLPPDKNPRIHKGRRKKKRRRGSRGRRKRGSGKGKRHTSRAGRRRFINLVAKQKAVAQPTLHHRSWMEKQKGADLKPFPRHSTSGAQSTTAPRINQPSTSSAETTLSETLCINTIESSLPPLRGPNASIAGHCRLRAANRAHLDKFYNGHQFKFKRYKSMAKSARAQEFHRLADSLLRMVGGTIGEKKAEENKVVIGIGLGDFKSTSRMTSLHGSFQAFFVQKARALGYLVVGVEEYYTSKKCPICNEFVAQTKSIRRLYCGTCRKSMHRDVMGGHNMANILRSHVEKQERPLYLHPVDKDGHFPWLERGGGATRDDPQASGSRKRRHDDQQVNQGAQDTRTKTTRGKKVARSTTARTVKASAMDVDEGPTV

SEQ ID NO: 2177 - protein, 1641 aa, unidentified
  REGION 1..1641: note = Table 20
MSLCSDISQPFRTTNPVNFPSFVWTCWEHFFITVRQAYSGKHHDDAHAILEKAFTKLGPKETLVLYLDGAPALAKALTTANREENRRADLDVAEKNLQEFETLITANLRLRKRHFVAVSKPLQKAFYWDLPARQAFAQYLKARGWMVVECETEADLRIGNDCQPGDVVVTRDSDLLIYPKVACIWRPFSKERVLVYRVNDVLASLQTLVASAITLPEQGQTYITIKAKFKELCETRVERRFTNKSTALVNGESKSDVDTRLPKPFTTIDKQNPAKAHQYLPATAPKCALSLPKSNQHLLFRCNTFSSIGRSRHSSQVCCLHLKMQKAPTPIKPEISEDDRFGLKEMRNALTFEHPMVILDLAWETKRQCQMLIGLHLEDLFYPPPTPGAPRPATPLADTTERDRLILDNLCPRLSSMEMADSGDDDDNNAEDGENDGTNAPFIRSFLTFLYSGNMPTNSKTGAAVNTFICRLQEMGHLERLEVAKTDIVKNIKEYTPSFIVRSVASQLSAEIKRHYRHRSVKVAEKIQAMIKKEQLRSNQAIDMTQQQPAIQIFVRANATAGRPWCISPLSSDEHGFMTFTEIELGAFLHKRKELHPVLKELIGVDQQRQLAQAELLKEAGVAAAIRVVEPGELQAHINTLRSDGFDPRTYQEKGYFLSGSVKTDGYQLQLLAFKVRELNSVKYKRYTSEVLPDRLLTTIAGTSDHLTEVRNVFKTPVDVERLLGCPPPPPDETDKVSYLGIDLDQAFMVGAYAHLPQDKNPKVGKRRERKKRGSRGRRNRGSGHGRKSVSRAGRQRHINLAANQKAVARPTLRFRTWMEQQKCTDLKLPSNPSTTHTESAASSTANQPLTNSTVEAASGALSIREIESAIPPRRGDEANYKDHVRYCQAHKACLDMFYNGKGYKFKKYKRMSKKARAKEHERLADALLHMVGGSIGEQRKEENKVVIGVGLGRFSSNSRLSSLHGTFESYFIHKSRSLGYLVIGVNEFYTSKRCPKCEQFVAQAGNIRRLYCARCKKYIHRDVFAGHNIVNILRSYVERQERPLYLHPIDKDGRHPWLQEDSSGSNAGGSSRKRHAEDKGHAGAENSGKRTKATEQKACAGQVPSTSVTSFEPLQRDFHYCCLLSLSISSSAALTLLHTSIMPPANTIKVNVKWSGKKFDDIELNLDEPGLVFKAQLFALTGVEPDRQKIIAKGGMLKDDTDMSKLGLKAGHNFMMMGTAGELPKAPEKKTLFAEDMTEATLNKAMDVPVGLMNLGNTCYMNATLQCLRVVPELVQDLQKYEGGVNNMDPGSNMTASLRDLYRQLNASGHGVMPAGFLTYLRKAFPQFSQQGRDGVWMQQDAEECWSQLISTLKVKLPPHTEGTQNVIHQFMQGEFTTTLKCEEAPEEAVVVTKEAFAKLDCHISINVNYLHNGILESLDQKIEKNSATLGRSAVYSKSQRISRLPAYLTVNFVRFFWKPTEQVKAKILRKVKFPFDLDASQFCTPELQAKLTHTKGKLRELDNAEVALKRRQRLDKEAGRMDTDDVSEEQKAVEEAQVALESSLDPELVKDVGSNPSGQYELAAVLTHIGRTADSGHYIGWARKGDTDEWYKYDDDKVSPVSKDDIMKLDGGGDFHVAYMALYRARSFKPKTKPATAEA

SEQ ID NO: 2178 - protein, 572 aa, unidentified
  REGION 1..572: note = Table 20
MIKKEQLASDQAVDLTSQKPAIQLFVRANAAAGRRWRLSPLSSSEHGCMTFTEIELAAFLHKRAELHPILRKLIGCTNQQRRLTQDELTRDWLQVQVPGVLIQRLIAPVIQGRLMAIACVDDRGKRPVLRQPSRLSSLRSCVLISTPPSWQRFRSRAYQEKGYFLRGSIKTDKYQLQLLAHKVRELSSVKFKRYRDDVLPNRLLTTTAGTSDFLTEVRNVFKTSADVERLLGCTPDETDKVSYLGLDLGQAFVVGAYGLLPQDKSPKIGKRWRHRQQKKCGSRGRRNRGSGKGKTKSVCRTRGERHINLAAKQKAVARLTLRHRTWMEQQKIADLKILFSQSTSFPEAAVTESLTTRTIEPSLLPLRGANASFADRVEYKKHRHMSKKARTLEFHRLADSLLRMVGGSIGEKRKEEDKIVIGIGMGRFTSTSRLSSLHGTFESYFIQKARALGYLVIGVHEYYTSKRCPKCQQFVAQTESIRCLYCSYRKKYCSSKEGLTNNFTRALYMHRDTMVGHNMVNILRSHVEQQQRPLYLHPVDKDGHYPWLERGSESAAQPDDAPTFLAASRWRW

SEQ ID NO: 2179 - protein, 311 aa, unidentified
  REGION 1..311: note = Table 20
MLKSVKEYTPSFVVRSVASQLSAEMKRHYKYGTKTLSKKVEKMIEKGQFAGRSSGGSHLERPSYSPFCACECRRRQDCRARRDPRPYQHPSRGGFDPRSYHEKGYFLRGSIKTDGYQLQLLAYKVRELNSVKYKRYHTDLLPDRLLTTTASTGDHLIEVRNVFKSKADVKRLLGCTDDDTDQVSYLDIDLSQAFVVGTYSSIPQDKNPKIGKRRCHRQKKKRGSRGRRNRGSGNCRKKSARALGYLVIGVHEYYTSKKCPRCLQFVAQTKSIRRLYCTYCKKSMHRDVLAGHNIVNILKSHVEKQERPLYL

SEQ ID NO: 2180 - protein, 1483 aa, unidentified
  REGION 1..1483: note = Table 20
MGVKGSWLLLRNKGHAADIHGKPSCPTPASKIRVDVCGSQFSTIRYAYSIAHSDANNAHRRLEQQLIKLGKKDELVLYVDGHPAAEKANTHHQRKQNLDKARDRAYRAHVTLEDRLQTNKRIHKHHMKTVHKELASAFSWTMKDRRGFVDYMANNGYEIILCATETDVKIAADCQEVDVVVTGDSDLLFYKSVSVVWGPMGRGKSRRYLLYDKAAVLNALDVTSTQLVTLAIISGNDYTGNIPTLGIETNRKLIKKLEKRASIVQDEASIVQDYLTLPEVIRKTCKDDANDWTSASFDSALKVFVTMKQDRAETTAPLEADSDATPTYDALRSRMDDFMMQYKQHQKEAYKARVAKRALLGAQASSTVASGLPNMFATVDKPSSVNASTYRPRYSAKVRYEPTQKYEPPPVMQQYELTPWNPPPDKPDPPALQPKKLSAPIKPQIHGHFERKGPQREYRNCGVRLTVVLGLGGLRENIETVVSDSGASQLIVSSVQEAVREALSIKRRGQELIGKYIQAVFYPRPAPGEQRPKDPLAVTNSMDIAILDQPCPRLSSSKELDKGDEQNEVVGDGHGEGKKTHFLKTFLTFLYSDNIPLASSTGVAATVNSFIRRLQDLNFLPKPDRLKAEIKNIKDFTPSYLVRSVASQLSAELEWQYMHGCRELSKKAAMIKKGKLSSENEIKLNDKVPAIELFLRLNNLTGNKWTIAPLSPCLYKKVELRPTLEKLIHHTDKRALTQENLTRDWLRGHEPGSLIRRLIAPVAPDALPFKKKRKGVKTAPVEFLTPGGIRDHINGLRAADFDPRAYAQKGYLLRGSIKTDGCQLQVLAFKLRELLSVRYKRYNSDLLPDRLLSTTAGTDDHLTEVRNVFKTKEDVERLLGCTADQVASVSYLGIDPGQACVVGSYAYLPPGKEPKGGRNRHRGCRKRGSRGHKPRGSKHGKVKTDSRAESGERHINLVARQKAVAHPTFKHRRWMEAQKAKALKETSTQLAQSSTPSTESSSEAEEISIGKIEKTYPPLHGERADFDAYVQHRYAYKDALDNFYNGNNFEFKRHKQYAKAAREEEYHRLTDALLRMVGGSIGAKKKDEDKVVIGIGLGDFKSKSRLSSLHGTFMAYFVTKARSLGYLVLGVNEFYTSKKCPKCQKFIGRPRNIRRSYCGDCEKYIHRDVMAAHNMVNILRAYVERQERPDYLQPVDEDGKYPWKEDYKHEAQLTSASGASKRAKSKSGSDRKRPAKEGDNEKESPAKKKTKIKTTKPSPNDVLDEQDTAELFENLPGFMPDDDDDQDTEASIKKEDPTLSTVYEHEPAALIALKTRLAGHAPWLESSIPYPLVPSDHYSPKGKTFTYSPKVFYYSQRTYEDWIELDGVKHLFHWVNESHRDIPLQSKSPYVLTETWQCHFAGKPEYKAKKEGVKRRAVYKSYKARRCDARIYIHKYKDAHPAAEGYPLANATKRVRVTYYGVHTNHVLGHKDDFEHLSLSASL

SEQ ID NO: 2181 - protein, 1192 aa, unidentified
  REGION 1..1192: note = Table 20
MGVPGLWPLIREEGYEAALQRFPTATPDTHFHIDILGSFFSIIRRCFISSDIAIACIKFEKHLASLRFPKASTTLHLDGPSPTVKDATNRERQAKRRQAFTKADTLLTKMEDAIHNQHGKLRKRDFKTLNKAITNSFYFTRDLRQALTKHLCANGWNVCFCSFEADTCIGKKCGKDDVVVTRDSDSLIYNSISTIWRPTKGGYLVYSVPQVLLKIQLSRSGLTALGIVSQNDYGKGIHNLGLKTNFKIMCQLDAEGKVKELICDYLKHTTVSKKQIAGKVEWSIDSYADAYEVFVNMHQQVANHQLHATETIDSATPLLSNLQLRKRQVLVLNAKRKQVAYNERKARRAAQSVSDIQSKPINPFLAINKPNPNQPHIHRPRYTPKVRYEPINKQEPPPVYVQHSWKPWKQRPSLEEVKGSSSKKPPAPIRPMLEEDVIPGRKDIKAALNWEHPIVTLRLGLLTKNVHAVLKDQNMANSVPSPETPRPKAPVTAISSEDLNCLDWLCSRLPSKEAIELDEDNVGLDDGSNDDKNTPFLQCFLTYLYSDNLPSSKSKAGEAANKFIFRLQQLNILTALTAPSVEKTRNVREYTPSMLIRSVASQLGAELKRHYRHGCVQISEKGHIPSNQADIEPHARGPAIMVFVHLNAIAGYPWSVVPLSSAENGFMTFTESELGAFFHKREGLHPELKSLVQFSDSGRRLTQADIISDWCPLQAPGVLIKHFVAPVDPRSVDGQRLRGRKRKKAGIAAAVKLLSPSEIHSHINMLRSDDFDPRQYTEKGYVLYGSIKTDGHQLQVSAYKLRELNSVKYKRYSSERLPDRRLTTIAGTGDYLTEVRNVFKTKEDVEQLLGCTSDMAHIISYLGIDPGQACVVGAYASLPSDKEPRICRRRNKRKRKNNRRGTRGRKSRGNRTRKPREIEGRHINLAAKQKSVAQPTLRHRKWMENRKDTFLIKPEGQNTQPMSVSEIESSLPSFHGQEANLTDYLNLRNNCQNALNLFYNDRKFTFKKHKWLMKEAREEEFKRLTDGLLRMVGGTIGERRKPEDKVVIGIGLGDFKSTNRLSSLHKTFTGFFINKARALGYLVVGVCEYYTSKKCPTCEEFIGQAGDIRRFYCKTCGKYIHRDIAAAQNMCNILRSHVENQERPNYLHPVDEFGNFPWKEKDDKRTAKGKRNIEGANEMKRGRKRPKGDLGL

SEQ ID NO: 2182 - protein, 1289 aa, unidentified
  REGION 1..1289: note = Table 20
MGVPGSFVAIRDKGLTPEMHNRPVLPATATQENKIRVDVSQVGFSTYRYAYSKYPLDLGDAHTRLETRLLQLGAKEELFLYVDGDLAAEKSCTHLQREDNRRRHREQAHQQLIRLQEQLNDNQRIRKHHLNKLNRHFRLAFHWERGDRESFVQHLIDNGYSAVLCNTEADVQIAADCLPDDIVVSGDSDFLFYKSVAALWRPIGKPPFQKYLVYEKHAVCEALGLSNEGLVALAVVSRNDYNRNIPSLGFATNHKLIKQLELQKKDDDAEGIVCDYLRMPAVVLKKDKDNEVEWNIESFRSAINIFGHMQQSTLPETAAGPQDDAEVDSTPSYATLRIAINAFYEQFNQRKKAEYAAREAKRVLSGAQTSVTATVKSHVMFSTIDRPSPHAPSSYHPRYTPTVWHDAGHQQEPPPIMMQYALKPWAPPTKSPDEPASTPKKPPKKVRPKLGDDHEMRRKDILDELAWEHPTVTLDLGTLNKNVAAAFQDRPSLESKLRPRSVVSCIRGAVREALDVKRQCQELPRFQEPVENIDPNDTLILNNLCPQVPPTTSSKEGEEEEDNVEDGHSEDKGSGPASRFIRRLQELDLFPMVDRDAIRTIKEYRPSFLVRSAASQLAEELKRQYNHGAKQLAEQLTSMIKKGQLAEKDELERKPEWSNIEYFVRLNSRTGNKWALAPLSPVEDGFLTFTEIELATFLAKREDLREDLKDLICLESDRRLTQEDITRDWLPYVTPGLFIQRLVSPVAPRGLRGGKKRNAGVATAIKMLTPNAIHEHINMLREQDFDPREYMEKGYILRGSIKTDGHRLQLLAFKVRKLLSVRYKRSGYRSEVPPDSLVSTTAGTGDPLTEARNVFKSKEDVERLLGCTTDQADAISYLGIDLGQTCVVGAYSLLPADKKPRIGGRSHNRHRGCKGDGRRNKGGSRGRRRRGSKQVKEKKPPASAMRHIELFSKQKAVSQPTLKHRAWMEAKKRMPLYQTSGKKGDQQSTNSTTESALQRQTANGLNTSMDGAVQQQTASITPTTVHEQSISAIETAMPPLRGAGACFAGYVKYRRDNKDTLDKFYNGKKFTFKRHKWHARRARQQEYHQLADGLLRMVGGLIGEKRRVEDPVVIGIGLGRFRSTSGLSSLHGTFEGYFTGKARALGYVVVGIKEYYTSKKCPMCHKFVCQTESIRRLYCPNCRKYRHRDVLAGHNMCNILRAFVERQERPDYLQPVDKDGNYPWKEKDGKTKDQPKNVPGPSKRASPGKRQVEEGNSEKADAKKQATRRAKRISTKSKTAVAKSKRVVV

SEQ ID NO: 2183 - protein, 421 aa, unidentified
  REGION 1..421: note = Table 20
MLSVRFKRPGYQPEVLPDRLITTIVGTCDPLTEVRNAFATKEDVDRRLGYSIEQADKVSYLGIDLGQTCVAGREPRIGGRSHNRHRGCKSNGRRNKRGFRGGRQQGSKGSKKKKKKKGKKDPSPGGMRHIELFGKQKAVSQPTLKHRSWMEAQKRRPLNQSAVQEGVHESTSIAPVSTIHQQTAGTPDPVETSIPSISTIESAVSPLRGANGCFSKHVDRNEDNKEVLDKFYNGNKFFFKRHKWHARRARQGVYYRLADGFLRMVGGSIGEKKDKDNPVVVRIGLGRFRSTSGLSSLHGTFEEFFHPKEVPPLAMTLWCETESLRRLYCSKCGKYRHRDVLAGHNICNILKSTVEQQERPLYLQPMNEDGSYVWMEKDGKNKDQQAISTSPSPNQAAPTSGKRHMEHDGDERANAKKQAIA

SEQ ID NO: 2184 - protein, 1166 aa, unidentified
  REGION 1..1166: note = Table 20
MGVLGFWAWMRKKGVQPHLHQVTQQFPASLHLPSLQSKIRVDFLGSFFPAVLWAYSNHTRDKAHLILESLLKKLGNQQRLIIYFDGDPAEEKADTHRHRQDLRDKAQIRACNALEVLRGRVDNDLTVRKSHFNNVRKHLRGCFKWIHADRDVFIALLRSKGWVVVLCETEADVKIAQDCLIDDVVVSRDSDMLIHMTISTLWKPIRRATQGKFLVYEVPSILARVGLTRTQLTAVGVVTKNDYTSNIRTLGIAINHDLLRCLDGQQDVPTLILQYLALDKVILKNKTGQTFSTSINVFVNRRQTPITTDPPANAVAYDNLRSEFNRVCNVFEQRKRERQAARRDSKRAPVSVSQAPVPAFHVSSASGASVSAPACTKKPQHRSRYSFKKRRKGKEHDSPEVITSFVLKSYKKPPDLPVVTTPTKTSKTTSIRRAITSNQKKAVLNALTSEHPIVSLDIGTIRTNVHGVHGTNAALTREVVECIQGAAREALIVKRQCQQYVGMYLQRLLSGNTIDDDDPTTDATPATNSGSDEREGDDDQNNQEDDDARPSDQQVFLKSVMTCLYSKNRPRGDIAASRIITRLEELHILPPGTIHSCGHPRQSSKYTPADLVRSVASQMAAELTRHFLKGSRELYIKLKKDMNNGLLPSGTAIELRTEISYDELRERLKDIMAPAYPNEPREKFNKTWCVSNWMPGVDPGLLIKAFICNIAPKDDPTVTACQKRKSGHLAAIELCSLDRLKDHVNMLRQRTFDPQQYDAKGYFLRGSIRTNGHRLQLIAYKLRELQSVCFRRYKTNVLPNRLLSTVGGTNDYLTEVRNVFSCSQDVEDLLGCSAKDVRKEVRVLGLDLGQAFVVGASAVQGMPPKRRRRKRGKGRKSRRRRGKKRGHGSNTALPDYYNLAVSQKAVYQPTLKFRRWLEAKKASTITGTEQTGSVLQTICDIESNYPPLRGPAANIEGYFNHRSEYAEVLDKFYNGTRVYKQYSWDAKKARKEEYRRAADNLLRMIGGSLGAPKDKDEKVVIGVGLSKFSTGIRLSSLDGTFGSYFIQTARALGYIVVGVNEYFTSKKCPSCKNFVAQVGDNIRCFYCTSCKKYMHRDIMAGQNICNVVLGHLIDQQRPLYLQPQDAEGNYPWMQPQAPQEPADRLKRAGMDVEGGPSEVKKRSIGI

SEQ ID NO: 2185 - protein, 621 aa, unidentified
  REGION 1..621: note = Table 20
MISGKDPPRGSVASEFIARLRGIGLINGDVPATEYPAGIIARSVSSQLCVQLKKHFKDGAVSLHQRLVKLQSRGKLPPDTRVEIDSSVSAIENFRRLNHLTNNSWSPVPLSPVEDGFIIISEYELATILWKHEVTRHELRAMMNGQFSVSSDVLTLPDLIECWLPGTPPGTLLKTFLADVDLDSKGLTNRQKGKAGHAAAIKPLSIEQIHQHINTIRHRDFDPRTYRLKGYQLLGSLKTEGHRLQLLAYKLKELLSARYKRYKEDVLPDRLQSTVAGVDYYMAEIRSVVKTSQDVKNLLGCWPHQVREQVNVLGIDLGQACVVGASAVRPKPPVRRRTKRGKRGGCKKRPSKRKRRKNKKKKDKGKSVAKYDKEGGHPAFYNLAVKQKAVLQPVLKLRMWMERQKQQELPALADMQVQITAVQDSVGQGAQQEITQEPQRKIRTISDIETAVPPIRGQGANFNMYKQYLDRYWQHLDSFYNTKGRFKKIRWLARRAKMEEYTRLTDSLLRMVDGCVGARRKDGNKVVIGVGLGKFSSKSKLSSLHESFQSFFVKKARSLGYIVVGVNEYYTSKKCPTCENFVAQTQSIRRLYCPSCKKYMHRDIMAGHNICNVVLGHLEHH

SEQ ID NO: 2186 - protein, 1130 aa, unidentified
  REGION 1..1130: note = Table 20
ADVEIAKVCGPGDAVASRDGDFFAYQQVQTIWRVVGFGARANVHCYHVQEVLLSLGLTRDQLTALCVVTGNDYNKNISTLGICTNYELIKDITAGQDVAAIVSDYLGLESVMLKNAALTTFDDSLRVFIGLTQTPITTPGGQQTDSSDHYHRLLKEFDDARLQLKERQKTMAAEKRHQKLRHNSIPNTSNHSSIDPPITEHRPRYSFKTRQTAKLHERPQTLLQYKWKESKSLVPDQIPAAPVQDIPDMAAKRRKMIEGRRTDKLTATSNKKMILTALEYEHPFAVLRLGLLEGNVKKALPNQPDAAQEMVGCLRAAVCDAWSIKRRCQEIISIYLAKVSSFSVVSEKDRQILDQLCPRLTKDDFKQPGDGTVDESSNKDAGTGDSADKNANFLHSFMSALHSGNRPGSKALLLVERLRDKEFEGILQPFEIGLPGTVNQNDDRFPASSLTRSVSGQMYVELKKHFKHGTVNLYHKLEVIQKRDPSSPTVPINYNLSAVENFWRLNKLLHNPWKPFPLSSVEVGFVTFTEYELGGFFFNSRYPCLRTKLRQDMKEAFPRTPEESLNKTTLVEDHLPKTRFGHLTEMLVAKVGSDGLTRRQRDRAGLEAAIDNLSLDDIKRHINELREEDFDPRAYKGKGYIMRGSIKTDGHELQLLVHKKKELLGVRYKRFPDDRLPNRLLSTMGGADYYLTEVRNVFKSAQDVQDLLGCSPDQVRQEVTVLGIDLGQAFVVGASAVRPGPPIQRRNNSNDGQKRKRGRKGKRGGKLRHKQTHKRGKRRRSITKEQATEVDKGLPLEMYYNLAVKQKAVYQPTLKHRRWMEGEKRKDLNMPEDLLAANVQVGPGEEATTTATMTATTTTPTTTAHSPLRSISDIESSLPPLRGEDTDVNKYLDHLHKYEKQLNNFYNSYDGKASLKKNKWFSKRAREREYWLIADRLLEMVDGCMGARRHDKNKVVIGIGLGEFSGVNKLSSLHGTFETYFIQKVRALGYLVVGVNEFYSSKKCPTCHKFVAQTESIRRLWCDNCKKPMHRDVMAGHNMCNAILGHLEDQQRPLYLQPVTADGLYPWMQQGEKEEPSNKAPTNQTPETPKTKSAGKKRKTPSDGADTVKETPKKKSAGKKRKAPSDDTDS

SEQ ID NO: 2187 - protein, 933 aa, unidentified
  REGION 1..933: note = Table 20
MKDALSHASLRTEFNAASERYTLLQKAKREAFEAERRTSPGALSQADSSHIRYRTVDRPPPTTADTTLKEHPALARTRIPPRRKRYSPSKRTVLKSHPAPKTMVRYKRKPYTQTPESPLEKKPPKPAKRKETKTRKTITAKSTKVDLTRAMSWEHPTITLDVGTVSANVGRALGEADLAAELLGCLQEITRLASEIKRQGQQLIGRYIEYIFAQGDLTAADKRLLDYLCPRVTSGTKDDSEDDQDQEEDDIAQADDTAKFYNTLLIHIYSGNPIVVPTLKPGQPPNKSAAWCVKQFIDRVAELGLLQTNDPGATNITMPYPGSSLLRSVSTEMSTEIKRHYRNGSTELVFKLEKKKKKGLLVPGMPTAIDNEIPAIENFVLLNRTDKNSRRIVPLTSFEQPFVSFSERELGILFWKNPVLKEQLRAWVLEDLENASFQPAQHDVNRLLQRAAPGELITRLLSNVGRDEPRHGRRTYKDTTTVMDQEEISVHIQNLRREGFNPADYDGSVVRESGDMTKKCRYVLRGTIRTDGHRLQLLAFKTKVLQSVKFKRFPPEILPPRLTSTVGGVDYYLSEVRNIVRTEQDVADLWGCPAEEIKILALDLGQTCVVGAYARIPKASDSKNKEGPIVFNNLAVKQKAVLQPTFKHRRWVEQQKNQDPGNGHKAISEIESELPPLLGEDASVTAYIDHVQTVKVQLDRFYNGRNRYKKHRWDMRRARQEEYNRIADQLLKMVGGSIGQQRDPANKVIIGIGLGKFSSQARLTSLHTSFQSFFVQKARALGYIVTGVNEFYSSKKCPRCQNFVAQVEIRRLYCPCCKSYVHRDVLAAHNLSNVIFGHLKEQTRPLYLQPVDDDGHYPWMANTKLDAGVGAGVGAGPGPGVGPGGDPGAGSGAGARSDSDASKKPGQVQSGFKRAGLPRESGRKKRSKSALPL

SEQ ID NO: 2188 - protein, 317 aa, unidentified
  REGION 1..317: note = Table 20
IKILGIDLGQAFVVGASALLPSRNKHLDAEGGPEGAQKDPLVKQPTTKYFNLAVKQKAVYQPTLKHRRWLEQRKAQPLEGGGSICQIETSLPARFGPDASIAEYTTRMQEVEAQLGSFYGSVVLKKHRWNARKARDEEYRLIANRLLEMVGGSLGAKRKESNKIVIGVGLGQFSSRIRLSSLHESFESYFIQKARSLGYIVVGVNEYYTSKKCPTCGEFVGQVDLRRLYCSECKKYMHRDVMAGHNICNVIRGHLLKQERPRYLQPKDIDGNYPWEEKQSFRPRPGGSGAGGHKGKGVKRKATDEGTDSSQFRRVSV

SEQ ID NO: 2189 - protein, 811 aa, unidentified
  REGION 1..811: note = Table 20
AKSKKRVRNLDDMEKRNLVKELQWEHPTRVLNVGTINANVSRALAKESLPPEYLPQIKTCFSDIAKKAAKAKRTCQLAIGQYLEQLSLENVDEQDRLILARLCRPFTAKDVIKDEDIEAEQDAVERDDQERNDECNDSNDSKNETLKFFLSLLTAIYNSKCPPLHYTDTTKPTPENTSKTVLAVRACWVKAKNFLPEETGEADGVYPASTILQSTALNLSVEFNRHFRNGSIDLAKKIRILKKKGLLPLSAVDNIDPKLSPAENFIILNRISGCRRRLSPLSSMETKFVGLSELDLTKVFWQNDVLRQLLQQCASVDFPSLEPHEVTQYSVGLWLSRVEPGYLINLLLTDIGGYSMEERRKKRNLSRCTLRMPIDATREHLRGLRRDTFDPSSYTTKGYVLRGSIRFDGFRLQVLAFKLNELNCVKYRRLPPERLPHPVTTTLGGTDYFLSEIRNVVTSKEDVAALWACDPSQIKILGIDLGQAFVVGASALLPSPVEPVPSPMSEVKEGIEDKQTRTAAPKFFNLAVKQKAVYQPTFKHRNWLEHRKGRASEGQMSITEIETKLPALRGSEASIKKFVVDLEKGKAQLEGFYGDVVLKKHKWNAQKAKDEEYRIIANRLLELVGGSLGAKRDKDNKVVIGVGLGQFSSKIRLSSLHESFQSYFVQKARSLGYIVIGVNEYYTSQRCPVCEEFVGKVDMRRFYCLKCKAFMHRDVMAGHNIANAVRGHLLTQQRPRYLQPRDVNGNYPWEERRSVTFMSHSGGSSEAASSSEGAKRAGMKRKVPVESQASKRARVKRKVPVEWTEEEQDQE

SEQ ID NO: 2190 - protein, 1944 aa, unidentified
  REGION 1..1944: note = Table 20
MANTIFEQQLRSLQFPPATTILYMDGPSPEEKRATREVREARCTAGLTKADALLSEMEDIQRQGKKLRKQHFRKLYKAINAAFYFSADLRTSLARYLRDKGWMVTECPSEADLQIALNCKSNDIVVSGDSDSLIHSSSIKTIWRPLARGGYLEYDVPSLLQQLELSRASLTALGVVCRNDYTSNMKQMGLATNYEILQSLEGEDVDTLVNSYLTHPEVVLKNPIMTHFDSALKVFTRQEFTTWDHSLPPQVIQQEDALTETRLPPTLSGILARLRDLQNQLKIKNESPNTAHASEFEYRFNRYNTVDREPAISPPPHASGRKYKYRKRYAIKTRSRMIEHERPDVLKQYILKPWTAPPESPKESGPPPASKIPTKKILHKLDSMDKKWLVKELHMDKKWLVKELQWDHPTRILDVGTVNANVTRALAKGSLPNAYLPRIKACLSKVTKIAATTKRACQQAIGQYLENLSLENLDDQDKLILRLLCRPFTANDVLPANGVLPANGVLPANGVLPANDVLPAEGATEPGSVGQVEEEETEEEVDESDDSNDRKNPALQFFMSLLSAIYNAEPPKMSLELQRAKYMPKTLATEPKKESDSIQAVREFLIKAKDFLPPQSGQATAVYPSSTVLRSTALHLSVEYMKHYRNGSLDLCKKIRSLKKKGTLPSDTVDNIDLTLSPVENFIVLNRASGCRRCLSPMSYMGTGFVNLSELDLTKIFWYDNILCRRLQECAFPHFNLQIPEQVSLDTVGIWVGTSEPGMLINKFLTDIGGYAADERKKKKNFSRSAMRMSLNDIRSHLRYLRQDGFDPSSYNTNGYLLRGSIRTDGFRLQVLGFKLNELNCVKYRRLPPERLPDRITSTLAGTDYYLTEIRNIVKSQEDVTRLWGDDVDPRQIKILGIDLGQAFVVGASALLPSPTEPNSTPRPTRFFNLSVKQKAVYQPTFKHRSWLEHRKGRASAEMQSVAKIESELPPLRGPGASIKSYVEQINNVRAQLESFYGSVVLKKHKWNAQKAKVEEYKVMANRLLELVGGSLGAKRDKDNKVVIGIGLGDFSSKMRLSSLHGTFQSYFVQKARSLGYIVVGVNEYYTSKKCPVCEDFVGQVDIRRLYCSRCKAYMHRDEMGGHNIANVVRGHILNQQRPRYLQPVDAEGKYPWEDGRAVYRPKSTTIRPSKAIKRASVKRKAPVDWSEQDHDHVKRKPDYRPSTAHHSSTSATATTTMRREGTIDYTDEYNRFMARLEAFHQKHGTVLNREPVLGSQRLDLLKVYKLVTAYGGCEKVTSERGWKRITLPFNFPPTCTNSAYVMKSVYVKNLELFEQEDFFGKEVPVNKFETAESNISRSREASQAPSTGSKRGPYLTAHMKQQLQQQQLQQQQQQQQQQQQQQQQQQQHHHHQHPTPQPPMQPHAPSTPAATPAGSTAVVPARPANYLEGYYIDGGHQNRILLALKSELPNEIDWAFSRLIALSFEWNDFSLKMIPGLFNELLAFAQPFFDWWSTLEPKEIEELAEEDLLNMSDAHNMERVLQVFHILRNLSFLDQNTIILTEHMAYRKMLQQGLSMPSSTQLSELRIYCLDTLESLSIHITLRSKFDVYLRELHKLLQTNDKALILGSLRALTRLAANEHNEKILSDIDPEIIDRISQLLLIQDEELIGATLDYLYQFSSFHGDAAVQIAKNFPGNIVSALVRFLSWGSPKSVPPPVTADPAQQILIEPYRALHWVQSNFESSPQAYIYESELFKLYQTKFMAHGPMLRSADLITVSRVGFPKMETVFVQEVEGAPPVQIIKGISKKPWMDFSGADNRILCRWIGCQSVAATEEELFKHTVQEHIAPNMGLYTCQWLSCRRFTTPTIDRQQVIKHLKTHFPLTPTVKPFSNRPRWFDMRPTVLGTRELAGIPLTAVFVLRNLSRQKRNQKLFLPYEESLARIMGEFPKMAAFIVDILTYLRVG

SEQ ID NO: 2191 - protein, 739 aa, unidentified
  REGION 1..739: note = Table 20
TKRICQRAIGQYIERLSTIGVDDTDRELLDLICPRITAKCVAQSESLEEVEERPCLQDDESIKRDKQASFLSTLLQSIYTKNIPTDRGLGRYVRDFIKKAKDFLPAMHGAHEIAIKGSYPASLILKSSATQLSVELKNHYRKGSKELCEKVKALKNIGLLPANTPSEIDFKKSAIENFVALNKACGGRRKPAPLSTFESSFVSLTELDLISVFWRDDDLKTLLREYVKDQFDTDTPSMADIRGWLSSKEPGHLITKLLTDIGSSERGQRKKWKGYNVSKMSLSEMQDHIQVIRDDDFNFNSYNKRGYVPVGSIRTDGFLLQLLAFKLNELNAVKYRRLPKEKLEKLQPRIASTVGGTDYFLTEVRNVVKTKQDVVDLWGCGPQDIKILGVDLGQACVVGASALLPTSQSSDSSAKPKFCNLSVKQKAVYQPTFKFRRWLERRKAQPIDGSQSISDIESSLPPLRGNEGSVQEYVKSLQEVEEHLDSFYNSNNTVKKHRWNARRARDEEFRRIADSLLRMVGGSIGRKRADEDKVVIAVGLGQFSSKARLSSLHESFQSYFVQLARSLGYIVVGCNEYYTSKKCPICKDFVCQVEIRRLYCPNCKTYIHRDVMAGHNICNIVQGHLFEQQRPLYLQPVTKDGVYPWMKNQSSSETQREAPIIDEEPSHRRKGVKRVVPPEEEAPTTDKKPSHRKKGVKRGAPPEEEAPIMDKKPSHRKKGVKRGAPPEEEAPRRGKWARM

SEQ ID NO: 2192 - protein, 487 aa, unidentified
  REGION 1..487: note = Table 20
MRKVDLVRVMQYKHPSETLDIGTVSANVKKALKDQPNLVPEVERCLQEAVHLANDLVNSPLVDFIEHIATPGMVEKSGREMLDLICPRVTNTNCDEVEEEEEDGSRTKNQVSLLQDCSQRLAIMFYEVPLEQMDFVQLSAFKLKELQSVRYRRLPETVLPPKITSTAGGVDYFLVEIRNVVKTKQDAGDLWGCEPEQIKILGLDLGQACILGASVLLPRHARLEGVKNVTMNEPVGQDSQMKVDVPCTKDKDGDVPIGEPCNAIVPTSAPAPVKAIYHNLAVKQKAKHKWDAQRAKDDEFRPIADHLLKLVGGLIGLKRDEANKVVIGAGLGKFSTKTRLSSLHESFQSYLAQKTRSLGYIAAGVNEYYTSKKCPMCEQFVGQVEIRRLYCPTCNYSMHRDVMAGHNICNAVRSHPVDQQRPLYIFNRSIWMGITLGCKMQGHTQKPKVAPAAVLTAIALWDKDKDETKGELVGASEPPPWRLTRLE

SEQ ID NO: 2193 - protein, 1254 aa, unidentified
  REGION 1..1254: note = Table 20
MGVIGLWSFLHQKGYEPVVRHQSTHLFSPLDHSPTLRVDILGCLFLTIRNAYSSHPLDIAHSIVEKEIKLLGTPKSLVLYLDGSPSVEKRDTQIRREKDRAKAMELAQMSINELRDRVKKNLRVRKQLFRAIYKNLKKAFYWSLDARQAFAKYMKQKGWTIIECSTEADLAIAKDSIPGDIVISKDSDMLAYEKICTIWRPISRSRYLVYDIPSVLATLGLNRVQLTVLGVVSRNDYNRNIPSLGSTINFGIIKDLKDLDGIDAEAMVKKYLSHERVVHKNMKGETFEASIRVFVHGIQTSIQSGTPIPTEIATPSETLVQSELPTQSPEQLPVTHEVLWGELDLLQKQYYENRRVLQESREAEKRASTGYKVQRHKSSQTFNRYRTVDRPAPQDAEVAHSVLPQSKTPPYRPRYSIKHRSRIIEHEAPEAMKQYAWKPWKKAPESPICCDTNASETSEKTISQSKPKPKPKSKPNSEPSRPRKQVEHMTKVELLNAMAWEHPIVTLKVGTVKANVTDALDNNEPLALRVTKHLQRIVQEATDIKRSCQHLIGRYIERLSTPGVFQESLDREPLDKLCPRIPSTVKTSDEDEKDDEKEEELRTMREALGKETDYSHFVEMLMRQLHSGKPVLGNSPNAQAMRRFIKRLENLELLERNTKESELPGSALLRSAASQLTVELDKIYRKGSMALYEKLKRLKDKGLLPSDCKIDVDGKISAIENFIHLNKISKNKRKIAPVMPMRRPMLLFTEHQLAILFSKDDFLMNLMQGWRDDITDRPILQSDITDWVATNPPGSFITKLLSPVGRPITERHGPRGYKDSTSMMSFEDMKSHLTPIQQDGFDPRSYTERGYVLRSAIQTDGFRLHLPVFKLKELNSVRYRRLPPSVLPFRITSTTAGLDYYLTEIRNIVKTQEDVTSIWGCEPDQIKILGLDLGQACVLGASALLPPKGITRSEVRKIVRRNLNGGGEDIDLGKSRNTLISTRPPVAFHNLAVKQKAVYQPTFKYRCWLEDKKRNDKQGDAAESISDIESNLPPLHGEGASFETYFKEFNKVKKRLDDFYNCSKSLVKRHQWDAEKARESEYSIITNRLLKLVGGTIGEKRIDENKVVIAIGLGQFAARSRLSSLHGSFESYFVSKARSLGYVVVGVNEYYTSKKCPKCEEFVGQVEIRRLYCRNCKSYMHRDIMAAHNICNVVRGHLFHQRRPPYLQPRDENGGLPWEAQSETGNTSTSIVSGNSSSSSSSSSMAITTENQRG

SEQ ID NO: 2194 - protein, 1062 aa, unidentified
  REGION 1..1062: note = Table 20
MDTLNSPTENNLRLQKRHFTAVVRNLKRAFYWPVESRAALIEYLNKKGWNAIMCRTEADLQIAQDYEPNDVVVTRDSDLLVYDNTNTIRRPVTRDLTLVYDVPRVLETLSYTRAKLSVLGIVSKNDYNHNIPRLGCELNFGIIKSLSEGDAKETLKSYLSHEVVLLKNKGNEKFIHSTNAFIHRTQTLLELDPSVQASESTPETFFDLRTKFNQLCKVLKDNRNRKSRQSNGSAEGVNSKGRAGGFNRYQTVDRPVMPEAAEATQVQTSQIAKYRPRYSIKHRLRKVEYEAPTTMKEYVLKPWKVVPESPDVVPESLNVTASTPLKNKSATPKAKVKPKAKAKPKAKAKQKDPKEMNRADISYAMRWEHPIVTLDIGTLSANIKGALEDEELANETLAWLREAVRTAAKTKKECQFLIGRFIEALLLRGNFVESNRTLLDMICPRIPEAKDASDEEKDDKLPLYIQSLMIYLYSGNEPRKGQKEKKEGPGLVRTFITRAQALGLLGASRHRNEVRRLMTFTPTSLLRSVASQLTVEVRRMYMKGSWEIHEKLLHLRNRGILPENCDIDINHDLSAIENFVKLNSLDGNKRRIAPLSSMQLPFVSFTEGELIEIFWKNTNWRLKEKLKAQVVGIEHNNLQGFQRSCSYSNNVGHMVTTFISSVERPITVRKGRRGLKDKTRTMSPDDLIKHITDVRRGDFDPEKYRESGTAVCSVQETPREKLPSQFTSALGGLDRYLTEVRNVVKSKDDVSKLCGCEPQDIKILGLDLGQACVLGANAILPAVDNSKGYKDDSRPVFHNMAVKQKAVYQPTFKFRRWLEYNKNAAPSGTKSISEIESDLPAVRGDSSSIGNYFEEFGKAEERLRDFYDGDKNIVKRHQWDARKARNTEYTKITDRLLKLIGGSMGQKRDVSNKIVIGIGFGKFSSTMRLSSLHQTFLSYFVQKVRSLGYIVVGINEYYTSKKCPVCENFVGQVEIRRLYCKTCKTYLHRDVMAGHNICNVVRGHLLYQQRPQYLQPVDKDGNYPWMPTSGLLESGISTEVELGESSRQGGGAKPNKKRKAEP

SEQ ID NO: 2195 - protein, 350 aa, unidentified
  REGION 1..350: note = Table 20
VLSMIGGTIGKKGESNKKAVIGIGLGRSGTNANSTSQRSSFNSYLAGKVCSFAYLVVGVNGFYTSNKCRRLAPDEIPPRITSITDSVDYFLAEIRNIVKTKQDIADLWSCQPQQIKILRLDLGQACVHGASTLLPGDNHCEAGGNDLMKKAGPTVYREIPTGATNSISNIENNLLPPRGKDTSFESYRSGLQRVEDELNAFYNGSILFKKHQWGASRVYKAEYAITTDCLLKLIGGSIGRQRDMNCEASLGQFVTKTRFSFLHGSFLSYFAPRTRSLDYIAIGANGYCTSKKPLICGKIDIHRLNCRHCTAYMHRDIMERHNIYNVVCGHLLRQQRPRYLQPRNESGGYP

SEQ ID NO: 2196 - protein, 1194 aa, unidentified
  REGION 1..1194: note = Table 20
MQEAHAIVEREILLLGARKNWILYLDGYPSDEKRAVQLRREEVRKKALVLAQNGIKDPSDRIEKNQRIRKQWFITIDKNLKKSFYWSLDSRRSFAAYMLQKEWNVIVSQTEADLKIASDCNPGDVVMSRDSDFLIYDKVKTIWRPISGRRFLVYDLQDVLTTLGLSSVQLTVLGVVSKNDYNSNIPSLGSSTNFGIIKGLDKTKGAEAMVQEYLTRSQVVSKNVANETFATSLKVFVDREQTQSKSDQALAESDPCTQGSLREHDSLRNNFNRLREKHQELKALRETKKNSESSDDKIQRHKSSQTFNRYRTIDLPACSNTNEADVAHPALPRTRTPRHRPRYSFKERSRLKQHEPLERMKQYTLKPWKKVPENPSDDDPNAPKELPQNAEKKKKEEKEKRRLHERKKKLEIEEKGDDNKRRTRLIRQLKWEHPLIAFKDDLSNPEPDRSVLDEVRRSLQSSVRAVNQVQHACQLLVGRYIQYIIAQDMIQEEDRKLLNCICPPISAPRDANDVQGDAEVDTGPVDDDRKGDKQEQFLRALIRCIYSRKHPKKELTEVILFIDRVCELGFFKMPPKSQINEPMEFNPTDLLQNLGTQLKTQFNRHWRTGTKELYQSLMTRQSKGILPAGIKIEIDNEISAIENFVQLNRIGKNRRKLAPMTPVAQTFVMFTERQLCSIFWKSRILQERLFRIAGERYTNCTDLHNWVSCQAPGFLITQLLSNVGRPEHRTNHEGRRGFKEVTKYMSLDEIEEHLKPIQEEDFNARSYTGRGYALRGTIRTDGFRLQLLAFKLKELQSVRYKRLAPDKIPPRISSTTGGVDYFLTEIRNIVKTKKDVADLWTCPPQQIKILGLDLGQACVLGASALLPGDNHSEVEVAGGDVTMNAGPAVYRNLAVKQKAVYQPILKFRRWFQNKKNEIPAGSTGSISNIESNLPPLRGESASFESYYSELQKVEGELNAFYNGSMLFKKHQWDANKAHKAEYAIITDRLLKLIGGSIGRQRDKDCEVVIGVGLGQFATKTGLSSLHGSFLSYFVPKVRSLGYIVVGVNEYYTSKKCPTCHNFVGQVDIRRLYCRHCRTYMHRDVMAGHNICNVVRGHLLHQQRPRYLQPRDENGGYPWEVTTSERESGRSSSGSSSGSGSSSNNSVTTTTTNKNNNTTSTTSRISRGQNQAGGRKRATSVVLKKEDNSSSKGKK

SEQ ID NO: 2197 - protein, 822 aa, unidentified
  REGION 1..822: note = Table 20
SSSIGTTTQRHKSLQIFNRYRTIDRLPPLDPLDLELAMNETTDMSALGETMRMEGVMAMQAAHPSALPRKAPCHQPRYSFRERTQKKQHEPPKTMKEYGWKSWKEKPKSPSDSDTAPPSQKEKSDKPKKKSGKPKKPHVEGPVREMDKQSLLRALNWEHSTATLDIGTLSANVNRALANEPDLMTEIQRCLQESYWTLSVHEFLTTVKVDEEQDNDDEKGNNEEQDNDDEWDNDEEDSTNSEHMQKFIDRLGSLGLLHEGDPASQLTVRFPLQQLQPQSVKGRLPAECDIGIHPGVSSIENFVRLNKINKNRRRLVPMTPSNKPFISFSEIELFILFWKSNVLKKYLQKLIGSDDYSIVDAQEWFSLQEPEFLVARLLTDAGRGKASQRRKPGAGKSVTAAVHLEFIRQPTFNPNTYDSKGYVLRGSIRTDGFCLQLLTFKLKELKSIRYKRLPANVLPPRLTSTVGGTGYYLTEVRNVVKAQQDVTVLWGCRPEEIKILSLDLGQACVIGASALLPDEPEKPKKGKKVQRDQDGDAPTEEPSGTMKSDPRPAIYYNLALKRKAVYQPIFKLRPESISDIKSRLPPLRGDDANITNYVTELGSAKEQLDAFYNTDMSVKKHRWDARKAFDAEFAIITDCLLKMVGGAAGWPRDEANKIVIGVGLGKFSTKTRLSSLHTSFQSYFVQKVYSTTSGVGVNEYYTSKKCPTCERFVGEVGICRLYCKTCKTCMHRDVMAGHNICNVVHGQLMYQRRPLYLQPMDANGRYVWEQAATSQTVASTSASSSRTSTSASTSTSGQQGARARKRAASEEGPAARCVPRQE

SEQ ID NO: 2198 - protein, 1139 aa, unidentified
  REGION 1..1139: note = Table 20
MILYLDGGPCEEKAFTQEQRERRRKTALDSALVNVAALEHRVDERCRIRKQHHLAIKKHVKASFLWNRDSKKAFVAYMRGKGWDVRECLTEADVEIAKDCQAGDVVITRDSDFLIYSNITTIWRPVTRDKFLIYDVAVLQATLHLNRVQLTVLGITSRNDYGPNIASLGPASNYGIVKTLDGKDPAEMLHAYLSHKLVTIKNVQGRTFEEALRVFAHLTQTPRQSAAVERAQDSVIVTHSAVVARYARACQKYEELKAQNSKQKTTTPAEPVQNSLQGSGRRFNRYRTVVGPPGQGHQSPKPRARYSIRIRRRRALEPEPPIMKRYEWKAFKEQPQSPDTPPPKKPKKAKTPKKPRPPLKIDKMSLVRALSYEHPAASLEVGTLKANAKEAIGNDPDLVDELVSCIRGAARQAGNIKRKTQRLLGLYIEQIQRHGVQPCDVPILDLLCPRITPKEPSRPEAAEEQDEDGDQNEDEICEEGKENSTMKFVSALMRYVYSGKQPKATGVGPMVSAFIRRLEQLGIWARNNSSTPPSQPEYRPTDLVRSVASQLSFEIRKMYRQGTYEISDKLKTQKDKGLLPSHCQVEVDPNKSAIENFLLLNNLCVNRRRIVPMTGSKQPFMTFSEKELAHFFFQWPRLRAALQMLAWPAYPSIKEPKMIGQNAIDIWLSCKHPGILIKHFLSDVAKEGLTKRQLGKAGYKGAVKFLSLPEIRDHLKPLREPNFDPANYDKKGYILRGSVRTDGFRLQLLGFKIKELQSVRYKQLPEKVLPERLTSTVGGVDYHLAEVRNIIKTKEDVSRLWPNTQPEDIKVVGMDLGQAYVVGFSALLPTTESVDRTNSASTSVTPSVQQQGQAPVATFYNMAVNQKAVYQPLFKFRHWSEEHKSIKQTEDQPSISEIESGLPPQRGEDASVFSYITELEKVEEWLDRFYNGDGLRYKRHEWDARRAYEEEFAHITDRILQLVGGSIGAKRDPGNMVAFAIGLGDFASNGRLTSLHTSFKTYFVQKVRSLGYIVLGANEYYTSKKCPVCKQFVAQVEIRRLFCPKCKTYIHRDVLGGHNIANVVQGHILQQERPLYLQPVARDGSYPWATKAITTTSPAAVTTSTSTRRTSRRSSATKRVPKRALSPVQDVKKGKRKKH

SEQ ID NO: 2199 - protein, 628 aa, unidentified
  REGION 1..628: note = Table 20
NQLATELKSHFSRGCQDIIKKLEIKVKKGLLAPDQLELNDNEPTILNFARLNGLLENPRKVLPVSTSAPAFVSFSERELLPLLWKSNVIKAKLVEMSGRPDMNLKFMEWWLSDQEPGRLTSELLTTVGRGRSEGGNQQGYQRSTKIWSFTDVRAHLETLRSDGFDPAQYNKSGYVLRGGISTNGFLIHVQAHKVKELQRVRYRKIAIPSRLTSTLGGTDDFLQEVRHVIRTPEDVARLWPCDPRDIKIVGIDPGQACVFGASALLPSSGLAHPSQHIDKEKTLADTALESAPANRAIDPATSATVSSSFGINSATALTPYRFAVAIATSGGVSSVPPSDAPILASKTASSSSKEAVVYHNMSVKSKAIYQPIFKFRKWLNDGKNDQPEGEQSIQDIESNMPAMRGADANFDELTEYINKHQSQLHAFYGRRYQKHAWDSRRAMEAEYAAAADQLLKMVGGSIGEKRKPDSNVLFGIGLGKFSSSSGLTSLHSSFETYLIKLLRSLGYVVVGCNEFYTSKKCPDCENFVCEVQIRILYCENCRTYFHRDQLAGNNIANVLQSYVLRQERPKYLQPVDAKGSLIWKTGTVTGTSTNTGTGTGTSSCSGSGSVSGSNSNSRTPARRKRCTQ

SEQ ID NO: 2200 - protein, 786 aa, unidentified
  REGION 1..786: note = Table 20
MKQYKWKAWKKKPEPPQDNSNNGKQDNGGQDSKKDKKRARKKRKTEPTPLEDMIKSELVDEMERQHPLASLNMGTLSSNSKAALADKPSLTSDVVTCIKDAVAHVARTVRLCQRLIGQYLELLFTEDKFEEKDREWLDLICPRVHDGDEEGEDTDETAATEADVQASSQCQFMLMLLGHLYSGDLPARSTKNSLALIAFLGRVHELGLLPRGNEPGTRTAMPYPKSILFQNAASQLCGDLKKHYRNGSKEIKTRINLLKGQGRLPGMQPATIDGNLSAIENFVRLNRMDKKKRGFVPMSFGEQPFVTFSERELVCIFWQNTNLKTELQRIAKPSFPRLGANQNPTRADVADIWLRGQPPGYLIKHFISNVGQVGLTSRKKGKAGYKGKTTLMTAEQMRQHLLSIQQADFDPISYSTRGYALRGSIRTDGFRVQVQSFKLRELKAVKYKRLPDNRLPPRLTSTVGGIDDYLTEVRNVIRSPQDVARLWPDTNPDDIKVLAHDLGQVNVVGAYAYIPDTAPTSAAPPKPAQEKVVHHNLAVKSKAMYQPQFKFRRWMEGQKKIVPPGESSSISDIESGLPALRGEDASVINYVKELSKVEDRLDEFYNGNEMQYKRHKWDAARAKDTEYNQLANSLLKVVGGNIGEQRKDSNKVIIAIGLGQFLGTPGLTSLHSSFMAFFVRKARSLNYIVIGVNEFYSSKKCPSCEQFVGEVEYRRLYCQHCRAYMHRDIMAAENMCNIVRSYLQYQRRPAYLQPTDSKGRLLWSSSGSNNGTGHDAERAVAGGSRI

SEQ ID NO: 2201 - protein, 1278 aa, unidentified
  REGION 1..1278: note = Table 20
MTIATGRHRRLDVLSTCYRVICDAYSNHTPDVAHRMLEKNIMRFGTTLDMTLYIDGFQAVENSDTSAVREQIRQKALERTSTALDTFESRLNSDQRIRKRHFTYVRAGLASSFHWSLESRLLFVRYMESRGWRVKFVETEADVAIAREVTPQDVIISADSDMLGYMTIHTLWRPVSDGVILQYSLATLLLTLGLSRAQLTALAIVSRNDYNRNIHSLGPVTNSSIVKSIDQADPRIIVGRYLLDKQVISKNTSSEDFALSIRVFVDMTQTRAGFKADTQVVYKQLQVRFKELCSRHENAKRIRDTKILAGGSGNDLVRLHAPKSFNRYRTVESPVYIPEDSGAPSQQISQVKHNGTSSISSDPKDLSHPALARTRIPRHRPRFSFKQQSGKVDHPPPPKAKQLRWKAPKEPCQPPNITSTSRTESQKHIKAKKMDAPLSDDPTRSYAEMDKKRLVRSLGWHHPRSSLIIGTLEANAKRVASEDPRVQEEVVKCIKEASEAAADVKRMAQRLIGRFLETLQIRMRLAEDARRRELARVGVEMSEADRQKARYNAITEDERKSLDFICGRIGPKAKFDQDDGGSSNAVPLDEEDKDDIHYKFFMCLLTYLYSNNLPDRNSKSGKAVDTFIHILVRLDLFHIIRDRSEINERFVFTPNALVRSVSSQHTAELARMYKNGSYSLSEQAVALQRKNLLANNLDTSIRNTISAFIADIDPTGISNRKRRRIGHRSAIRLYSLDNIRHHLQYIEDTPPKEYQSSGYIATGSIVTDGFLVKVQAFKLKERQDARYKRVSEEQLPVRLTSTVAGVDYYLQEIRNVFETEDDIHRVWPGKNMERIRILTIDAGKACVVGAFAHLPQDASGSNKEQGSVAESSTEDTTLTDQLPSTSLVPASSMSMPTSLVPASLMSMSTSLVPASSMPTSLVPVPSMPTSLVPASSMSTSLVPAPSMSTSLVPVPSMSTSLVPVPSIPTSLVPASSMPDLSTPVYRNLAVKAKAVYQPQFRFRRWLEAEKKLRPEGEEESVLDIESRLPPLRGETASIINYLDELERVEERLKTFYTGNGDRYRRHKWDRYRRHKWDLQRARQEEFKAIAESLLNSVGGSLGRKVDDSPSADPVLIGVGLSKFSCKVGLASLDSSFLSFFIQTARSLGYIVVGLNEYYTSKKCPRCEQFVTQVTFRSLYCFPCKRYYHRDCMAAENMSRIVLERLKYQERPTYLQPINADGSYPWKTASAASPNTTTSTRSTSATTSAGSTRQTLKRRSETVTRKEEEGGRRDKTARV

SEQ ID NO: 2202 - protein, 772 aa, unidentified
  REGION 1..772: note = Table 20
MLQIRMKAAEESKRQELRKAGKTMLESERLEARRDAVTVDERDTLDYLCGRIEPLANKCDDADADGDDIQEDSGDLDAEGKDNKHLLFLRSFLTYLYSRNLPDKNSKIGKSVNTFINILVGLQLFDICRNRSELNETMLFTASFLVRSVAGQLSVELKKMYNNGSHLLHDQVKTLKDKGRIEAHIDIRIQENISAAENYLALNELIPNSWRLAPVTSSKQPFVTFSERELAAFFWKRPLLKQRLVELALLDEDITTLTSIKDLEDWIGGREPGVIIKHFISDIDPVGLSNRQKRKAGHRGAISLISLDQIRDHLKLVEETKPRDYHQGGYIPQGSIRTDGFLVQVLTFKLRERQDARFKRLAEEDMPSRITTTVAGTNSFLQEIRNVIRSEQDIRELWPGKDVDRMKILTLDGGQACVVGAFAHLPNGLAGKEKAEEGSSMDGIVITNQESTSPFSQWATTLNPVPASASTFTSAQPPVTDSLVTLSKPAFYNLAVKQKAVYQPTFRFRRWLENEKMATLQGEEDDSIAYIETHLPPLRGQGASVVEYARELEQVEQRLKKFYSGDDHRYQRHHWDMRRARQAEYQAIAESLLGIVGGSLGRRVEDNKSTDPILIGVGLGQFSSKSRLSSLHSTFLSYFVQKARSLGYVVVGLNEYYTSKKCPRCTHFVAQVTLRTFYCFHCQIFHHRDVMAAENMCKIALGHLVRHERPDYLQPINADGTYPWKASSDEGSSTTSSSVAISTSADRAPGRRKRTMTASSQDQGRRGKSTRA

SEQ ID NO: 2203 - protein, 1316 aa, unidentified
  REGION 1..1316: note = Table 20
MGLFDWYPFIRKKGYNPTVLYQSVLASLTTGTRRFDVMANCFPVIQQAYSNQNLPPDDAHRILENDIKRFGDPLNMQEKMDTAKARDAKRHKALNRTEKSIKVFEERLNSNLRVRKRHFTDVKAGLKSSFHWSLRSRQEFANYMRHRGWTVIVCRTEADLAIAMDAQGIDVIISDSDMMAYQSVTTLWRPVSNNLILVYKIPDVLATLGISRTQLTALAVVSRNDYHKNIYSLGPVTNFSIIKSIGSRPDAREIVTAYLTHGQVVVKNTKEETFENSIRVFILLQQEPIRPLVQESQALQLFRVLQHRFNELCIKHQSIKNIRAAGVKERPKDDIVRLPSPKTFNRYRTVESPAAISKTKTVTTPQPARGPSQQISSDSSPSQQSTSVMSAPDADGHPPLSRTRIPRNRGRFSFKERTRKVVHAPPPKAKQFKLKFYQERPETVNPTPAKKTTSKANKPPQPNMKPIADKDKSGLLRSLSWHHTTAWLEIGTLEANVGRVSGDGATLGNPEIPLNLNIVQQEVVDCLQEAVQSAATVKRNAQRLIGEFVETLAVRMHAAEETKRAELQKLSPPMTMTNVERRKAKRDAVTKDEREILTHLCVRIKPNAADKEQQDVEQKEEDNTDLDDKGNLEQKFLRPFLAYLYSGNYPSKTRVGVVVNKLIDWLTDHGFHHPIRARRDLNETMPFTPSMLVRSISVQLAVELQRIYGHGPYDLHKQATAMVAKHLLPPEADIGIQDDISAVENFLQLNRITGNRRRIIPLTSFELPFVSFTEPELASFFWKRESLKTRLTDLVAEDGSPVNTLFDITSWIAGKGPGIIIKQFIADVAPQVKTSRQRRKAGHRGAIKLLTLEQIKSHLTAVQDKWVDPINYATKGYILRGSIRTDGFRLQLPAYKLRELQSVRYRRLEPTKLPPKLTSTVGGTDYYLQEIRRVITCKEDIEKLWPGVPVERIKTLTLDGGQVCVIGAFADLAEDVLSQSKGMDNANESSMEDVTTTTTTTTTTTTTTVATTTPPTISNRLMQLPPYRPKSPSRCHSHKAVYQPTFRFRRWLEDAKQEQVSVDGQQVSISDIESRLPPLKGQGSSVINYVQELKRVEECLQKFYAGSGNLYKRQKWDMERARDYEYQLIANRLLGIVGGSLGERYDPSNPVLIGVGLGNFSITSGLSALNSTFLSYFIQKARSLGYIIVGLNEYYTSKKCLHCGHFVAQVTLRRFYCPECQVYHHRDVMAAENMANIVRGYLEKQERPEYLHPVAADGSLPWMAKAGAGPATSSTAASSSSNTTTAINRPKGSRKRAASTSSSSRGRRGKVAQEDK

SEQ ID NO: 2204 - protein, 155 aa, unidentified
  REGION 1..155: note = Table 20
MTLTLDGGQVRVIGAIADLAEDVLSQAKGKENANESSMEDVTTTTTTDNQTTFLNLAVKQKAVYQSTFRFRRWLEDAKQEQVSVDGQQARSLGYIIVGLNEYYTSKKCPHCGQFVAQVTLRRFYYPECHVYHHRDAMSAENMRTLCEDIWKTRAA

SEQ ID NO: 2205 - protein, 671 aa, unidentified
  REGION 1..671: note = Table 20
MQEAPQLAAHVEHEAQRLIGRFTETLQNRMDRAEEDQRINLELMKPPLTMSENCRLHAWKNAVSEVERNILLLFCEQAKPKDAEEDKDDAGGNYPKSTSKAGAVANDLTDWLVKREVYNSVRSLTDMKVTVPFTPGHLIRSVTDQLAKEMKLIYGRPLKDRMIHLVTLDNMTVTSTIDFDKWISGKEPDFLFKYCIADVTPQGLTSRQRRKEGHRAAVKLLSLDQIRNHLDVAKNEWLDPVTHAKKRYVFRGSVKTDGFRIQILAFKLRELQYVRYRRLDDNRLPLRLTSTVGGVDYYLQEIRDVITSKEDVARLWPGVQPEEIKTLTLDRGQTSIVGAFADIPRTRERMEMARRLTGHIQPWKGSHHFRGTDSILDILNPSSCPHHSFHPRSTINKLPNGVVKDGVSQYGSQTKAVYQPTFRLHRWLEDEKQATQEGKQETIAEIGGRLLPLKGQVASVVGYVAELKKCHKWDMKRVRHYEYQLIADRLLGIVGGSVGRPRESSNPVLIGVGLAKFSTRSGLSSLDSNVLSYLIKLVQSLEYLVVGLNEYYTRKKCPRCGLFVAQVALRPFYCPEYHVYHHREVMGAENMANIERGCLEKQERPEYLHSAAADDSLPWMAKAGAGPATSSTTSSSNTTAAINGPKGSRKRAASTSSSSRGRRGKAVREDK

SEQ ID NO: 2206 - protein, 1092 aa, unidentified
  REGION 1..1092: note = Table 20
MRHIGHADSMLIKNAYSNHPQDKTNTILEEHVIIWGSRDNLVFYVDGGQAVEKQHTTEIREAAREKASVKCARSLDVLEDRIDNNLKVRKSHFTNVRSSLASSFYWSFDDRQSFVTHMAQSGYMIRFCEAEADVAIAADCEPNDVVISGGSDMLAYASITMLWRPVSKSLFLVYDLPNLLRDIGLSRAQFTTLAIVSSNDYNRNIFQLRTIPLLSPWKEKRAQGVHSAVAYPSVTQSLQDCRITYILRSQDLSLALAGFHLNCPRRRSGCSSYSSGQGTPTIAKNEDPRNRPRYSFQQRTRKIRHSPPPRMERYTWNPHKASPESSVNHNTSTPAKSDAPKKRSPLTSRPVPTNKDKFVKALAWHHPLVTLEVGALDTNIKLVLASEPNLQQEVKQCVQEAAQLAAKIKRGAQRLIGQFIETIGDPRNFEATDRRILDHICERIKPKDQDDSNEQEVDTTDLGDNGNIQWQFLQSFMCYLYSRNYPKRLGVGEVANDFIDRLEKLKLYEPPRKRIATKVVMPLTPNFLVKSVATQLAAGLKRIYRNGSFDLYDKLKTKRDKGGLAETVEFRIREKDSSIENFVRLNKLSGNSRKISPVSSSQQPFISFSERELVAFFFKKDSLKKKLRDMMGLEYAALADVDNWIATKEPGFLIKRFLADVDPQGLTSRQRGKMGYRAAIRLLSLDDIRTHLQNLEDPSFDPNNYSRKGYILRGSVRTDGFRIHLMAFKIRELQMVRYRRVSEDRLPSRLTSTVGGVDYWLQEIRHIISTKEDLERLWPGTRPEAIKMLTLDAGQAYVIGAYAHLPFAAATTCPTDAPLSASLPGAVKPSPSQESAAARPTDASSSTPSTNIAGPGSFQDLDAARPADALSTSFQESTFVLPTETVPVTSLNLAVNQKAVYQPQFRFQRWLEGEKEAVPEGETKSIADIESALPPLRGDGSRVVKYTAELKGENRLLEFYNGDNNRYKRYQWDLRRARQEEYSAIANRLLSIVDGSIGRIKDKSDPVLIGARSLGYIVVGLNKFYTSKKCPICHEFVAQVTLRRLYCLECQVYHHRDVMAAHNMYNLARGYLEDQQRLSTSIPEHKTDRTLG

SEQ ID NO: 2207 - protein, 1106 aa, unidentified
  REGION 1..1106: note = Table 20
MLPLKVSQVNKDQLPLRLTSTVGGIDYYLQEIRNVIMTKEDVVRLWPGVQPEKIETLTLDGGLACIIGTFADIPEDSQVNGKGKEVDWTHSTMEGIIATSVEPTTFSTSSTPLPVPISVSTPDQQSTNLPMVSSRTVFCNLVVKQKAVYQPTFWFHWWLEGEKQKLLDMGEEQETIAGIETGLPPSKGEGASVINYTAELRQVEERLFEFYAGRDHLYKHYKWDMEHARQYEYQLLANHLFGIIGGSISLVRDPENPVLIGVGLGKFLMRSGLLSLDSSFLSFFVQKSLGYLVVGLNEYYTSKKCPQCGLFVAQVTLCHFYCPKCHVFHHHDVMAAENMVNIAQGYLEKQERPEYLQPVAEDGSLPWMKRAGTGPRTSSTITPGQGGSSSTSTSNQSPGCHKRSTTASSTTDGAPGRHKRSTIASNSSPARQGKEATSWNLMGSGEASVQRGRRHKATATYIGMCISPQRHDQIPVINQHLINGISFLNEFRDFCKERANIERDYAHRIETLVRKYQHKKEKKTTMTPTSGVPLSPLEPDFDPSLPDGTTTLRAWTSILNDTEALSKDRQMYSEALITRVYDPLKGLATKKDEARKKHIHFAQKLLSERDRSAQERDKAKSRYDASCDEVESSKQKQERAYDEKNQEKLRKTYYQDILDMNNSKNSYILALQVLNTHRKKYYEQDLPELSNNMQVLDESRIEGLKGIWENYIGLESKLTTDTQAHLDSMVQAVRAVDASVDSAVFVRSQRIPWTLPPDQPFESSPTINDTEELVIDDNAQVFLSNKLMKLRRKQAQTTVDIQGRLKDMEGLQNLKEAYTGSNSMGDPEEVQENILETSRAITVLQTMSALYEAEINTIVQNMGETGVQNQPHDFKAASFTIPTSCDYCQSTIWGIAKQGFTCRDCGYNCHSKCEMKVPPNCSDVKGGAKAQRNSVIQPSSTFNTMSSLPPELAPVATPISELSPRPSTVVRDSGSNASLNQLQAHVIYDYDASGPAELSVRAGDVVVIVEPDDGSGWVACQLKGSQPGLIPASYIEIEQFYEAPSEASSVQQVRAMYDYDAQSDLELSIRQGDVIVLTSTNCSEGWWEGTLRGVTAQFPASYVEMI

SEQ ID NO: 2208 - protein, 1401 aa, unidentified
  REGION 1..1401: note = Table 20
MSLFDWFPFIRRKGYNPVELYHVIIDNLSTTSRRRFDVLGSCFPAIRDAYSKHPQKEAHSVLQKQIERFGKNNNMTLYLDGPQAVEKSATAETRESKRQKAIEKLSGRLDTFETRIDEGSRIRKQHYNDIKKDLGSSFYWSLDSRQDFAEHMRGQEWIVVVCDTEADVKIASDAQPGDIIISGDSDMLGYANIHTLWRPVSKTVILAYFLPDVLRTIGLSRAQLTALAVVSKNDYQRNIKGLGPASNFGVIKRLPGLSDPRLIVAAYLSDPTIIMKNKQEATFNDSIRVFLEMKQQQVMDPFRPNPTQAVYHALQKRFLDLCQKRESLNDVKGSEAQPRPVEEPIVRLRVPRSFNRYRPVESPANVAKDTGTHPMQSEDSGHPALARTRIPHHRERFSFQERTRKKAHAPPPRMKQFTLKYYRKPLETTNSKSTPTKPKTSVKKAPSSARKPLTEMKKVGLVRSLDWRHPSVSLEVGTLNANTKRVFMSGCTSSTTPPPTTPGSISLSPTTPSLLASNLQRTVVECLQECSRLAADKKREAQRLIGVFVETLRIRMDSAEETLRIKLLAEKQTLTEEQRIKARRDEISDTERQILDHLSERTKPKDEEEDEEEDEDEDAADSKRQINSDLDEKVSNQEGFLLAFLTFLYSGNYPRERDLKGFGPRDFLPKDKGNDEDKVKNKKTNAGVVVNHLIDWLVAGHFYKPLRRRDEIGVKMSYTPTNLVRSVAGQLAVEFKKMYRNGTYELHKKVQTMQQKGTLEASIDIRIQEQISAVENFLSLNKHTNNSRRIVPITTLQQPFVSFSERELGAFFWKREVLKRNLCELALQDGTRLYSIDDLDSWIGSKEPGFIIKRFICDVGSEGLTSRKKKKAGHRAAVRMWTLDDIRSHLQQFLPEDEKKVKANAKVDKEDDFHPAMYKEKGYVLRGSILTDGFRVKLQAFKLRELKDVRYRRWREDRLPPRLTSTVAGTDYYLQEIRNVLTCKEDIQRFWPGVDVKDIRTLTLDAGQACVIGGFAHLPEELAKKTKGKEIVKDLSPNDIVASEHLAPAFVSTSPASSSSTTASSLTAHDTSFGSSSNDLTPLSIQNVFSSTTSAQPSTASPVPSLRPVFFNLAVKTKAVYQPAFKFRRWAKSEKDSTPVGQDRSVTDIETHLPPLRGPSSDVINYIKELERVEEQLKGFYNGPDAKYKKHKCDMQRAIHGEFQLTAHRLLGIVGGGLGIRSDPSKPVIIGVGLGKFGTKSGLTSLHSTFLSYFIPLARSLGYIVLGLNEYYTSKKCPACGLFVAQVDLRRFFCSHCQVYHHRDIMAAENMANIIQGYLFDQQRPDYLHPIAPDGAMPWKQEPSGGSSKSSGTVGTTSTTGPTSTKTAAGGSTKAAPPSKRQRERSSTVSSLEQSSSKARK

SEQ ID NO: 2209 - protein, 1116 aa, unidentified
  REGION 1..1116: note = Table 20
MKQAGWTVRICDTEADLAIAADCQPDDVIISADSDMLAYGSVSILWRPISKYLVLEYKLADVSQQLGLSRAHLTDLAVVSSNDYNKNIYSLGPATNYSIIKSLEHKDTKSIVSAYLAHFKVSPKNTEGKTFEIALQVFVDLKQTPVDPENLSEPGLSFNDLRKRFADLCLRHEQLKKGRLSEKSPPKDNINSASKRHIVRLRSSRTPNRFKTVESPAQKHSGARTTTPQQAIQPSPLDQPVPGAQSQQLASTTQCSSSPQEQDGHPPLPRTRIPQHRHRYSFKRRERTQAQKRPPPPKMKQFVAKPYEEPEHKPEKPKPKPKPKPKPKSLSTSTATTEKLTITRLMAYQHPTTSLYLGTLSANVKRALPNQDDLQKEVMAVHQKASSEAARIKRQGQMLIGEYIEHLVKKGLESLDAEDRKFLDLLCPRVSMNNIKDDADDAMEDDKDGDEIVGVVEEEDDEEDDGDEDDTDLEGSGRDDKEQRLFLGSFLTYLYSGNYPKKSDAGEKVTKFIDHLEHLGLCNPPRTRSQINETMPFTPTDLVRSVVGQLKAELKRMYKNGTCDLHKTLRKRVSKGLLKRSNEEIQIQGDISAVENYVALNKLTQNSRRIAPMTSSEQPYIGFTERELAGFYFKSGGKLKERLVELVSKDGGYATTNEVKRWIGTKEPGFLFKHFVADIDPQSLTSRQKGKAGRRAAIKLWSLDALRSHLQKLEEPGFHPGEYAEKGYISRGTLLTDGFGLYLLGFKLGELQCVRYRRLPADRLPPQITSTVGGVDYYLQEIRNVIRTKEDVARLWPEIDPHDIKILTLDAGQAFVVGAYAYLPEDPDAHYNLAVNQKAVLQPVFRHRRWLEGEKEATPDEQTESIAHIESRLPPLRGPGANLFDYINELEKVKERLSEFYNGNKNRFKKYALDMERAKQTEYQAIAASLLGIVGGSIGQHRDPANPVLVGVGLGQFKSTGRLSSLHSSFLAYFIPLARSLGYIMVGLNEYYTSKKCPDCENFVAQVNIRQFYCIRCRRHHHRDVMAAENMSKIVRGYLENQKRPLYLQPRTADGGYPWEVAATSSNSSTIDAGTSSSASMATSSSNSSSAPPRSHKRSSSGSNQPRGLDKKMAKV

SEQ ID NO: 2210 - protein, 611 aa, unidentified
  REGION 1..611: note = Table 20
MDDVVTTLGLASRNHLVVLCIVSHNDCNRNIYGLGCATNFKIIQDMPLVRMDVPTMVAAYLSDKRVHKSKKSVFRCIHQGLCAQRTIADSLPTDFGTEGSVTITLARNLDSPLSDLSFTLTLEDVKSRFEDAKKQHTERKKNEAERFVTFSERELLVFFYDQSFLANKIRNLAKDEFPNGVAVTYLENLVGSKARYRGTIKSWSLDRIKDHLRGLAQGAIKPKDYTTKGYLLQGSIRFDGLEIQLVAFKMELQSARFKRSQDAYDPKKIKVLRIDLGQACVVGASGLLPDALDFDKKGKMKHSDQNTKGKMKVISTSTAPSFSASTSTPAQPKPILFNLTMKQKARIKRRNCLLLGKDASVVKYFEELERVQDRLGDFYNGGHMRFKRHGWNVSRAREEEFKAIANRLLGLAGGSIGEKRGPKNLVVIGIGLGQFSCKIGLTSLHGTFISFFVQLARSLGYIVVGINEFYTSKKCPIRFEFVCQVNIRRLYCPNCEQFFPHNIMAAHNMCNIVKSHLLHQRRPKYLQPIDEDGKYPWMEDDGSNSSPESLAKDSKSSAGSTLVPGSKRRKLIDDDEHSLTPVRGAKRRQLEEDVKPSIQTSEVPGSEDPTL

SEQ ID NO: 2211 - protein, 1322 aa, unidentified
  REGION 1..1322: note = Table 20
MPRRARVDNTNNKVRVDVMGSIFSTIQYAYTHCSREAAHALVHKRLRKLANPLISVLYFDGDPTTVKESTHDERAKVRRKAEVLADEKINEFEVRINNGQRIRKQHFVGIQKQLSRAFQWNSEDRLSLIDYLRDHQWIVQLSPYEADVHIADDCAPGDIVISGDSDLIIHPTVTTVWSHNDYNKNIYGLGCATNYKIIKDLPKAETDVPKLVAAYLADSRVVIKNTDHLDFRNSIRVFVQRLQEGVKALPDLDAHSGNRLRKRFEEAKKKYQERKKSEVAATLAKKRTIDQPPPTDVKQGNVTAIRTRPRYSPKRRSKSKKHAPPKAMTLYKWKAWKKKPETPDDTSTTTDAKIKELKPKKYVSPKNKLKLLRSLSREHPIVSLDVGTLRANVRSALKVKVEPTSNDGAGLPDKVNPTIGNGSLVEVGKAVGLDMAVEAGLTEASTVQVEAGVAERVEVANAVVACLRGAARQACKVKRRCQGIFGRYIERVTVGEVSPADRRFLDFICPSIPSKDLTSTDGANQKQDDDDHKLDQQEAFIGCFMRYLYSGKTPAASYTGASTASSGEASKVGQSVMEFITRLKQLKILESRDQALMKDGPEYTPGSILRSVATQLAVELKRIYHHGTYELQEQFKAQWDRDQKAKQEASGLEEAPKAEQKAKSGKHSTTAEKGTAQDSKAASVDKELLLKMKASNGAESSKKVATVGPDLEIHRNWSAIENFLRFNRRSSNPRRIVAMTPQEDRFVSFSEKEILAFFWGRPILKAVLREFTSAQYPSGVALNDLYEWLGKEPPGYLIKLFLSNIDPKGLTKRQRGKAGYRGGAIKLMSVAEIKQHLSSLRPPNPTDFKPDSYTTKGYLLHGSVRCDGFRIQLTAFKLRELLCVKYRQLPEDQLPLQLTSTVGGLDFYLTEIRNIVKTKSDVERLWPNVDPNEIKVLCIDLGQAFVVGACALLSDSFITVPCDKMVLGTSDETPSSSASSTSASSSTLSTDSSSSATPTTTVVQPNPAFYNLSVSQKAVPQPTFKHRRWMEDQKKIVLQGAQESIADVESELPPLRGKDANVDEYLEVLEQHHDRLDAFYNGEDMRFKRHSWDAKRARVKEVNIIANRLLGLVGGSIGAKSKDDNHVIIGIGLGQFTSKGGLTSLHKTFLSFFVQLARSLGYLVVGVNEFYTSKKCPTCGEFVCQVNLRRLYCQTCQAYMHRDIMAGHNMCNIVKTHLLTQTRPLYLQPIDEEGHYPWMEDSESNRIDAGTSRGLPSQNPKDKAETVGPTQRVSKRKSTDDSMPGDGSVRQDKKRKAVTDSNPRVSQSRGPRKRSQVKKDTR

SEQ ID NO: 2212 - protein, 1347 aa, unidentified
  REGION 1..1347: note = Table 20
MGCRNLWRFFAKKKHKPSKRYLHDQHSALATPENRVRIDIQGAIFQTIRQAYTHCSSLEAAHKLVLKHIRKIGRREDSVLYFDGNPAQEKQGTHQQQASAREKALRAAEENVEEFAERVQTGLRIRKQLYINIKKNLAKGFYWDPEARESLIVYLENEGWTVTRSPTEADVQIAADCKAGDIVISGDSDLAIHPSVSLIWRPISGYKFLEYKLEDVMAALAISKTQLTVLGIVSHNDYNVNVHGLGCSTNFSIIKSSSGTDIPGMVADYLANSQVIVKNKDKLDFDASIEVFAFGRQTPILRQESNLCALTVDRINDKFNNAKERLAQWRITEAEATLLSKIAMTDRVSRHKASQKFNRYRVIDRPTPQGKKPLINRSTTYVVQPGQPVPHVPLATYRPRYSVKSHVRKAHNPPNAMKQYKLKPWKAKDPIANETPTASVTDKPKAPSRGPRLPSIERMSKAQLVTALSWKHPTVTLDIGTLAGNVNNALKVKDISRDPIELAEDSAVAKETIDCIRAIAKEANRVKHKCQGLFGAYLERINRDGVTSYDKEILKEFCPPIPQKMIENAAFNTSPSYQDSTIDDDDDTSDRQVQFIGCFMRYLYSNNYPRDTGVGTVVNRFISRLEQMEMHTPVRIRGSIDKKSEFTSGLLVRLASTQLAAEMKKIYWEGSVQLLEQLRTKFERDQKANTPNIRADKDKNTNTLKDADTVGDLGSAEHTADDRDTVPNRNRDKGTASNGKKDGSSRQLDSFTLSISNSMSAVENFLNLNKLAKNARRIVPMCSQEGRFLSFSETELLGLLCSRPLLQDRIRSWADHDFSTKPSASNLQNIWLDSKEPGFLIKMLLVDVGPKNLTSRQRGKAGYRLHTMADIREHIDPLRQDTFDPRHYDSKGYALRGSIRTDGYCLQLLGFKLKELQRCRFNRACRYPLPPRLTSTIGDLDYHLTEIRNVVKTPADVARIWPDCQPDAIEILCLDLGQAFVAGASALLPETARSTMLTQSTPLISSIAPTPPVTSNQVFHNVAISQKAVSQPTLQHRRWMERVKSIVPEGGESSFNDLECNLAPLRGESASIIEYLEGVRRIQGPLDDFYNGNNMLFKRHAFDAKRARQEEFIKAANRLLNMVGGSVGCKRKPENMTVIIIGLGQFKSSSGLTTLHGSFQAFFTQLARSLGYVVVGVNEFFTSKKCPTCEQFVYQVNIRRLFCKSCKSFVHRDILAAHNMCNIVKSHPLIQERADYLQPIDEDGNMPWKKNDSAAPTHNPSATSSPLPKKAQKIKAPPAQNPSSSNRSSKKTQKSKVPPTQDFSPALSRPFKRSNIDDEPQPSSAPSRPSKKAKPVPNVSSRDLAPR

SEQ ID NO: 2213 - protein, 946 aa, unidentified
  REGION 1..946: note = Table 20
ELMSIEQIKNHLRNIQSSAFVASTYDTKGYLLRGSILTNGVTMQLAAFKLKELQSVRYKRLPEDKLPPRLTSTVGGTDHYLTEIRNVIGSKEDVTFYWPNCSPENIKILCLDLGQAYTAAASAILPDFASSNSPSKGKTPDKTATSTLITTAATSTTTTCNSSAITPMSASSTLPPQGTHVFHNLAVSQKAIMQPPFKHRHWIEEQKRLVPPGASKSVEQIESQLPALCGEGASVVDYLTELDKFQDQLDIFYNGNNDIYMKHEWDAKRARDQEFKVVANRLLGVVGGSIGCKRKDDNMVVIGIGLGDFSSKTRLTSLHGSFVSYFVGTARALGYIVVGLNEFYTSKKCPVCQDFVSQANLRRLYCRNCGVFMHRDIMAADNMCNIVRGHLLEQRRSRYLQPVDAKGHYPWEEECDCGLEDNTDSATKDVTKSNADEHKRKREELSKKPEGASTSEIEAEGDVEAVPPKKIKPEVDASETVSKAEVKQIQRNLKTMPLEDSSKATEDSKDMDDVESDLGSAEDGAQDKQMESSSQPTPIKADTPDESSPPSDQETEQASDSNGTPKTTDHTATTSSGSQTKLGSGFSNTSSASPFANVKPGENVFGSSSSTLQGMSATSAASPFANVGKSTNVFGGSKPSAFSGGFSNTSSVSPFASMAASTNVFGGESAKDVFGGGSAKSAFGQGSTTTASAFGSSAFGAPASPESTSGSVFGAQSVVGSVAGTNKPTSTVGSKFASNSQPATTGSFSTFGAKNTFGAKEGSFSAGSFISQEGSQEQADFGDLLSQEAQNKEDSEQPEESERSFGVGVFSGADQIDVQTGEENEMTIYQTKGKLYADAEKTKTWKERGKGTFKVNVGRRDTKVARLVMRTDGVLRLILNISIFPEMNMSISGDKYIYFMGIEEGKPISFLLKVKDAATADEVVQHINRAADRQLKGKGQGVVLRD

SEQ ID NO: 2214 - protein, 1054 aa, unidentified
  REGION 1..1054: note = Table 20
IQTPITPTPLPNSDDMDVLTVERVKARFAEARRTNDRRKKEREEIRRNAKSGSPQNSVRRHKASQQYNRYRVIDRPPLNDNPKMPNNNFKVPNNNPKGKKAKQDMRLSSTTPIWRPRYSGKRRTRKISHDPPPSMKQYCLKPWKTSPVSPAEDAIIADTNSTKPAKKPSKPYQKPTDKLSLMRALSKEHPIVTLRIGTLSANVKRSLKVKSEVAEEPAVARESVVAEGAVMAEDSAVALEVILCIRGAVREANKVKRRCQGLLGTYIEKVTAGDVSTKDRNFLKLLCPPIETKNSSNTCPNAHDQGNVNIDDDNRKRDDSEKFIDCFMRHLYTGNHLTRQGIGPNVAAFIKRLEELKLYQPRDRSAMNQRADYTPNGIIRSVSAQLALELKMMYTLGTIELQEQLKAHRDKEEKRAKLLKLEEDSSSVEDTMQNQNELEIRKDWSPVENFIKFNRMVINPRRIAPMSPRKDGFVLFSEPEILSFFWARPVLKGKIRELVHEEFPSAVSLTDLKRWLGTKEPGFLIQRFLADVNSEGLNSRQKHRMGIRSAVKLWTTSAIEDHLLSIGLGTVDPSTYNTKGYVFQGSIKTNGHSLQLLGFKLKELQCVRYKQLPEDRLPDQLTSTVGGVDYFLKEIRNIVATKEDVARLWPHCASKDIKVLGLDLGQAFVAGVSALLPEQVESERKGKFKSSLSLPFLDTSSSLARSAPSKPSISSTSSVPLVSSLYSASPTPLTSSTPSAPLTPPATMPQPGIFHNLAVNQKAAYQPTFKHRTWMEGQKAIVSPETTMSVAHIESNLPSLRGNDASIHDYLLELERTHDQLDHFYNGDNMRFERHAYDASRAKEQEFNLMANQILKLVGGSIGAKRDDKNMVVIAIGLGQFAPGSRLSSLHGVFMRFFVPLARSLNYIVVGINEFYTSKKCPICLDFVAQVEIRRLYCKNCRTFFHRDVMAGHNIANIARGYLLEQERPEYLHPVDQDGNFPWKKTSVGAGAASSSSSTSASSTISTITSPTTTKSSTRKVGTDASTQGSKKRNPAEKGDPQEGRRGKRKIGVD

SEQ ID NO: 2215 - protein, 898 aa, unidentified
  REGION 1..898: note = Table 20
MMIYSSISVVWRPISGGQFLVYNIDEVLSTLDLNKNQPTVLGVVSHNDYNKNIYGLGCATNYGIIRDFTEGMDVPSMVEVYLTDSRVQFKNKDKLSFATSIRAFVDGRQTPVSPTTDGSSDDPGTLTVEKVKARFAEARSIRRQRKSELEMARRASKRTQQPSYIGLGETGKSSCRRDQRQTQSEGSAKAPSLKLARPVGLMDKKQVIQALGWEHPPTMLRVGSLSKSVKSGLKDDVAVAKEAITCLQDAVHEAYEVKRRAQRIVGMYVERMAVGDLVLADREYLDLLCPRIVPEESNNGDNIAHINSDDDDDAKKDRQQQFLNGFLRFLYSEYSISATELVRSVSSQLTVELKKMCSNGTREIQKRYKSRKEIIALIWRRPTLKVKILELVTPVFPGCLALNDVTDIWLRDREPGFVIKSLLSDVAPVGLTSRQKGKVGYRAAVKLMTISEIKDNLLTIRQPAFDPRTYATKGYVLRGSIRTNGFSIQLAAFKLRELQAARFRRLPEDRLPPRLTTRVGGLDYYLTEMRNIVRTKEDVAQLWPNCAPDLIKILCLDLGQTCVVGAYASLPDSTCSNDTSKGKNHAASTAMDIPTTSTLAAVTTLTSPQPQVFYNLSVKQKAVSQPSFKFRRWTEEQKWIVPAGATESVEEIESNLPPLRGDDASIMDYVEEIQRAEDQLNESCNGNNMRYHHHNFDSSRAREEEFRTIANRLLSMIGGSVGAKRNESNMAVIGIGLGQFASRSGLTSLHGTFFAFFVCLARSLGYIVAGINEYYSSKKCPRCQAFVAQVTIWRLFCKACSMYLHRDEMAAHNMANVVRGHLLDQKRPDYLQPVDAQGRYPWKEDLSSSADGAGSGKSTSPNTDAEPKSSQPRQSRKRKAIDDTQPPTSPTRLSKRKA

SEQ ID NO: 2216 - protein, 1011 aa, unidentified
  REGION 1..1011: note = Table 20
QLRNSFRWDSEARNGLVLFLRNCGWTVVQCETEADVTIATDTVQGDIVISADSDLFVYQHIKVVWRPLPGNGFLEYQKSAVISALGFETAEQLAALGVVSTNDYNHSVYGLGCETNYKIIKEIDSKGSDKQVKDVPALVKEYLADERVVIKNKGGNTFDTSIDVFVHLKQTLITHGQHDNPDVTRLETRLEDIKERFKDACGKFAERKQTQLTSRQAAKSISKKPATKPKKPPTPIESMNKKQLREALGWEHPMVTLNIGTLQANIRAALKTEREVSCRMIVRLREAVNEANKIKRRAQRLIGRYVEKMASGCLEPVDQTYLDGLCRRVQLEDADDGQDGSQNHTDDNIDDGSDSSNTQQQFLAAFLRHLYSGNPPTTRGIGPVVSGFIVRLQQLNLYTPPRSTSAILQRAPFTPSDLLRSVSSQLAAELKRLYCNGTIVLQKQLVDWQDKGRPEVDGCDLKICNDLTVVENFLRFNNMTGNRRKIAPLSTPVDHFVSFSERELVALCWKDDLLKTQILELARPTFPTCSAMDDVIRLWMPDQEPGLLIKNLIADVAPTGLTVRRRGKLGYRGAIINMSIQDTRNHLSEIHYPNFDPRNYDRKGYALSGSFSTNGFTLQLSAFKLRELQAVRYRRLPDNILPPRLTSTVGGTDYYLQEIRNVVKTKDDVSKLWPHCAPEKIKILCLDLGQTYVVAGSAFLPDADPVAHGITPASSISTAATGTNTAASSVDPLYPRTYYNMSVNQKAVCQPAFKFRKWSEEQKRAVPAGATQSIQEIESDLPPLRGPDASIEQYVQQLEMVERHLSNFYNGSNRLYQRGSIGARRDEKNMAVIGVGLGQFSSCSRLSSLHTSFQRFFVPLARSLGYIVIGVNEFYPSKKCPRCHVFVAQRTIRRLFCEECGTPFHRDELAAHNMVNAVQGHLLHQKRPLYLQPVDKDGHYPWIETKTTRGSTDKDSQALEGTSSSYSRIDNGTLSGVQGSSHKESRRKASDEEEEEEQTMAVRQRCRRPRK

SEQ ID NO: 2217 - protein, 320 aa, unidentified
  REGION 1..320: note = Table 20
LTSTVGGTDYWLTEARNVVKTQQDVVALWRCRPEEIKIFGLDLEQACVVGASALLPKEPAGAGLDQGGDAPAKGPSDATKSAPSPAVYYSLAVKQEAIYQPIFKYRRWLEEQKQQVPSEVTESISDIESRLPSLCVDDANFTNYVKEVEDVKERLDGFYNADQSVKSISGMPERSLMPSSRLLQTAYSIWSEARALGYIVVGVNEYYTSKKCPTYRQFVGQVEIRRLFCKTCKTYMHRDVIAGHNICSIVRGHLMHQRRPLYLQPMDSEGNYVWGQAAMFQTAASTSTSTNTSGQLGARVRKRAASVERPTTRRPSQALS

SEQ ID NO: 2218 - protein, 768 aa, unidentified
  REGION 1..768: note = Table 20
MKQYAWKPPKNISDDPSADEANILVTTTPKKYVSKKTTAKELDVDKMDKNQLIKEMKWEHPTVTLNAGSISANVSRALKDDSLASEVERCLHEVVDSVSTAKRQCQQLIGRYIERITAAGTVVDPADREILDRLCARVEPKDKVLDDNELKGDDDDDDHGPKKRFSVQRSFFVRLLQYLYSKKSIVAGKADAANDFVSRFVDRAATLDLLERRAPVRKGDRQEYDPYPATALMDSAGQQLEIEFKKHYRNGTLALQEKYDKLLGEKQISDGSKVQINSSISAIENFVYLNRAMRNPYVLVPLTRASQPFILFSERDLGDIFWQNHRLRPILLELCLNNGFSEATSQADVRQLIQHAGPGLLIARLLSSIGGPKPSKGRTCLQSTTLMSVSDLRLHINELRQDDFDPKLYSKRGYTLRGSIRTDGFRLQLLAFKLKELHMVKYRRLPLDRLPLQITSTIGGADYYLTEIRNVVRTPEDVSKLWGCAPEQIKILGIDLGQACVVGASAVLPDNQPVRAVGQHQEPAPTTYINLAVKQKAVYQPAFKHRRWMEEQKAVVPEGLTESVSNIETNLPPLCGEKTSFESYYQALESAKGRLDLFYNGNNGNNRRFKKHAWDASRARDVEFRVIANRLLGMVGGTIGRRRDESDKVVIGARSLGYIVVGVNEYYTSKKCPTCEEFVGQVEIRRLYCPHCKTFMHRDVMAGHNICNAIRGHLHDQQRPLYLQPVDEKGEYPWMRAANPIRYKRKVPEGTRSRKRAKIVPEAAQEIA

SEQ ID NO: 2219 - protein, 353 aa, unidentified
  REGION 1..353: note = Table 20
MDLAAMREHIQSLWQANFDPRNYTERSYVHQGSIRTDGFRLQVLAFKMKELQSMRYRGLPENIRNVVKTQQDVIDLWGCALDQIKILSIDLGQACVVGASLLLPEDHDPGSATTVTGEKCDDADMASPSEDASQPQVPATFRNLAVKQKAVYQPTFKHRRWMEEQKNIVLGNGIESISNIETKLSPLRGQGISFTNHVVELEKVEERLQEFYNGNNRFKKHKWDARRARDAEYRFITESLLKAVGGNIGRKRDETNKVNDRSRPRQVLDKGQAFLIARVFQSYFGNASPSKYADLYHVWARSLGYIVVRVNEYYTSKKCLTCEQFVGQVEIRRLHCLNYGTTMHCDIVAGHNI

SEQ ID NO: 2220 - protein, 563 aa, unidentified
  REGION 1..563: note = Table 20
MDKYPGSTVVRSTAKRLSVEFKQHFKAGSFLLMQKIQQDKKKGLLPENTPDTLDLDMTPIENFVTLNRASGNSRRMSPLSSPVTKFISLSELELVRVFWHEKEIKKLLTDVGSYAAGERKNMKGWARSTVRMTKDEMTDHLSMIRDPNFSVQDPDSYTARGYVLRGSIQTNGHRIKVFAFKLNELHCVKYRQLDEDKIPPRFSFSSLGGTNHYLSEIRNVVKTKEDSTNVLNCDPSEIDFVGIDLGDTFTVGPVYHNLAVKKKALYQPTLKHRRWLEQRKEREVDGKESIAHIESKLPPLHGPGASITAYNQSWNENRGELETFHKSVVLEKHQWDLTRAMEKEFQRLAERIFTLAGGSSGAKRDDANKVIIGIGLGEFSLKSGLSSFHSRFKDYFVSLARSLNNPVVGVNEYYTSKKCPVCEDFVGQIDIRRLYCRKCGAIMHRDVMAGHNMCIAMKGQVLDQKRPRSLQPIDNEGNYPWEKEEENSASIATEPSTEMSMVEQSMQEEECSESVATESKPEVSMVVWGQNLESTVERLSIKRMAPNDDQDKESSERAHKRAA

SEQ ID NO: 2221 - protein, 499 aa, unidentified
  REGION 1..499: note = Table 20
ALIQSLFPITNGSPSLEIIQKHLEPGCMINALLCKVGTNGLSWSQRKKAGIRAAIECPSPRENEAHVNTLRHPEFIPSEYKARGYILRPSIRTDGFRLQVMAFKKKELQSVRFKRYPEEKLPSRLLSTVGGTDDFLTEIRNVIHLPEVQEYIGNEAERVKILGLDLGQSCTVAAFALLPQDASPPLFRNLAIKSKAIYQPSLKHRHWMEQRKSRPIPGTSVSITDIESSLPPLRGKGSSCFEYCQQLEQAQQKLDQFYNDEKQVFKRPSWDAQRAKQEEYRTIAERLLQSVGGSLHHRRDEDNKVIISIGLGKFQSKSRMTSLHESFATYFVKTVSLCNILEALKIRINVLSLTPSLPSSATTQARSLGYLVVGVNEFYTSKKCPACHNFVGQVTIRRLYCRECKTYIHRDVMAAENICKIVQSYIFQQGRPKYLQPRDADGSHPWLSGKSTIATSETMTSSVKATVHSSKRVADDAELEGYIDDLVTETINPKKHRVQ

SEQ ID NO: 2222 - protein, 1128 aa, unidentified
  REGION 1..1128: note = Table 20
MIQYAYSNFPVNKAQQHVQSKLDKALDKATALIYFDGAPPVEKVQVHRKRKETRRESLDKANKHADMLMERIDQHLRVRKRHFQSVQQSLRRAFHLDPVEAGSLLDYLRSMGWEAIESETEADIRIARDCLPGDVVVSGDSDLLIYQSVETVWRPTSGGRFLEYVIDDILDTLGLARSQWIALGVVSKNDYNSNIYGLGWATNFNIIKALNGDDPSTLVQQYLEDPRVMENKKNITFDAPARVFIHRLQTPISQTSMHHPPATIRLEEPSITFQSVSEKLRTAKENLAALKAVQQEPKIGKKSANIEARHKPTQKFNRYRTIDQPPSESNTVFRPRYSFKARQRTKTHDPPKALKQYEQKVPKDPVKSPEDVKSTSTTSSKRSGIKPPLPTNTLKRKDLLKALTWEHPTSALDVGTLHKNVEYALGESHAAREEVIKVIRRAVRVASKEKRRCQRLIAEYIQLIVSPENFHDDDRAILAHLCPYSSPCNSSSSIENNKEDEQDADDTDFDDSSDKQVQFLQSLMISLYSQNKPLGKIANVVNTFISRLEDLELLPQRQQPRVGALKKKTEFPSGALLRSVSVQMCAELKRHYKVGCEKLLEKLTKQQEKGLLPAECRVEVRSDVSAIENFAYLNKLADNAWRLAPLSPVKDGLVSFSELELIAILWQSPILKPLIQNLYTITSGVPSLEIIQKGLEPGRMINALLCKVGIDGLSWSQRKKAGIRAAIEMPASSKIVAHVNTLREPAFDPRTYRGKGYFMRPFRRYPEDVLPNRLLSTIGGTDSFLTEIRNVIQSPDIQEYLGNEPDRVKILGLDLGQTCTVAASTLLPQDASASEQLFLNLAVKSKAIYQPNLKHRRWMERRKHQALPGSNKSEESGQSEESGQSEESEESIADIESNLPSLRGKDSDKYLFERHDWDVRRAKQEEFRTIADRLLQSVGGSLRKKRDEDNKVVIAVGLGKFQSKSGMTSLHDAFAAYFVKTARSLGYLVVGVNEFYTSKKCPVCTNFVGQVTIRRLYCRTCRAYLHRDVMAAQNMCNIVQGYLLKRERPEYLQPKSIDGTHLWTTAISEASSGANLDPTTLEQASGTEPSAKGSSKTSVFLRKRIASDSELEEQVEELTTEPKKQRHT

SEQ ID NO: 2223 - protein, 1234 aa, unidentified
  REGION 1..1234: note = Table 20
MGVHELWPLVRKKGYDPPAASLPHQRHPGTIRLDASSCLFAAIQRAYSTHPPDLAAAIFERALTELVGHVKPSVICYLDGQRALEKATAHEARDSKRKTALDSAEEGMVVLRNQVQRRRPATKQQHFAVRKKLGTSFRWSFEFRQHLREYLHQQGWAVILSSCEADVEIARDYQEGDVVLTKDCDFLAYTRVKTVWRLVTKTKLLVYNIPELLRATGLTRIQLTALCIVSRNDYDSNIDRLGTTTNYKIIKAIIGDDIQDTVGQYRRHQDVVRRNNTSISFELSQRVFVNMEQTATPADNSSSVLNTRHQALQSEYEQLCTQLKAISEEARTLRQESRATDSGTPNRQRQRQKFNQFRTIDLPIPSTTHAGSTTDIEMAPVDEEAPDMAGLTLQPVHPALARTRVPRHRPRYSPKERVRIRRHPPPPVLKQYKWKEHKTKPEDTLLTSSDTTEKPAKKKKTAPEMTHDEIRASVDSIRKHNLVKMLAVEHPIVSLQVGTVQANTHGARLSVQNELGVQLDGLDEAGSEIAKEVARILKRASRQAATAKRTAQALLGGVIQRAVIDAGLVERAFAQDRQTLSPEDNMLLDILDLLCPPITKPKEKDRSNSQASQQGIQAEDEDAAPDEEDNSDQGQFLCMLLQLQYTGVCHTTSKLEKSLQSFVDQASKLGLCDPWVVTSTPARTEFPARPLVTSSAAELARELRRHYRKGTLEIQEKLQKLIDKGVLPPDTDISISHELPAILNFARLNSLLDNRYTTAPLSPIQQPYVLFSEANLLPLFWSSDLLKEEIRSLLNMTERNKTQAEASRLLALQGPGHLLTGLVTSVGRGARRGATGYMRQTTTMSLEQIREDYATTRAIGFRPSEYTRRGYCLYGSIRTNGLCLQILAFKMKELQAVKFRRLPASVLPERLTSTVHGTGDFLTEIRNVVRSQEDVTRLWGCDPFDISILALDLGQNCVVGAYALKPMDQSIAQQAPPRHLNLAVKTRAVYQPTFRHRSWLAQKKEAIPEGRTESVSTIESRIPPCRGLQANFADHVLYKKSKDQDLDQFYNGDMSVLRHKWDQERAHVGEYHTITDRLLGMVGGSIGRTRDPGNKVVIAVGLGEFKSKSGLGSLHQSFATFFVQKCRSLGYLVVGVNEFYTSKRCPQCKQFVGQVTLRRLFCRRCGTYMHRDVMASHNMATIVQSHLVHLRRPDHLQPTDKNGSLIWTSTNSDSGANNYSSNAPGSSSQKRKAL

SEQ ID NO: 2224 - protein, 1139 aa, unidentified
  REGION 1..1139: note = Table 20
MGVQDLWPLVRRKGYDPATASLPQQQPLLLPGKIRVDVSSCLFASLQRSYSTYPPNEAAAHFERALNGLVGHLKSSVVCYLDGKLCQEKAATHAARDAKRRNALESTNDPMDALRDRVRQRRPATKQQHLAVKKVLRNSFRTSEEDVVLTKDCDFLAFEGVKTIWRLVTKSKLLVYKVPDLLKATGLTRIQLTALCVVSKNDYDSNIERLGTTTNYKILKSITGNDVQQTVEQYRRHQDVVRRDNNGVSFEYSRRVYVAMEQTETIGSSSSELNNRHHTLHSEYEQLRTQLQVISQEARALRQQFGAITDTGWEPRHAPWQRFNRFRTIDRPANLKAGPVDTSVTPSNNPNVVSSSLPISSALQSTLASARPMNSNSNEMLKDGPAAPQSVRDQPRSRFSAKIRQRSAKSSGPPQVMKLYKWKPHQPKPDSDDPSGRKDTNGSSKRTPKRPAKKKKKKKDDDETPWKWTLSKDDTVKKLEGEDWTKRETLLRLYKEHPRATLRVGTLTANVRGVCDEHAREVTKSLREAIKIITDVKQQAQELIGQFIQLVVVKAFEDGHSVSNDDRELLDAICPRIAKSEPKDDTEVSDHTEEDEDEDEKEKSLQYQFLYKLLTHLFSGNVTNKNPTGKLVQKFVNRASELELCEPFSTAPIRKQVPFPASVLWSVTQELAKEIKMHHSRGCETIQNKDLLSILWKNDILKARIMRIFEMSRASKDVAAGILSTKGPGFLLNHLITRKGTGGPRRGHDSYQKTAKTFSIGGMKTHLAGLWSKEFKDNPTTYDGRGYMLTGSFRTDGFSLQILALKLKECSSVKYKRLPEYVDLPPRMLSVMSGIDDHLTEIRNVPLLELLDMSQEDVRVQGVTKLGIDLGQKLRQRQKGAQPTYINLAVKSKAVLQPTFKKRAWLEAEKNTAVIGPKSINDLELSIPPRHGQDTDFVAHVNARRETSGQLRDFYSSPRMMSREYDARRAHEGEYSKITDQLLRMVGGTIGRPKDADAKIVIGVGLSKFGSGSGLTSMDQAFASYFIRTCRALGYLVVGLNEFYTSKKCPDCHNFAAQVTLRQLYCPHCRVYFHRDVMAGNNLCNVIDGHLLTGHRPQYLQLVNVDGGYPWMYPEPSTSISNSIQSSTSSLTRKRPAGH

SEQ ID NO: 2225 - protein, 851 aa, unidentified
  REGION 1..851: note = Table 20
ISQRQRHKVHDPPKKLKQYAWKAFKVVPEVPADETDGSVPNSETAEATSTTKNPTKKSTAKTKEATKKKATKKKATKKQDGRGVVSERTKMIRRMDKEHPFSTLDVGTTLANVKAALRDDEEETLLAQEVMKCLQEASRLAAITKRECQRLVSMFIETITAQKTVSEADRLLLDYICPRDGNLNGSDDGDDKEDDEADEESGKKGEQIRFLKALLHHLYSGKAPSSATKFGHAVNEFIRRTKELGLYKDLNVTSHDTGQESRYAADHLLDSVASELGREFTQHWVAGSRLLQQTIQTQQKKSGQQDLVSIRADLSAVENFALLNNMLVNPWQIAPLTSIKQPFIGFSEHQLLHIFFKNPVLQKKIRQLIGPKPYTPSQEDAVYWLNKQAPGSLLTALITPVGRGRNQKGRRDYRYMTTTMTTEAMGKHVDSIRDENFDVSAYMNKYNITSTKEYRYVLRGYIRTNGFRLQLLAYKMKELQGARFKRFSEDRLPPRLTTTVAGTGDYLREIRNVIKTPQDITDLFGDCDPKQIKVLALDLGQAYVLAANVYLPEPLTSASNSKPKPETYCNLTVSQKAVMQPTFAFRRWMEFAKAELPEGASQSVSEIESGLPPLRGQEGSIVQHTAAMKNVEGTLDKLYNEKLTFKKHAWDSKKAKEAEYAVITDRLLKIVGGTIGEKRKADNPVIIAIGLGDFNPASRLSSLHGTFRSFFINKARSLGYVVIGCNEYYTSKKCPTCHRFVGQVTITPVILSRLPHVFSPGYTRRQQHGEYRSQLPTSPNKATVSATSRCEWAVSLDVLKQRQYDHRDNRHRSQHYNLHRHQCQHDRQHKLRSYCSCTTSYQWAEAEAVPG

SEQ ID NO: 2226 - protein, 610 aa, unidentified
  REGION 1..610: note = Table 20
MIAANPVPGPSQYLTALNVTSGRPTYVEQEYSEPEEKTSKKKKYKPSRRIPSDRYDLVKAMTKAHQAATRTIGSVDANREILDDLTEDEKAAIIKLIQDCVSVGNFVKHEAQIALASYIKNKGKEGLENIRKALLKHPDDIEGDEEDTEFGRADSAGFFQSLLINLCNGTRPRGQRHQETFPTNDVQLHLNAINTRVTAERKYSRSENRHQPNMKLMHDPHEGYDSYLREVQNVFPDRNAVLSVFGDNSTNKNRPCADIDVLALDLGEAFTVGACAKRANDTKYRLNLAANRKALYQPRRKFRHLLENRKSRVVDGETIANIESNLPSFEADSETREAYEATHWNALNGFYNDPGLKHLRHDWDAGRAHRAEFALLTDRLLSMVGGTIGKKRESNKKVVIGIRLGKFGTNTKLTSLHSSFSAYFVGKVRSLVYLVVGVNEFYTSKRCPNCKGGGTHPTDFVGSITIRQLFCEQCKTYFHRDEMAASNMVNAICSQLQNNKRPNYLLPVDESGKFVVKRQSTSEITAQDRPETYTSESETQTSESETDSRKRKAVPEARTLRKRHQTYESETNSESDSSWQSSEEEGKRENDGDGEEDYEEDGDNEEEDDE

SEQ ID NO: 2227 - protein, 1563 aa, unidentified
  REGION 1..1563: note = Table 20
MSAPPPPPPPAAPKAPSVSAAASKPPAASQDKGALLKQIQKGAKLKKAETNDRSAPIVDAPKASPAASSGGGGGSRPGAGGGSSGPTPQLGGLFAGGMPKLRPAGGNAVGGGKVNADTSVKPSTITPMPSKAPAAQSSFRPPMIPKPNDSVSNASAKPLGKPPSKVPPPVPAVSNATPSIGKNGPPLPGRRPSEIAALKSPTSSGPPPVPSIPKPTKSPTSSNENISGSVFVSEKIVVPKRGSVSAKLAPPVPGRPRSISTGSSEKINTSAGKLPPAVPNRPPQGNSRTNEKINDNDGSQKVSSPGQLRKQPPVPGGSVTKPATLGRSPSIPLSSGPLSDDMDDGRYKFKPDSELPPPHAFTPSIKVYYSGAVTGSKYNIDSLLGIKANSPGSARRPQPSVPGRAPPPPPPRRAFAKKHQLYSETVNLQEFKEMFKGYKVYVDLYGSFFDLIRYYALDERYRAFAKCSNEIFDGMDVIFVLDGARSAEKHEAHLARETQRDLRMQSFSHNLNSVDPQSRVSTSVWKRLDKLRASCFRLMKYHTNCISEAFEKENLSFVQAPYEADVAIARLLSPSNSDKMSNTIIISNDSDLLFYGHPIVGKSFFKNKLDCLSLHFTLFREQIALKKIGISRECWRALAVVTGNDYVSNLRGFGIARCLKEFQKINENGACTAEEMVETFEQSHDKKGHFQIASAVFLNYQETSCAVCVESLQEQMFKDCCSQLQLLKENYGAARAANRQTTQGRSLQELKHLKVPSQNNRYSPMVHIHFGPYKVKSVGLNKLRNLSITPAATLNSSVSIKPRPYNKSKKRKGKKKNKRARYLKSAMFTRSVPSENPHGAHKLSQATLNIKMLKQKYQMKTWELGTLKSQVKKSSLDATIQNTILKRLQNVVKLVNKASQAAIIIADLFFQNVQNNLIVENELLFGVGGGCKVWYNLISFLLSPEKRGRKGRKLFQKMKKFVEDNELGLNLTEEELEYVSFCSGNTLQAQSKLMDSIVARHFVGSAPLLAQSVMKNSPFQTDQVEVLLNALMSAVEQKGTLPGSLESLKSMKDHGVNLDLIENINNTEMMTSHCSTSKMKLRPRKRKLEESADETKPEPTIPQFDPTRLETYSVVRWFFLLNDMLPVSQRYRSFPNYQPSFFPLSLTEDCLLGIIGTKDSRLWFADFLDPLKAGPLMKRDKTGELLQLSFGLKSAKYRKYRLIGQKDLGERFVLNTSFETDGFSLSIHVIDTKYRKLKKNPPPPVVSRDRAYIKGKDIIMGLDMGQAYTVGAVSWLPDGSKKNLAVNKKALGEPYYLHRNWLNKTKMKDENKPVRDAENCGLSRNSDETITIYFNRMMERYSVWANFYNSHAIRKRTFEYHCAKQREMDRVFNALISMVGLKPHQKVKKKQRIYVGIGTGDFDATGSLHTSFLEYFVRKARPLGITILGVDEYFTSQKCVRCHEFTESLSMRAKKCSKCNVVFHRDILAADNMCAALSAILQNGERPEYLCKPPDDKSDDDNDEQDDGLNKKDRNGRNPKEKKKKKPKDKESGQSTSSEYALENAAKKKSASYVLGSARVIVQ

SEQ ID NO: 2228 - protein, 542 aa, unidentified
  REGION 1..542: note = Table 20
MALHFIGSSTVLAAKVKEICPEKGQEVDKLINMIDQTILNKGKKQKKNVEVEIDTTGQSSSKTNDEPVSNVVVRDNASSAKKTTKKRKRDETEKDEEEVTNEVLYKAGDLDTYSIVRLFTAMNEMLPATERFKSFPQYSPTHGSLDLTEDLLLSIIGMEDSKKYLAGFLVKNGKITHFKLNHDCKGMVLQSVFGLRSKDYRSYCFIGNQDMRKRFVLMTSFSTDGFSLLVNVIDKHAKKVKNETGPPMAAKEPEFNKSTDIILGLDLGQTYTVGAVSWLPDGSKKIVAVKKTALGELGRLYRNWLNKTTMDDQNKLLRDAENSVVEQGTDEPDEMYFNRIMERDSTLSQFYNSHAVRKRSFEYNCAMQREMDRVFNALISMVGLKPNQKVKGNKRIYVGVGTGEFDSNGSFHTSFLKYFVRKAKPMGLTILGVDEYFTSQKCVRCHDFTESLSMRAKQCPKCKVVFHRDILAADNMCAALSAMLEKGERPEYLCKPPDDETEEATEEPVQDVKKGSIKGRNPKEKDKDKQEGLRRSSRQKKR

SEQ ID NO: 2229 - protein, 783 aa, unidentified
  REGION 1..783: note = Table 20
MVKRITTIIPKSKHITIVFDGGSTEEKQVTHIKRLESKRQSVQALQYFVDSLCKGNGDQEGAEDIVSLKRVSKAKKILMKQLIKKAFVLTKQDKKEIMALLKRLGYTIEQAAGEADVFIGTRKGRVNVISPDSDMVFHLNDGIWAVPSLQGNNLMIRYIDVAEARNKLKLNLASLRALAVLGGNDYCSNVRGWAIASVYKRIRQYRKADLESCNKLVQSFLETVGSDSNFDKALMIFECKEEHVLPHDARTEILLQLSLYNKESEKFNDDNESLTRYKYKTVDRKSLCVSEVPPLTLKNRPKQPEEILESQIEALQENLYGSESNEENDINKLQKLCKSKVEYFYKLNQLLPSNKRWSMISLSRVPDLAITVNESGLLDVLKQVVPVFKRISNDFVIQNKGWFFMELFGKNFGDNRNRHLRLQNDTSNKRYILQNTLQTGGVELRVHVLDTAEKKKRNVLQPTQEIDFDEELFDNAGVKPSDVVYDKVPIMTEDEAKDCYFVGVDLGYKYSAGVCAVQESSNTIRNLAIRKNFLREPFKKYNRWFYKQKNENEWVYETERLMERTESETASNFATRWFNCYSKLYVFYNSLSMKKNRWDLKKALRGELDRAVHAILRMVEMKINFNLKHEAFKNKRTVIGIGASKFEMGDNTHTLFEKHLVMKLRSLGYTVVCVEEYLTGQMCRRCFNRTEQLKMRVKYCRHCHVFYHRDVMAGENMARVLRDEVTGKGRPEHLRYKPPNKPSPDYSASIGDEIGDKTLDDSAEDNVSVSLVKKGKRRLDMSH

SEQ ID NO: 2230 - protein, 1119 aa, unidentified
  REGION 1..1119: note = Table 20
MATSALGSQFKIMVDFNGTFYRHLRRIYNRSKNPLEASIHLVKTALPLNQMVMVQGEARPIKDIVTLVFEGEQTCEKSQTSLKRVNARLKQILKLRNCLENLPVDQKVSKAKWCMIGKLERSTWHFKADDASNLQQELIKAGYNVEVACGEADVHIAKCKDPVVAVSFDSDLFMHKDVLVAAKPTFGCGLMKFFVLDRKVVCDKLNLTNSAWVALAVVSGNDYSDNVKGFGFGRNLKIIRKLMEAGHSDVKSIVSQYQSVMEVGPIFCQAQRVFDSNQERLIVQSLEGDPNYEKNSLDNLFKHVEDEVFVSMGTLEWIRREISASSLTAAHGQYHEVYALRNLCSKWHESVLQLKSVKIDAYQEWKIQSRHVGKSREEVSYLSLQDRWKGYNRFLPLYKKEYVDDRQNGTSIQSGGRYIFQEVERNRKSKSEIPQPKKQTPKFIRDIESHEERQEESDDTSQYDNIEVAPRKKRRVQSSQTARRGNYRASSSVTRDKCDARSSGQKRNNTEETLLMTKLKSAHSMSTLEVGSLRKCLSKGSLSQQLQHQLAATIQTVVRDINLLKRMAQLGVQWFIGIILEQYPDEISLLDDICYSDTPGQGGRKFWQGVIRFLRNGRSIASQKGAAVLKFGQLLGQQMNIMISLERKFDSTLNIKEIVDQLAIQLDSEFASQVIGRVELLAAQVLEHDPELRRRIEEIDKMPSVFQKFQSLNDLLPKDRQYGYPLSSPQDCYVTFTENSMMRLLQSSINNNPQMEQERKQELLRDLQCYYSEGGLVKQKGHTLRECYGIKLKKGLRLLSQYMPEACDTTRRILSNTFITNGKVLKVHLIDIRRKQQVRRLAESQGEGLLEAAQRKRLSKGTMQVSDTVKLQPDKLSEHWICCLDIGERYTAGVVAVKGHGKSRIIRALALKSSAVNEPGRKFRKYHQGRPSDITQLERSMYRGEEESMECYWERYIDIYQHLRSYYSSEIWQKRHWDFKKAQRAEFDRATNAILNMVDASVFQKSNGRVVFGIGNTQFDSKQTIHLSFQRHFVQKVRSLGYPVVFLDEHLTSQKAPCCGCVCESFGMRIKYCRKCHKFYHRDIMAAENLTQVLICLICDEPRPKYLCSKNQSRFQESE

SEQ ID NO: 2231 - protein, 1117 aa, unidentified
  REGION 1..1117: note = Table 20
MTVKGAHLQFRKRQLFTNSRPIDLRRLYEIATTSIGEGLKIQVDFYGTFFRQLRRIFKRSEKTIPLKDVLTLVFDGAPSREKVRTQLNRTKSRLKQIMKLHEKLNGLPKDSRLRQKLSDAGYRVDLAAGEADVHIAKSCQPIVAISFDSDLFMHKNIKVAAKPTFKSGLMKFFVMERSAVCSKLKISNDKWVSLAIVSGNDYSDNVYGFGFGKNLNIIRSIDFGYNVKQIVAQYAKIMDAGSHFDVALQVFDDCYESFNSQSLNEEGRTHQQSCTLNCVVQQICSAEVIEWSMIENLEKIAASADLSFDERNCLMLNALKSLYGRWIKQVEQLKDDKTRLYQEWKKGRHQVGHDRESVKYLQLPKKYQGYNRFCPLFEKNAPAEAGNIFRKSRYLNKAVDVNRPSKSEIPPIQATRTIEQESDQQNDAHGSSEDLLQPVANNRHRNKRRRDSGKSDKVQRGNYRQSSAKTRDKVTAMPSGKKRTNSQETQLFRSLNRRHAICTKEIGHIQKSLSKGQASAALQILLKYSIDTVMKEMNLLKRMAQLGARWFIDTILKNFPDQIQLLDSICYADTPGQGGRKFWQGILRFLRNGKSTRSQKCAAVLKFGQLIKDQLTILDKLQGQFDRRITVSQIIDQLAIVLDSEFASQVIGRMALLAAKVLEFDESKRDQITEIDMLDSIFQKYEALNFLLPGEERFTYPLSSLSECYVTFTENSLMQLIQSVITNCWDVAKQQLIQNGLCNVSAQSLRLELNEWYQNGKLMKQKGETLAGILGLKMNGGLRLLKDYDPISTKSKILGCTFIANGIVLKVHCINTKQSKPIERVQSGSRSLLQGAEATRVKIQRKFSSRIRVPAIELSDYWICCIDIGERYTVGAVAEKGAGESRQLRSLAIESAALNEPNRRFEKWFGERSLTVQNAERSLERLQVESLQDYWVRYIATYSQLREFYCSSRWKRISWDQKKAQRAEYDRATNVILKMVDGKINQECYGKVIFGLGDAQFESMQTTHQSFEKYFVAKVKSLGYPVIYLNEYLTSQRAPCCGRMCESFGLRVKYCRQCHKFFHRDIMAAENLVKDAKAVLAGLERPPYLCSKASGNIQREEGSMRLGKRAIQLQTIS

SEQ ID NO: 2232 - protein, 855 aa, unidentified
  REGION 1..855: note = Table 20
MDRTVVVLDGVAREAKFETSCKRRDISRHSLDKLDRAATKLEQAVAGGRYRMPHAFWQRIDRLKSSCNNVTMEDKQDLEKLLTKAGFEIIIAEGEADVYIGAHALGKWMLCLVVTTHMVAFEPTLTTTFSHSPRYYHICRFGYGILRGRANFSHAKIHPWWLYFQLVKKQQVLERLVLESFALPVLGIVSGNDYVPNVPGLAIRRNVELLKQLQTHQRTSKELLDAYVIATDAGSLGYDFTSAYNVFLEFNEGHNINVDVDDPMDRLDIIERIDRAREQMYLRAATKEEQETEGEESRLCHKESMLETIVDAVHQLQEPKALAGPACQAIIDDALETGRLEGLTTIIVGTHGGSNFSGPLLHLIHGTSGRTKEPLIVRAKEIMDFPPWNHTKFTLTLTISDLSDILDQEMGQQVIGRYDLLKERVLDLVPDAKDDVVAIESEHGLLNASALVRFIKINMLLPESSRWDVVPLSKLRATYIRLSEAALFDILHHNTSFVALMADLAQSTDPRLMKDNLVRSEKGWIVNRLFRFPKSVRRRLALLNDDDEFDAGQRINILHNYILTNGFVVKISVIAKGLRKPPPNSGLVLADLSALDDLESRDVEWVLGVDLGEKCLVGCVSKNPSAPHIVRKVAITTQATNQPNRRFNDWNHRHKDDDQCRKERILTRRNDKASADYLNRFIGGYGVARRYYREKSYLRMEWDAKKASKGEWDMVINKMLEMVDCTIGRKVQDGRNVVVAFGTGEFESKKSRHTAFLKYFVNRVSSLGLRIVGVDEYFTSKKCPRCGLFVEMMTLRSLYCRGCHMYYHRDEMAGENIVNVVMEYVKSGDRPEYLQPPPPPSSQSSRKTTNKHRRH

SEQ ID NO: 2233 - protein, 765 aa, unidentified
  REGION 1..765: note = Table 20
MLQSIYSNVSSIHVFMVILLPMLILEGSAGCGVRSHSDSGSSDTSPIPRPDTPFHSERFRSNIVSSRSDLPPVSLPIARSARDDSTHSHGRRTSGRRSASSYHNPRLESYDQYPADFPRFSDSVRSDADSTRSDFPPDPPLFGSARSDAYSTPSDFPPNPPLFGSARYSWSHSHGRRTSGRRSASNYENPRLESYDQYLADLPRVSDSVRSDADSTRSDFPPDLPLFGSARYGSRHLRYHYAPGVLHVPESVRSDADSTQSDFPPDLRQIVTSRRRFIPVADNHGLRNRLPQRIANHLAGDECPICICKYENLAEIKTFDCTHSFHSACINTWLKEQTSCPVCRATIRAHDITQSPDILKDDCSSGFVLGSCSEYVAYLLREGYIMSSGKNLGLGLPHSVKKVSLAILLLLSLCLHEALGGACVSGRSGVTWTIIYFPSTSTAYLHHPSQVKSFKKLVHDLAGMSQDKNKVETRKAFMKIKEKGLLLHHLFKIDRRVLRKSHFVSKTSNTRFVRTLSFSTNGVVLNLLYIDLTSAQPPKILKAQDAINLPSIQTQIHIQNTHPNAHIIGIDLGVECMFATVAYNPDDPAHLQTLAVRTKSMTEPERLIRSGIQLMKPERLVGIERQCTKSADDWWPAFMKASVIAYDELHCHYGGKSYMKSETMGNKLPDNKKVIVAIGLGESETKNSRHIGFTRYLIRKLKPLGYTIVGVDEYYTSQKCPCCGGDVLAAENMVNILLSFLDIGQSPEYLLPPRRPMVKKSRGTR

SEQ ID NO: 2234 - protein, 907 aa, unidentified
  REGION 1..907: note = Table 20
MHRDWLDDREPPSDIECPSSSDDNDANENNPTDHVNIEEILHTECPSSSDDNDANESDRTDHVNIEDIRYIYVDVLGCFYPEILQCCSGSSPDEPLNLYPLIHKVEGMFPTGPTWMVIDGMACEAKIGTHAIRNQGRAAALRQLEKEAAKIEKAVAQGKARMSKSFYEGVDRLKLRSILIDFAVRKQLVTALGNVFSVIEAPGEADVEIARRVGERDMVISGDYKKKAIHKMGLCEESWPVLAIVSGNDYDTNIPGKGVMTNAKILKKIKDEEGELFSRDYLRVYRDLCQTNRTFEVPEKVFLDHDEGGAVELVERSDTDELRREVLRRIVVAKEALVSNRRGQGPQSFLFNRKWRPNPFRPLQSENDGAGPVKKNTEDEAKKPRLQNDSFLKLKSLSAKHGYRTLHLGHLKRCLNLGDSELIYKRMSNAVAILNRARALAEWATVALIEDILHTGTGTDLLWHITHSTTNYWKNIVRMMITGKLGVKMSATMKQLMERVYNLLGETFFNSLGWEDLWPEFDWQKRRVNQIPNLNTLVSKLGDEMDTAFSLQVVGKVELLKEHIVQVMGDVGKDGCEKIETWRDVLIAQNKGPPPIVDFHRLNALLPKPYQWKMVPHTCYGDSFCHFSEEALYDLLYDIPCFKKLVHDLAGMAQDKNKMETRKAFMKIKEKGLLLHHLFKIDRRFLRKSHFVPETSNTRFVRTPSFSTNRVVLNLLYIDLTSNAHIIGIDLGVECMFAAVAYNPDDPAHLQTLAAFIIAYNELHCQYGGKSYMKRSWDAAKAKQGEMDRALEGLVRKVGEIMGNKLPDNKKVTVAIGLGEFETKNSRHIGFTRYLIRKLKPLGYTIVGVDESYTSQKCPCCGGYVERDVLAAENMVNILLSFLDTGQRPEYLLPPRRPMAKKSRGTR

SEQ ID NO: 2235 - protein, 533 aa, unidentified
  REGION 1..533: note = Table 20
MKNPSKGRLLDEVFLLPPEMLAKSKYVLDDSPRRYVRTPSFKTNGLVLSLLWIDTTSKPPPPDRKVEDAINLPNIFHNKALRSTHKDARVIALDPGATCIAGAVAFDPNHPDQRRNLAVTTKSLAEPERRYRNWQEADKPEAIYSAERDCTKTDQETWAEFLERFVISYDIARAYYSTKRYKRKRWDADKAKRGELDRVLEGIVNMVDESMGHKLSGGKKVIVAIGMGDFSSNKSRHVMFTKYLIRKLRPLGYTIVGVNEYFTSKKCPCCTEFVEMPAMRRLYCRGCNKWYHRDAMAADNMVNIVRGYLEHDERPTYLKPPSKDKNNPMKRKADEGGKSRGGPRNSLGGVKSREKVTYVSEIICCLLANTASFTMIYGLTRARVERLARRIENSRKSGLRAKFPKKTKLVSTRLSDFSTFVNEHTEKINEKYEKALQDSGVLEGSYVNNVAACTWTGSGKRSGRRSRFPMSSIRILDGASNGHLTSTLTMPEEDRPPIPLAADVSSTGSEYTQVNRMSFVASINLNEPQPEAP

SEQ ID NO: 2236 - protein, 780 aa, unidentified
  REGION 1..780: note = Table 20
MTLYAADDTWLANALLNQRDIASVLPIDRALWYGLELKTVLFASNQITTANLKSVAEPLAAKYQRLVVDLYWDAQNKDFQMCPAPYPSVIPSPTPTMLAATAAAVTGTATTSRAPSPTSTGTDSFIAGYNCSNSIRTLSDLLPYIASYMSDTSSRLAANVVFLVFNLHDLGITPTAGAAATTKTLSSTLLATIGNSSIYTPQDLAKHRSSVNDTWGFVSPYYVTSSSGNITSTSNGWPVAQYLTLTGKRLLVAFGTNTISSAVYDTAVDANTIFSATALAISMTGTGSFDSEHFRLVPGTTGLSYSFVQIQDSALTPFTQAEDLAATIWTWDVNEPSNKGRCAVLKKSNGRWAAADCDGRYAVACRSISDPYQWVISGGQEYHWNGDSLCPMGYRFAVPRSPIESTFLYNALAGTSNDQIWIDYNSNSLKNCWVVGGNTKCPYYDSALIIPDIIAASLREGLLVVVVAFIFLIWQVRRQASWRRIRMRRTEHSQVFILYYYKTTETIELLGVSFHLLHDEPLTKVPSSILVLGFDFVHDRLPRQPHTDRTTNNPRLATFRIMRYRDWLEADKPEAICTAERECTKSDQETWAVFRKRFVRPYEIARAYYRTNKYKRKRWDADKAKRGELDRVLEGIVNMVDESMGHKLSGGIKVIVTIGMCDFSSTQSRHVMFIRYLFRKLRPLGYTIVGVNEYFTSKKCPCGTEFVEMPAMRRLYCRRCNKWYHRDVMAADNMVNIVRGYLEHDERPTYLKPPSKDKNAPMKRKTDEGGGVKARVPTGR

SEQ ID NO: 2237 - protein, 993 aa, unidentified
  REGION 1..993: note = Table 20
  REGION 806..808: note = misc_feature - Xaa can be any naturally occurring amino acid
MNSSSSFSSSTKPSGSYSSTYSSSTSGKSTWKPTSTDFVSVNLIDNDRYLKLLSNSGGFRWDVSVLNPRYRDRPSHHDQSDIDDVPVTEIRLDDHYITRYPAEESIAIMSNPGKGKLPEVNPSDLSTANPNDTSLAILKKKASPNKLVVDDAANDDNSVCALHTTTMEALQLFRGDTVLVKGKKRRDTVLIVLADDEVEPSKIRINKVVRSNLRVRLGDVISVHACPDIKYGKRIHVLPIDDTIEGLEGNIFDIFLKPYFLEAYRPVRKGDTFVVRGAMRGVEFKVVECDPAPYCIVAQDTVIHCEGDPIKREEEESNLADVGYDDIGGCRKQLAQIREMVELPLRHPQLFKSIGIKPPRGVLMYGPPGTGKTLIARAVANETGAFFFLINGPEIMSKMAGESESNLRKAFEEAEKNAPAIIFIDELDAIAPKREKTNGEVERRVVSQLLTLMDGLKARSSVVVMAATNRPNSIDPALRRFGRFDREVDIGIPDPIGRLEIARIHTKNMKLADDVDLEQIASETHGYVGSDLASLCSEAAMQQIREKMDLIDLDEETIDAEVLDSLAVTMENFRYALGTSNPSALRETIVEVPNVHWEDIGGLEKVKQELQETVQYPVEHPEKFLKYGMSPSKGVLFYGPPGTGKTLLAKAIANECQANFISIKGPELLTMWFGESEANVRDVFDKARAAAPCVMFFDELDSIAKARGGSLGDAGGAGDRVLNQILTEMDGMNAKKNVFVIGATNRPDQIDPALLRPGRLDQLIYIPLPDEAARSQILQATLRKSPIAKDVDLTFISKKTIGFSGXXXVFLRRFVTSYDIARAYYGTRKYKRKRWDADKAKRGELDRVLEGIVNMVGESMGHKLSGGKQVIVAIGMGDFSSNKSRHVMFTRYLIRKLRPLGYTIVGVNEYFTSKEMPAMRRLYCRRCNKWYHRDVMAADMIIWSILSGGTWNMMKGPRTLVSTLSKDKNAPMKRKADEGGTSRAGPSKSRKTR

SEQ ID NO: 2238 - protein, 1302 aa, unidentified
  REGION 1..1302: note = Table 20
MGVDKLFTYLATKVPERGVDLHGVLLKFREVHIDLLSLVYPQIRKAVMADLRRKRTAAQDLRTLPYTIAAIIDSTFGDREKLFIHVDGHECAEKARARQTRNDRSATAAAKADGIIPATTAAKPPSPTAISTFREHLLNVYRVPFETKRWIANALIALGYNVCCCEFEADQCIARTLLACSQEDRQLKVAVTIDSDFLIYPSIKWILRPLTRNMKSWALYEKETVLKALGFEDEDKLVLFGVTSCNDYDVNIPRIGLDTNRGLIEALPSLAEGESRFEEYLGMYMQNFPCTSSDIFEKSIKIFHKIEPSIFENTNSPSQPTFMELRSRLRSVPRRIVQIERRRKQGKMPLRIIRKSKVNAYRPKIGSRAYGSQISPRKVKFDQPTKRKEPFPDTTATMFQVLSENLRPVKKKNPRKESKRSMDAKNAKKEQNEIRKKAREEKKATERSRTRVKDTIEPPKTTAKKKKRCFTEETIRHYSFSKRYWSRALKLGTVKVCLWKNQSTHQLSHDQSVRVQGTIRELMLMVNALQLRLYQATALLITKLTLPEANYGAGVLSPDHDAEALLRAITDSKGFMSSLACRLFSGNNSAPRGTNVSASRTAAYYAYRLFVSVTRLQPLSQTFRSLTCSALSFAVIPVYSSIQAHYENARFLSVDGDQSKSTISKFFVSNEVECRYKDFPMGKLSPSTVCMTEEGLLALLWNDSDIVQTALSQYHDEISKCQGLHIEEDDDDLQDDEAISEQQEDDENPELDQKLPSTLGYESFRRFIMYKKGILLRALFGTGNYQVSHVSEKDASGIVMRPTFQTNGIQITLLAHDTSRPRSRRKATTLSRNVLFEGAGCSQWDSEPQQGSSEPSKGKGKEEPLWDTEAQAAHDEPQADMAETDISAAEWDAIIDAFIDDPMVPMDWDNEDDDTDATLEPMHLHDAAFVFRDMPAAIRPDPYMTPIIAIDPGVRVAAHVVRIVHGGPTGTIVSKKITRAFLTKSDAWLRRRLENRKKAKGILEIESKIPHLSRRTIIQYLTYMLGNEQEHPPVLNPTHPEGKSSCRSHLEIASCVDDNEAQHGTPQDGEPETDQHPKCRLDILRDFYFSDDRQWYLRNIFDARRGKEAAMDLAIDVIFRMGGGASHLKGKSNFIIAIGNGKFKGHNEFSMHGPFINKLAKKAKALGILVVMVDEYNTSKKCPRPACEQTLIDDNATRSKFCPTCKIYFDRDMVGAEGIGRICLAHLVGGGRPEKYMRGKDAIDVDMEAGEKEGVKRTGDVIDAMEPPSKRPRHCGVCGSESHDRRTCPERTDKPVKRENRC

SEQ ID NO: 2239 - protein, 448 aa, unidentified
  REGION 1..448: note = Table 20
MQQAAGGASSSSASGAFLRRAPSSGSPPHSSRSSSGRGEGSSAGDDDDDDDDGDDGDDDDDDGDDGDDDGDDGDDGDDDDDDDDDDDDGDEDDDDDDGSDYEGGSLGPHADVDDEEDINNLDRFFLKDAEEAFKNISGSSASYPNRVTTRPIGIDPGVNIAAEAVMIDPTIPGKMEARAVRVTRKVLNKPTKYFAQRLQRRKHDNGIDLIESKIPPFSRSTLREYLKFLLDPDGPLDADTAAIVLAPPPLPPPTTPSTRSSASVSVTAPQAPAPQAPAPQAPARRATRHQRGNTRLDVLNRFYLEDPFLPTGGTAAGGQQQAPRHWFLRNRWDAKKAKTGIMDIAIDAIFELGGGTSHLTRKNDPNADFVLGIGSGQFRGRQQYSLHGPFLRRLVSKAKALGILAVKVKEEYTSKKCPRPTCSQDLVHIRKDRSAWCPNCQMYFDRDV

SEQ ID NO: 2240 - protein, 1567 aa, unidentified
  REGION 1..1567: note = Table 20
MGIENFYQYEARLSDKLSTIEILPLINNANDIHVDLPSLTYAAITRATKYDIDHPFAATPRLNDLPRIIANDIDRIFGPSARTTILFHIDGADCNEKQRARRLRDTRITNAATAANNILPAINQSIKPPSKSKEAEFKKHTLKTFRFDPSLKTWLATSLAALGVNVHQCPFEADVCIAATLAASTSQGERIAISADSDFQIYAGIPTVLRPLDRRCTTWTRYDKDRVLGDFGFTHPEQMVLFGVVNRNDYEGNIQNLGLARNRALIAGLPSSKSAPKPTLFRSLLNEYLSVTRPVGMPFTNSVKVFNNLQQTSLVGPPAPVHPNQEYVDLCQRARGIAHWRNAYPRTRSASTSTSSGLTGQAAIAGAAANRKPNPYRPKLGRGMPAGLRVKVFRFDQTNPRAPPQMKEEDWSGEKAAAPSNLTPLVKPKRKPKPKTAAQKRKDEERAKKAQKKKEEEKKKKEEDKKKKKVKDMAPSAAPSAKGVPRVLKESTRLFHKLRGKYRTIALPLGTVRANLLRNLTGTQAEQVKTRVERSVVMVNLIVQRLYFATALLVTALTNGDPVLGRSVSLDKRNCENYLKAVTSGPGYIFALARRLYQGNSETPRGEEASDAALAAYHAFKLFQQEAGKVLTPLKTSHPFYIGGTALDLAVQPVFRAIRSHYENATFLGVDVDPNSSVIRKFFGLNAKENRYKDFPKAKFSPSSITLSEDGLCHLLYGNTSSENLLKVVMQPHATEVKKLPTSRKVASGGPFLDQYVAFTQHNTGILVRTLFGVGQHQGVLLISEKHNKNSRVLRPAFHTDGLTITLLAHNLAMPKKKKKTDDDGAGGDGGGDVPKGGDIKGKGVVRNVEGPGASQRSLRTRRAAALSSSAGSEDDEDHAQELRSAIRASRATFQRAQEAFLQESAGGASSSSAGARRYRGARSGGVFQSGGSPSHSGGSSSDHDGEGLSAGDDDDDGGDGDNGDDDDDEGDDEDDEDDDEDDGSDAEWGPLELPADFEDEEDINNLDRFFLKDAEEAFKNMSRSSTTYPNRNTRPIGIDPGVNIAAEAVMIDPAKPGKMEARAVRVTRKVLNKPTKYFAQRLQRRKRDKGIDIVESKIPPFSRTTLREYLKFLLAPDGPLDADTASVTLTPPPLPPPTVPHGGGSGSVRVRVRQAPAPQASARRATRHQRGNTRLDVLNRFYLEDPFLPTSGAGAGGQQQAPRHWFLRNRWDAKKAKGGMMDIAIDAIFQLGGGTSHLKQRSDANANFVLGIGSGQFRGRQQYSLHGPFLRRLVSKAKGLGILVVKVKEEYTSKKCPRPNCSQDLDHIRKDRSAWCSKCQMYFDRDVVGGENICRILAEHMKGRPRPAKFQKPRGGGGGEAPPGGSTGAQPSSSGSSHSGFSTPGSSSSDGSSGDDDDEGAHLKHHPPRGLEANKEVASANEVDAQDEHKPEAAAAAVVVAALEATVAAAVEAVIVTWVEDNHWVDLASCLRGLADPTDLEVIPLKAPQAAAIHLCHWTPLKAIRRGSQDGGRLHQGRPAQHPKAEAEAEAGAEAALLHYHPRSADTSLCSLPAQHHIQEPAKDNN

SEQ ID NO: 2241 - protein, 300 aa, unidentified
  REGION 1..300: note = Table 20
MALYHPTATRTPARRISQSKLAPEFVCLTETIAVDILWANKHTQAILQFALQERLALEFKLKEFQYIQDEFRGVVTDVVFGHGLAYDASVVKPRRQQQQQLSDQDKDEMGADDALELLDSVEGHENFDNNLSILQPRQPPSLHSVHERTTRDQPPLSWRHSSGVERVETIKASTWSIDERLQPIIVCIGLAQFNVKTSLPSKHAPLSNDSYKKGELPGVIIVGANEFYTSAKCPRDGCNTFLENNIHRSKYCQTSKMDYDRDGVGSENIARVCLFHLKHQIRPPKYMPKSQTRVLLLHPR

SEQ ID NO: 2242 - protein, 1431 aa, unidentified
  REGION 1..1431: note = Table 20
MGVAGLWPLIKAAGIHVDPKTITINNLHYDVMACHYNDFINATVDKKSLRYTSDSSQPGGGPGTGLSSSSAQQPVVSSSTVATVPAHQNIRDLAKKIFDDTWALFPLCQSISFHLDGADGYTKEQEHARRAKTRQQARHRAKVELDTLQSKFDGGRWISKALPDRIYRDLRKAHRLSDAQKKAFGDAIKECDKAMQTAHAGPLTASRSDGPLPTAIPATRATYFCQCSTEADTCIAFSCHPSGPTQQAPASPANDLRDETVVVTRDSDLIMYSEVQTVFRPNPKGSFFLRYRKKDVKEALDFSEDFQLMTLAIVCKNDYTSNFPGFGIKRNRNVIRDFDPAVVQARKEREAEERRRKAALKRSTSKGKSSKKRTREASPTEVPAGTSTMASSPSSVISVAVTTRKREASRKRKASPVDERWRTMTPRQYLSHYCETVTESLKDERRVLPSRYERSLLAFAFLCTSLAGKKDDKVLLKAGRNIRQYEPRTIEEGDEEQEEIGPDQLGPPVEIDEPKLFQDLYNRYVQEMGRSRVLPANPVSVSTLKTYNCSYRNHGRSRWRNPYEHIFPRVDSNGNASFLAGLEVADIGNCKERPDGPRQKQGGRKGQGMVKKNMAKRRKRKTKADAGTGRVKIYQQKAEIDPTKPAKESNVTAETTKRRQMVKDFVTITITAGSLLGNIQQCLSGAEAIAVNKRIQDCVATKLRLENDLYDIYAVCIDKFRQRTTAAAVLSSLVGPSLAGPSSAGPPSAGPPSTPLSALQGTDGLPDDFFEQIVGPRANTIAFGLTPFLFNGTRTQRARSPEAATVAKMFAIYKESLPSPFLSYKERGWQTFDTNAGQSSAVQVVKNIKHHYRTAKINHEVWPKSTKNDYIAWFFQHNKGQFADYVQGKIASQFTRVDSADLFRFLAAKPPGPNTAEDPILKQLLHRIFGADKPNQNLRVAYITKHKGWLFSQILYKIDPPGTTRFRRYHRKARLQDDEDDPNPLVLGQSFQTNGRVLNIQVSDTRRPKPKKKKKSEDPDSQDPADDKDDEDDDEDDDEDDGGDGDDDFFDYDEDDDPNEMQPLKDDDDDHEEAISADADKQTAQTGVASQPTSMSKNPGPVTFSNGSTYTFGKGSATLPNASVFDFGDITTGEVTVIGIDPGEVFSMTATRLRLNAEKSGTTNDRASKRIRRSFLYHPVRLFQEALRVKKVKEHIHLLETNIPPYKPLSILERMHYLHSPAQQVLGRLLGPNIPVPNLQGAVKDVLFDFYHSPWMLKRKWDMRKAQQRAIDLAMDQIFKLAGVLSGRKADGSAGTTVVFALGLGSFNSRTGLPSKHGPLERRFTQRARRLGYIVVGVDEYYTSAKCLRQNCDAFLQYGERRSKYCTACKQYFDRDVVGSENIAYICMQFILGQERPPKFCPIPDPFHLTATILKDAVIEVCQEAIKNIFG

SEQ ID NO: 2243 - protein, 624 aa, unidentified
  REGION 1..624: note = Table 20
MFAIYKESLPSPFLSYKERGWQTFDTNAGQSSAVQVVKNIKHHYRTAKINHEVWPKSTKNDYIAWFFQHNKGQFADYVQGKIASQFTRVDSADLFRFLAAKPPGPNTAEDPILKQLLHRIFGADKPNQNQRVRYVTKHKGWLFSQILYKIDPPGTTRFRRYHRKARLQDDEDDPNPLVLGQSFQTNGRVLNIQVSDTRRPKPKKKKKSEDPDSQDPADDKDDEEDDEDDDEDDGGDGDDDFFDYNEDDDPNEMQPLKDDDYEDHEEAISADADKQTAQTGVASQPTSMSKNPGPVTFNNGSTYTFGKGSATLPNASVFDFGDITTGEVTVIGIDPGEVFSMTATRLRLNAEKSGTTNDRASKRIRRSFLYHPVRLFQEAVRVKKVKEHIHLLETNIPPYKPQSILERMRYLHSPAQQVLGRLLGPNTTVPNLQGTVKDVLFDFYHSPWMLKRKWDMRKAQQRAIDLAMDQIFKLAGVLSGRKADGSAGTTVVFALGLGSFNSRTGLPSKHGPLERRFTQRARRLGYIVVGVDEYYTSAKCLRQNCDAFLQYGERRSKYCTACKQYFDRDVVGSENIAYICMQFILGQERPPKFCPIPEPFHLTVTNVKDAVVELGTMTIKNLLG

SEQ ID NO: 2244 - protein, 1565 aa, unidentified
  REGION 1..1565: note = Table 20
MGCNKLFVTIHKNGLSNVSATSQQVREAGFSLFQYDVLAMHLRTIIRHAIDARHFRNGSLDLDESMLAAAREIKRDIDLTLTDLLVTSDKTTQGTSMQPSTAFGLSSLAHGSISLYDRLLLHIDGGPSLAKGIEHQKRLKKREEAASKLDSCIRAFNIKRGRSRRVPKKLLDRMQKEMTKAFQLTIHHKEALHRAFKAVGLRSHICHGEADPCLAKACLDHASNARGSSQPSGSSDSSSLSVPSQGKMAVITKDSDLLVYESIEGVLRPNPKGAGYILYEKTEVLKVLKLLHPLFLVLYGISLRNDYSYNVRSIGPVGSLELVHQVQDKYLPAPAAQAAPRPSSASRKGKNLVQPPFPSSAASSSLGSAQRKGKSVVAPVFAPSPTPTPTTTRGKHARGLGPEDEGPAVKKRIGSDPSADAASAAGQSSIISVNPQQSQPSPEELKSIRDLVACWCEKASAKIKKNVYATRFENTIQTFGFYSQLVVGEDPLVNFWYVYQFEPPLQPPLAAWPEDEEVAPEKTDKIDPDTLSARALVLLEQYAKVRNHLNEQAERSPSPGTIKSYNHTRYHNLLPGQIQANGDVIDIINRRPPYNQFSHHYIKKDGFLQGRSINDITAVKPKSVSITATVSGSTSTAQAHSSSGAAASSGGSSSKSKRNTKKKKKGNKHRKKGNKRRKKDPTDYKEKAPAGTGPKPSSATIRARKSAQEYEMRTLTVGSLAKNICSCLMANRDMDKYPFKSPEFFSFFREQRTLAEKVAKRIQVCVETAQMYQETLYAIIMLAIDDVKDPSRLKQQSQEARRIEVGSSRYRERLPWELPETYDNSFIASLLDQKVIYGLSSLIFYGKNRATEAAIEAKDAHQNTSTRNASTRKMDYSKNYGTWIFERYRQETGFIPFAERDIHILHAEATRSAASDVLEAIDTHYKYALFKDEAKKDIKWDKKDGQPAISWFQAHNTGQFADFVSPKVMARFVGVTEKDLFLFLSPPPKSIFAKEKDQFDEVSATEDHAGPSSSCGMEGAAGISTTVEDHAGTSSPRSTEGTATTVTNVDFVLSSQSTAKVEFAASSGNDNQEVLSNVLDKIFTPTGKTKQKARSDYILSKKGWFITQLLYDRGKTDSNKELRRNEKGFRRNDGYGRKVRLGSEKKSHDRPLELRTEFKTNGLVLQLVATDSRYPKKAKSKYRYHDDEEEEEDILEQEDHVEEISDEDQKIVNRIIREDAQYARDPHIIQGHYKHKHAGRSEVTDKDVKYRKENDIVFTQSGYECDLSARSELLANASQLTFPTSLKKVIGIDLGEIVTAAACLLDKDNPNSRYAKTIKRSYLYEPSWRFTRLLRSTKAANFIDILESKTPSRKHGGVLDYFNYQGRSAQEVLQEHFASDAKALEAISRPEKENVLEGSVREVLFRFYHSKWMLKKSWDARKASTQALDIAVNAIISLAGINNESEAQVIFAIGLAVFRSGFGPSSKHLILLKKLVKKIREAGHIAVGVHEYYTSSKCPRENCNLFLKDKGNRSKFCSGCNVYFDRDQVGSENIARVCVAFLNGLERPAKYKPAPPAPAPAASSS

SEQ ID NO: 2245 - protein, 1231 aa, unidentified
  REGION 1..1231: note = Table 20
MGVQGIFPMLRELGMSDTPVDNALTLGIDTIHYDVKACHYGDMMREMTNVRHSDSTGVIAALAATIDQKIKLWRNHLDKDVTFVLHIDAPGSAAKGPTHLKRHLKREAAARKLEYNLRVLERKKGRWVPHKVIGRIDKDLRTCCQLTLETRDALVAALKHLGHDVCVCRAETDPCIATQCYQHEGPKEAAVLSIDSDYLFYQGVKTLLRPNPKGPGLLHYSRDNVKKALGLIRDEELIVYGCVNRNDYNSNVPTIGLVRSLKLIRPDAENEDSDASSYNSHASGNDPESSGDDPESSGDDPESSGNDSGLSDEEPTSDDEGSHSGYTDTDSDTKGRPAKKRAKTLSSRKPLPWSDKGKAPMRNARALVADAAAEASSSRISILRSDKGKTPVRNVDVSMDVDTAVPEAQSGGQLRSITFQNQPLQGHVGTDLGSLASLRQLIAQFCDDVGAIVKMRVPVSMFEASLRTFGFLSQLKTGEEPEDHEDQIPLWEEPTDDEPDSLSPLSLLQLPNLPEPEKSPDELLQTFQLQFKDYCRLRRARRETFYPPERVEEFKRPHNQYGHAFRKDKDGRHTFLNGRTVTIDSSKEKRVPPKPISRVIQSTAARGQKSKKNKKSKRRRKKKPVQTKRKQDRIEKQPEGAGAFNNGKDSWTANQKESAAHIPAIRWFQEQNKEGIFKDFVFGSNARKYQVVTEQDLYCFLKAAPPPSTQPQPQYLSEISRFDFEPLLKGLFPKARRGDDMKEGQRADYINDNKGWLTTSLLYDRAPQHVTEGRVPGRDGYCHKVKLQSETSNRRYILGTGYHSDGKVLTLLASDTFSEKPIRKRKKKLPTFGPEDEDEVAAAAACAGSGEGNGDGDDDDDDDDDDDEDENEEGAMGKRGKCKAPVPISSHLYEKDDKHACYEFAPPEDLQAFLVGTKSGYQCNLASRTKLLPNAALLKWDSANSPKIIIGGDPGEHVALATTRIERGSSDVRNTVKIRRTMLYEPYWRFRRTLGEKKKEELIDILESMTPSRKLGNVVQYLNFMNSNIQEALLPHARSDDDRAKISLMSGTVGEVIFAFYHSSWLLKKMWDCKKAQRSALDLAVGAVLAQAGFKPNSKRQDQPTVIFAYGMATFNTRRGPASKAVVVEKKVVKALRGLGQIVVGEHEYFTSQKCPRRDCDEFLEKLDNRSMYCRKCNMFFDRDAVGSENIAFICQEFVEGRTRPAKFLPATTVVAAPATSVFVPTAAGSS

SEQ ID NO: 2246 - protein, 929 aa, unidentified
  REGION 1..929: note = Table 20
MGPSNNLKLIHKLQTESDMSVEEMLELYLVAAREELTDIDDPSVIAKERFQRAVEIFALLSPTPLPDQEPPSNHLFEELVMEFESAKRLQLEVKTATPGVDDPTDRFYVAKNSTQDHPAEDEPESGQKYRCKPATNKNRKLCSQFVTKAIEVGCLQSNIKKALNLDDNSQLAKAIVSRIGSVTRTIQDMRIRVFEIVALDVDSIMAPRWPRDLVDGSSLADVPPLPSTSSSVSSSMSSSAPSYDTWPKKPRTTLTDQDKEDLQDIISSPVYYQQLTALLLNGQLGNQSSYHLLTITPPPRATRSNPHATRAPIKIPHAVRAYERYVATTSFQPYNNRPAAVPTQTTVPRIAIKAVWQSIKALYTKSFVDDEDEPIDRPEGMQDIDYCFMLNSDRQEYTDYSSSKWRPTFIHLSEEDILKALLDDETISEQIFGTIGIAQGPRRIGRALDMVLKTKGCLISRLLYPVGSTKKLDAAGGRIRYSGYHRRISLQTSIVPARYVLRPVIRTNGHVLQLITHDMNERRRKKSDGNGDDDDGLLDTDEDEDFELDDAFLEELDDDEQLETSDELISSSNRKRKLGSAISRTIEKGDTGAPIRSGSSSSSSSRTSRSVPNVGSGSAAPGTIEKGDTGAPVGSGSSSSSSSSFRTSRSVPPVRSGAPVSTLTSNINPDVEEDDDDLITRINFKRSSIMLPNLEKVYDSREKCPNPRDVVVVGIDPGERVTMCCTRVSFTSGERESVSIRRSFLYRPYTRFKQLYERRLMQAGLTRVVSAIPPLKLGGVVTYLQYLDATGASPTVRSRLMAFYQSTWYLKKAWDLSKAQTACFDYGIKAILRLVGGSEGRSYQGAGPPPIFAIGLGDFNTKTGLPSKHSKMEKIFIRKARALGSRYCPACEMHFDRDVVGSENIAHIALAQLDCQARPAKYMPASSNS

SEQ ID NO: 2247 - protein, 1210 aa, unidentified
  REGION 1..1210: note = Table 20
MGQKGYFGYLKHTLKYEGELLEPADCVWAKWDVDLLGTYYSFIRRNLSEDLTTDPYDLGKRLGYHIRSHFDPSRTTIYMDGRSPDQKAKANAERTKTRVKNLRQIDSLLEKVKKKSVEGKWTAKTTIQSISKKLAAVFRMSSYFTQRFLEGLGSLFPDIVLCDGEADTQIAQSIAVNPKASVAGSDCIRVAVSSDSDLMGYRSVTLLLRKLSGAAGSGFRLFRKDAVLTAIRFEDADQLEALAIVADNDYHKNLDQYGWANNVRIIRAAPSEIRGTLNILDHYVNTVNAERPRTEEPVTRETFQAPTQVFYDLSPSYHDIQCQSNHEEFDSRAALLKEYMDIRDEQRCNRLNVPKKDLDFYVARHSHPNRYRPCFESKDKILNSKVREIDINIPRDTSSNQPQPKKRKNKDVGPVQARTKRAKKTTSGFGLSRRRTEDPGQRRKLKAATRKDHSLRKNWPTRSLTVGSLHASIKRTLNDGQESQATKDVCNVIGEASAQIDELCSIMFEVVALDIDRIMGPKYQVGSSSPAGSSSSSAAPPAQGSLAAPLSLDSSSPNSSQRVPHEVATSLPLQLSQQERSDLLELTGTDPVFFRQLATLILKGSLGAASQYERRRKAPPPRRSSRLHTDGPSSDQPAELAVPHAVRAYHRYMEVVPGFVPLHRRENAMNFQPSVSHLSVDRIHLAVRQLYLGSQFMGLDGEPLTRPKDSVPIEWFFRMNQPTQSYKHYPKSSWTASFALFSEEDLVHILFPVKSTRPVLKSVLGGADTITSFVDTVLNNKGILIQGILYPVGQQFPRRSRPSGYHYKLALQSDPSESKLKLRSVIRTNGFVLHLLAYDTRGERKPSKKDTVSATAAGKSGLYDEDEDDTDFELDAAFLDHDHPTSTLSRPESSSTTSSSDPCTTSANASLTSFAPTSTSRPPKAYDPSKINFARGSKTLTNVEVKFAEPENCPDHKHTRIVGVDLGERITFCATRIGPRTGERTAENEGQRETVSIRRNYLYKPATAFRQQYQDRLQESGLDLVLSRMPSFELGGVVKYIEYTAKHREAILEFYHGRWYMKHSWEASKAQRACYDYGIKAVLGLVGGSEGRKHRERDGPAPVFAVGLGSFDTQTGLPSKHSKMEKLFICKAVSLGYTVVGVHEYFTSAKCPRPDCDNFLISDKNRSRFCTECRIYVDRDQGGSENIAHITLGQVRDQERPKKYKPTQPL

SEQ ID NO: 2248 - protein, 1068 aa, unidentified
  REGION 1..1068: note = Table 20
NDYVTNIRTIGLSKNRDIIRDLIVDWNADMDVLLEAYLLEANSRVAVDDRVDKGHFRHSIAMFFDLRPTYDEKLPSATNMQYMEFSLKFSHLKALRVERKSEQPRSAPKFYIAPGSKPNQYRPTFGSKDTILGSKTRAFRVCDTKEQRMPEPRKGPKTKRGKQEVQYQRTQKPVKRKNRVPKEGEPTYEAGHKNKLKASTVVDHRLNRKHPTSTLLVGSVHTNIKRALKVPWGSDDDHDDGEGLTDLEKEPRIHEVAGQEDTLVDNINAKQEDKEEQNPDARVLSTSLSDAIGTIQLLRIQLYEVLALDLDRIFGPKLPPGTSSVTLPAPSITSTTFQPLAHITPTSSSSVLSPLSPLATPSTDMSPMDAPQPTQKLPGPACTIEQLNLSSADRQDIGDIVSTSLTFYYQVVSLMLNGSLGSNSQYERNKSAPERTIPTRANKTAFRAPLAVPHSVRAYEHYCTVTGFVPFNLHPGVTAMTTMVPRLAAIGVQTSFRQHYLASSFSGDDGKDLEPPKDNVDRVCWFHIHNWTRDEYAHLPKSRFTPTFVHLSEADMLEVFYADETAQAIALERLEVKTFSQARKLVVEKKGLLIQRLFYPVEADLIPRPSGYHDNLTLQSNGRTSKLKLRGTICSNGLELHLLAYDTTKLRRSPKNKDGSADDCSGSDADLDGLFDEPGEDEDDLLDEPFLDLDDSEYVLTPKRRQLDSVAGSISDGESTNAGLIQHGGEPIPRSGGGTSRSTIAGSSSLTRGTPMVTNAGSVPLTREDTTMEPVWKINYGRGSKLLPNVEKEFETPVQCVDWDSRPIVSVDPGEKKPFCAIRMGPRSGPRTEDNESEREVLNVSKAFLYRPVIEFRNAHQHRLASVDLDLVVFGIPPLRIGAVERYLAYLESASTGQNSEETEGQKGNPGDERTVRARIEDFYFQNRWFVKKSWDAKKAQNASYNYVLKAMLGLVGGSEDRKFDGDKPPIFAFGLGDFNTRTGFSSKHSSLEKFFVVKCMSFTPRGDVSCLEFLKSGRGRSRYCEECKIFVDRDVVGAENIGQVVLSQLREQQRPTKFMAPDTPSIS

SEQ ID NO: 2249 - protein, 834 aa, unidentified
  REGION 1..834: note = Table 20
MTKKRRLRRKRRKKKKNKGKAKYIRKTDKTRKVKEATAEDRRLKRAHPTVALTLGTLKTCVVAKLDSTSDPNLNPEQLAATIQGLIQSFIKMLNEARIRAFWACALWIDNLLTTGPSNPADLPQLLDEVLDSRDFIYGLAALLYHGVMSPLSRYSREVKKKGEGNVAKPSQLKAYENFYAKTGLGPLNQIYPDLVISRSSRMVMVPVQAALRSHYRNAQFDIDIPGDGRSSIQFFFEQNATAKKYLDFPTSAFPPQSLCLTEACLLDILWSNPTVREEIAQLLELNMSTKGAAEDKILNHKGILLQELFSLKGYKDVGLQSDDGPRRKLRTSFFTNGLTLTLLAYDTSKQKRGRGSQAAQPSDTQRSQAVQASSSAQQGSSSSGHGAGDGGDDGDDDGNEDDDILLGISDIDLLEVDEPFLDGEEGEEAAEEGTSSTNPLFPVSPSPRREINWKQRSRLLEHVEVKYDTQAACPPPESTIIIGIDPGERYSMTIAKLDPRKPNEREILRISRAYLYKPSKKFQGELERRKLRRGITEIESNIPSFSRPTLTQYFAYMSLPLNQAPSSTGGSFSGSGVGASSSGGAGTGSSSGVEASSSSGSGTSDDNRETKYRALVEFYNDGWFVRNSWDIRKAQNGCVDCVIKAILKLAGGSNGRRRDANTNAVICIGLGSFKTNRGQVSKHGILMKKLVEKAKSLDYPIVGCHEYYTSAKCPRPHCDSILENVPFRSKYCRNCKAYFDRDAVGAENIARVCELQIREQKRPAKYMPPDGGTQGQASSGSGGGGGSGGSGGGSSRSTKRKFSDEGGGGVEGSRPPKGPLLGPGGGGETSRQQQ

SEQ ID NO: 2250 - protein, 265 aa, unidentified
  REGION 1..265: note = Table 20
TISTNGLVLNLLAYDTTQMKRQQQSDELELSQGFLNTPRPKAAGKDLIDEGYANIYWKRSSKLLENVELTFNEPGRCSSTNTTTVVGCDPDIVNTLTFPSLDPHDPNLRRFLYLPVLRFNHLLKKRKREKGMIEVENAIPVFGRDPTSDYAVQRVLKILGEKGVLVIGLGSYESSKGVPSKHTAITRHFVTQAVYSRSKYCRACKVFFDRDAVGAENIARIGLAQIERQERPAKYKPMEESPAPAAERMTLDTSIWVPAHPQKNL

SEQ ID NO: 2251 - protein, 950 aa, unidentified
  REGION 1..950: note = Table 20
MRRINKGLSDIIQTSEQEKNDLSIGLMQSGFTVCRCRTETDVCIGHGADPSSIVITSDSDLFIYSNIGTIVRPLPKKRRAFVIYEKSEVLQALDLPSPQYLILFGIVSNNDYNSNARGVGPVKNLRIVKTLKESQSIETMLKEYVSIVAGIVAGTNARDYQAALRVFAYGHQTLANLPQSTAFQVAIHRLQQAKSKRAEVTCKGLLCCQWFKRNQFRPVFHTKEQILTGTVNIDIRRSTAHERPPCRPRSPKKRSGRKPKRKKRKHDGKKPARTKKEGAKARNLKDATKLDHDLRSNHPVHALKIGSLKANIARRTSAVLTDAQQEAVASRLRTACVLLQRLRRHAFWACAVQMDRILRREGTPESRKADLDEILDGDSFAKTLATLLLSGKVGSNSAYMRAMKNGEEVKKPLSLETFSHFTESSGIGAIKEMPLTLDDVPGADPSTFVLTRASELAMVQVQSALRSHFRNAQFEVENKDPSMSAVEFFFIRNSIEKKYKDFPQAHFAPRFSFFSEHAMVDVLWGDDVTRGALRVVLGLDENAGKRTVEETVQNRKGLLISKIFYDTNAKDRLSGYHNKLSLQDGIADTRYKLRGTICTDGLVLNLLAYDTHQKKHKSKDSKSSDDMDLETDTDWSLELDDAFLDEAYDGESDDSEPQDVTASDLAYINWKRGSDLLPNVEVTFAEKKDCPAADKTIVVGCDPGIKNAMTFSKLDPLQPNRRETFKVTSNFLNMPVTKFRHLLQRRKDDHGITRLESQLPSFRRDNMDEFFRYITERPDGCVESRLSQLMRFYEHRWNLKKGWDVKKAQTATYDYVIQRLLRMMRGQEDQQSVLSVGLGSFTSTIGMPSKHTNIMKHVVVRIKSLGYPVVGTHEYFTSARCPRPACSNFLETILPRSKYCRNCKVYLDRDAVGSENIAWICKAQIADQYRPAKFKPEIAMEAQRKRRRMQ

SEQ ID NO: 2252 - protein, 858 aa, unidentified
  REGION 1..858: note = Table 20
MLQLYCAAATSQVLEEVVPSYFANARTVFFDKTATPLEEPLTRSNSDHTDGAAELERLTQMRAAIKAQRARTLTISPPFYVARQSTPNAFRPTFASKRSILAGRRCKDITKARQHEHQLPARISGPHPRPPAAKKPIAKKGRNGKKKTSTASDKKRTLRPAVQQDHRLRTQFQTKTLTIGSATARMAQMGLDRETQAVPLQKHLQDVVFLLNDIQLRAYWASAIYITHLLDNTSREAAQRKALLDQVIDDQGFMSNLGRMLYHGGVSGHGYVPRATGTRSAAASAKEAYDLFSAKTGLGPLKEHVPDLPITMLSDMSMVPVQAALRSHYRNCEFADFPKAKLATGFVVLPESALMDVFYARDDTKKIVQDILFKLGQEDQVMNKKKTGFETFRFKNAALEYVRDHIGRFMERLFGCGGYASASVQQGVSSSRYLLKGSIVTDGLEVHLLAYDTRCPRRKSALEEKPDQDQDLARDMDDELDIEAGLTAMSDIDANNALTVASAPAPQAISASQTTSASQATPASQATSYTVNWRQKSKLLDNLEVALEKPEDRARLKDAIILGADPGEINPLVIAKLDPRRPNERHIVRITRRMHYVPYARFRQALEAQKAEAGIDKAESAIPTFSRATLTQYFEYMLQPTSSISTPTTQATSTASATSTSADNSQSVLSKITSFYRSHWILKKSWDLKKAQRSLIDLSIKAILGLAGGSEGRKREVGERPVVICIGLASFNSQTGLPSKHSRLERQLAKALGYLVLGAHEYFTSAKCPRPDCDNFLRQLKNRTKYCQRCKTYYDRDAVGSENIAWVCQAQIVDGRRPAKYKPRDEPTVEPSIGQSRKKRPGGDFDQTAGTSKIRRQL

SEQ ID NO: 2253 - protein, 1260 aa, unidentified
  REGION 1..1260: note = Table 20
MGTTGLFQRLKALLLDVATYQLTDMSGYYIDIDLLGTFYQFLRSLLIQFDGPDAGYKAGRYLGFWLRNSLHVGQPGGNQVCIHLDGAPCVEKAKASAKRTATYNRHLHRVDQGLAKMERQSIAGKWTPQTTMTTIVKGLTNLYVISDDVKEGIRHGIEASGLQFCQCHTEADLCIARCSSIPLATSLTRAVMSADSDLLIYSAIQVVIRPMPKSRDFGIYSKDAILQTLHLDSPEHLVLLGTISDNDYVQNIRSLGLVRNVEIVKSIVPAHSHTMLMSYIQKARAKVTQDIKNDHFKFSESVFMNLMETVLSVDPATNNVFIGRCAQFLALKDLRAEQAAALARHRVRPPFYVAPGSHKNQYRPIFSSKETILCGSLYEDISTAKERDQAFANKLASQPRPPKPKKTMKKRKKVARTPSAPSQVTRNWRIATIIDRELRKKHPTKIRNLGCISGAMRAQQQFSDAEVLDTKNHLQSIVFLMNTLQLRLYYAYAITIDALLATAPPPVGSSARPAWAPTTDQERKSILDRLLTVDFARDLARALFNGIKDDPQEEDFELPQGPLDLAHLSYFLFARATSLLPLRLKYSGLQISELSKMAASPVITAVKTHYQNAVFADESDEPQDPTLSAIESFFLRNEARRSFADFPKARFVPGFVYLTEEGLVHALWATETTKVLLQTILRRVGEEDLYFRKDMASLHPVLEGSAPEEPTALEQASLVHSLVIQPRADGSLDLGPVLETFSTKGRAVDYVQEHKGRLIDALFGRGNHPISLQQELDEKRLRLKGTITCNGLEVKALVYDTQYYRPKAARELRAQGIMAQTEHEFLREVPLDIQDNGAEEDDDDDQEGLEGLDDDDEIDAAFLELDESEQETTGPGGSGGQDQTDPDIGLPGWVDVGMDMMDVDRDGIVAAGGFVGPGDLIQQRLPYDQVLIRDPFMGVMTPQVDEDIVLDESALDIHRRRSSSTPAQQNRLIMNFKQASKLVPNIEVHFDHPEKCPDPDNAILLGMDPGEVNSLTITKLDPRFPNQRHVLKVRRSFLSQPDVRFRNALQDRKAAEGINQLESQIPEFSRATLERHFFYLTSCHHLPGTVQGTWTVWDRILNFYQGSSWYLKKKWEVSKARTACLDYAIKAILRLAGGSEGRKHRTDDRPVVMCLGLGSFNSQSGLPSKHSVLERRLVIKARTLGYTIVGVNEFWTSAKCPRPQCNSFLRNVGRARSKYCGSCRMHFDRDAVGSENIAWIGDPQIRHQCRPPKFKPPDRL

SEQ ID NO: 2254 - protein, 1186 aa, unidentified
  REGION 1..1186: note = Table 20
MGLKDFFKTLAKKGLKPTGADLSEIEKNATVDIDLLGTPVFRNFMIRHITEAYDASSALATGTALANYIHSVFGASDRTIRIHLDGAPNEEKSHAHEARSTQKAKNIEVLTGEIAKMRERSEQGRWTCQTTITRITKLLHQIFVLDTTDKASLVQGMRSQAGIIVCECRSESDTCIARTSTPGPRVVVSGDSDLMAYRTVDRVLRSIPRTHDFGWYSKDEILSALGLPTALHLVLLAIVSYNDYGSNIKGLGVVGNCNIIRQLPQSTYGDIDQMLEAYVAAAEARMKKPVNISRFDNARRIFFDHTETLSDHSSTSNESFTLHTQEFQRLKDLRFHLAMEARVARPGPVPFYVAKRSKRNQFRPIFGTKDSILSGSKKVDITRTRHHDGPAPRKGPATKHRKRAKRAMKKRQKIHKKTKTDDEGTDRRKLQISTRRDHALRSKFTCKTLKIGSVHGNLVRTGSMDAREAKTVAETIQGAAAILNKIQVHAYELIALDIASIISPDTLESTSSSSSSATPRLSASQKSDLADILESDAFYFSIATLLCQGSLGANSQYQRQLDAPPRTMGTRRTAAGTPRTIEVPHAQRAFDRYKEASGFRPFFDRQPQIGRRGRVHSTTGGPTFPTTVARLSLSSVKAAVRMHYLGSKFGEEERPDEANPIEYFFEKNREDRQFADFPKGKFAPGYIFLSEADLVNILYSSPATQPIIAKVMEGSSKTAAEKSVVGTKGVLIKQLFYDTDSQKRLDGYHRKVSLQRDTAKTTKYKLRGTICTNGLVLNLLAYDTTAPRRKRQDHPPPSEESSSTRRASGSSSQQLGSESDHDDDDLFGLERELEQDFLLDEAFLFTEDDDEEGEEEEKENEEEEEEEEEEEVSDEEEEVQEASSATAMEWQAEPSAGPSIRAKRPRSSDTASTINWKRGSKILKNIETVFVMPEDCPNAAESIIIGIDPGEIKTACATRIGPVSDSTRVSVDVNRSFLYRPYTKFRQLLQERKAADGIDVLESRMPSLTIQGVRGYLEYLRDNNTREQLFNFYHSWWYLRKHWDMRKAQEASYDYAIKSIMALGGVSDSVKRDESQPNVVFAVGLGSFNSQTGLPSKHGVLIRKLVTRARSLGYGVFGVHEYFTSAKCPRRSCTSFLQSIPKSRSKYCQNCRAYFDRDHVGSENIGTICQMQMLHQYRPQKYMPND

SEQ ID NO: 2255 - protein, 632 aa, unidentified
  REGION 1..632: note = Table 20
MLDAYAAAAQARAKKPVNISRFENATIVFFDQTETFRELSITSNEPFVRQSQEFQRLNDLRFRLAMETRAARPGPVPFYGAKRSKRNQFRPIFGTKESILSGKKEVDVSKALQHVGPAPKKGPTTKKRKRAHRAAIKKRQKIYKKAKKGDEDRERRALQASTRQDYCIPFDPTHRQDVASLISPDSVENASSASNSSTPRPLSSSKKDDLDDILESDGFYFSIATLLCQGNLGSNSQYQRQLDAAPRTIRTRRTAAGTPRGRSKFLTQRGHSIVNILYSTPATQPIIAKVMGGSSKTAAEKTVVETKGLLIKRLFYDTDSDKRLDGYHKKVSLQRDTARTTYVAPSRPKALTSAFQFDTDELDLEDDGKEEEEDDDEEEDDVDEEEDDANVEEGASSGAAMESHAECSRNSSAGAKRPHLSVSAGTINWKRGSKLLTSIETVFARPENCPDASETTIIGIGPGEIKTACATRTGPVNDTISRRYLRKQWDMRKAQEASYDYAIKPIMGLGGASDCTKRDESRPNVNFAVGLGSFNSQTGLQSKHEALIRKLVIRVRSLKHGVYGVHEYFTSARCPRRSCNSFLQPVPKSRSRYCRSCEACFDRDHVGSENIGILCQTQILQQQRPDKFKLTN

SEQ ID NO: 2256 - protein, 1037 aa, unidentified
  REGION 1..1037: note = Table 20
DVLAKLELPSSSHLTVLAAISKNDYGPNIKTLGIITNCKIIKKIAAGPIDSMLDEYVQLATVKVGHPVDKAMFDSSKRIFFDMQDTMSTSSAEAASNNDFVTQVREFNRIKGIRATVSRQAQADRPGISFYVRRGSKRNQFRHIFSSKGSILHKTKEVDLSLVRAYHHPPAPSKGPATKRRKRALKKKQKKQKKIPKKTKPKDQPAERTLQSSTREDHRLRKTFVTKALKVGCIHGNLVRTRTTSGITAAEAKTISTSLLDAVMIINNIQRFAYEVIALDIATIVSAAAARAVPPLAAQASSSSASQTTSAPLSRLSNNEQKDLQDLLEDHAFYHSLATLLCTGSLGPQSRYERRLNAPQRTMTTRSSARGAPPLAPLQVPHVVQAYNRYQGATGYQPFFRRQAAQRGQELVSNTAGPVFPATVPALALHAVMTAIKSHYLGSDFGDMECPEGVHPIDLFFQANAKDRQFADFPKAKLAPSYVFLSEASLVQILYSNNETKGIISRVMGHATSKAAGEHVVRTKGWLIRQLFYNTASTKRFDGYHRKVRLQSEGNRGGKFKLRGTICTNGLVLNLLAYDETAPRRRRQAPSSTEPQLASSSTAPQQPGPGGDDDDTEADAEDSDLFNIENQIEGDLLLEDAFFPGAGGSSQGSSQGSSPSASEDEWGDFGDDDDDDGDDGWGAVELGGSMSTSAQAGPSAGPSTAVGQGTLVSPSAVVLGKRRATSPPPQTPTAVARGKRKATSPTPQTSGLLPAGPLPLGPQTRSAVAAGKRRATSSAPQSTATTAVTATPFAPGDINWLRSSRILQNVGVLYTNPGNSPNPNLTTPYTMFRGLLQQRKAAQGIDIIESKIPSMTIEGIHTYLNYFKNGVQEALFDFYLSPWYLRKSWDMRKAQLAAYDYAIKVIMGLAGQQSVNEGQRRPANGADVVFAIGLGSFNTQTGLPSKHGELERRFIIRVKSLGYDVVGIHEYYTSAKCPRQGCNAFLEQVKKTRTKYCRNCQAFMDRDKVGSENIATICRAHIRHQTRPDKYMPASNN

SEQ ID NO: 2257 - protein, 542 aa, unidentified
  REGION 1..542: note = Table 20
MRGHYLGSKFAEDETRPKDVNDIVYFFDKNQEKKEFADFPRAKFRPGYVFLSEVDLVQILYSTAATKPIITKILGISTVSAAEKELLNHKGLLIKTLFYNPDSATRIDGYHRKVSLQDDKGRDTKYKLKGTICTNGLVLNLLAYDTTTTKRRPKGGGQKSQDGDQDLFDTQAEIDEEFELDEAFVEDEDEGQDVSDTEMRSVSSNGSEEDTGGRVEDVEMGDEEGTEMEWQVEAAVAEGSSGRKRPLEPTSSAEGKRPRTAHPHEGINWKRASKMLQNVEVAYEHAEVCPPADQTVVIGMDPGEVVTMTATRLDPTRPSNRASVKVTRSFLYRPYILFRRLLEGRKRAQGIDLLESLIPSFSRDGIHRYLDYMSQDGVRDQLLDFYLCPWFLRKSWDCRKAQLAAYDYGIKAILRLVDDPAVHEARRREVWEPQVVFAIGLGSFDSQTGLSSKHSQFEKRFISRVRSMGYSVLGVHEYFTSAKCPRTGCDNFLESIPKCRSRYCRGCQAYFDRDVVGSENIASICQSHIRHQRRPNKFKPTH

SEQ ID NO: 2258 - protein, 1373 aa, unidentified
  REGION 1..1373: note = Table 20
MGFTTGGAGGGGHTALAPALIGGESVRARKLVHVHRGERAALEHAIATGGPLRFLLVDTTPIEYAITARMADAAVPVPQTAAALRSAVLAALRAELLRLGALGLAERSIFCWDGPNVALIKKDTTSKRMQAMATGLLAWQREAAEAAPREAQLRQHATHAAMAMLSDLYTPEGVAALVADLPGHVTADEDAVAGSAAPIVHVVAHNEADLLIARLSRSLGHGESSAVLSIDSDMLVHALDAYRWVVRAVPLEEHDVPGAPPPEFHWQHLFDRNRLAHALNTTWSAAFGPHLDEARVLAFVALCRTDYGNGLHRIGPKQLINQRQLANALLHVGARPLLAARVHAIIERVGHNHTAAEVAAVQRIADVYLLAEHGATETRAKCRNEATRAAAQARLGFRDGSRLAHWEEHPQEHRPVVPPLRAPDHGNVGGKALGFKQQVSRAVLSHKPDILVPRTQGNVPTTHLTPKRPAPDRVFDKSKQEAAKSKKPARGSTAVKLLRKTPKVYDGGASTTKIKDSTVDKETMTKHFGLATHCTSMAALGNSGVSEAHLRAVPGFAALVSTEAYSNQHCIVVWRVALGEMLKLQPGWLTCSDATAVDRLRHLFLVCRSGCSSKSFLNKGMAAPNGYTNDEFAAVRSSGGWSDEMVQARRAVQQAGYVLPDFAMLDKATPNVLAAHIFGEWSRLAERVRGVVSSAIHLRYGHNKRGRTLTKRLWSCELPDRHGRAQHGVARDSELQALLSQRDAHVVAARRTLEDSAEGGWDLTLDQIMRSARGTVTLHLLQGWAEALSGKALLSGTAAPSFVGIFTRSSLGHFFRFGAKRLAAFASWIDTNSTLLRAAADSERLARCGVVRHPGRWALRPDLPSICAEMQFRVRRQLGLSPELTKDCTSFDKAAMDSTLHFLETALDMSARQAWGAMGMGVAWVPTGTVTSDGASMRWYYCNLTRPVRFRMLDANAPPEEDKYRVGAPVLSECAARLAPHQSSMVWRRLQRHERFCGVQVGVRRAVVLPLPSNEDFTGSPAARTSANQGALSGTTSRKNTRLAIGKAQAAGRPVMHVGVDPGINNIVTMARFVDMEPGTYYTCPDGTHPDGRAPLTADERVAARLPPLAPTRTKRSLSDELYGATDEDRQRWRRLQAVALKKETMTDQCNWLASEIAKLRRTHDAAAPVGVAARHMHAAAFEQSPAVSALRDELRRVKKRQLQLAVDAILEWLVMREGVGLMSQRFQTWGSRDALVVVHVGNWKSTRRPGLAGQTSSVLLRECMRQARLRGLPIVWRLQDEFMTSQACPSACTSTGRKIDSKKNLRGEPQRLSGLRRRFRSRAVRDIKHCTSCHRTYARDVAAAVNIMLAGLHQLRHNCGAFRPPPPKPLRQ

SEQ ID NO: 2259 - protein, 845 aa, unidentified
  REGION 1..845: note = Table 20
MLNPAHGVPAHAPPQPPQAGQAGPPQQAQGAAQGQLPGQQVAQQAQPHGVGMFRAANVDFGGGDQGTEFTITSSLHSFFRKQYWFLERDFEDVCSQVGRLTVEAGLAHNGYIAHVLEEQFNLFWQWDLEAWDGFVAAQQHAVANNPLGPPAPWLPGQPPGFQALPPPQPPLPPAQLAALQATRAAYIAGKLAQFAPLAPNVQNMVQMGIMPIPFPSEVRTLIQPNVNFNAQLIAEVAQGVSRAPFHPPRPPNPQGHPPPPPINHTIIPNNPANLSVANYLRLYYRPQRVLQPYARVQGLGAIVSQVIRQMQTNVRNMISAKNVHIHLKGLFRLKLWPRLSSLNGGVGRRRLNITKRTAAGAAGFIFGLVYRRDPFLMPNKLDDFVQRAINRQVHGHATLQNNVDRYCREVYDWGMAMFGQVDLRPASIENEWDQWYPRLYYIQRCFDESPGVRGVFKKFSLAPHPDNKLPLILVTTQGLHEILMLSKTLRNHGALPQAEQDRIHNLNIPTWNAIRTAPNAAQLGIALWRRFTKFESFETQNHKFAASIRVDGVNTHLNMRKPTRSGIPVTLENYLQRPADDRDLRGKLVSSCDPNRGKTTYHATVDVPGNIVNKRPHLRPSDLNGWPVDYDRGFTTNEYYHRAGFDWEQKLREKCMNADPHIQYYNKHVPSNHTVDHARLLIDLNFRLRHLSRLLLFYGARRWRMMKLKARSTKQRALAALVQKFTRGRDPAECIIAWGAAEFDHASRGHRACPYKLIRKVFASAGVTVILVDEKNTSRVCSKCHQWFPKERGTKQKLWHVRSCTRRNGGCGTTWDRDRNAARNILFLFFFANARNTVARPGLFA

SEQ ID NO: 2260 - protein, 559 aa, unidentified
  REGION 1..559: note = Table 20
  VARIANT 299: note = misc_feature - Xaa can be any naturally occurring amino acid
MDNFATRKNINRILNYIMLELSRNSDNYDVYRFPLEAVMFSKGKKPTQRSEQEVFTLMSLALSVWNDTRELLECKSISRKVIKPLFSDYVAPLYKLLQHSVSVNNEYASSGKRQRQRRRRLRAFTIVPLASYQQKHIPLDTVGLYEIINCAGLNGDLWKGNRQAALNDAVSIWSSVFDFKKLETRNRRFGFYVTTNGVEVGVSILKVRKKNTLTDHGFSSDNKFQKMTVNPSTRVIGLDPGRRSLYVAYGGNDYKETVFECSNARWREISGAQHGQQKRKNWRRNDPHLVSMMNLGPSXPSTRVFGLDTGRISLYVAYGGNDYKETVFECSNARWREISGAQHGQQKRKNWRRNDPHLVSMMNFGPSPKCCTTEEYNAYLHHFLDLRDDILGFYRDPKWRRLRFKTRITRQKAYETLARELTGGDKKCIIAYGSGGFSSTSKGHAPTPNKHLFLELKKRCKVRLVSEYRTSQVCSNCSAQLQQTKHWGLKKCNNHSAEGIPYNFRCLTLWNRDLNAARNIRFMFLYRNANKNEMPDEFRKKKEGETKSNEQANISEPCN

SEQ ID NO: 2261 - protein, 749 aa, unidentified
  REGION 1..749: note = Table 20
MQAGVDPMLGFRDLELDDDAKGVKPCKCGGFDHKRVSHYSCPLYQGKIRDRYKLGDHEATECSIKLGLANFLHPALSANQQKQLNASIQDAVHRITDVYAEASRFLNGFVLWALESGHSIPDLRYSDGIMAQVFQAIQQKETKAPYSRKKVASSLLNLYADTVYAQFRPKQVAWCDGSYLSYSIKALSKQYAVNCMVHVQTNIKRFLKQVVKFRLEQKLNGHISIKSFNLLLEYLMRQLSRYDSQYNVVRFPLEIFPLDGSWNIDFSSPLYETIVTAVSDVWSEALLILENKNITKKYVNKEWLKYIRPMHELLRVACDNYQKEADARRHTRKKGRSLRLYSLVPLAAYQQTHIPLDSCAFHQILVSSGLAKDFGCNKLDDFLLDPRKYWAMVFNLGSVETINRRFAFRVVTNGVEIGINMLKPKIESNFNEWGLDEDNNYHPINITAETRVVALDPGRRHLYDAVGGTYLQQENFSCSNSRWREISGTKYGTQMRRQWMSQNKDLQKKLHNTPTPKCSTLADYGKYLGFFLSERDNILGFFREPKWRRLRFITHRKRQKAYDILAKELTGGDPNCVIAYGAGKFECSSRGHAPTPNRKLFTELRKRCRTRLVSEFKTSQICANCNHRLDKVYRKTTKMKPGKTESNIKHMEQTKKNSKKLCWGLKKCNNHLASVRGRSYCLTLWDRDINAALNIRHVFLYRNANKNESPGIFKRKKKSDDDETKKDDQNSTQPQAASPVAPIDMARGS

SEQ ID NO: 2262 - protein, 804 aa, unidentified
  REGION 1..804: note = Table 20
MSDQRFIPPDTSQDHSESNPHVDQAFPMDLDDTDKPTDIVDIEMEPLQRIATSAVDVITFGADVDGVPAYGSKRKKRSQANKQKSTLATNIAVAMTSVDLSASYQTVTDETAGTKCSSCSGLDHQRKSSKKCPYYQGKMADRYKENDYEESECTIKLSLNQLLAKSLSDNSKQSLKDAIEDAVNCASDIYVDATRFLHGFIIWLMERNHPVPDLRHSEGIMAKIFQVVKFKSARDPYNHNRVNYESINKYADEIFHSTRNGLAYGDGSGISYTVNILARNYKTNCMKYIQMNIYKWLKQHVRYKLHKHVGSFVSAKSLTTLEKYLMHQLSRKSFQNNMVAFPMEALRIVGEPGNDTEKVTTSDILERVVRIWDKTLALLNFRRIDKDSVQADWWKYVPSVWKLLKCSSKNYESEALRRKEQNIKGRSLRLFNIVPQASHHPSHAIIDSCVLHQLTVSAGIAGEFGCAKQDSFLSDAAKFWAMCFDVKRLTTMNKRFSLMISTNGVEVGVLMKKRVALDSLDDWGHDKIGLDPGRRNLFDAVAGADNDLEKLSCSNGRWREISGAHHCIQKRRHWMSQNKDLMNKLKESPTFKRSSTEELTEYRRHFFSIRDAVFGFFRRPKWRRLKFKTRIARQKAYDKLAKELTNGDPNTTIAYGGGKFYCSSKELKRRCRVRLVSEYRTSQVCHNCHSQLEEVYGAIMVPDKHGRLGKNGKVKLKMTGRRKLCWGLKKCTNRSANFNERSFCLTLWDRDVNAALNIRQVFLYRNAYNNKAPIEFKREKKEDEEVPVADNKDSTTPNAMDMDT

SEQ ID NO: 2263 - protein, 782 aa, unidentified
  REGION 1..782: note = Table 20
MSDQRFVPPDTGQDHSEIDTHVYQAMPMDLDDRDQPTDIVEIEMKPVQRTAASADDVITTDDDVVGVSSSTSKRKRRTQCKCGSTTHLNISHSACPLNKRHKSTSQTETVSANASPVAAVNDQSADIENPVKKCPSCGGTDHQRKSSKKCAHYQGKFADRYKQHDHEESECTVKLGLSYMYNRQLHPEQKQLLHNLIQDAVHRMTEIYCETTKLLQGYLIGLLERGDKIPDIRFSDGILTQLFQAIQFENENSHRIPKTVSTASINTFVSEVYSVARGDRSFCDGSGISHMISSVAEQYNTNCMLHLSLKMKRYLKQWLQCGIKRSILWSLKLLALKQSKNLGGPILSHSIICWLSLGENFYSEAERRRTNRLKGRSLRLFNLVPQASHHLIHVPIDSTILIDLLSSVGVKKFGYRDRNECSADPLKVWQSLFYFDRIITARKRFGLRIATNGVEVSVLLMKIVTNGPKLNDFGIDQNDQFIPFSVAGNVRIVVLDPGRSCLYDAVAATHVDGLIQNDNEVLSCSNKRCQDLSGAHRGRQKRSHWMLWNQTLMKTLTQAKWRRLKFKTRISRQKAYDQLAKELTKGDPDTIIAYGAGKFDCCSKGHAPAPNRHLFKELKKRCRVRLVSEYRTSQVCFNCHSQLEKVYGAVIMSDKHGRLGKNGKMKSNRTGRRKLCWGLKKCINHSANVNGRSFCLTLWDRDVNAALNIRQVFLYRNAHNNESPEEFKRKKKEGEKVCAAEIQDSTTSEAMNTDTLREDGLGSNGYGIKSQVAQKYSEIPAI

SEQ ID NO: 2264 - protein, 697 aa, unidentified
  REGION 1..697: note = Table 20
MADPPIEVADIGGALPPRKRQREVHCKACGRDDHKRSSSKMCPNYVPRARNAAKPQDNMGIPVAEAQLAVPIGLNVFCKLDAVKQEISDLVSRCTDLKVEACRLLLSFVLNHLVYNPDTPMPDIRFGANGQMRNFFISLIANPRRRDLFNRNTCNWAALNEFIEAHYVPRRPVDLFWCDMRGYSNMVTTLASAHNDDCARHISTNLPSRLKQWLRHKFRKHLGFCLEEDDVNTLAIYVLALIDDPPEDIEEMPPYPAEIIDNCGNGELVVYYLDYYETRARQYILCYLPLDKPSLQSNWHLYLKYMWRILRTFENNHEMYEEEYLLNNEDPLLNPYALLPLNGFTQKHILITSNVLKEICVAANLPDVRQMNAPALWSHCFKLNKVSTTGNQRRRFGYSIKSDGVGCSASVLRPAYPAPPASRYGFAFDGTGYQELDVNNETRVIGIEVNRGVLLAASYSPDDRIPDVPTEQTPFANGKHELVYTTARWREDNGEKFGEKKKAEWNEIAPEVVNAMTHIHSAKSTSFLGIIQHLQYVLQHKDAFTGFYRPEMWRKLRSKLFSKRQRAYDNLARMLTLRQDGQFDHNTIIAYGAGNFDTASPGYPATPNKRLFYDPKKRCRVRLVPEYRTSQSCSNCECELVQSRIWRIKHYPNNNCLAIWHRDVNAARNIRYIFLARNRGGGERPVPFRYDPPRPQQ

SEQ ID NO: 2265 - protein, 279 aa, unidentified
  REGION 1..279: note = Table 20
FDVDKLTTATKRFGFSISTDGVHYHRHNLKQHIRSNINDWGNDFGGEFHEMELQPETCVVALDPGRGSLYVAASGNTPDDIQECKTKRWREISGATYAALKNKTWMAADRHWQQMVTLTPTPCGYTVESDELLGFYRETKWRRLRWKTRIKRQKAYDTLYKELAGDAQDVVIAYGGGKFSPKSRGHPPTPNKHLFLELKRRTRVRLVPEFRTSKMCSLCDHELVQSRFWSIKSCNNNNCWTRWNRDVNAARNIMRVFLHMNANGGYRPEAFRRGNPHGN

SEQ ID NO: 2266 - protein, 206 aa, unidentified
  REGION 1..206: note = Table 20
EIRWRRLRWKTRIKRQKANDTLYKELAGDAQEVVIAYGGGKFSPNSRGHPPTPNKHLFLELKRRTRCREIRWRRLRWKTRIKRQKANDTLFTELTGGLEDVVIAYGGGKFSHNSRGHPPTPNKHLFLELKRRTRCRLVPEFRASKLCSLCDNELVQSDIWSIKSCNNNNCWTRWNRDINGARNIRRVFLHMNANGGEKPEAFRRGN

SEQ ID NO: 2267 - protein, 783 aa, unidentified
  REGION 1..783: note = Table 20
MDLDLNMRVDENEMPKTFTTDGFLSMSMVEYSGVAVDVGDLGGIGPSAGGKKRKEPEGGKRCKCGSTEHQRICNKNCPLYKPRLKLQYRDTELPEKTVTTTTGLNSVLRIAPLKDIIMDAVARCTDIQVEVSRLLNGYVIWMIEENRPIPDLRFSDGIMREFYQAIVSTPSINEYMDEIYSRCRPDHLAWNDSTKLGQLLSNMARMHSTNCQNHVVTNLLKWIKKWLIWKRGKQLRAFLCADDFNEVVTVAMNEITRTEEDEGFYAIPLNIIEADILKTDVQAFENENGIHGRGLRLFSLTPISTFKQKFILIDTDALHDLMTSENIGIVVPRDKVVFRVNAIEWWPRAFNVDKLTTATKRFGFSISTNGVEYHQHNMKQFERSEMNDWGLRLFSLIPISTFKQKFILIDTDALHDLMTSENIGIVVPRDKVVFRVHAMEWWRRAFNVDKLTTATKRFGFSISTNGVEYHQHNMKQFERSEINDWGYNYEGEFIPLEINGQTRVVALDPGRNSLYVAVSGKTAADVLECSNSRWQEISGTRYSTKKANTWITADRDRHMAITLTPTPSEINDWGYNYEGEFIPLEINGQTRVDALDPGRNSLYVAVAGNTAADVLECSNSRWQEISGTRYSTKKANTWITADRDRHMAITLTPTPCCSNTDGYITHLLHELAAGAEDVVIAYGGGGFSHNSRGHPPTPNKHLFLELKRRTRCRLVPEFRTSKLCSKCDNELVQSDIWTIKSCNNNNCRTRWNRDVNGARNIRRVFLYMNANGGRKPPAFRRGN

SEQ ID NO: 2268 - protein, 1744 aa, unidentified
  REGION 1..1744: note = Table 20
MDLDLNMRVDENEMPKTFTTDGFLSMSMVEYSGVAVDVGDLGGIGPSAGGKKRKEPEGGKRCKCGITEHQKISNKECPLYKPRLKLVDQPFDRTERTVTTSTGLNSVLRIAPLNDIIMDANRPIPDLRFSDGIMREFYQAVCSIDALRNPHQHKIVSTPSINEYMAEVYSRCRPDNLAWNDATKLAQLISNMARMHSTNCQNHVVTNLLKWIKKWLIWKLGKQLRAFLSADDFNEDGVDLDLNMRVDENEMPKTFYTDEFLSMNLVEHSGVEVDVGNSSGIRPSVGGKKRKEPEGGKRCKCGSTEHQRISNKNCPLIYEHKNTFHLLRVEDGVDLDLNMRVDENEMPKTFYTDEFLSMNLVEHSGVEVDVGNSSGIRPSVGGKKRKEPEGGKRCKCGSTERQRISNKNCPLYKPRLKLLYRDTELPEKTVTTITGLNSHSGVEVDVGNSSGIRPSVGGKKRKEPEGGKRCKCGSTEHQRISNKNYTELPEKPVTTTTGLNSVLRNAPLNDIIMDAVARCTDIQVEVSRLLNGYVIWMIEENRPIPDLRFSDGIMTEFYQAVYSIDAVRNPHQHKIVSTPSINEYMDEIYSRCRPDHLAWNDATKLTQLISNMARMHSKNCQNYVVTNLLKWIKIWLILKLGKQLRAFLSADDFNQVVTVAMNEITRTKENEEFYAIPLNIIEAVTPEQLNLIYDRINHYYEKLTIILNNQPLDEDSIKGSWWTYLKPISRLLNTFVNNYEQDAQNRLENGIHGRGLRLFSLTPISTFKQKFILIDTDALHDLMTSENIGIVVPRDKVVFRVHAMEWWRRAFNKWLIWKRGKQLRAFLCADDFNEVVTVAMNEITRTEEDEGFYAIPLNIIEAVTPEQLNLIYDRINHYYEKLRITLNNQPLDEDSLKASWWTYLKPMSRLLKTFVNNYKQDAQNRLENGIHGRGLRLFSLTPIKDEGFYAIPLNIIEAVTPEQLNLIYDRINHYYEKLRITLNNQPLDEDSLKASWWTYLKPMSRLLKTFVNNYKQDAQNRLENGIHGRGLRLFSLTPISTFKQKFILIDTDALHDLMTSENIGIVNRPIPDLRFSDGIMREFYQAVCSIDALRNPHQHKIVSTPSINEYMDEIYSSCRPDHLAWNDATKLAQLSSNMARMHSTNYQNHVVTNLLKWIKKWLIWKLGKQLRAFLSADDFNEVITVAMNEITRTEEDEGFYAIPLNIIEAVTPEQLNLIYDRINHYYEKMRIILNNQPLDEDSLKASWWTYLKPMSRLLKTFVITVAMNDITRTEEDEGFYAIPLNIIEAVTPEQLNLIYDRINHYYEKLRIILNNQPLNEDSLKASWWTYLKPMSRLLKTFVKNYEQDAQNRLENGIHGRGLRLFSLTPISAFKQKFILIDTDALHDLMTSENIGIVVPRDKVVFRLNAMEWWRRAFNVDKLTTDTKRFGFSVSTNGVKYHQHNMKQFERSEINDWGYNYEGEFIPLEINGQTRVVALDPGRNSLYVAVAGNTAADVLESDRDRHMAITLTTTPCCYNTDDYITHLLHVLEYRDEFLGFYRDMRWRRLRWKTRIKRQKAYDTLYKELAAGGLDNVVIAYGGGKFIHNSRGHPPTPNKHLFLELKRRTSCRLVPEFRTSKLCSLCDNELVQSDIWSIKNVVIAYGGGGFSHNSRGHPPTPNKHRFLELKRRTRRRLVPEFRTSKLCSLCDNELVQSDIWSIKSCNNNNCWTRWNRDVNGARNIRRVAFHMNANGGEKPEAFRRGN

SEQ ID NO: 2269 - protein, 634 aa, unidentified
  REGION 1..634: note = Table 20
MKRKRTVQASTKSSLAANTTATTTATTTATTTATTTATTTATTTATTTATTTATTTTTTTATCSACGQVGHSRRSNHLCPFYIPRQRVEIRAKSAVPMVSGTVKIGFGSLLAFGPLAGPIESAVARLGKITFDASRLLNIHMSKVCADGGEIPNLPNTMRLYFQAVGFNTRGGNLHQGAPTLNEGINHIRDASFPAEHQFTDSKILSSMIGAKARSWTMACQNHVVLNMPRRASRLISWWLETNVGEAIQSRISISQLLKLLLPDQRTVMEAHLRVLFDFLTDDIFGGLPLTGEAIKASWWSYLRPLYRWRPSFHISKVETDRRQFARSLSTDGIGVSAGMLRPMSSSSGIDAYGWRWEGEGKDRHQSEYVPWDVRPEDEVVGLDPGRRTLLSTTAGGLDMSLDNGGLAERGTQWSLSLKSWRHLAGMDRDARKQRLWMKNHAEVSTTLRDLPSFRSASLDRLRAALVIHSQSYSWLATFFAARRWRRLRWGAHISREQAYHKVALRLSAGRPRTFLAFGDGAFSSSSRGHAPGPIKMMYAKLRASPLLQVRKVWEFRTSRVCSKCHGEFSGRHKAWAIKECRSVCRTWWNRDINASRNMLHLALHQEMNEGARMLGFDITATTLVAEAEAGTD

SEQ ID NO: 2270 - protein, 510 aa, unidentified
  REGION 1..510: note = Table 20
MWNNGNGLGQIISSMARLHATNCQNHVVVNLHKRLTRWIQWKLEKQLQFLSKNNNCTLTHHLVSKLVHNQPFSLPHFVDKLNPQYRILVEIRACYTFRKVKQVILENKLISEDVIKQEWWNYLRPLWKILITFEKNNHVDAESRCSSNRRGRGLCLFTILPHTSFQQQFVLIDSDALYQIFSKINFCGLGRVSKSDFSENIEEWWRVAFRIDKVTTTQRIFGFSIMTDGMSVSANLKKEVTKQDIPVNAYGFDKEGNFHPLDVRDNDRIVGLDPGRKDLFVAMSEEKKPIRCSTKEWHILCGHVYARKKTEVWIKGNNIVENILHNIPTPSCSSITSYNNYLTYVLQHMRILIEFYGERRWLRMRWKSYINRNKAYDKICERITKKNPRTIVAYGNGKFSSCSKGHVSGPIKGLYKELKRRLGKRVRLVDEYRTSIICSTCNGRMDKRSRFWSLKTLWNRDTNAARNIRRLFFYMNSNNGERLEEFRRSQNRGGEELPFTVATSGVSSDA

SEQ ID NO: 2271 - protein, 921 aa, unidentified
  REGION 1..921: note = Table 20
  VARIANT 539: note = misc_feature - Xaa can be any naturally occurring amino acid
MASDVNISEDISQSSAVTKKRKLEDVEKEEYEETEDQSVFTVKSGIMTFLKNTDLKKPFLEALEDVIKRASLLRYLSAQFLNFVMLKHLEAGSEIPNIMNNTGGLMRQCFVSMSTGQSQYVKKNIEIRARHDHINTLASEFKQLNSIEDSSLPDFKGLSHVLAQCVKENDTNCKTHVSVNLFKVLKRWTAYQLEQIFPAVFKSNSRANTVANFIIRSVQFEQKVVWKKQPGIPGTLFKFLEKNKIKCGKFRIITAIIIARRRVLNLIAGKILCPKIMKKNYIRFLGIMRKISVCFYLNYAVDAQQRMKEGRKGKGLRLFSLLPIVKVRTGSLLIGSSSLYEFLKLCGDSYCTTLNNFPTSLGTFLKQDAFWWKQLFNYDKFESVAKQRTFKFTISTDAVSVSIHLKRPVHNSTFDDHGYTVDKKNYDILDLSNSVIIGFDPGRRDVFVAAKYPSDITKHEGKNMKQKQKKKKEKKKRKKSGKKTSVQGEGNILIEKSVITRNVEENAKNNVLKNVNKRRKKKKKAPIQKSEVVRCSAKXGKNMKQKQKKKKEKKKRKKSGKKTSVQGEGNIIIEKSVITRNNVNKRRKKKKKAPIQKSEVVRCSAKKWAAKRGDRYFRMKYRVWLKYGTGVKKADQKQLTSKVPTVKGFCDFVRTGWDRYNVVSGFYGSKRWRKLRWSLYIKKQRAYDYAWKKMSFGLKEENVIIAYGDGAFNHASRGNEWAVKRGDRYFRKKYRVWLKYGTGVKKADQKQLTSKVPTVKGFCDFVRTGWDRYNVVSGFYGSKRWRKLRWSLYIKKQRAYDYSWKKMSFGLKEENVIIAYGDGAFNHASRGHVPTPAKTLFQKLKSKLKNCSSELEQKKAWTSKFCHGCNKLVDRDINAALNIGDLLVYQNENNGKRPEAFTRSNSAQHDQGQKLEKGGLQ

SEQ ID NO: 2272 - protein, 1047 aa, unidentified
  REGION 1..1047: note = Table 20
MEADVDLMVVDEDVMDIDNDVGVLESTEKNSLWDLFTKYLNNNYSDVDIFTDILVVPLHEGGTVPLLPYDIEDLAINEDVTNGTETYSIKVGVNTGLCLENRELAGVKAALEEISQRVSIVRFWATRFINYVALYYLENNLGIPNLSRSADGMLRKCFTIVASDGIIQNSKDSKKAINGRFLAALYRGFAEHSGLNSDNISSLKGFSQLLAGVSRQYEANAKTHVKMNFPKKLKRWIMWKLECILPAVFKANTRSGYAADYIISCVKYVQKILKTEPKFPEKLHKSIKKATKFDHALFFKSLAAVSRVTNDALFLLGPLSLDSKKMKIHFCDYLGVMHQIQKDFYNNFQSNAASRKEERRTGKGLRLFNLFPMTKARCGNVLYSTDGYYELLKYAKNQNNLFQEEDFPVSLAKFKAEGVKEYWFKRCINVQYFESLGSYRKFGFSFSQMVKFGFSFYSDGVTLCPTMIRPKTFTLTDDYGFVDESRTKFLKHDLNDVEVVGVDPGRKDLFYSVLGDKKDVASLSVQQWCWLRGDYHFRNKQKKWLKERNEVQQADKSILTSKVPTVDGFIDFARSCVARFNVAFDFYGAVRWRKLKWNLYIRRQKANKQKKWLKERNEVQQADKSMLTSNVPTVDSFIDFARSCVARFNVAFDFYGAVRWRKLKWNLYIRRQKAYDFACKKLKFGKKLKNIVVAYGDGSFSGSSRGYAPVPTKQLYIQMKIRMKQRIVKVDEFRTSKLCYHCEGEFEQQREWRLKYCPNCKVWWHRDINASLNIRKLYLHQNQHNGARPQAFSRSIRKNDPEETAQKNSDFMGGFAPMTVETPSVSAYKAAQDGQLNVLRTLLPENPNLIRSKDEDGRTLLHHAVKHSSVVELLLEQDRCDVEAKDEAGWTPLHIAASTNQEMTVKLLIAKDADVNATNDSGVTPLCYACSKGYKNIVTILLDNGADALLRDKFGRSVFHRAVLKGQLSILKLLFEKVKSASVNQPDADNNTLLHLAVEEENGEIVKFLLLEKHADATYKNKEGKSVSEVASKTFLPYFQRLLENAI

SEQ ID NO: 2273 - protein, 728 aa, unidentified
  REGION 1..728: note = Table 20
MKKKRKLPDDDVEEYDPAAEDDVAAEPIDEPEEEEEDDMTPIPMTSIVTRKTGLNSLLPNEILRTKIRDLVDAMNFIRYHGSRLLHLYVVQMCSEGRDLGLLTCSYGGILRHFFVAVCYNSGNIHAKRLDNNVAPLAEIYRNTAFEYGIEFPLNTGISSTLNNMITTTTVGRVRRWLMHLLELEYPDCFKVKKRSTSGANYCISSLSALLEENNELPELPDILEKFAKKHDRARIMRALRTKRNFLKEYWYKFFYLQYHILEHFTKYSEADAQARLEENRRGKGLRLFTMVPLADIKTSHAFFDSSGLSEVVHMAFEDESFVAPPNHPRNLNVTSRKALFTGKKSRVPLWNWAVELKCVKHTNLDFNYSFSTDGVSVSVHFKKPGFKERLNDKGFLWSNQMKYSPIGIENRVVVGVDPGRIDLVVCSDGSRKSFGCSGKEWQEIAGFSTDGLSVSVHFKKPGFKERLNDTGFLWSNQMKYSPIAIENRVVVGVDPGRIDLVVCSDGSRKSFGCSGKEWQEIAGFRYQRWRQKSWSDKNDNIQTIIRDMHSAKVRKVEVYLTYLNYILRHYASLADFYGSQRWRQLRRKTDIMKTKTFDIVCRRIAGNNFERVVAYGSGGFSSCSRGHAPLRVKGLFKALKQKNALVRLVWEHRTSKLCCQCEGELPEGKRWQVRICKTCKIHWNRDFNAANNIRKILKHMEENSGDRPCNFLTKKQQKSKGNDLIVGG

SEQ ID NO: 2274 - protein, 588 aa, unidentified
  REGION 1..588: note = Table 20
MSYLAWQANERADKPEFPLFLDKFLAKNDDLRAVVLAALLTARVKLFSISYASEGTAGAKYIMSYLAWQANERVDKPEFPLFLDKFLAKNDDLRAVVLAALVTARVELFSISYASEYSLSKDYIKENWYKYVRLLFHVLSYFNEHSIADAQGRLFERRCGRGLRRFTLAPLTKMRNEFILVDTTSLRNFGFCLRSWKKPSSKVIISKEGYYSKESDNVMKPRKTDGVSARVHFKKNCYTTDVGKDGFKTFGDKEYVQLDVENKRVVGLDPGRKDMFCCHDGSKKADKPEFPLFLDKFLAKNDDLRAVVLAALLTARVKLFSISYASEYSLSKDYIKENLYKYFPLLFHVLSYFNEHSIADSQDRLLERRRGRGLRTFILAPLTKMRNEFILTDGVSARVHFKKTCYTTDVGKDGFKTFGDKEYVQLNVENKRVVGLDPGRKDIFSCFDGTKAWRQLRRKTDIRRQKAYDVLCKRIAGEKLDSIVAYGSAKFSASSRGSPPIPTTHLYKKLLEKKVCVRLVWEHRTSVVCSVCHNDLPKGKKWRVKICPICKIYWNRDVNAASNIRQIFLFMNGNNGQRPMQFRTFKER

SEQ ID NO: 2275 - protein, 1366 aa, unidentified
  REGION 1..1366: note = Table 20
MAEDVNIIVTRSMAKRQRSEADDPVSTKKLVVSQEDSTSGSNISTRWFGNLWDNVLLYGKRVLTNIKNACGLHKVAADSTVTNVEVNILDTDSTEHYERLSVVKTSLSFACKNRPVYGRLVSEKIKELAQKIGSIRYHTSRYLNYLVIRLLEDKVEVPKLSTGQDGILRYCFKLFLSDSTLETKNSEIKRLRALIEKYAVEYRTKSGLKNLDAVSMAGFSQILASVVDKYQVGIKQHVSVNLFRKLKRYIQWRLQQQNAKLYTSNSRSAKAALYVIKMVQFSQKVFVKRLPTVPKQLLDLVNEKKFKHLTEQEITDELNGMVVEYSRLQSFNHVLPSIKDNEITNNNNNKISLTSSTQPPTMLTRKRTRSQRLDSDPEDDPQDQDYNPEDDMQKISCEFYANYETDAARRVMKRQRGKGLRLFNLLPVTKLRAGGFDIQTIHLYEVLKSIKETNSKLCNDIPSKTLKFMDNRTKGWRSWIEYDKFERKGSGKQFAFSINSDGVYVSIHLKQTAQSSVMNDYGFRICDENRYESINLNGKTIVGIDPGKSQVFCAVSNKERRCLSINQWYYLLVPNGPKYLDYAKTSVERFKTAYDFYGSVKWRKLLWWKHIRKQFAYNFVCKKLCFGKPADSVVLAFVPVYDCAYKAQPPTMLTRKRTRSQRLDSDPEDDPQDQDYNPEDDMQVDEQNNQLPKEFQARPYEYTYSIKCGLRTLIKQTTIRKTFQTHVQIMNSIMYHGSRLLNLYLVQQLSRNDDIVLLNCSFRGKLRHFFAIICQGSRKKIETYDPGIVEALRCYKEKAISADVELPSCTGLTNTLNNAVSGYETSLQLHITQNIHKRTIRWISHVFEQMFPECFENQKRSTEGAKYVINLVESIWEPKSSTNELPAKLKSFITSDERRIRCFDVLRIAAVLLMEQTFDKGLRLEKTFVENNWEKFFPLLYFLLKYNNLHSETDAATRMTEQRTGRGLRFFNMAPLSSRSCSYILFDTSSFCEVITAASKKNHKSMPSGFPVSGNIVQICQQVRKNHHKYWGMVINWSALKTNKERFSGSIRTDGVTVVVHFKRTEYTKPVHDDGFRKTDKTYERIEVSGKTVVGLDPGRKDIFTCHDGEKKVHCSNREWQEISGANFQKKKHVFWLKKEPDIENINASMPSSKVSNVKDFLHFLDYELKNSKKLLSFYGSKRWRQLRRKSDIQKQKAYDVVCKRIAGPCLDSVVAYASGPTKSLLKNLIQRKVTVRMVWEHRTSVVCSKCKLDLPKGKNWRVKFCRNCKIHLNRDVNAAKNIRFIFLEMDKKDGTRPLQFRTFKERTAGLNSIESCVVDSASLRPTPPTPNDEILADGDRWAISVVNDSIDWNNFVPNQGGDNKT

SEQ ID NO: 2276 - protein, 558 aa, unidentified
  REGION 1..558: note = Table 20
MLAKIRQCDLPSIEGLSKSIDTVVMQYQTNCQVYVSTTLWGRVHRWARHLLEIQLPAVFKNCARSKAAATYLMSCLLYEEPSEKERKRPSLQKKLVEFCKKKGLEQELDLALIDVYSILLQHTHCAGLCLNTVSVKTNWDKYFGLMWGILRHFEEYGPKDCESRAQEQRRGRGLKLFNLVPLAQIRNGFVTIDTSGLYELSRNLNINSKKDPLQSASNNIHQQPKIYVSPVQRFLANAEEEWGKVLRLKQVVPKNRYFSYSISTDGISLHFNLKKQILKTESTIHEFGYSIEDPKVYSPVDLKDRTAVGIDPNKKDLFMAYDGKQKFQVTGKEWRQMAGITAAKKKRENWLKKRNDIVNANSNVPTSKVSHVSDLHNHFFYLFAHLNLWLDFYGSRQWRQLRKRSSIKRQQALDLIVNRIIGKTERKCYLGHKGANAKHSRSYNNVFVAFGGGQFSSTSRGHHPIPRRSLINALKQRKIPMRLVDEFRTSMLCCKCKEPLPKRGMWHVKRYDNCNIVWNRDVNAAVNIREVFISVNACKGVRPEKFSRSYKFCSSTNA

SEQ ID NO: 2277 - protein, 1479 aa, unidentified
  REGION 1..1479: note = Table 20
MEIDTALTIEIKEDSTESKENEKDDKENDNVIPMEIDDAASPELPTCNACGLVGHSRRSSKHCLQHIPRVAERNLDPLEEYSNVTVKVGFKKAIRGIELASAIENYVRTMNLVRIHGSRVVLKYVLDKVQRGLPVGNLQSSEGGIMRQLFVGAFHYFHKGNGAGLDNEDIALSIHEYVMLAKIRQCDLPSIEGISKSIDTVVMQYQKNCQVYVSTTLWGRVHRWARHLLEIQLPAVFKNCARSKAAATYLMSCLLYEEPSEKERKRPSLQKKLVEFCKKKGLEQELDLALIDVYSILLQHTHCAGLCLNTVSVKTNWDKYFGLMWVILRQAQEQRRGRGLRLFNLVPLAQIRNGFVTIDTSGLYELSRNLNINSKENPLQSASNNIHQQPKIYVSPVQRFLANAEEEWGKVLRLKRVVPKNRSFSYSISTDAESTIDEFGYKTDYSKEYSPVDLKDRTNDDVIPMEIDGAASPDLPTCNACGLVGHSRRSRKHCRQHIPRIAERNLDPDEEYSNVTVKVGFKKAIRGIELAFAMEKYVRTMNLVRIHGSRVVLKYVVDKAQRGLPVGNLQSSEGGIMRQLFVGAFHYFHKGHGAGLSNEDIALSTHEYVMLAKIRQCDLPSIEGLSKSIDTVVMQYQTNCQVYVSTTLWGRVHRWARHLLEIQLPAVFKNCARSNAAATYLMSCLLYEEPSEKERKKPSLQKKLVEFCKKKGLEQELDLALIDVYSILLQHTHCAGLHLNSAAVKKNWGRYFGLMWVILRHFEEYGPKDCESRAQEQRRGRGLRLFNLVPLAQIRNGFVTIDTSGLYELSRNLNINSKENPLQSASNNIHQQPKIYVSPVQRFLANAEEEWGKVLRLKRVVPKHRSFSYTIVQRGLPVGNLQSSEGGIMRQLFVGAFHYLRKGIGAGLDNEDIALSIHEYVMLAKIRQCELPSIEGLCKSIDTVVMQYQTNCQVYVSTTLWGRVHRWARHLLEIQLPAVFKNCARSKAAATYLMSCLLYEEPSEKERKRPSLQKKLVEFCKKKGLEQELDLALIDVYTILLQNTHCAGLCLNNISVNTNWDKYFGLMWVILRQFEEYGRKDCESRAQEQRRGRGLKLFNLVPLAQIRNGFVTIDTSGLYELSRNLNINSKKDPLQSASNNIHQQPIIYVSPVQRFLANAEEEWGKVLRLKRVVPKNRYFSYSISTDGISLHLNLKKQIFKTESTIDEFEYSIEDPKVYSPVDLKDRTVVGIDPNRKDLFMAYDGKQKFQVTGKEWTHMSGITAAKKKRENWLKKRNDIVNANSNVPTSKVSHVSDLHNHFFYLFAHLNLWFDFYGSRQWRQLRKRSSIKRQQALDLIVNRIIGKTERKCYLGHKGVNAKQSRSYNNVFVAFGGGQFSSTSRGHHPIPRRSLINALKQRKIPMRLVDEFRTSMLCCKCKEPLPKRGMWHVKRCDNCNIVWNRDVNAAVNIRDVFISMNASNGVRPEKFSRSYKFCSSTNA

SEQ ID NO: 2278 - protein, 578 aa, unidentified
  REGION 1..578: note = Table 20
MRNVDASYEYATSTIKVGLLKNVKPQDFLMKLKRYVERINLIRIHSSNLFNLYLIDMLAAGKIIGLVTTGKDGILCNFFVAGDLERKVNDYASMLKQVGLELPNGDGLSQSIVHLAGEYETRCKTFVSTTLLIRITRWLQFLLETALPEVFMSMARSKSAAGYLIAMLIYEMSDDPKKQEPTLAKKVVENCKKYSSIGLMGIALEQVYGGLRAFTLAHIYHNRNGYVNIDTSCLFEVYQFGKEDRRDWVFPFDKDLIEKEKTTQQYFMDTAEARWGETIEMKPWLRPDDFGFNRVNNKKVYVPIDLKDTVVIGLDPGRKDLFDAYDENGSFGCSGGEWRQLSGIEFSAKKRKFWLSKRTDIGKINADLPFSKVATVLEFKQYLSYFAEIFNTLMSFYGSHRWRLLRRKCDIHKQWAYDHLIKRIKRRGKKVFVAFGGGKFSSCSRGHAPIPKVGFYKALKQRNIPCRYVWEYNTSKICAKCFTVLPKGRKWLLKICSKITCGRYWNRDVNAAKNMKFVFTFMNNNNGENPEQFKPKQQKQEQNNNNKTEVTEGRKSAQDHNRGHVTNVTSDVDGVTVA

SEQ ID NO: 2279 - protein, 251 aa, unidentified
  REGION 1..251: note = Table 20
MTFGYSMVTDGVSVEFHVMKKIHDGDKGPDDFGLNMVDDKKFYVPVDLKDTVVIGLDPGRKDLFDAYDENGSFGCSGGEWRRLLSKRTDIGKINADMPSAKCLFTDLTSGVFLRRTCDIHKQWAYDHLIKRIKRRGKKVFVAFGGGKFSSCSRGHAPIPKVGFYKALKQRKIPCRYVWEYNTSKICAKCFTVLPKGRKWRLKICSKITCGRYWNRDVNAAKDMKFVFTFMNKNNGERPEQFKPKPTEAGTK

SEQ ID NO: 2280 - protein, 1178 aa, unidentified
  VARIANT 826: note = misc_feature - Xaa can be any naturally occurring amino acid
  REGION 1..1178: note = Table 20
MPKRKKKKEQEIALSTEIPSQESATAVSTVAAGVALVNDESPEETSTKQCKSCGGTDHQRASSKKCANYKPPVKMRNVDASYEYATSTVKVGLLKNVKSQDFLMKLKSYVERMNLIRIHASNLFNLYLVDMLAAGKDIGRVTTGKDGMLCNLFVAATCRTKYVHSNSLEGDLERVVNDYAALLKQVGFELPNGDGLSQSIVHLAGEYETRCKTFVSTTLLGRIARWLKFLLETALPEVFVSMARMKLKSYVERMNLIRIHASNLFNLYLVDMLAAGKNIGLVTTGKDGMLCNLFVAATCRTKYVHSNSLEGDLERVVNDYAALLKKVGLELPNGDGLSQSIVHLAGEYETRCKTFVSTTLLGRITRWLQVLLEKALPGVFMSMARSKSAAGYLIAMLIYEMSDDPKKQEPTLAKKLVEYCKQYSSIGLMARTAVKRLSLEKLKIKTNWHLYLPLLYKILDFFRDHQNEDAASRVETKRRGRGLRTFTLAPIYQNRNGYVNIDTSCLFEVYQCGKENRSNWVFPFDKDLVEKGKITQQYFMETADARWEETIEMKPWLRKCHSFGYSMVTDGVSVGFHVMKKIHDVDKGPDDFGFITVDDKKVYVPTNWHLYLPLLYKILDFFRDHQNEDAASRVETKRRGRGLRTFTLAPIYQNRNGYVNIDTSCLFEVYQCVKENRSDWVFPFDKDLIEKGKRTQQYFMETAEARWEETIEMKPWLRKCHSFGYSMVTDGVSVGFHVMKKIHDGDKGPDDFGLITVDDKKVYVPVDLKDTVVIGLDPGRKDLFDAYDENGSFGCSGGEWRQLSGIEFSAKKRTVWLSKRTDIGKXIWLFYGPDDFGFNMVDDKKFYVPVDLKDTVVIGLDPGRKDLFDAYDENGSFGCSGGEWRQLSGIEFSAKKRTVWLSKRTDIDTVVIGLDPGRKDLFDAYDENGSFGCSGGEWRQLSGIEFSAKKRTVWLSKRTDIGKINADMPSAKVATVLEFKQYLSYFAKNLNTLMSFYGSHQWRLLRRKCDIHKQWAYDHLIKRIKRRGKKVFVAFGGGKFSSCSRGHAPIPKVGFYKALKQRKIPCRYVWEYNTSKICAKCFTVLPKGRKWRLKICSKITCGRYWNRDVNAAKNMKFVFTFMNNNNGEKPEQFKPKQQKQEQNNNNKTEVTEGRKSAQDHNRGHVTNVTSDVDGVTVA

SEQ ID NO: 2281 - protein, 334 aa, unidentified
  REGION 1..334: note = Table 20
MEKKTFPILPVSGMNLKHINLDSYSMKGVFTSSGIDDFEWNKYFDIDKIKVSKKTFTGTISTNGVSVNVHFWEPKQVASSEQEPINLEGKRVISNDPGRTNIYYMAEETKPEIFKYHVLTRKAYYQESGINKANVNSSNWNRKVKEELEQLSNENKKSLDVAVFKMYLSTVMEVRDAMWVQYGKKKWRQQKLRLYGGKKRVYAKFFNKIEIDENTVFAYGAAKFSPGAKKELSVPTATAYKECAVRAPVILVDEFRTTKAYWKTGEILQKVATKTLSGSLKTVRGLLWCGSTKCGFINRDKNAAINILRCATLPQRPTVLNRSLAKEKLVQRIG

SEQ ID NO: 2282 - protein, 389 aa, unidentified
  REGION 1..389: note = Table 20
MQRNRQRKRNRDASDSEVDRELEAQPEQSQAQKNKKASVDISRKLEAAHVSWQLDWADWQAVGGQRNTRPYRPPSPFALTPSCSCKAHHIKLDTKALFGLMRTAGMLPADITSLPKFRSGVAGPKDTVRPNVGQIFAQVVHTDGVAISVMFICPKPAEPPDKLPCMGKEEGAVNPLAHLHADWLGCDPGKTNMATVAHEERYPSGAVQSVWQRSLTAGQYYRQGGITEHAKESKVWMAGIQPQQDELSQVTNYTASLQRYREYADTTLATWPAMWAEMSKRRWRQAAHGRLLALAYGAAGFSGSGSIGSKGVPVKQMRREACKQFPGRVVLVHEFRTSRVSSARTNVVAGQAESFRWLHPVRSMATRSRIRGLMCSTSNGIRFYDRDVE

SEQ ID NO: 2283 - protein, 672 aa, unidentified
  REGION 1..672: note = Table 20
MPESSDGPKGHRAARRERDRFFEKTVIKMGLRTFCKESRLIGLIEKAVQVSSQVTWEASLLVSFHVLRCLESGIDVEPLEQSFWDRCISAIANGDKGIGMNASEELKESFRLYAQLRPHEYVPVKREGYMNHIFLGLRQTMLTNFKTVFVETFHGRLCRWLRLKVCLSDRERLKHSNVIKSAIALLDRACTNEEGSVESLWPTFRRLEELTSEDIEWMQHLVDDVRQRMSGPLPVSFAPDDMPGYFPFLRDMLKDIEDHILWAKDNEEKSISGIKLFSILPQKKFRAPFIDISTTVLKSLVAVLRGRKRKKMEDYDVTQETANILLESGTESELWNEYFDVKSMVKAGRNQRRSFGHSVKTDGMSVSVVVETPRKIPLPLHPKSRKKQLKQEEAEVSVQIRQKVLKEIKKSEKFLEETRVVAIDPGVKAPFTAVVYNPAAIERLSQPHGHNVHFSSVSWKASKYYDECGITGRTREMRKWTNAAPPIRQFNETVATAKTSSTEAYAERCRQVLMALQTLLNFYVHKRRVRRARWFAYGRKQQATEKMIEEITATKDHAEQRKVLVAYGNAAMHNVKGTKPVVQKALRRKLARRCLLVDVDEFRTSKLCCSCLKEMMGKLVNGDRLHQVRHCENSACHRIYWNRDLNAAINILCKCLRFLWGQQDPPQFSRTY

SEQ ID NO: 2284 - protein, 569 aa, unidentified
  REGION 1..569: note = Table 20
MSTRQQRRKANQAGRFYNVKSGVNSFFTDQALLGQIQQAVQLVTPLLVEGHLLANLHVLRCIEAGEAMPKLDQTFFNRCFHAVSFGTGNQARQFNRASDPSLATTHDTLYTQSLPANHQRPERPTSVKYMLNAAALKARVDLDNHVATNFFTRSRRWIRLQLEHKLEHKLHFANMEAARVKSWASSQAKFITINSASLLRLLKAAGWADLPSLSPAGEKQFTAERASWWQRCTDYQSFCTHTERTHREFHFQVETDGISVSILMFQPASGSASAPPVAPNSKKRKRRQQQQTSSAWVSGLPDSQLLQAPRIVGLDPGRKALFTAVVHSQPAADSLHRGRPCESKYDTLSWSCSRWREASGIKHRLRKSELWLNRKPALKAALLDTPTAKVWSTDQFMLHIKHRLQHAPEAIAHFGDRRHRQLRWSTYIKRQQAYAAVCKAISDGSRDTVVAYGDASFSSSCCKGNPSTPTVSLRRQLGGRCRVYDTDEFRTSKLCCACRTPMKGMPLPVTERGRKDHGPESYSVRLCRNTECRRILWNRDVNAAINILHLFLDWVEGRPKPPEFCRTGQ

SEQ ID NO: 2285 - protein, 572 aa, unidentified
  REGION 1..572: note = Table 20
MVTELNQLRAEREGGPVADIQLLKRVWRCVPAMDRVSIGHYLRTVSHTPNSREPTSQEPTSQEWRLLQASMAALVQAATAAETSLRLRLPSRALLSHVITEAALVLRTNWSNFLKYGTFNHMKQYLRAKYQLNKSEAAALRAALLSESQPRRPDLVQHYHNELALVQGFGVADFMHGTDNVLDPAEQERNMVVFRYMMLKTVEASDLPIKRFTLVPVCRVQYPMINVSRSCLKLWGYDGGRGWEKIFTKKVNNIAKKGHTNGRTKAFARHFRTDGLSVVVVVEEVILARPDNNYIGQGERCATKPSQFDPRNTVGVDPGRIFVVYANILERGRKRTFSLHLSAYRDRCGFTKRNILAHQWLSRAPNNLQQRLNDRAISLKLTSVDRLQAAIGTRLTFLSNAIDFLGQRRWRRKGLETFGRKQRTMEFIASKLFPTASHIVFYGAANFPSGIRGRPPGPCIGLKRFLVTKTTPGRFFFVDEYNTSKMCAACSQKNISTALRRVHKSDRSRGNGPPSKKGRPQYGVLSCPKCSMEVPRDDNGSDNILAIASAFLHAQNWSVPREIWPPALRRPL

SEQ ID NO: 2286 - protein, 1101 aa, unidentified
  REGION 1..1101: note = Table 20
MSTVKRRRKRDPQEESSTSASKRQQTSKGKKALKGKQPEQPQVPGERPEPSEPPSNEEPEQPARRAFYTSSLQRKCKVSTLMNDGFEGYRGLFRTIAEEFSVVRRDALNFGLFLLVRWLNTQQLEIHQQYMEQLPNVSQQMRQLLHQGRLLEQLQGQLGQLNQDINAETELFAALVDDIPDLTAHQNDLNTAIDEIRPQIGNLRGLNERLTLAALGSQDRLQLGALQRDTAALIAELQGQLDHLTQIVGNMYETIRRLSATITPQQDAIYQGFSVNLQRYFEIDMEMEAIRRALTRAQTTLARAVAEQNTDVILRTRNDINIHQRRLAQLREEQAPRQAEVDNSQNAAVFVANQYVLNVLGQMESLEHNTILELLAMTAQLAVVNQAPQSNLIFPNIVDINFWRHAYRAVAGPNTRGYNGQARNMERCITNNIAAFDRHRCDETGARLYQLPGMDHMHASLAHNYAEAVVQNVVMHLLNVHLWFKRIFKAFIIVYKNANPNVRIAVKNTASTAANGIFKFRDFGQLELPNIPGLLDVYHDLQQMYNYEFLNVPEDTVKLYDNAKKHPIKYARLSFCLLQYATLHPDWNVKLWCLLPQASHGIVHAPLARSTAFYGLMRRAELLRLPIPLVSQDANGGLLPMKMFCQMYVDPRRKEALWHTLFDVDHLQRNRILEPQELNQNAEERAIKLGYGLKTDGVMVGVLFQRKTREFNTVSTGDFKYLARQRDLSNVSSGIYPLYKEPRGITMDDYIVGLDPGVRDVVVAVDCPAEDIGNRDDLRQHVVSVSNTSYKQRSGMAWINQRELQSRQHADIQPVYDQLASSNIPSNRGVADYLDSLYAQHERIFTFMCSYKHRENKAANYSNRNQANDFIARAVICRTNTDEPYKLAHTSTKRQRKKARKRFRRGPQRRQLRDQDDQQRTVVAYGDASIQATMKKHTPVPVKKVQKALSTKAIVIPTDEFRTSVFCSHCLRRNEQRFPVAPLICTHRKKIRRVPTGRIRQDGTQNTRAARFCLDDEGNFAHRTSQCPARARPQQVHPIYALRLCQQCPENNGQDIVWNRDANAGLNMRTILTRYIVSHYDLASRPLEISRARRRQEDDEA

SEQ ID NO: 2287 - protein, 1071 aa, unidentified
  REGION 1..1071: note = Table 20
MTQTRKRKATAEAGPSKPRKPKRTEPAPPPPPPPPPPAGAAVNTELKTQFVVRKCKIGPLLREPYKQYKNFFRTLAEDYSVLRQDAMNFVLLILIQFFNTQQVELVQIYTNNITNVQRSINQLNHYVRLAEQLLTELLSLITNINQNIDTDSENITAALQGLTAPINNLLDQLRPHIQDVDDIVHQMHAAVTQENPDIANVNQLHDRLNHSVTELRPQINAVQALITQKLQYLRQTKTRIENDITDILDRLTQEERTIINIITQSRDTTERIESGRQMLRARLNQFRREDLNQAEILLQSQLNAQLRIFIQNQQDVLTASQRYQDQQRQTIEASADIQQCLQLDTIKRQLQQIEKQNTALFQLAEITSQQLSLAIAEPEGRPLFPKLTDATFWSHVYRKVAIDPNGLNRTIQFNQSIQRNFPDFDISRKIAGSEEYAYTVPTLDRLHIAISSQYGTTIIQNVVMHLLNTRLWIVRIFKGYFVSQQNPPDQEFHRLPIMTLAKKATDGIISHKRFDEIVFREENDDELPIFENLNNLYDQVRLIYEAEFPGLNYDQVDDYSTASSHPLKYLRLSYRLLQLATSMHDTPIKLWSLIPQGSHSIVHVLLSGVTVLYRLFKRAHENHLPVPERLIRNNVFIRLTDFDNAYFRYEEKRDLWNDVFDLARIQDRELRLGFGMKTDGHMISILFEKIAQNFVPQNKKEIMMQKTQKNLTNWTNGLYPLYKNPVGITAEDRIVGIDPGVRDIICGVDCDSGEMNNKQTTKEHSFFISNSSYKLRSGMSWLKQKELQSRTQTNIQASYDRLQTRKACSNEGIMQFLNAFSGERTEIHRFMRSWQHREHKGYAYSNRKMAQDYIARVVLGRTKAGEDFKLAHSSSSSSRRKKRKRFRQQHQPELRPLTDIRRTVIAYGDANIRGTYKGNTPIPVKSVQRAIAEKAIVITVDEFRTSVTCCHCHRRLNNATSELHGCNHRKKRHRIAGVEKRSRMKCIDEEGNIIHLSSQCPDRRLTRQNNTIYPLKLCTQCPVNRNNDLYWQRDINAATNIRSILVEYINSNFNIGSRPAALSRGRQDQGS

SEQ ID NO: 2288 - protein, 446 aa, unidentified
  REGION 1..446: note = Table 20
MIPNCNFFRLTNFDRFYFGHENKMYLWNTVFNIGKLDTRILASPATSHLAYSMKTDGHMVSILYEKTSVESVPQAKNDLIRQKRNIDLTNRTKGLYPLYKEPTGITANDRIIGIDPGVRDMIYAIDCDADELVDKRSTKQHSFAYSNTSYKLRSGVNWIKQKELASRLSSDIQASYDQLKTRNTYTNQGVMNLLHSIALTHNNVHGFMRSWQHREHKGHAYSNRKMAEDHVARVVLGQTKVDEAFKLAHCSKSTRRKKRKRFRRQHQNELRGNENTRRTIVAYGDASIRDTYRGNTPVPVKKVQRAIAQKAIVFTVDEFRTSVTCCHCQRRMNNATSELNTCDHNKKKHGINGVENRSRRKCLDEDRILHWSSRCPESRTVRQNNIIYPLKLCNQCPVNGNNDLYWQRDVNAAINIRSVLIEYVCSNFNIRSRPAALSRGQQDQGN

SEQ ID NO: 2289 - protein, 978 aa, unidentified
  REGION 1..978: note = Table 20
MIQTEQISQDDSEMNFMKRRVNLKNWSKGLYPLKKEPTGITLNDRIIGLDPGHRNIFVVTDCSASEIIDKKTVKENTTKFSNAEYNEIPAVDSVNSNELLKHLRVIGRNRRKIFDFMKDYRHRETKAYLVQNRQITDSYMYDLILGQTADGAPYTLAHRTSSKKRRKAKNTYKKASGIVAKEEKRTVIAYGDASLTGTKAGKVQRALVIPVDEFRTSVTCSKCCRCLENKHERQKLVCNHKKKNTRLKEEKNATLRCLDDNKRIVCRPSECSQREPRSYPPVIYQLKHCQLCPAANDRVIPLHSHFDWPFGPLRHHFGGDLGVSFNRIAQKRPFASIVTEDEETATNQHPSENEREKKSFERMSLQDRRLCSETLNKLWKHPCSFPFQQPVDPVLYNIPDYFDIIKHPMDLSTIEKKMDEYKSKEEFIADVELMFYNCFLYNNPTDPVCDQARELEKLFKKQLPKLRASPAVDKKEKVTAAAMSDEEYKHCESVVKEFKKPKYAHLTWPFERPVDADAWGATDYYDIIKRPMDLSTIERKFNELVYNSEDELYDDFKLMFENCYLYNPPQHEVHLLGKKFESAFDKFWSKIHGKSKERHVKKQRVDQHQELMITPPTTQDDLHLKPDNNHTIPTVTKPVTQSTNASKTTTVQTGTQAPPQPSSQAAAASNDGRNVLRIKLNVKKPEEAKPTSTPSTSAPHKSIVKIPGLALSKEPPTAAPKLALDQQPPSPLEKKEQRPALVLQNHDKWVAQAKQHALQQQQQSYKSTNNNNKPVNIKSNTVPSERRTSLSRPPEQPKPSMFDIGELYNKINDEKRLRQQQLREEQERREREERARRERDRLRHEEQLAKKREFLKQMAKRKEREKEQRLAALNERVVDISAQKMISHKFESNILSKDLDWRELISWQRDTVDYRHIPVPAFIRRSHLNLQELRSKLLSKSVRLKNARQQAEHGQHFEYASNNGGHHSSGQDSDMDVE

SEQ ID NO: 2290 - protein, 366 aa, unidentified
  REGION 1..366: note = Table 20
MIQTEQIPQDGSEMNFMKRKVNLTNWRKGLYPLKKEPTGITLNDRIIGLDPGLRDIFVAADSSATEIIDKKTALEKTTKFSNAEYKMRSGFEWARKVELKNREAADMQQVYSEIPVVNSVNSSELLKYLRVIGYRHRETKAYLVQNRQVADNHMCDLVLGQTAAGAPYTLAHRTNSKKRKKASGIVAKEVKRTVIAYGDASLTRTKAGYTPIPMKRALVIPVDEFRTSVTCSKCHRRLENKYERQKLVCNHKKKKVRLQGEKNATLRCLDDNKRIVDRTSECPQRESNSYPPVIYQLKHCQLCSVANDRDIVWQRDINAALNIRSILVSYVESNYSTVFPESNVAKIEFLQYKIYRNATSWRDINF

SEQ ID NO: 2291 - protein, 851 aa, unidentified
  REGION 1..851: note = Table 20
MDIDNQANIQAALEQNRHRIETFRANRHNIRSVTRNCKLKTALNEEYQGLMGPLRTLAEDYTIVRRDAFDLVNMDVLRWIEEGAEDGLCPDILNQGYWTKAFLLCTLPPTHTEQAAEPRFLHLIQTFNWCFQPCRLLHPQEYPEDLDPNQPQPPLYQPPDFNSRSLRGRLAEEFARGEAIPAVKNHLALNPPKYMKHTLVAYFYDLQDQIGPDLPRQPQAFANAMVRHLLNHDIPEDVDFDDLPLALRAGFHAYYQNQHEEFERCFANYDLNQVAKNPGRRVNADYIPGALRYLGGLLFREAERLDSQRWTLIPIGKLQISFVPICVKVLYWVCRLAHEDPNVEFHAPPALMRETPGRRGDIFIPENSIRGNTNLLLKEQFFEQLFNLDPLSKRRMRYAADYNFNPNVEPITFKFSFNTDGVRACFHFVRSLTTLQGERMPDTSADVRYYPRELDLTNWSRGMYHLSKEPGGLNEERLQHTRIIGIDPGIRAIITGTDTNINLANRQTRQQHVVQISNKEYQSRSLSNWIKQKTLHSRAKSPNDMATQYFVLSAFPSRTANLQSFMDHVHLRSFLHNVLHEFVCHYRHREQRCTTFSARVSAQESMVNQILGLENIEDLRDVPFNHRTMGKRQRKLARRAARAQRRLDQEDVTMKEAEEPEIETIVAYGAARFGATTKRHQAVPVETLRARIARRAPLILVDEFRTSVTCPDCDGRLQQFREPETLVCGHNKKYIRDYLEDLKRAKPRQWCMDDDGQRLHWTSTCPDRVQVHDFRNKVYAMKWCPNCQVVFDRDLSASTNIYRILEQYMASDGDIDSRPAAMSRGQVVEEPVNEVEEEDELETDDDDEALL

SEQ ID NO: 2292 - protein, 852 aa, unidentified
  REGION 1..852: note = Table 20
MAAVPQQQEEVDRTEEINNAFGGNTRNIRGLNRTCDIRSILRPEYQHLRGVFITIAEQHNILARDAYNLMNMHVRRFIRAIGDYPGLGDQEGENWAPNFATINIPAGNGIQPAPGGQQVIDGQGLLIPPVTNQLLWTWAYKLVSKSPMLQNVNIRSQDAAVLDLLNTYTNHFQPMQRNEAGEASLYEPPAMYQKLLSVLSERFAREAVKNCKAMLWRNIPVYVNRLCDGYIKHMVHSETDYGIYMNLRHLAPIMTTGIINHQEATPDQLQPVDEQLGTEFVDVYQEIHQACERFLADVPLVEMQGTPSQGLLPVLAMRLIRFSFWLLWQADALDTKRWSLLPLGSTQIGFFGIDLRMLYAILHYVRDQDQDALVPEICLNQRGRVLALLPFQARFQSARQKELLWEALLNIDHVQRRRWRYSGELPGTAIRFAHFMRTDGFTANVMFERPDPRNLPRMYLQQKLATSYAHFSAIAFFPEVAKTARRDVRNDADLTDIHTGMYMLNKEPLGLNQARLKNSRLVGIDPGKREFITAIDHEQSLQLQPRENVVEVRARHYQHATMTHWVYKHTLANRQKANMQEVYDQLAQDSPNVPRLNQFKAHVACVSRNSNRLRDFSAHFKHRITRGILFSARQSYQQVMINEILGISPPDSPRETVMFINRTTKSRRRRVRRFERRRAGWERPEEETIVAYGDATLRHMKGYAPLPHWDFIKRLCRQALVVFIDEYRTSITCRHDGDDLLLCYDNRRLHCNHKKTRNRVPTGQGNRGRKVLHCKDEDGTVIGRSNLCQQRFAVGNNTWRNLIYAVKRCNVHGFLGRDVNAAARIRSVLRLYMETNGNLQSRPDSLRRDIIR

SEQ ID NO: 2293 - protein, 391 aa, unidentified
  REGION 1..391: note = Table 20
MYLQQKLATSYAHFSAIAFFPEVAKTARRDVRNDADLTDIHTGMYMLNKEPLGLNQARLKNSRLVGIDPGKREFITAIDHEQSLQLQPRENVVEVRARHYQHATMTHWVYKHTLANRQKANMQEVYDQLAQDSPNVPRLNQFKAYVACVSRNSNRLRDFSAHFKHRITRGILFSARQSYQQVMINEILGISPPDSPRETVMFINRTTKSRRRRVRRFERRRDGWERPEEETIVAYGDATLGHMKGYAPLPHWEFIKRLCRQALVVFIDEYRTSITCRHDGDDLLLCYDNRRLHCNHKKTRNRVPTGQGNRGRKVLHCKDDDGTVIGRSNLCQQRFAVGNNTWRNLIYAVKRCNVHGFLGRDVNAAARIRSVLRLYMETNGNLQSRPDSLRR

SEQ ID NO: 2294 - protein, 650 aa, unidentified
  REGION 1..650: note = Table 20
MPRNKKDDARVIKCPLDKILKPEIVSIIRDIVPVYNRIAISATLFLNLRIRQLVESRASSTEFAQFFQANKLVKYFMAVTSSTLGAGDLHAAFGTNFPSVIREDRPKAFSQVCMYICRNLEATATTNVWYHMKKRVCTVVKKTFGIPRDEWLHMSNEEKKNHKIHLKQVNVDVLSLEGDAFVSPEQYHDWISNLRSEMKVTHVTRQLLADTRGVDVDDPNVPGMVYYMKVKPYEFIYAIATLSSHLNSITGGGYALYPIRSSMVPKYLHLDELILADISPGISKGATNTAAGKKRTADGSELSNKDKLVARRMIVFKHVMTPKAFNKWENHLGWSVDTDGYGCSLHVKKKVNELPPSTHPSIHNGLIKIDAFKDKFSERYSINDLSIIGVDPGKREIVSAVDSMDYTSKYTFRKTHQDHLTGTVRHRKAMECTKPQSVFETEQDLATTSKKVVPVERFMDYATKLATSISSSSGFYEQGVYRKRKWKRHLRLQKAYSGIVNNLKMVSCHPNKPIVLAYGSWGMTTSGLPFKGLPPTIGIGMVRYLARFFPVVITPEYYTSTICPCCDSNVTRCTHVEQQRASPFFENGRLKEIRGLKHCPGCNTYFNRDNMGAWNIARNFTNMYQGMAPIRVRNAAQAAEQELTNRTEVD

SEQ ID NO: 2295 - protein, 690 aa, unidentified; identical to SEQ ID NO: 628
  REGION 1..690: note = Table 20

SEQ ID NO: 2296 - protein, 752 aa, unidentified
  REGION 1..752: note = Table 20
MKPVAEHASPRIRGFKHTIHQFFRPEDAARIDETIRYVHAVMCNASLLIKYRLFKIVESGEVGHDTAPMVVDETQVLNAIRAVQEYRAATEGDDPGAARKKKTTTRIRKRPRTETTDEETLDEIEAASTAAAAQKDLRQQTIDSWIADYDEMLSSCGNYPVELRSRGELSASHIFGIAAKQLAAATLSNIRYHFRSYVCASLGLVLRSCVCSLADVKHFSDLPAGEAKRWRREFGKAYDDVLFHRTGKDVKSCEALRATIERHRHRLVPPLPPMTRTIDRDMDSSTRPYIYLGYMLRMTRFQEMCGVKAGRLFTPVPLKTSHIPAHYAMDTSCIAQLLMDAPRIKSFAIYFEKSVRGGFALPGLLRKDTLLRSLQVLSGRSEPVTAGDEELYKDALWAYLANFKNRRTKILNPLLHKKATQQGAMRFAHSISTDGYSVTLVVSDEETRGRKHQYKSAVSARTSKKKVEPKPPEFPALSSESARSVKEELMSMGCGDAAEYLGGDPGKSNLLMLVDAAGKSLRYTSAHRGHNTLARKRSLAMRVARSQRCDTPSTPCDGGKPFQRSAQDLERDMARQGLSSRTSDMWKFRQYIAYREATRVALEAVYHRRLFRAMRFLAWSRRAGSVEKFAKRILEKFGGESRSNAQVVILYGDWGRRPNLKHQAPTPGIGLRRLLHETPGLTTVTVGETYTSSFCPKCGGEVANARGAHGLLKCSSGGCGTWWSRDVVGAKNILAKGLHLLREQTPHPLFGS

SEQ ID NO: 2297 - protein, 753 aa, unidentified
  REGION 1..753: note = Table 20
MSGDRLDGGDHENSCRMVVKRALGTICRDVVVLETLSDAALRMDRIVTETYQLLNLHVRRLLEAGLEVPPLDKNYLQKFALAVSHGERPGKLPPELAPALELYRSTRPPDHVVPSRCGLSHAITDACVEMSTAIRNNIAVHFFARQLKHLRYVDEDAPPPNTERREIAARQQQINEEAANRDDLDELTLPSSVGVSVAYDLVARPWAFLQPMWRMRRAAERLYELEVEQERAAAQADGQAPRNVRKRNNFALLPLRRGFVPRFFAVDTETLCLLFSGKSDKLPKQHPYRGAVRERKKARKTKKEQRDQELDRLADEECDRLPDATERDAECARIRQETVDKKRRLQQDEPMDKLPERTALWYSLFDDLKLHMGSGARWTFAFRVQTDGVSAAIHYVRTDASVAGVLTHKKAKLDDGDGGKPKVKYKPKQKRKRADERQPTAEPLLPPLPDLIGRVVVGVDPGMVDLISCTSDDATKTGARLRYTAVQRRKEGGAKRAARLRRKMLERDPTAKAAQATLGDSDSRDSRSDRFADHLRKQGAAQEPLLRHYAGDRQYRTLRWSCYRHRQRSEARLVRNMKQKFGDRAVLAYGAWVKPSAFAIKGTVGGPGVGLRRMLAKHFTVVVVPEYHTTETCHRCLRLDQVGKMCPMQSRPSKSPRYRRLPEEKKPLVDVRALRRCQNEKCGVWMNRDYNAALNIRANLMHRLAHGRYHPAFASRRHQAITESDEVADEPSAKQVRIAEPECVPARLDVEFE

SEQ ID NO: 2298 - protein, 680 aa, unidentified
  REGION 1..680: note = Table 20
MVVMQDGVRVMKCSLDSFCRDDALRERLREHALRAHRVVTETYHLIHLDLRERYESALRDDRTPEEPPWTKQRVKQFLYAATTSERAKVVLPDALAELVRTQYDPLREEHALAKERRDYLGGNWLEETANRIAAAIETNVREHFFQRQFRYVRLRDQLGSKSETAKRVRKINAVAAPGNQTDDSLPTSLDATITDDLEAHPERFLWPMWNMNRAFEAAGAKKFAVLPLPQGFVPGASYHVDSDTLRSLVGTKDARLKSYYDRCDARRRATRETSGQKRGPPGKKLDPDVLDENDLLWSPFFDLRSVARGQNVRFGHHLTTDGVSVSVTVLGRATEATPPASSRAKRKRARDDDSLPDVSMFAGVDVKKVVGVDPGKHDLVHMTNDSSPRRSDGQKAKTLRYTAAQRRHESGAKYREARVRKPPDVQELEDALSGTDSRVTGLKAFQEYLSARFAVQERLYAHYGKPVYRIHRWQTWRDRRSSEDRFVERAVQTFGKDAVLAYGDWSAWHGMKGLPSSPTNALRRRLAQRLRVVDIPEFRTTKTCSRCHGMVAGDPSRLCTLKDGRKVPTRGIRRCNSDLCGGLLRWNRDHNAAINMRETLLHRIRTGEWHPAFRRGAGEDPAYVAARVSTCPPPKPKRARSNNNEALLVYAESKCRPPREEVETNDCNGECCELQTVNDD

SEQ ID NO: 2299 - protein, 904 aa, unidentified
  REGION 1..904: note = Table 20
MSAIKQRKIACQCLGCRGDPPTRCLYEGHGTELSRSAGSAREATAVAPWFEATPLRQGEQDTIAGQGEHHAIASQGEHHAITGQGEQSTIAGQGEHHAITGQGEQSTIAGQGEHQAITGQGEQPPLIDEPMHAAFARRHRPGHHGGRRPHGRNHCRGKRRGRRPRAGRRHRSRNRRRAPRHPRQHISRRPRRTRPLREAIKSVKGSVRNCLGWRPELRARLEELFVRVNEVDRYVRLFLKYACVRILSDTPAYDLSPLHDPQVIMNVWKALTLDARGGLRDCEPLWLSQHLAAFLELTGYRRRAFANVDEIAGYQATKIVTNHTNTIRANFGKRLRRLLMLSSDITAFEHDREVLSSFKRSVARGTPTASADPRLHRCREAAQRVLAGYPAGWAFQRESIYYDVVARPGGHIAAFHQLGLALDAAERHPVDRKARQKMQRRLEAAQRRAAANPDAVVQTPEPRSPSYYPLADGWIPRHIRIDTRIAWNHILAKAKNPPARGDVLDVWDEIVDLSRPIFRHHGQIDPDVTTLHDGILTFEGSIETDAVAATVQMQNYSGRSLQRTTRHGGDLGDGAIDLEEPYIDSLLPEDLDSVLLMDPGEKAIVSGMLFTSTAEEPQTIAYTKAQRARDMRSRRYAAIREAVKTRAVREAEADLSMGNARTLDLAQFEEHLRRYGRHEQVLAAHYSTTLTRGSGDPLHRKFRLAGYIRGERSYRALAERIKHKFGRDIKVVVGNWSVGAGRTPSRGKDFRAAMRRNGLPVYLIDEWGTSVCCPTCHGRTLSSYEPPSAPGRARTGKVWRLQRCSRCRVQVDGQDDCQRIWQRDTAALINMASILFASAHGQPRPRHLCRADDDSDSDGDSDGDDNNNNNNNNNNNNNNNNNDDNNDNNGGSAALACLDRQAGT

SEQ ID NO: 2300 - protein, 879 aa, unidentified
  REGION 1..879: note = Table 20
TIAVAPNYTSQNCSNCGETVKKSLSTRTHQCKCGCVLDRDENAAINILKRGLSTVGHTGTFGLDPRNAWGENTSTFSEAILSFASNLCEPRIPVSLEQGVSREELNIEDGLANPDVYILDPCCGTGAYLVEVLRYITDTLQENGSGALAMALVKKAAIERIFGFEILTAPFVVAHLQLGLFLQSLGVPLIEDSERVGVYLTNALTGWQPPDEESKQKIQQLQLNFPELNKEREAADEVKRGKPILVILGNPPYNAFAGTSPTEEAGLVEVYKQGLISDWGIKKFNLDDLYVRFFRLAERCISENTGKGVVCYISNFSYLADPSFVVMRQRFLQEFDRLWFDCLNGDSRETGKLTPEGNPDPSVFSTQYNKEGIRVGTTIGLMVRKEVRNKNIDVYFRHFWGVSKREQLLDSLNNQDFDDFYQVSKPEQSNRYSFRPSDVSSHYLAWPKLTDLCKEPPSNGLMEKRGGALIDIDKSSLETRIKMYYDTSITWEELKTLKTGLTEDAARFDAKKARIKIINLESYNSKNLQRYIIRPFDVRYCYYTAVRPLWNEHRPSLWLQCWEGNSFLISRFKSAKTSEGSPFYFAIGLSDDHLLSPDASCFPIRLRTKLTENKTATLFNTQEFIDTTLTANLSEKSRQYLKQMGINNLEENIENASLIWLHALAIGYSPLYLQENADGIRQDFPRIPLPNSQELLIKSAELGQAIASLLDTENPVIGVTKKPTPALQKIALISCTDGVNLNPDKGDLIINVGWGHGGKNGVTMPGKGKAIARQYTTAEMSVISPEMRKLLGTKTYDIYLNDRAYWQNIPSRVWEYTIGGYQVIKKWLSYREEKLLGRGLTIAEVQEVSEMTRRITAIILLESDLDDNYQNIKTAVYSF

SEQ ID NO: 2301 - protein, 827 aa, unidentified
  REGION 1..827: note = Table 20
MGNVQSSLPSYYNADPTNEAYKHSLSDYVDLASAAIGARVIRASNERFGAASNLIKPQEPGTADSGKVDAWVTRRHNPETDWAVVRLGSAGTIAGFDIDTRGLDGEQASHVSIQGCLTSDKAAVDSHGNIDDAEWEELLPEVEISANSHHLLALWRATKTPYNFVRITLHPDGGVSRLRILGTVTADLDTDGELDLALVTAGARVVQVSDEKLGAKENLILPGRATSAVRETQGWKTRRSQSDEHSDWAIVRLAEPGFLTRIELDTLFYDGDQPVSAAVQACYTELDSPDRDRECFWYQIVPRTELNGNKLHKIDVTLNDVPFSHIKLLIYPDGGIGRLRAFGQRVKEIEEEAAREKAEAAAEAALVAELAADADSFEQTEILVTETKVKTSTAEKKDARSKTSAAAAAARVETSGDEKDDGSQRKKTKKTEKPASRKKSKSSKTSHDTKEAVEDEDSDKFSSRAGELIQSLTSPLPPRKRGRPRSRAEDETDDGSINTMDSRAKRSHRKTKSRTTAAAQRYVEMRNLVSPVFRNFYENYQTIESSAHQIHKGHGGFKLCRYLLHRKLRLFHAPIRGVSLRDMLRAHVFKVYHIDEYRTSVTCPVCYHRLEKFRWVDNPHPWQRRNHPRVLCYGLLHFTSEKYSKDVLVPIEQSAENHKANIDSVVNPMHTLKTKARAKAKAKARVKKMLRDSPAKNMPNRIWNRDLAAVINMWAILHSLRDDNGIPRAFQHGNNNALAAPQSRCPRTSTSSVSAITNSGSTSTPAASQARHTRKSAWSMPETAGTSATSASVIVGPSNLQVEYLASDSDDPLIKRRRLDKGKEPEC

SEQ ID NO: 2302 - protein, 296 aa, unidentified
  REGION 1..296: note = Table 20
MICLLEELQATKGNCVLIDPGRGNLIYCMHKRSTADNPCLYCYSAQTTHKTIDPQRFRRYVEMRNCISPVLRGFYENHQTIESLTHQIHKEHGGFKLHRYPLHWKLQLSVYINQQQADARLARNLREKFGAYPVLVLVIGNWSAPNVRFHAPIRSVGLRDMLQAYRFKVYLIDEYCTMVACPVCYHQLEKFCWLDKPRPWQQKNHPRVLCHGLLRFTSERCSEDNMPNRIWNRDLAAVINMRAILHSLRNDNGIPRAFHRGNNNALAAPQPRHPRTSTSSVSGITNSGSASTSAAF

SEQ ID NO: 2303 - protein, 452 aa, unidentified
  REGION 1..452: note = Table 20
MNGFGQQLRRVVNRLLGVKDRASHRRAELRQQARQFKLAIAERRSNISTIPTTMQNAFLALEPAIKAYPDNYEFGRNSIYYDAKAHPENHILAYYRLSQVCETFGIKSFQCFPLRSSFVPGYFQIDTTVLRENILHEHNRDYSLEGKLRSWRKVVNLNAKAFKTQASDHELKFRGSIQTDGVGVSVLKTNFDTRAGGPRQQNLQITIREPNVADLSQEELHATEGPCILVDSNRRDIMYCMHETSTPDQPQTMRKKRKERKYHQNTAIAQAEAKLIVYTRFIIQRSKVAALLFHHYSDTTGLLAQNMKLSSIINRNRENDRLVKDLRQSFGENCILVMTFHEPIRGIGMRRALRKRGITLLMIDEYMTSKHCPHCFQLPNPRPWRREEQPTVVCNGLLRCNNQNCMQPRQTTRLWNRDMAAVRNFRHILQGLRLDGSRALRFRRRHPQNNPR

SEQ ID NO: 2304 - protein, 761 aa, unidentified
  REGION 1..761: note = Table 20
MPAEEAAETAASPLSAFKRILTIKTSLSTIGWKEQYKPALKELMNITRDGSVTGKSQLSDKTRMARSLTFPYTEKYCQHASYTPIKLTNAQQITKYEGTKIHTAYINNITLHFGNQLYMEERGCSEEEIKKTIKTDVLDVCHKLKMEISAKKLPTLTANFLTETITNQIQSFLNVYPDKYNFAKNSIYYDVKAKPQQHLQAYYMLAKICEENNSKSFSCFPLRKGFIPGYMTIDAKILNYHILKNKKFAVGSKFDIWKSVGTIETDGVGVSIVKQNFDPARKGASSDRWRMITTDDSFVYAGNLSKSELLKTKDKCILIDPGRGDLLHCIHETSSPEKKSIFRYKRNQRAVEMKSRRYRKLRQILKPDYIQSLEDQLSRLPASTVKSKVFAEYLEVKAQISECLKEYYCNEDVIFGTSNCDAINDGNASDNISYADAASSKVIIGEASRSNVDSIDGIANDGEANCASDSADVISDGAVSDEAVSDFNVDDKFDTELAIHQVKRCLKRSIDNLQFILNENKTKNKIEKHEYEWFNSILKEAQFLKVISKEEYEYHHKRAKDLSELIRSTLTPLPFRKLKLSSKINKQQSNKKLANDLKKKFGKDAVLILGDWMVNYVEFHEPIREKGMRLMLRKEGFTALLINEYKTSSFCPECEIGELETFKIMPTVKRHGLLRCKNQNCLKIQQTSRLWNRDLAAVLNFRSILQSLRKTGARPERFTRYTMEDNRRKRKGTQHESNKTKKPDLIPPRLLLKAPTVQINY

SEQ ID NO: 2305 - protein, 763 aa, unidentified
  REGION 1..763: note = Table 20
MTEENSDDDFQSTITRKRKGRKPTPVNSSQKQMKKGKEKSSSSSSTAIVESKSSDDAPLTKPTAATAKYNTVSDSNNSSANANIVKKCAIAVKATVKPIWKPNYTQALHELVNITNTQELEEDFNFDLSDYIRKEFFVEIFLSPIVRNNISGRLLGKTANYRSLVSKHKESYCLSASYTPIVLVNAQQIALYECTKVQTAYLNNIKAHFGNRLRAILNKVCKTKELAADLRKDLKKKNVDKRAVNKALREEVYGPCNQKKSKAVLQSYLNNYKFKKDSIFYDVKSNTECHYMAFMKIAELFDSEGLRQFSCFPLRTTSIPCYMTLDFKIVHCNVLKNKTAPKMDNKFQNWGSVVNTNNKAFKDQGMNISLCFQDTIETDGVGASIIKQNTTINRKMAQPKTKYKESEDVARYMESLIQEELNEAKSMCVLMDSERRDLLHCMETSTAQNKQVMVYTKMTRTKVSSHYRILQKKTKPASVKSSEAKLAKTKSSSVKIEEYETYIKTRASVEKVLCSYYGNETLQTKQTYFSNHCFDFHLKNKADLYFGHLGYFPQPNESTGIDMHATYLELMIKQRHISERLDNGGKAKLLGIVAKMSKESSDQDSLKQQASQILEKLQVLPFRKMKFSSKLYYDQDDLMLVKKLKQKFGSDAVLVLGNWPAPDTKYQELTRNKGLIQMLKEDGSVVFLIDEFRTSSFCPLCEGRLENFKTLRNPRPYKKKTRPTVLCHGLQRCIFSGCLEQLKPKLWNRDLAAVLNFKKILTC

SEQ ID NO: 2306 - protein, 361 aa, unidentified
  REGION 1..361: note = Table 20
MNKSLCFQGTIETDGVGASIIKQNTTTNRKMTQPKTKHKESEDAARYIQNLTQEELNETKSKCVLMDPGRRDLLYCMKETSTAKNKQFMAYTNMTRTKVSRHYRILSKKTKPASVKSSKAKLAKTKSSSVKIEEYEMYIKTRASVEKLQESGDTFPQPDESTGIDMHATYLELMISQRHISERLDNVGKTKLLEIVAKMSKESNDQGCLKQQASQILEKLQVLPFRKMKFSVKLYYDQANLITPSFCPLCEGKLESFKTERNPRPYKRKTRPTVFRHRLQRYWAIRYTNSGCLEQLKPRLWNRDLAAVLNFKKILTSLREKGSCLKFVYSHKSRRILRQGYRQIVAKFWLQSLGHFIQNYL

SEQ ID NO: 2307 - protein, 786 aa, unidentified
  REGION 1..786: note = Table 20
MTEEESHPESSTERRIMTIKSTIQNIWKSNYIEPLHKLVDITNHLVTHTYFFIKYIFLQEMKNTNEAFDMNAYVNKKFFVEVFLSLIERQVRDGAKTGKSRLGNDVVLFRALINAHKDSYFRLAKYTPPKLTNAQQIALYECEKIHTAYINNIRKHFGNRLRMFLNFCCKIKQRSADIRTRMTKARYSEANIRDVIYRTVTQPSNAIKDQVSQKLVPADSSLSSEHLGQVESFLAMYPAEYNFQKSSIYYDLKANPQSHFKAFYKLTELCQLNNLKNFHCFPLRTSFVPAYMTLDAKIANYHILKNKSMKEDKMTIWGLVCDLQNKAMKDQGTLKFHGTIETDGIAASVLKQNFPTSRKRPGGGEGGSGGEDEDQPQYVESLTMAQHQEIQGRCVLIDPNRRDLLFCMKESSTISRKQLYRHTQVCRNKQLRHFKKLQKKLKPESVRLAELALSETKSSSVDSVAFVNYVTIRAEHEDILYEYYGNETADFTQDFDWDIKHEFNIRNQKNLYWGHFFIAQYKGLFPENCIDTLDDRTNLQLQINYLEVMLSQSHVKKRISQDILDRLSLFASETFIWSQRNHTQEDLKEKLNETEELVNSELKLLNLLPFRKMRFSLKVYSKQNDANLVRSLRSKFGADCVLILGNWSAPTTKFHEPIRNKGLIKMLQKNGFTLFLIDEFKTSSVCPDCEGGLQKFKTIPNPRPYQREKMPKVTCNGLLKCKNHSTPKLWNRDVAAVSNFLKILNELRKTGNRPSCFSRSNTETKKRKNNRSPTSASSSKKVKHSA

SEQ ID NO: 2308 - protein, 528 aa, unidentified
  REGION 1..528: note = Table 20
MFLNGICKKKEESNCLRKKMTEERYADYIIQETIKRTLILPCMKVKLAVAKKQIPNDEILNADAKDQIKEFFSMYSTEYNFQKASIYYDVKANLGKHFKAFHKLLNYAKQIKLKTINAILYEALNYYILKYKNKKERKLTIWSKVINLEKKGMKNQGIGKTLQFEGTIETDEICASIIKQNFDTSRKRPGTDNSRSQKPKKTTIGDNNNVKHIKILTRTEPLSTNGRCVLIDPNHRDLLYCMKETSSAENKQILRFTSICRSKHSRRFRILRKKAKPEEVRLAEEMLSKTRSSAMNANIFLEHSKASSAFEDVLSNYDSHETKGPKGIYYPDLRNDFEFKKCNLYWGNLFGARFPAIFSKSIAIQDNNTKLQTYAINIQIISLLQTLQLLPFRKMRFSSKLLLQQNNDKLIKSLKKKFGHDAVLGLIQMLKKSGFYLYLINEYKISSLCPDCKGKLEKIKIIDNPRPYGRKDMSKVKCNGLLRKILMSFRETREHPSCFRQIQPLPKPSYKRRQGEGPSSNKRTKLSA

SEQ ID NO: 2309 - protein, 224 aa, unidentified
  REGION 1..224: note = Table 20
MQSKGMRPQVESQQLMFRGTVYTDGVGISILKQNHDSKKKRSGGKQKKAYIDDDVPYVHTLSKKQLLADIGKCILVDPGRRDMLYCMHESSTIQIKSLYRYTNNQRNVETKTRKFRKFRENSQLEKFKEVNNPRPFRRNTRPKVICHGLLRCTNQQCLKDADTPRLWNRDLVATLNFRKILFELRKNDTRPICFRRPSTNYASKQKGSFSDEYSGNKRHKANPL

SEQ ID NO: 2310 - protein, 615 aa, unidentified
  REGION 1..615: note = Table 20
MKLRGTIYTDGVGVLVLKRNYDTKKKGGSSGGKPKSIELDEFQYIEKLGKEDLLAGADKCVLIDSGRRDLLCYKFVEYLQERAKVTPVMKVYYLNEDLPAAEDQGADGFLPFRKMKLESFINRQQANKWLAKKFKERFRNGAILILDNWSAGNVKYHEPIRGGEMRRMLVNEGFQVYLLDQLRASSLCPSCQNGELETFKKVQNPRPYQREKYPIADCHGLLRCKSQRCLKAVTRTIEATDKVPLCRLWNRDMAATLNFRHILFSLRANVTAALISDTVTDDNQGQIKGMSTELTIYGYNEEPLPSVEIAHRNKDAVFNSLFDMEKVQHTCESNGLKFGQRMSVLPKLKVVRILGVKKTIVPPVKPQKMFYLKRILRDPNILLEGQKPLEDLKAETAKLEKEVKSLDQEREKALKCQKEQDSIKKIKALRKEWHNKVDKQTLYQRIEEERHLRDKTYLKINDIEDQLMEKKQVLYYQRMAIRHNSRIHTVDTTSALPTTKKELKKDSRGLVHSEACVPRDFEDFTFCGTDNGLVNMTAAVPFSLKRFSFHLKLHNYYSVLDDDNKAAPVVQVIELQKYLKTPKATTISASEIDFGCGAFKQRSFSESDINFKCVS

SEQ ID NO: 2311 - protein, 693 aa, unidentified
  REGION 1..693: note = Table 20
MEPPLKIITVKSSIAGIGWKPQYIPLLKTLVANVHTLVSHTFSFLKYIFIHELENNPAFPLEDFINVDFFKEVFLSLLKNYKPDKQKASTKSRTYKGLVLNYRHQYFQCCSYEPINMKYAHQIASYEMVKIVTAYLNGVKVQFGNKVRMFLNLLLKKNERIKALKSEMKKNEGTEKEIVATIKTITEQISKVKLAISSRSIEDVPKEFFSSNDLDKIRNLFDSYSTDYRFAKGSIYYDCKANPLKHIKAYYRLSSMCEALQNKSFNCFPLRKGFIPSYMTIDTYILNTQILKNSIISHLDKEVVWGAVLDVRSKAMKPQGERRIMKFRGTIYTDGVGVSVLKQSYDTMKKGGSSGGKPKSIKAEEFQYIEKLGKEELLAGVGKCVLIDPGRRDLLYCMHEKSTVENKMIYRYTSNQKAIETKSRKFRKLRNNLKRDEVIAAELSLSHFKSSTVNKDKFIEYLQERAKVTHVMKAYYLNEDRPAAEDQGAGGFLPFRKMKFSSFINQQQADKRLAKKLRERFGNDSILILGNWSAGKVKYHEPIRGVGMRRMLAKEGFQVYLLDEFRTSSLFPSCQNRELEKFKKVQNPRPYQREKYPVVDRHGLLRCKNQQCLKAVMSTTETTDKAPLRRLWNRDMAATLNFRQILFSLRANGERPERFCRSKKPLSTGPKRKNIPSSSASTSRPTKRPNNPL

SEQ ID NO: 2312 - protein, 517 aa, unidentified
  REGION 1..517: note = Table 20
MYEATKIHTAYIVNIKLMFGQHLRRVINILLDIKNKQRELTQQLHIQRATEERIKRMLTEHIFEPTRMFKEGVSTRRLEDVFIGEGYRTAFMEISPILTAYPKRYEFQKDSIYYDSKASPHNHFLALFRMVKLLEHLGRRSFNCFPLRRSWSPGYMQIDTRILSQGTIHTDGVGISIIRQNKDTTQGPNPRRATTINPENIPYIHDLSPEQHEIICGRCVLIDPGRRGLLYCMHEESTVKTPRCYRYTSNQKNIRLKRTKFRHILQDLKAQAPNVIAAEREISQTSGRANNTTNFAFHTSVKAANSSILSSFYTSTVSRTSKKPLFRKLRFSSYINQRKASERLAKDIRAKFGQDCVLVMVNWSAHHNRYHEHIKGVEMRNLLRKHGFNVCLIDEYATSRYCPRCYQPSLQTFKQVENPRPYRRSQMLTMTRHGLLRCTNLNCLENMDGSEVMHRLWNRDVAAVLNFRRILNNLRYDGTIPVRFTRVIRIGRIRRQAEEDLQEGRRLRQRLTRIQRK

SEQ ID NO: 2313 - protein, 682 aa, unidentified
  REGION 1..682: note = Table 20
MDDADFPGGNGDQQGAIDAVRGERITVVKGSIASINIRRPVYRDRLEHYVNLHHKTTMHTYRLLKYIILHRINNHHFDAMYYLNHRFIHEVYMKLITKARERAPRTQDTIERRAIIDQYLPAYLRLVGINDLRELPLMVNSQQSAMYEAVKISTAYLNNVRNNFGKRLRQVINVLLNVKARQRALRQLLRGQAMDQRAINQAIRREITNPARRFKIALSNRTTIEALHARFDDGPEGFYTTAIDQLAPFLETYPNNMQFAQGNIYYDCKANPHLHFKAFFRLAELLHQRQVRSFCVFPLRQSLIPGYVIIDTKILMTQIFQRTVRPGEPLRHRHEWGQFIDFRMPIFRAQAGREFGNMIETDGVGVSVLKREQHDLQFQQPRQQGAPQQQEFPYITDPEVQIPPNCVVIDPGRRDMLYCMEENSTPQAPRMFRFTKPMQDKIRKNKRYRRILQQMKPRRIADMERELTNSNTLNLQVYQQYLQNFGRVYEALLLYYSITRGASQTGQFPIHRKLRLSAVINKSRCDQFLIRFLNTKFPNTTTYIMGNWSAPHTRFQEPIRGLGFRRLLQKHGKQVFLVDEFKTSKVCPQCQQPTLETFKQGINPRPYRRATQLYTTVHGLLRNHAAHGLPQRFPFHYFNRDTAACLNFIRCLQAVRQGLPRPLDLQRRPLQDNDDDDEEDDD

SEQ ID NO: 2314 - protein, 549 aa, unidentified
  REGION 1..549: note = Table 20
MSFQIFYEDGHGNAVDEYGRPEPMDYIIDEERYALETVSPHTQYLHNQPRENSFDVGSMEDEDAKDDVDVCMKEASNKRAYTVYTDQDKVRFFKLVFERVMSASTAAKQLGIHVRTAQRWAQVYKTDPDSIFIKHKKTGRSRILHEEHKQVILEYIDEDPSAALEQVIERLLQKFQDLKVSKSTIYNFIGTVKKKIQERFDWVHKWECTDMDFRTNCVFLDESAFHINLKRSMAWSKKGLPAVVTVPKTRAQTTMILGAISASRLIKCSLRLPQPPAKKRKRKGYVELTSTGTVASHYFSFLKATMDEMDQYPRMKGHYLIMDSANALTTSFKPDLNSLPFSVDSMDNTITNHGNGYPLFRKIRLSAYFNKQRADQKLIQDLRAKFGEDVVFVMGNWSAPHARHHKLIRGLSFRRLLKKYGFQVFLIDEYKTSRCCPTCYNESLRTFRRVPNPRPYQRERYPTVVCHGLLRCTNLYYRPAMAVPDRYRLWNRDVAACFNYLHILRGLRHNGIVPHRFRRVVVAPTRRRRRVGDQEQPRTRIRLDDDSPS

SEQ ID NO: 2315 - protein, 604 aa, unidentified
  REGION 1..604: note = Table 20
MDEVSTPSSFYSSAMSTSSFLAPGDRILAVKSSVDGIGWNDLYRETLESFVERVHIITMHVYSFSKFIFLRESMALIGYRELINRHLDDYLTITNYQRPNFVFAQQSVIIEGTKVYTVYVNNAHLRFGQHLRRAVNALLRIRQRTADLRRDLSAQGMDDDEIKHRIRQDISLPAQTFKQAISQQPIDMKQVPQEPIYMEALITLRPVFDAYDRDYNFDEQRLYYNVKRNPVNHFKAFYQLSRLFILCQSILGIKWSNAVDKLDYWHRVVNLDSKALKPQEGVQLRFRGTIQTDGVDVTVFKKRFDRQTRYTARLPVKYEATSYITNVTRRNHQGVSGRCVAVDPGRRGMLYFVHENSTPEQLVKFRYTKQQQDKTWKTKKYRRILQALEAQDPDIVRADTISVEGFGRFLQARSEQSAVLSRFYGHTITNHDNGYPLFRKIRLSAYFNRQRADQKLIQDLRARFGEDAVFVMGNWSAPHARYHEPIRGLGFRRLLKKHEFQVYLIDEYRTSRCCPTCLNESLHTFRRVPNPRPPAMAAPDRYRFWDRDVAACLNYMHIIRELRRNGMVPHRFRRVAVAPTRRRRRVDDQEQPRTRIRLDDDSPS

SEQ ID NO: 2316 - protein, 319 aa, unidentified
  REGION 1..319: note = Table 20
  REGION 291..303: note = misc_feature - Xaa can be any naturally occurring amino acid
MGRAVFIDPGKRNLLTAVGEHSKSKKHGAIVLRYSAAQRAASLETAMFKKRLTKRELRMDPSLSEVIASLSRLNSRAFSASAISAWLQSMASHFDRLANVYGDLFYRQVLLRKYSMQQIETTKLIKNFSQKFGSDAILIFGTWNQTSIRKQPSTLKASTLQKAFSKAGFTVYSVDEYLTSSCCPFCFGRVTSSSNTIQLRRKVGFDHLVRPHGLLVCNRKTCKDECGGSGRFMDRDVMAAMNFRLIFQHHANAIQAGTERGRPAHLSRSKHPSLSQAHDEVNPDFDEEDDXXXXXXXXXXXXXEEEEEEEEEEEEEEEE

SEQ ID NO: 2317 - protein, 739 aa, unidentified
  REGION 1..739: note = Table 20
MDVEPGQLKRRENTGATAAHKAWLGPTLAGPRRKIRKTRFKIHQCVTTASSADHIASWLVAFVIEKEWRHPSIRQDVRSNISSFRSSMELLSHTKGTRNSTAIGFLFEEAMRFALSGESRTTRGGQGSGPRRECQQLIALHGPTFKAIFDFPTSKIQLPTEVIVDIGEQWATAYQNQIQEHLFNTILHIVNVFTAAKDVRAAARFGSSQQKRAAQRRLKAIATYKKWLANDPDGAIRINDNAIRRTHNVLGPIIAAHGSPLSFIQHRSRRSQVNEKPLIFLPLFLATLEVLAAEPMLKSARPRLSLPVRRSFIPKHIRLDAGALSTLSPSLQYDPRDNSNKSQDKREQERHSIFRYHFDLTKRPFASEDEDGNTRDVRWTLGSSIATDGYAISVIKARSGAAPKGRAERSKSSRGDAAARRRQGQDASSFPDLTKMTDEEVLHTQGRAIFVDPGKQNIAFALPDKDDRRVTFRYTSAMRRRGLGTAILRRRLVQLERNLPPDLKTALKIYRENPLPSSRVFSEEGIAAWLRVLNTHFRSMTAIYSKPLFRTQRMLSYSRNQREWSRVIKTIVDKFGADAQVFVGNWGASNIKGSPPSPSRKSFQNELFKAGFDVYTIDEFRTSSYCPDCSEKVYKSKKTTHPNPALKKLGWIRQESPRGLLICTSETCRARCKGGDRYFDRDLLGAANMRLVYRTRIAAINGSSESARPPHLSRQRRNEDNEEVIASSDESSGSGSSTR

SEQ ID NO: 2318 - protein, 308 aa, unidentified
  REGION 1..308: note = Table 20
MSVSVYLKHPEADRYGKRTGRKSAKSLEEEVKVQYVENNLPACRTAANVIVIDPNKRDLLYCQDNKGIIFRYTSNQRAMETGSRQQQNQRQQMKKEAKIDLIESRIPSHKTMNLMDFTRYLLVRRVHCEHRKQFYSHPAHTRWKWHSFINKQKSESSLISNMHKKYGDFTVVMGDWSDAGRTAKFQTSSKTKGWRTLFKCNGIDCFLLDDYKTSSVCPHCNSPEFVQKCVKERPHSRPWRQREGKTEKVHGLLGCTNPNCLQQDWMMRYWNRDTLATCNMLSIVQSLLDGKGRQAVVQQVYSGGSVDG

SEQ ID NO: 2319 - protein, 638 aa, unidentified; identical to SEQ ID NO: 654
  REGION 1..638: note = Table 20

SEQ ID NO: 2320 - protein, 669 aa, unidentified
  REGION 1..669: note = Table 20
MPPKRKPDPPDKPTGANCTQEKTPYRTIKTSLKSIIKTPEIHQKINELVLRINPIVVDTYQFIRLYCLQLYHQQRPIPDLDSTFISYCMMAMGERDARGRQPKQSDVMKELHHFYETEFQPIFNHTKFDLKLLTYPLSYIQQTMETCLTVNIKEHFTKRLLRFINIFADKYYDEHVGSQVEHTEEYIRSKRETIWKLKKAILENKPDDVPSCLRNWFIEQRSKLYPANITKTIPYDCQVQPFCYIIHSFYMNQCYEDYNNTIRAKMVDASPTEAKELNQEMIKLFQPMSLRSSCVPKYITLDTATLINLFAEKGTKGNLLKKVSENQEHIWMAHFKMNKKIFTSKDYVFNYTIQTDGVGVSLLFKHKTLVDKKYGSKVKEVDTSIPYIDDCSAEQLEILKTKKIITADPGKLYLLYMMDDEGNELKYSCKQRDTESLAKRNRRIKLTNKKRSGLNHQLNSSCPDIIECETELSAYSSNTVNIQLFKDYIKKKHEVNIKVKSYYEAELNRKINWRTKVYRQKSEDKFLHHIETQFGNKDDIVICIGDWSAKQGSCIKGASTMGVGLKRLVKKRYTTLLLDEYNTSKKCCHCWKDISNITIDGSKKFRLLGCKHCRNDKEEHIGSPEDEPKSMFQSYRFFTRDKNSCLNMLGIVKHMIYNKNKRPTEFIRG

SEQ ID NO: 2321 - protein, 578 aa, unidentified
  REGION 1..578: note = Table 20
MVKKKKKDTFQEFRSTDKSAYTTIKTTLKSVLHNHKEVQPVITNLVFEMNDLMIHSYQFIRLYVLKCYNNNQPLPEINDKFILYCIKTLGVRSNQGVKCKDTDLLETLQDFYDKEYQPLLHHERTSLKNKSNMLLYLATQIHTSLSNNTQEHFIQHFLRFINKTTEKITEDKAVLFKFKKQLLECNEETDTMFDEWKTTHLPNILPENIKKSIHYDVKVKPFDYLKGMLYMNTVLEKEDHKLFQPLPLRNNIIPKHIILDTSCIVNLFSLEGKTKTELFKAIKENQYDVWNNLLNLHHKTFKSKYYQFHYQIETDGISCSLLFIRKDLKDKKWGSRMPTLQEQEFHNIEDLSIEQLTELAPRNIVGCDPGKRSLVYMMDDKGNKLQYTAPQRKRESKTKTNQRILLVEKKRNNIIEKETRLSFQNSKSVDYEKFKMYLVEKDKLNKETLDFYQRDVWRKMKFRQYSYGKKSIDTFLNKIKETFGENILIGYGNWSRDTQMKHFMPTMNKGLRKQIHKKYDTITINECNTSKKCCECNNDLSYYRHSDGSKQFRLLVCLSCNRGNDCSGCVRPQVKQTV

SEQ ID NO: 2322 - protein, 632 aa, unidentified
  REGION 1..632: note = Table 20
MSESTAKLKCIKHSLRKLATNKTFTKINDTVLRVNKIVIDVYNFIKLYVLYKYEQTNNIPKIDQSFILTVFKTVTENSNKSGRKTTKNIKLLNDLNIFYESHFKQVSSGKLDSKNLSHIMVYLSIQILTNIKNNIVLNFSKYIKNILRLFYENSNIPITNKELNKAVNKIICKKNKKFDYKKNSSFLPYMFVNYVKTFYTPIKKSKTLIEDIRNHPLNYLPYMIKINREIEEYNSKLTDENKNKLKKLYQVLPLRTNIVSKYIPIDTTIICDLLVDTGISEYYKGKTEKDIKDLWSLCFPGLYNKKNNHLIKTKKYRFDNLIYTDGVGVSIIQISNTIKTKKDKFIAKKQKKLKNEFLYIDELSGTELTNIKNNYTLLGVDPGKRFIVHMIDKEGKKIKYTSLQRRHECLHKANRKKINNIKTENIIKKETELSKVNSKSSFVKSFTEYLIIKYKINSDLFDFYNAELFRKLKWKSYIQTQRSEMAFVNKIRKTFESDNKKVCLMYGNWSQTKQQANYFPTPGIGFKRKLSKYFKVITIDEFRTSMLCHSCESETEQKFSRKNPRPYKDNIVKVHSLLHCKNGDCNKFWDRDVNGSLNILKLAEHYLEYKTRKYNFRRDIKKDEILPIIPAV

SEQ ID NO: 2323 - protein, 726 aa, unidentified
  REGION 1..726: note = Table 20
MYVYTKTRFKNILRPDINYTELFSAIHRMHLITTYTYQFLKAFVIDCFDKNSDMPDITENFLRLIIKVICIKAPRSRALTEDNKKIFDQLQNFYDSKLNNTNMIPVDGLHLDNIVGYTITEMLTSIKNNIVANFSLKVKSYVTLTYKDEIKDEINKLKKKKVPQSHIKEKYKELTNEINLIKNDLLNNNEILLSNKKYHKWIKQERNKLFPELIQDSNDASKTHTYNVHVKPLEYLKHYVYLAKKMEEFNNEVSNTCKSFNFLPLRRSFVEKSIVIDTSSIIKLIKLDDTKLDDTKQSYLENICEKEDEIWSTVFKMKGKKYRRKGYTFNNYIVTNGYDVSIRFINNNNMKAEKNRKLKMTIGRRKAFQEKKKCKEMGTKYVTISEKLSVTEKKPKIRKTQKKEIEEKKYVDGIPYIEDASESEREELKKRKLLYIDPGKIRLLTMIDNEGKTMKYTCGQRLRETKRYKYREKLNKYAEKEGIKEKEKKLSEYNSKTSEYKKYIEYITEKNKIMNEVGDKYNKEEGIYKKYKWYGYINRQRSEARIVNKIKEEYGEDIIIIMGDWSENTQKKRIKRISVPGASLRRLLKENFRMYMINEYNTSKLNYKTEEETKNLIISKERRVPKYNKKKMEEVKVHNERLNEEDRELKRIHSVLTYKMENNRMGCINRDINSVKNMRKITKHILERGERPEKYKIDYHPKTKEKKTKVKPKSEKQKSVKGSHAK

SEQ ID NO: 2324 - protein, 419 aa, unidentified
  REGION 413..416: note = misc_feature - Xaa can be any naturally occurring amino acid
  REGION 1..419: note = Table 20
KKKIMSCKEIVWRKVFRMSKPIFSRNHYKFDYTISTNGYEVNIRYIRDGKFFEKKLAHKMMLSKSRTQGSIDRANGIVKEKKPQIKVKKKKNNEVKKDKSEIKTVKKKEFKYIDELNGDELAKLKIAKRVYVDPGKIRIFTMIDDEDNVLKYSCGQRLRETKRLEYQRKRERYSDRTGIKTMQEILSDYTSKTYFLDRFIEYVSVKNIVNDSIHGKYNDTDFFQKLHWYSHINKQRSESNLISKIKETYGENAILIVGDWSETMPIKRISTPGIGMLRLLARHFQVYLIDEYNTSKLNYITELACENLELNMKINGEVKLRSIHSVLTYQMLNGRKGCINRDINAVKNMRKIVRSMLSGNGRPEKYRRNTKKKEEEIEMTINETEVIEMKQKEELSNMKDDKKRTIDTIDRIXXXXKNK

SEQ ID NO: 2325 - protein, 738 aa, unidentified
  REGION 1..738: note = Table 20
MPKIDPPDKYTTIKVRLNQISQNSDCLKNIAEAVKNMNILIRHVLFFINAYLLYLYKNNKEFPIIDKPYIRLIFRLFCIKPKRGAAMTKENQILFKAMQKFYEDHFILTNPHHLIDGQSLSYMIGYATTTILTNIENNISMHFINRVRFFVNQNFVDFIPQEIDKMTGATKSELVEKRKELHKKIEQVKKDLIDNNETLVSDPQFHQWIKEIRSKIFPVNYSESYAYDVTVDPQKYLKCMMNMNSELERKELKTFQCLPLRRSPIEKSVTIDTKSVIDLLCENGTKKFYHDNMMENQQSLWDLFFRTKSKLFKRKKYVFDYTITTNGYVASIRFLNKKYLEQNNNTKTKKRVGRTNTAKARRERRISMEDQKDACITVNSLITDYLETDDTDNKTYMNLDISDTTKIVNYLLSEKINNKKVSSQKPTEIKVKQIKGEKKIKEVDPRYEFKYIQDLTGTELEYVKKAKKVYIDPGKIRIITAIDDDDEVYKYTCGQRLMETKRLEYQNKREKFKDYHYITENEERLNKHNAKTCNFEKFMEYVKDRNELDYIQDGEDLDLGLYEVYNNNRIFKKLEWYNVINTKRSEAKMINDLMSKYGKDAVIIIGDWSSNMPIKRISTPGIGLRRLLARHFKVYLMDEYRTSKLNHKTEEENSNLELPDKKRKIRKIHSVLTYKMSNGRMGCINRDINAVKNIRKIVKSILETGERPEKFKRKREEPISVKSFQVVVCEGTNNQIAQ

SEQ ID NO: 2326 - protein, 768 aa, unidentified
  REGION 1..768: note = Table 20
MTKTDTLKKVKKKDEIIQNNDVPFRRKKELPDFRTMKTSLKSILKDEQVNKPIILDAVNRTHHVVIHVYQFIRLYILDKYHKNKPLPIINRDFIAMVFKALVKTSIAGNTPKGKNLQLLKEFNSFYEKTYRQLGYEEKIDGVNLSNIFSNMEVDILTNIKNNIQLHFFSYVNRFVNSSFRDENNRIIENTKKKDKVELRKKLKKELYRVKEDLKKNTLLSQKKYHKWIKKHRVNMFPKEYTDSYEFDIKHNPFNYMNCMIYMCLVLEENEAKSFQFFPLRTSICPKYIPIDTTILIDLFIKNNKREYLNNVSGCKEELWNRLFNVDNSIFKQKHYSFDHRILTDGLAISIQFRNNSKIEKNKQNNRNRVKASKNAKAVYKHMTQKQIDITKQKKEEKKKEEQMKKQLEIKKERERKKEENKKLPKEKQKKIIEQKKKEMERKKQEMPIDFPYLEELNPTEYEELKNSNWIVNDPGKRVLLYMKNKDGERLRYTNKRHVTKTKRLKYQTIIKNYKEKEGINDTEKKLTGCNSKSCNYDKFKEYILEKNEANKELLGKYEAEIFRKYKWFGYINRKRAETDLVREIKEKFGEDTIILYGDWSIGIQKRYMMSTPNISLKRKLKEHFTIYNIDEFRTSILHHKTGKRCENLHLYDKNKKGVREMHAILTYKMENNRIGCINRDENATNNMLTIAKEYIKKKERPERFRRGTELIDEEEITRSSKSKKQNSKQAPKKAPKKAPKKAPKKAPKKAPKQTPKPKQYQQKTRTSN

SEQ ID NO: 2327 - protein, 445 aa, unidentified
  REGION 4..7: note = misc_feature - Xaa can be any naturally occurring amino acid
  REGION 1..445: note = Table 20
MITXXXXDYMDKNKKKKKAMSDAKKKQAIDTKGLTPEQKDKLKADNEKQKKADKKAKTKKLSEDFKKLSDAEKKAIKDKYIEFQYIDELTDEILKDILDNAIYSDPGKNNLVTMIDDDDNLFTYSNNQYLHETRKVEYGKHLQNYRKKEGITEIEQQLIDFNSKTCDLKKFKEYVKKKNEINKKLFADYAIEKFRQYKWYAYLNKKRAEDNLLNKIEEKYAKDDKKLNIIMGDWGAKGNQMKGFVSTPRVGMLRLLARRFNVYLIDEFRTSKVHYETETFCDNLYNYSTHYDNKSKKVHSVLTFKMQNNRQGCINRDVNAVYNMRKLVKYWIAHKGRPQIYTRTIVDTPKSSTINKADATFTHSAAIPTNKSSNSPRLVKTVNTNQKSEIKVLPENKPRQNIKQQSVKPLKEPVIKAKQKPLNSQNKNKSVKSTKNNRGNGRISK

SEQ ID NO: 2328 - protein, 681 aa, unidentified
  REGION 1..681: note = Table 20
MVLKKSEGQYITQKYLLFRITKILHHNIFQKTVRTIDTIVKYVCFFLRAYLLYQFKNDEELIHIDRGVLDIVIHCITKKSIAGPPSKKQAILRQTLMDFYNNHFAELTLNFAQYHSIEDISDYEFFKIDKKNLSQILNYSQTEIITNIENNIKLHFLDHLRHFVNQTFKEQNNQILDKLKTKRQKTDCRKRLTAELTKVKNDLINCTLLSEQKYHLWINTYRNILLPNQTDKTLEDDINATPQKYLKSMIKICRLLEYEGKKTFQFFPIRTSLIPKNITLDTASLVDIFFQENKNEYLDNISLYKEEIWGKIFNMQDPIFHRKNAVFDYSIMTDGYSVSIRFLKKQYIEANKKKKDNKQNAGKKSKELYKDLSEEEIQKIKNEKSIKDKQKKAALSKAAREKKKEFKHMSKEQQCKILENAMEFIYIHQLAKKKRRELRTAKKVYADTGKRSLLYMIDDEGNTLNYTNATRVRGTKRLIFQERIEKLKNKEKINEIENQLCKYNSKTTNFEWFKCYIEKKIEIDEELRNFYHQEVFRKLKWYAYINKKREEANMLNMIEKKYGKDIIIIIGDWNDSGGINYMSTPGVGLRRKLAERFKVYLIDEFRTSCLHNKTEERCSNLYLEHNNKVRKLHSVLTYRMNNKRLGCINRDKNAVLNMRKIVHHFLETGERLERYRRGINI

SEQ ID NO: 2329 - protein, 382 aa, unidentified
  REGION 1..382: note = Table 20
LIVETNKHQNLLNNCIKNPSIILTGKNKGNPKNKTKGDLYTCLEQNKELIWGTFFNITPTIKNYVFDYTIITDGYVASLRFIHKDYVKEEQIKKEKIKNGKLALIGLSKEDKDKLKHDKKVLSEQKQVENKNSVKKQEKNIKNDFLYIDEVPKEKLEGKHIFIDPGKRTLLTMMDDNKQFFSYTNRQYLKETKRLKYHSLLSNYKKKIGITKIEEDLNKYNAKTCNITNFQEYIETKIKIYDKVRDAYHQNINFRKYKWYSYINKKRTEDNMINKIIQIYSSKHIIIIGDWSIGKQMRNFISTPNLTLKRKLQEKFRVYNIDEYRTSCLSYKTEDYCENLYLKFENDPTQKKRKIHSVLTYKMENKRNGCINRDAQEVDVKI

SEQ ID NO: 2330 - protein, 743 aa, unidentified
  REGION 1..743: note = Table 20
MKALYKSELKTIKVRLCNLLKNPQFHQIINEKVTSVNKIQFISYHFIRSFILYLYDKQIDIPNIDITIIAHVFNLFIKNNNKGRKSIQNDYTKLVDKYYDDIFSKIYKHKIIDTNISFILNEAAKKMSTCYKNNIVLNFYKYLNQYINGIFSSKCPDKKNYKTNEEFKLAKKLFLYNLRLLKDSLMQNNLDGCPKIYKKWYKLNKDTMLPKINETNYGTDIKHYPFKYLKYMLNMNKKLEKKKLKMFQCICLRTDLKDKYITINSSALIQLFDFGQPINKLAANLSEQKAKLWNKIIDVSKIKLKNYSFNHQISTDGTSVSISFINNDKIEKKIKVNKMKKDARNETFKIYKKLGAKEKEKLKEKKNKAKIQKSIEAKKKWKEQIKKRNEAFKKLSKTEQNELKLKLRLKLNEFSYIEDLIKNPKFYEFLKAEYENGNLVYGDPGKRDIVKFIDNNGKGFRYSNRRRIKETGRIKINRLIHNKKKKIKLNKKTIEQYEQELIKFNTKTTNHEKFNKYIQKKVKLRDLIITNKTYNEYLKKLKWHSHINKQKHESKLINDIKNVYGENATFIIGDWNGNTKLKYISTPGLGFKRLMAKHFNVYIIDEYNTSQFNCYTDKKNTKLELTTNHNKVIELYSVFTYYMSNGLLGIINRDRNAALNMKKIVGHLIKTKKRPYLYDRKKYIQDPLTVKQSSNGTRKVLHLTKDLKTGRTYREKIKLTKKRKNNNIKKLKSKKNNKKLTNK

SEQ ID NO: 2331 - protein, 826 aa, unidentified
  REGION 1..826: note = Table 20
MILKKGKDYKPSLDNEQYEKLFNFYINTFSQYYFNPNGKDKLICSERIDQIMKLNLKNTLTNFDNNIIYSHEKYINRFIKCYLNNVFKNKLEYNRQIKKASTYEMIKRHNKTDLCGNKIVNVMDFYLDFFKMQKKYNIDYDDRVLKQFNTYLGEKIEKKYIIRSANNFFKEDLDKIKAFEENLSEYKKRIKKILIENEPINENDPQFIKDIITIKNSIIPTIVKSYKDDLKKNPYNFIGGMIYINNYLEKIQSKTFNVFPTRKNFIPRNIIIDATSMNVAFCKNSFKNITNNKLEIYKTIFSFPDNYYKLNGYVFSGTIHTDGVSISLIFETDEKYKESLKVKKIKNDAKNIELRNKKNAEDKLYKEYNIVEIQNFIKNNEKILKNLKEKIDEDEIFKVSSSIDESKRMLDEFNKEIKKRMNKYINDTRKEKEEKNLNKEEKKDKKKEEDKKEYVKKIKKLKEESEGDELRKINRKGKEFYYLDDLTEEELKKVEKSKKMYIDQGKINLIYVLIEKDGKDVFIKYSGKERAFNLKTKEHIKNMKKMYLNYGITKEQQESIEINKKSSNAETIKSNMEQINKTFMATYEKYLNEKLRKEKLEIYIDKQKAEKSLINKIVKQLGLTNINELKEYTLIIGDWKGNNSLKNSKSTLGIGMKRLLKKYVKEMYLIDEYNTSKICNMLHEEEVKTEEKIMELKSISKKGEVKIISKKMHEILTFKMQKQRILCKKNFIYDDTNEEKVTIEGKDIIQINRYIQRDKNAVLNFRTILSHYILNNRERPKAFVRSEKSTCRGSKPRKATVAKESYSSSIGEPKKLKKKKAKKVKT

SEQ ID NO: 2332 - protein, 637 aa, unidentified
  REGION 1..637: note = Table 20
MKPPDPRPIEGKHILTVKKTALRNIVGNDPMILSRIQDAVYRKHVIVQHTTHFMKLYLLSLFEKGDVLPMIDVDFIAISMRVVSNMPPEENRRGRPPNASTRALMNQLECFYKEHYEPLLGKNPEEMRTTLYRIGDMLQYEEKDILKNIKNNIFLHFTDYVKEFINKEFNLKETLSKVDAMALTEEEKRLTKRSISIELRHVKNDLLSPLGTVLTSPVKYHEWICQHKSKLIPKEKYLKNNIEYDVKAKPMDYLSSMFYVCSQLEKYGRHVHAFPLCTSTIPSYATIDTTTLIMLMIDDNALMFRKKVKESKEDVWGSFFQLGNKAFRRKDYRFHYMIKTDGVGASILFHRKDQNPDKLDDDTICTVKEKYIDEIEVPQDKNIIGIDVGLDDILYCTDGTSFYRYSANQRRVQTKTKKYMNIMDSLKKEHLVEGMSVKEWETILSLYNKYTCSFSKFKEYVEQKTTITYTLTPFYTNTLLRKLKWNCYINRQRSEAKMLNKLKEQFGEPDKAIVAIGDWDQGSYHMKGKEPTKGKGMRKVLRQGGYEVYLVDEFKTSCTCHNCHGECKKWLYRPSHKPRNLGENTLVHGLLRCTSVNGCGSLWNRDVNGCLNICMLAHKAVQKEERPLAFQRGIHIC

SEQ ID NO: 2333 - protein, 746 aa, unidentified
  REGION 1..746: note = Table 20
MDNASLPLPPGVGREDPDPPDGQPLPDSSHRVVKHNLARVLRDPKKLKVLYNMVKGGHHIVVHAYQFIKLFLLYEYEMHLASAEGGRTAPKLTPVTVPFVQCVVTVLCEETGAREIQVRTEAKTELKAKLKDFYREHYKETVIPDQQRLGFTNQTQMVGYLAVQVVTSLVNNIQCRYVQHLDIFLGTLYGGEVLALAEAVRGLDNQLRASKAKVPKSKAASKTKATEEAALKAQLVVARKALATAKTTRARKIAEARDFVLFETKKPAATRKPAATRKRAKVGGHAVEEPAAVAAAAVAAAPAKAKAPVPPPARTMPPELADHWRGRLSYITVDTALAIRFLLPDDFMLKGQTEKPTKTQLLKNIIRHQSEIWASVVDLKKPCFAPRNSKYEFAWQFATDGIGCSLLWVSRGTHTASRENKAAGNRHKRGRPGPSTKPKTQAEMREAMYSWAAAAGRRVVGVDPGCDDLLFCSREKRGEELREASWRFSAKQRRHETGATRHRKKRAIMSKWLVDGKSVQAWELELSEFSRKVMTTASFQEYCKAKNALNARLYPYYERVAYRKMRWHRYINSQRSDAKMVNDFGAKLGTKEQVVLAYGDWGQGSSHMKHQAPTRRVGIQRLFEKAGYLVVLVDEYLTSRTCYACGGRCDKFKMVPQPRPWMRKTRPEVLRHGLLRCNKCSMHWNRDRNGSLNIMRCGMAARNDRDRPPCMDRIKIGETKQSAEAEAIRQAESEAIVIGSHNPGTS

SEQ ID NO: 2334 - protein, 726 aa, unidentified
  REGION 1..726: note = Table 20
MMRWVEDRGGRVPNVFPLRNSIVPKYIRLDTTLVIQLLLSKTSGLGAKYKLLKDIIGNKDAVWRSVFHLERKCFAPQESNKAPEKKKRLARKRELLALPKDLKRVRPEPSAKRAELYVAPTGSSERVVGVDPGKSDLISSGTGPGDWFRYTQNQKRHETGEKKHRRARTKMARTLVEGKTVVEWELSTFSRKALTVSAAEAWGDWSRGSQMKFLEPTKGVGMRKLFSRAGYEVVLVDEFRTSCTCFACEGGACEKFRVVENPRPWMRAKRPMVLRHGLLRCKTCERLWNRDRNGSLNIMRCAQAARLGGQRPSYMTRNFSAARPAGTTQGAGLPTMAQTPPWTLPWSCPRSGSRTAEAWWPKPQRRRGREEEQEREDLLEQNQHLREERKQILDKLSELESEINKPLRSEDALLTLENERLRQELEQHKQFVSGVFQQLGNVEQSQKSSMGELSKQNREFSMLHFLRLLADSQSNLEWKRPPFPEHEPFFKPMEVTVLYHRSHEGVLNLRVDFSLYEHVCPVKLRDAMTKCWEDLDAYEAVFGKGSLSLSRELVEFRVEDNHEVLECFHTREPSADADYRYRDLVYLVAKGSVDLAKSTLNLGVRGDLATCVSGEIKKRPKLDMVGTANCAFYTKTITEHGDSDSDSFQAKRMMSTNLEAIFCWNENEVEDERTSAVWMFTFAPSFESYVGGPNDYISEKGTVGAKAVQVFQDLLKTCIAKALTAE

SEQ ID NO: 2335 - protein, 578 aa, unidentified
  REGION 1..578: note = Table 20
MMNSEPPDKHRSIKQSLKNVVRDPASQRTILDVVHASHRITVHALQFLKLYLLSCFENGVKLPLVTEHLVVSIMNVLCEESEHQETRGRRCNPATLTLKQKLLEFHREHYKLTMTDPKEKLGFTNKAQLLQYIAVDVVKDYENNLKLHFVQHLIRFLEFVYKKSEVMATGDKQARAKLFADLRAARDFVLFQPEASSKRVRLSGPVEAPVMPPRLADHMKHIVPQRRFQEGSVHYDIQCSPQDYLPCVHDAVGGGSWRARPQRVSAAQLHRPQMLSGGACSIWSGNVLHPRRATSTSSPTPCRQTGSRARCCGTRRAPEKKKRLARKRELLALPKDLKRVRPEPSAKKAKRAELYVAPTESSKRVVGVDPGKSDLISSGTGPGDWFRYTQNQKRHETGEKKHRRARTKMARTLVEGKTVVDWETELSTFSRKALTVSAAEAWGDWSRGSQMKFLEPTKGVGMRKLFSRAGYEVVLVDEFRTSCTCFACEGGACEKFRVVENPRPWMRAKRPMVLRHGLLRCKTCERLWNRDRNGSLNIMRCAQAARLGGQRPSYMTRNFSAARPAGTTQGAGLPTMFI

SEQ ID NO: 2336 - protein, 273 aa, unidentified
  REGION 1..273: note = Table 20
MNVLCGESEHQETRGGKPATLLLKQELLEFHRVPSGAEMFCPRRATSTSSPTPCRQTGSRARCCGTRRAPEKKKRLARKRELLALPKDLKRVRPEPSAKRAELYVAPTGSSKRVVGVDPGKSDLISSGTGPVLGWGDWGRGSQMKFLEPTKGVGMRKLFSRAGYEVVLVDEFRTSCICFGCEGGACEKFRSVMNPRSWMREKRPMVLRNGLLRCKTCERLWNRDRNGSLNIMRCAQAARLGGQRPSYMTRNFSEARSAVTTQGAGLPTMAVFI

SEQ ID NO: 2337 - protein, 1173 aa, unidentified
  REGION 1..1173: note = Table 20
MLVVFALCSLAWAWVVVEGFAPGDPVPVIAIKVGPYANPSETYPYFSLPFCSPAQGEGFGAREAHGLGEVLAGDHKVKTTYQLRFKQDVAFASLCKKKLLPEEIALFQRAVDQEYFFELQVDGMPVWGYVGDSDKETDLLLGSLASVADPHTYVHSHFHFSVAYNGDRIVEVGLTADPTSRIDVTEHHEEHFDHVPSVRGELDLVEFSYSVKWVERTDLEFAHRLERYDSQRFLPASFEIHWLSIINSFVLVILLTVFLAMILMRVLRNDFTRYMRQEDGAATGAIGASNNAVTMAEADSLNNAEDETGWKLLHGDVFRPPPNVSLFAAMLGAGTQLLCMVGLLLVLALLSVYTPTAKGGIATAAIVLYSLTAGAGGFVAGRMYKQFGGKRWVGNTLLTAALFPAPTFVVFLILNSLAWQRGATQALPIGTILILIALNLLVTLPLTVLGAIVGKSSAPYVEPCRTTKLPRQIPPAPWFRQVPAQMFVAGFLPFSAIYIETHHIFSSVWGHKLYTLFGILFLAVALLVIVTSFITIALTYFQLAIEDHRWYWRSFFSGGSTAVFVMLYSFFFFFGRSEMTGNYQTAFFFLYMTIVCWGIFLLLGTVGFFSSLGFVRLIFSQIKRTILDVVHASHRITVHALQFLKLYLLRDRRQTSCSHRTPRSEHHERALRERAPGNERRQACHAAPQAGTPRVPSCSIWSGNVLHPRRATSTSSPTPCRQTGSRARCCGTRRAPEKKKRLARKRELLALPKDLKRVRPEPSAKRAELYVAPTGSSKRVVGVDPGKSDLIPSGTGPVLGWGDWSRGSQMKFLEPTKGVGMRKLFSRAGYEVVLVDEFRTSCTCFACEGGACEKFRVVENPRPWMRAKRPMVLRHGLLRCKTCERLWNRDRNGSLNIMRCAQAARLGDQRPSYMTRNFSAARPAGTTQGADGDADGLRKEFWGLLLHHFLNPHLPLPEGTKIIATGKTVDRHDLNDLANHDHCFVYVAPPSKTSRRYVTQKLGRIDPDPSTQVEEELAELHKHCKEGLCQCPPVWLHRVERKDCELGVIYGLQVGNLAVRRLFRVPSPPALPSPPSPAVMQAPEQPHSASNLYNLLSDSAVFQELENSAEPEQGVKRWKQSEVPQSEKFASFDWILNASDEEMRLVLPWWRSSDNSNEGDDDNNEGGDHSNGA

SEQ ID NO: 2338 - protein, 666 aa, unidentified
  REGION 1..666: note = Table 20
MPNATSLPIFRVFLFSPTPTRNHTPRTQMSSATPNDAERRVLARHASQRNQETAGTLAATPAPAKEKKPALAFWKHSVAGAVAGVCEVLGTMPLDVAKTNMQMHPGKYSGPVDCLMKISKQHGPAAMYNGTTPFMLQTAGKAAIRFTAFAQIKQVLEFLQMPTAMVNLWSGLLAGAVEAAVWTTPTERIKVLRQTEVVPVGQTSKYANIFSASKHIVQTQGVSGMFVGLIPTSIRQASSVGVRMALYPSVKTMFPENGGVAANMASGGIVGGLSVILNNPVDVIKSISQSGLRINPETNKPYKGLVECSKLIYSESGVQGFGRGLTARVPRVFCGQAITFAVYEQVADFEPSSALSTRHGSRIAVLETVPAFLLRERRQTSCSHRTPRSEHHERALRGERAPGNERRQACHAAPQAGTPRVPSCSIWSGNVLHPRRATSTSSPTPCRQTGSRARCCGTRRAPEKKKRLARKRELLALPKDLKRVRPEPSAKRAELYVAPTGSSERVVGVDPGKSDLISSGTGPVLGWGDWGRGSQMKFLEPTKGVGMRKLFSRAGYEVVLVDEFRTSCTCFGCEGGACEKFRSVMNPRRWMREKRPMVLRHGLLSCQNCKRLWNRDRNGSLNIMRCAQAARLGGQRPSYMTRNFSEAASAVTTQGAGLPLAVFRTI

SEQ ID NO: 2339 - protein, 344 aa, unidentified
  REGION 1..344: note = Table 20
MAAFVEQANRRPRSFCPLRTSLIPKHITLDTTTLVHLLWDQGAKSKLLTAGETRQEQSHDLGHFLSCQQERVYYEEVSYIDDITGSEIDELSKRKVIGIDPNMSDLLYCANEDASEQFRYTQNQRRQETKKNKYDQIIQNAKNHEYVEERRFKAYVQAKLLVNSKIETSYKARIYRKLKLNRFWNTRKSEQKMLHRLAQKLKKPEEVVIGIVDSEQKKHRKFKEPTKGKGFRNLLRNGGYKVYLVDEFRTSCQCSHCQQEDAKCEKFRVRLEPKKKLAENERRLRLVHGLLACKKCNKLWNRDVNSAINTARLTRESLAGRSRPTYLSRAATPPEADSAVASTA

SEQ ID NO: 2340 - protein, 660 aa, unidentified
  REGION 1..660: note = Table 20
MDEPEGECYTLKGGLPRLLKCCEADVQRILTHASCSVSNLATRATLLIKLYVLHCFESNVAIPKLTLDLVRHAFKVVGGQELRPERPPDDEPEEGAPKKKRNRVAETARRALSRFYVDHFDVLRPADDVLPSTKLLGDVVGYTARELLTNVEVHIKEHYADFVLAYARTALRVEPELQRVAEQSEDRFLANKIVSDLLNVDGAKPRAPQELQSWIAEQRRVVRPEKTRFKENSIPYDLKCDPQDYLLPMLRMARYRETRESDIRLHHTLPLHTSAVPMHITLDTKTLVQLFFGLKPDPESDRTVFSSLGMEKSSLVKSFADHKDAIWTALFRMDRRIFRNTTKFAFNYTIKTDGVSCCVVHMRRDLANRSERKRKRKEKKPGNEEKYIDDVDMSQYAGRQVVGIDPNKGNLMFCSTEGGETRFRYTQGQRSCDLKTAHRNAIMRNMKDTASVSEQTIAQWEAQLNAHNFKTVSVQAFRECIRAKLLVTAKVAAFYRDRWFRKNRLNAYFDKGTSERKMLDAFEREFGSPDRVVVGFGDWKQHHQMKHKPPTMGKGLRKLLRKKYPVFLVDEYCTSKKCSGCESVDDGDCAPFKKYSELSDEERRLTCARPPRNNVTESGAGTPPARNFRGLLRCQSCGKVWNRDENAARNMARLTRYAIE

SEQ ID NO: 2341 - protein, 626 aa, unidentified
  REGION 1..626: note = Table 20
MKKKPDKIYRIIKVPLDYVFRNIYSYEYKVLQENIIKCNKIFTYSLEFLKLYCLHSYEINNIFPTINSNLIRCILNIITTNPRVTTNEKKEITEFKIILMKIYNEHFKDEYIDINICSTGLKTLFEYMIIQILTIYENNIKLHYCDYVKRFINWFCNKKRFIEHYQKTKNKIGEKTFIANLKKIHYDVLNVNIDDNSYKTNVAFHDLVKIIKSIVLPKKTFIKSLYYDLECEPLKYLENMHIMMLIINNDNKCIYNVYPLRTSIIPKYMKLDTTTLINLLMETDKSHYLREGNLVKLADESWNKFFKLDNKVFKLKGYKFDHSILTDGVGCSIQFIKEEYYNKFVPNKKKITETYEYIDELEKEDYKRLKEKQIVAIDPNKGDLIYCVDGIEKERNQFRYTQDQRRKELKIKKYKKIREKLKKEEIIDGKTVEEWEAELSEKNRKELKFAEYKIYLKEKHKLNKKLEEFYEKRLFRKLNLNGYLNKKQSDQRMIKNFKEKFGESEKVVICIGDWSEKEQMKNKEPTKGKGMRKTFEENGFELYLVNEYNTSCKCNVCEGECKIFCKGENPRPWKNNKIPIHGLLKCKTCKVLWNRDENSSCNIYKISKLAIEGKQRPLYLTNKMDK

SEQ ID NO: 2342 - protein, 318 aa, unidentified
  REGION 1..318: note = Table 20
IFKINKSAFRASFAQFRYLIQTDGFAIHILFTITTNIKDGYSIPPYIHNLSKEELEDLKKKKLVAYDPNKGNLVFAVDGDDRKATVWRMTAISRWAEGKMKFFSKKRKMIRTNEKVQGISIMDIEKDLMQHNSKTLNLEKFLAYVSAKSNVRMKISKVYDKLCWRKFRFDSKIALKKVEKKHMDSFKNTFGTPAEVIVAAGNYSSKTYHMKGKRPVPGVGVRKLFVKYGYRLVLVDEYHTSKLCCKCGSDGKVGVNVNCVRIKHPHHFRSDEVTSWAILKCTTCGTFWNRDRNSANNIWRIAHSHIERGCRPLYLCRK

SEQ ID NO: 2343 - protein, 814 aa, unidentified
  REGION 1..814: note = Table 20
MKKKKEPDKNKSDKEKEYEEKYRKYITSYKTHKTSLENIIKNTDDLEKINDAVYRINLIICHTYQFLKLYYLYEFHNKGRIIVIDEQLVNTTMKLFCVRDKRGKNPSEKVVSLKQKLQKFYNNHYEKLLPEKLQISFTNLSTILDYEKKNIVTCIKTHISEHFEQCINRYINVLVDKDKNMNYIKYMKHYNPDNNLMHYMDTKTPEELKNRMIINGKNVPNNKKLSEPLKKKLMSVYTKELNVLKRDIMMNEDKCNPKYNEVKEKIRNDILNNLFNDYVKNALNNGLNNIYSIIDNSNQLINGELCTDDSVLPDDLKGYIKEYNKKRADKLITDILSNNITDNNTKLVKKKLIKQYMKTSIYDKINNDPLSLLPSLIKINIALEEKGLKTMSVFPLRRSIIPKYTTIDTTTLVHVLFPESMNKGEYLTKGNLKKYQSKIWETFFNMKNKIFKNKKYQFNYQIDTDGVGCSVLLIRKDLFNPNKRIRVNHIKKPVRFRSERYVDELMEEEKELYIQLKKAVIDPGKCDLIYATDGEVQSYTKKNGKSTYKIKSFRYTQRERNQETKKRKYSKIRENDKVNTVIKCNHIDESFINYLKENGYYEVMGYVKTHKISKTVKELEDILSSANSKSCNYKKTQEYIRIKSAINNVLQEYYQKKLYRKLRWNSYINNQKSEARMINQFKKIFGNPNETIVYFGNYGGSNLKHCEPTKGKGLRKIFRNVGYRLFLVDEYNTTKKNFITGQNNEKFLMRRNPRPFKQGVKLVHGLLRSKTIQSNEPMTTGHILVNRNTNGSMNISKLVDCVLRNTPIPPYLTR

SEQ ID NO: 2344 - protein, 756 aa, unidentified
  REGION 1..756: note = Table 20
MAKKKKKSDQKNQTLPSNKVVKVKLSRIVRSEYASKIPVIQEIVNRVSLIVTHTYHFLKLFCINHYQTKNTLPTIDKNFIMMIMKTVSKLSRKPGKLKEANQDIKLKLEQFYDDVYCHLVDELEPIKYDGLTQMLDYEAISIVTSYHNHLKNHFYKLTCRFVNLFFDIKGKTLAIRKQCEIDGTNYTEAVNQFRSKMFALKSDIYQSSDNCDPVFDNFKKCFRDKIMNNLNIKHTLYGDVKTKVQSDPHKLLLPLLKMSILGEQLVRQKLGDDEKDKQFNIINCFPVRKSNIPKYVKLDTVMLIYLFTKGNKRFYQTNLTDQKETLWHTYFKTGKRTFKKSNYVFNGSILTDGFTACVCFALKDDKSKSKKAKLTESNDSTQYVTELSEDDKLRLQTKTLVGIDPGWSDIIFCTSGKTEIVEKSNGKKVHKTETFRFSRQQRRKELKTKRYRDILESDKTETVVKGCTVKKAESILSQFNSSSCDYDRCKEYIRVKNRINFELKEYYQKEIHRKLRWYSYLNKLRSDSNMINRFRAKFGPPEEVVILMGDFSKTEVLKGSEPVKGKSVRKLFKNAGYELYLVNEYNTSRKMYKTGEDLEKFRKRESVRPYKKGTINTVHGLLRIKSKTSNSCTELVETDSMSQSEIEYNPQKMIRKTTIINRDLNGALNIRLKGEMQILNREIPNYLKRTKIVEQIEEEIKKTIRMPSKRAKVKEEEKDKKVKVIRRTSSVVPSGALALRASRQKAIRGPDLNVKI

SEQ ID NO: 2345 - protein, 683 aa, unidentified
  REGION 1..683: note = Table 20
MNYLDNIPSGIPFNSKPKCKIKFCPNKSNLMIVNKCPLVNIVSNDQLLHIINNLVIIVNKLVIHTYQFLELFLLYSYDNNLEIPNINVDYIKLIFRLLSKRVNNKGPKPSDNINRLMVPLQQFYDFHYSECIIDADIIYSTKLNYILAYEATDIVTNIKNNITEHFIHHFNKYVNCSFNVKEEIRKIKAMHINDNEKKKRCQKFYDKIKNIKKDILESKNNYFVSDEIYHEWIINESDHLLTKSKYQKDTANYDVCVYPLDYIKPLIYINRRLAELNKTKKDDDKVKLFHILPLRTNIIPKYITLDTSSLINIFIKENFKQYLDNVGEYHDFFWDGNFMTTNKEFKRNGYKFHNMIKTDGVSASIVFIKVDENNEPINITQKMKKKKPIEEKYIEDITIKVEMHDKKVITIDVGHSDLIHALAYGISKKTIDVDKEGEIIKEEDHKMEKFRYTQNQRRKETRIKKYGKMMDKKKKETTINNFTIKELEGILSVHNSKTCNFEEFKEYCKIKNDINRILFEHYEEKIYRKLKMNVYTNTQKSEDKMIKNFRKKFGDPKKCIVIMGDYDKDHNMRGTEPTICRKIRKLLRKAGYTVYMINEYRTSKLCHECNEETENFLERESKKPKSKGKKLLVWGLTRCKNLKCKLIHNRDVNACKNMQKIVRSILRGKGRPEIFTRKKEDER

SEQ ID NO: 2346 - protein, 698 aa, unidentified
  REGION 1..698: note = Table 20
MKKPKVKEKEKEKEKENFDFMKTNKGNIHKLIKDKMVLSIIDELVVRVNKIVIHAYQFNKLFCSYLYNNHFPLPFLDKEYICDIFRVITKRKCGKGGYTEDKMPVQLKILNDFYKNHYSKLVQPTEILYYDGLSYILAYEAIDIITNINNNIEMHFIDHLNKYVNIVFNVKQQAEQITNNNKDKTIRKELHKKLYDEFRKVKNDLISFSDEFTSDKKYHKWIIQQRSSIFKDKIEFEKNSIYYDIKVNTQDYLYSMFYIANEFEKMNEKINNDNEINNTNNKLIRLFNVLPLRKSNIPKHITIDTCGLIQNFMGNESTTKLLQNYSKENKFYELWNRFFMLNKRAFKKEKGKYIFNNMIRTDGISCCVLFVHVDKNGKPMKKTFQNKNSDDEMNTDYIEKATITDEMRKMQKVAADPNLADLIYCGARDNDGNLKTFRYTQNQRRLETRNKKYNKIIDNMNKHTLLPVNKKIIDEFNNKENKKIDVVLKILKINKLSIKELESILSEHNSKTINYDKLNKYISKKNEVNNIMKEHYEQKVFRKLNLNRFINTQKSESKLIKNFIKVFGNPKDVIFIMGDYDKGSYNMKRKEPVICKKFRRIFKNAGFMTFLINEFRTSMLCNGCKGELEKFMKRLSHKPKMYKEGKEELVHGLLRCQSIKHECEIYHNRDKNSVQNMLNIVEYIFKHGIRPKEFSRTE

SEQ ID NO: 2347 - protein, 876 aa, unidentified
  REGION 1..876: note = Table 20
MPKRRKFKKRKDIDVAKLTGFDFIKTNKDNIINVIINKAHLITINEFVARVNKIVINAYQYIKLYLIHLFDNNKTFPKLDEAFIGDVFRILSSKQLSVKTSLKLKDLISFYDDYFAPLIDKNDIQSYKYMRYTLQYEAIDMKKNIYVNIQEHFIEHLNYYIYIMLDVKTKRNKITSDNKDKEIRKVLHTELTHDINNVLTDLTNFEEPISKPEYHKFIKNERKNIYGNKTQFTGDTVFYEIKCDDKQHDYLRPLFYIHRKLEEKYNEIHEQNKFIEETNLIIKEYNDIAFSQIMKDNNELIEIIEYKSKFIDTFKECAKALNNSWTNTRKVQNTNFMNLRNKNSKLFDVIKINKATIKTNLEIIKFNKQFGETIDDRLVDMIVKCQKQNYNMMQTIRHDRNIVKMTNLTISQDNTEINYHTKNNKRTMKKYEKLNFENKLIIHNLKTREALKTFPKIKQIKLFNVVPLRTSIISKHITIDTQGLIWMFYSGDHVVEYIEDCKDDKDETLKLWGEIFNLDKKVFKNKKQNKKIVYQFHHMIRTDGVSISVLFERLNPDGSVHKQEKSKIYGIVAHTPYIEKTLITTDLKTRKIVCIDPNMQDIIYCGSKNKNNKLETFRYTQNQRRLEIGTKKYSKIMDEINKKPTIVSKTLTNETIKSTVKEIETELSKFNSRTTNMTEFKKYIKAKNIANSKLFSHYSQTLFRKFKLNRFINTQKSEAKLVSKFGNKFGKPNVKSIIKKVDTSPIIVMGDYDNGTNNLKGCEPVICKKIRRILKNAGYEVYMINEFRTSVICNRCHEKLDKFLKRKSSKPNSRMEEILVHGLLRHTDEKPEGEQEAPICKIIHNRDKNAVQNMIYIVKEIMRTGIRPAPFRRDNT

SEQ ID NO: 2348 - protein, 452 aa, unidentified
  REGION 1..452: note = Table 20
MLQQKHILEKLDDSKKSKDLGLAKEMYRRPQQSNYNKIISKALEKLQLLPFRKSKFSTKFGQDAVLVFGDCSTPNVKYQEPTRSKGLIRMLKKNGFVVYLINEYKTSSHCPTCENELEKFKTVPNQRKKKPDVLCNVLLRLSLWLFNTDIALKQVSDIYFSGNDLCFLLNEVSFLQTDKIYQPHCNLLNDQALCLAEICTILRKHYDINPTLAFLDIKSAYDTVNRDHVWQALSPCLHPALLGLLKNLFNDVQIEVLLGNTKSSRFSPKTGVLQGSILSPFLYSIYINQLPGLLRDRPLDPVPDANPVLFASSINCLLYADDVVLIAAPSRLQTLLQQCEEHSYQLGYRWNPLKCAIMAPAEDTQSYSLYDTVIPRQDSFPYLGIPIRPGGYINTSELIQGNINKALKTMNQMTAIGVNSTGFDRLLSARFYCQIVRPQLEYGLAISANLWW

SEQ ID NO: 2349 - protein, 513 aa, unidentified
  REGION 1..513: note = Table 20
IVNQNLVSQNKNLKNQFSKDWNLIFDRNVSNYRLHPEIDLSYRFPTPNYPSGKRYSRFQLNAQMLCEIIPRNNGLSKNEVLELFKKKNLKTEIEKFNEKSFIKDKSFYILGIDRGEKSLATLCVLNQDGEIQGNYDIYTRNFNVEKKIWEHIFLEKRSILDLTNLRVETTIKGEKVLVDLSKIKVKRDRFKGFEEDNLKENNQNIKLKQLAYRRKLQYQMQDKKNKDLILRIANSNDDCEKIKQLKESTLISAYGVGEKYENLNHKEILDLLNNFKEVMISKTISEKNREKEINRIIELDSADGLKKGITANMVGVINYFIEKYNYNIYISIENLSRCWASCIDGLNGIRLEKSFKDNSKENIIDYKKIANSKLAGLGTYHYFEMQLLKKLFKIQFENKDILHLVPPFRNVGNYEDIGIEKAKLQYKQFGRVFFVDPKNTSKKCPNCNSLKVKRETKKNDEIVCNNCNYNSNYENSITKTNLNLEFIKNGDDNGAYHIVLKTLENLRELNNLN

SEQ ID NO: 2350 - protein, 1017 aa, unidentified
  REGION 1..1017: note = Table 20
NVRRDFECMLKTDGYAVSVILSKVKAVATGWDVPTLDVSLAGKRVVGVDPGRTDLANCAWMDEAGEPVFSSYSNKEYQQKIGLKKAGAKRRLWMSRANLQEAMTQLPSAKTPSTFTMMAHLEQLFLILNRVLALNGLRRVRGLRFSQHCLRQRVMYDICDRITSPGAAVEDDRPVVVAFGAGMFSSCSRGHCPGPVKGVRRALRERGVEMYDVNEDYTSQLCNCCHGKVVPMYSQGGSMAIHGVRRCLSATCMRKTLNRDVNAALNILYIFTVETLQGDRPRVFTRRYQTELARAAVHSDTTPGHQIKAQFPRTRSGRVDDMELAKEEPAEVELAPADGRAKACATCFQTFATDDELRLHESSAHSSAQPPPPPDAPEPARAEDEKSGDSSDQKPSKTCPKCGKTFATSTNLRTHLSNVSPCVQSGDPAPPQELQMSGKTCPKCGKKFASSQGLRGHLNRVNPCDGERKVPRVVLTKDQAAKRRCDKCGKTFASAQSLRFHMNRVKPCDQEKVVPTTDAGQKEEERKARARFHARKTYLKRLGRLDELGEFQSVIHPRAGGAGGVIPAKLVPEDRERKRSAADEGSSAGNATKRPRSEKNGLVDDIHMQSIPDEAKHEPPVPRQGADTVPPTHGRFVRRPNRGHGGDLLAGGCSCPPCVRRWARKLMARMQQLEDEVVTLRRQAAKGGGRDGTKVPTASPVRNIAATQPPPLTQQTASNAERVEAQSSSSQAGRSLPTKDKPERVVEVAAALSPATSLDAKQDQHLGQKDNVDATTGVSSPSMRGEALSDNKKPDPDPATTIGSGQDQEASHTQAMGDVKKNLTDVYDHLNAQILLNERAVEDSISRVRLLMDADKATAVEFQSQIDELQVSINVEKGKRDVAVAALVAHEWRTRRDEFEALAGPMAARSMPGAMQTFHEKCAEIATQMAQKDQLLAELAQTIEAVRGATSPIGNHGDRRSRYEELGGLSSKIFAEQAAKEVLNHERGEVFMCLVKSSRQIWSLVRSKLAEMGNTSP

SEQ ID NO: 2351 - protein, 360 aa, unidentified
  REGION 1..360: note = Table 20
ILPLCSFASKHVTVDTGILHGLLTRVAKRTGRAPPEPLPAFRAAARAHWEAHFKLTKAEGKNVRRDFECMLKTDGYAVSVILSKVKAVATGWDVPTLDVSLAGKRVVGVDPGRTDLANCAWMDEAGEPVFSSYSNKEYQQKIGLKKAGAKRRLWMSRANLQEAMTQLPSAKTPSTFTMMAHLEQLFLILNRVLALNGLRRVRGLRFSQHCLRQRVMYDICDRITSPGAAVEDDRPVVVAFGAGMFSSCSRGHCPGPVKGVRRALRERGVEMYDVNEDYTSQLCNCCHGKVVPMYSQGGGMAIHGVRRCLSATCMRKTLNRDVNAALNILYIFTVETLQGDRPRVFTRRYQTELARAAVVP

SEQ ID NO: 2352 - protein, 529 aa, unidentified
  REGION 1..529: note = Table 20
MDYERRLKGLSCFVHSLGDDMAINGKTHLYYPLQRFQFNTLLLQTAGNKEEAKRLQRIINDGEEDGHHLVRRHQSFFGGEPLTEDFLKANPHRVLRYYKYLMGIQEKKRQWKEQHAEADWVPRIKSFSYLPIRRYRRMSIFVDTDGLHALLRRSGWTRVSKTVFGGDQEGYWRSVLRVPRVGNGWRFDFWLRTDGVSVCLGFWRLQPMEIGDRDPSQPMDIRGRVRGLITTGQLLVPMCTEGLTLIGVDPGRTKLMTCFNASTGEHRVLSKRQYYEECGYNVTRKRRNHARSMLPMEKQWSLEQSSLQSFRVSTVAQWREAWYARLPLEDHLWEFYTQRCFSNHRFYCYRRKQRCIDSFFNRLLSGLDPSSVVVGMGNANFRVSAKGEVSGPRIGLIRKLAQRVRVVFIDEWNTSQTCNRCHHHMKNPTIRRWKKEKNPDTGAMEVKRVCEQVHGILQCESTVCRVYRDRDRNAAENMCQLLRCRLTGTERPLPFRRGFHHRTARGGTATPIASHTIVASSGSLEVTTR

SEQ ID NO: 2353 - protein, 762 aa, unidentified
  REGION 1..762: note = Table 20
MSTTMTNQPFNPTVSRKNEKVPCDCGAEIVHYRRSHHACLYNIRNQQQSMDWSPDFYPEYFSVNIGLKTIIKSDELLLHIQDAVRRSNSIRFEASRLAYLYITQHVHDISNDTGFEGNPFQSNLYSHCQQAVSITTQQGRPNVATYLEAAWRCYYDIRGSSEWTSRSHITQILQYDANMMCENAKINIYYHFQTRLSRYLRLRISHVEDIVSRIGYKGIADLAEYVMNEVWKEDDDNDQEMTWRPIQSADQFFETINLDMTIAQRQSVFEVYTTIIQGIGEELMPLNTEKVEEHVEQVFKFHIKMLEFIEEVPAAVKQKSPASKVTKRWCSRKVANLHTKWGTEPILPSKQTIRIAECELYNCIQHKRPFEANQRLSDKLTKESLEKLSTKAANTISKIESNNFAPSTFTQSRFWNRLYSILPMTSFTTSHIMIDTVGLQQVSRSPKLEDVGAGASNLWEQFFDVSLLQGVSGVMKRFDHYITTDGVKASFKCVRPKRSITEDTITTTAITSRPIWGLDPGIRSIATLANNCSISESTCPPYSIKLSANQYHHLSFHHQSTNNLLQRMRHQPTVIEHQKKIGIHKTSKNESYIQYLQSIYEDGRWLQLLDFHQENREDNWRCFRYRQRTLAQFTNHIFDCSQGASNKKDVVIAYGDARLNHAMRSHKPVPVKRLPKVLSTQMTVKYVNEFRTSQICSQLCDDEYIPMDNAIDNESGDMIYAVKYCENCKIYWDRDANAARNILYRFLCEECFNDVDARFSRK

SEQ ID NO: 2354 - protein, 657 aa, unidentified
  REGION 1..657: note = Table 20
MMDRKPDPLDSEFYMHCIQAVSVIPGHAPVIRPYLQPAYEEYCRIRGHNQWTSRSHITQSLQHISNDIAKNTAVNIFYHFKTRLKRHIALQISAIPAIMESMSHHSIRKMANAMVETFWVSDDDDDVDMDWDTLKSSNDLWEKIGSTKLTVSQQQQNQLFGIYEQIATMLDPVLPVNEKRLKRQVKDVFPIHLYLLEFAESLPPATPVKELCSKPSGIWIKKTVAKIYGKWQCETVKPSNRTLKVAECELKGSILGDREFKPNDYLKRQLSAESIKRLRQKADSTRLKIKNHTFKPKKYVQPRGWSRLHSAIPQPQFKLCSIPIDSLALYQLLIGCGFNLGQDASRHFMEEKEEAWRRIFNINELQGVNFAGKTFDLFCTTNGVKSSFLCSRPSRTRTAKEPLTITENNRVWGCDPGIRSLVVMNNSSSKFDSSAPTFNVDFSSNQYHHHAFHYHAINNRRRRLKNNPEIQQYEKGITVHLTSRYNIFREHLQSALGVYRHLIRFNSQNRTDAWTTFRCRQRTLDCFANHIHMLTPEVNKKDIILAYGSASFSHTMRGHQSVPTKLLPKTLARHMTVIPVDEYHTSQQCSRYCTGTFKKLQNVYDDESDYPIWGVKYCPDCDVYWNRDTNAARNILHRFLFENQFGYIDPIFQRTSS

SEQ ID NO: 2355 - protein, 526 aa, unidentified
  REGION 1..526: note = Table 20
MGASHSNEAAHWEDIRHAENLEKERRKRLEEENLALQHRQRELEREKATLDLEVRQLHPTHLLKTSDAILEVKREMFVESDSHINVAVVGLSGTGKSTLINRLRKVPDNLPDSDGVACSVHIERPKGVITADIDPGEDEEPDVRTEDEREEHFVKQTRQLDRALREADISDDIQRRICIDPGGDVMAFGVLDHDSKEEPAVVRCPSAEYRDRAGFPAVLRKRRNWVRSSGVEELMTHAPSGKLVDLRGLREHIRYHLGVLERVLDHFGAARQRRLAFTSHVSKARAMDSMALRIAPRGVKTLVVYGAADFSHAMKGRAAVPYKRLKACVAALEDVTLVEVGECNTSRLCSRCHEELEGVRSEVMERERIVKRGIHAVKVCRHCSTTWNRDLNAARNIRHVFERIRESGVRPEVFRPRRRAMTTAEEGLRSRSLGGLTHPRGIKGQQHGFDADSTVVIKQLYKSFKEQPEFIEFVYRRFTDPGLVASVPDPDKRYTRAMELWKQRKGDASLDTVDVKRHIISMALHA

SEQ ID NO: 2356 - protein, 340 aa, unidentified
  REGION 1..340: note = Table 20
MLKHAEHIHIEEEIETQVPEREGIELVISQMDGSMVPIVETSGEGDRRRSRKVCWKEAKLALARRQGAVEGKYGGTIGNSEEAGDQLANSVIGVGAGTNTKIHCVGDGAPWIVEQVERVFAMQANYLIDFYHLCEYISAAADKCAPDNKTKWIEQQKERMKRNRSVEVLKELEPHLEPDIKKEAPVRACYRYIKNRPGQFNYAAAIASDLPIGSGEIESAHRYVIQKRLKIPGAWWKIENAKYMLSLRVLRANNDWDDYWNNLWSEKLTSSCHHFVKTRKWQYPKCKAIHDRDMNASINICRIGASTLGTGEVRPAILSANRQAHRQVQASPLKARIPRL

SEQ ID NO: 2357 - protein, 672 aa, unidentified
  REGION 1..672: note = Table 20
MVDNFVCIKERFNDYWIGGDELRQRLTRLHKDSIVVRVVSSLFIKYYLVSRLQQSDAYNQMLQIFQQGEGVVQLDTQFLHLSQNSIETMMRPFRGSPNDNGLDYNITGPDYPGVNTKLREFVQRVIIPSQLEIPRNDLMAHVLPQIASEYFTHLQNHVQANFLKILSCFVGYLLRVECQYDALDRNKLVKEMVRLLQKHENVDVSWQFLYRCVPADTPLAQKQLLRQRVLSIQQKARWLLRQMYNDFGALRRVTNENFDQYLVLAYCMLRHVEDLAHQSAQTASLPFLLPQFSIAPHHIKLTDAMFRRCNEEPVLRRRGWASEVFNTRSFQDKFTGHILTDMHSVSFIIRAGNHREAIGEGQLQQFLIEENIAAGDNFLEVFEDGDENLVDENGVEVPQEEHQPALQPNRLDNPDFTRLPQAWGTKYLAIDPGIRVAVALAGFEYQMPDQIPQDQSPLDQFNELNQLRELQVLRVRNLGQHDVAFASPPVLGLPAGVTRRTVNLERIVQYCQAYLSQTLAAVDLVLQGERRETRFQSWQRRRDQLLDVVKTVLGVHVLEEATRDKYVVFFGAAAEHAFAGFGRRRLPPLVEFRRLLNRYAIVALTPEPYSSQRCSLCNCLGTRHPRPHDQFVCIGNKNHQRNGDTNAAANILYIGLHMMMMNGQFPRHFLNI

SEQ ID NO: 2358 - protein, 639 aa, unidentified
  REGION 1..639: note = Table 20
MEQFTSVKLKFADVWKGDVDTRLALEKLHADSIQFRVVASMFVQYYIVLRCNNSGVYEKFQRRVRDGRTGEAIDLTFMHFNDSMMDRIMRPFSGAGGKLEFLDSALEYIEINKALREFAVQVLEQTDFEPLDNQLLSLSYREIAKEFYKNLKTYVKVNFSLHLANFFISHLKVDCQFDNFYMKSLVKKLVDQAKRDFHRRVVSLELLAKVYVGDLYNNHGHLKRITDETFDEFLVVMFCLQKHLEELKDSSMVPIKILQLIPQYKVKAAHIFLTNQMFSNQQQHPLLAQEEWIQSCFNTDSFKQQFAGSITTDLYSVSFLVYSHGVAAPLAAEAQVALEYFLDEQDAEDADEDDVDADELEIEEEDVEQDLQEDVPHVDWSFLNDESFSNLRRDTNTVFGAIDPGINKAIQMAFFSHMNGNISPLDEFCLLNSRRQLKFATESDLGQHQATRRTPPLISLPIGVTNKTSDLVSLQQYCVTYLQLSSVAIVRVLSGDARKIQFEYWEHRRAVLQNAVKRLLGLEQLDETRRYQFIIFFGRGGEFGFAGFGRKRVPPLVQLRYILNKYATVVVTPEPWTSSRCCACHSFGTRYRRPQDKFVCMRDPNHQMNGDSNAAVNILYIGLYMMMHGGTFPQHFINQ

SEQ ID NO: 2359 - protein, 429 aa, unidentified
  REGION 1..429: note = Table 20
MRCNNIDSLACSIWRICYHRYFYKKSSKPQALLPLCHAEVRHIQINNSTMENLINAIVAKGDLPDVYRIPHTTTTLQHYMAHFPGLRVFQKQAMYVDNGVFTFQSFRTDGVSASLLFGPKHVHSRRRTASQCDEHKQAKKRRKTSSKTSVDCTPSSLEGNRIIAIDPGRRDMIYAVYGTEHLVEGRFSVPTANFRQRCHTAEKQALGEKCLKRVLLDDGRTLLTAVGSLPSAKDVFQWRTFTDAYLPLLTTLALAKRSRCLRRTRFDSFIRRDMVLDQVIKEILGGSLSRQACESTWVAFGAAKVCSTGFGHASSPQARLLHRLKKVHRVKVTMIDEFRTSQVCSCCNLARLYKSKVHGKRRWVLESCPNCRNDAGTGPKILHHDLHGAMNIRKIFLEEVAGSGRPQCFTRGTEKLSNLPSTFHPVIMH

SEQ ID NO: 2360 - protein, 375 aa, unidentified
  REGION 1..375: note = Table 20
MIRRSRNVNTNNNNKNNDDDGDDDNNAVPNPEQPDPVPPIIQRAYDSGQIERIIGCDPGYREFVGVVRKDLATDNEENFLKSSKEWHHMTGFFDRQYKLKRFTGAFEKKCRKLRENREIYEETPSKKSADYHTYLDYQLDVFNESCEIKYQKRVVRLKFDAYTRTQVALHVLVKQMTKVDRRMSDAEKTVILAFGGAKFASNSPIKGYLRCPHRALQQMAREYVFVLPINEHNTSRKCSRSGRKLKKRRSVPERQSKDRFLVCPNCKPVEDGVFHDPIQWTGRVHRTFKKKHQEWKYRSICTFHRPVPEANPNPQPKQKKKRYKKQLEPKTTVIFNRDINAARNMIKKGLYMLDHLPMPNCFRPFGHQLHYYFNN

SEQ ID NO: 2361 - protein, 601 aa, unidentified
  REGION 1..601: note = Table 20
MTVFRDLDTGTFYTEWYRKPVASGLLLNYKSIHPMNQKISVVTGLIDRDNRLSHTRFKYENDELVTKMLTGNDYPLRLKPSVMHKIWMNKKQVDEQEAECDATEYAVPHGWLQHTSDKQNEWYKYVYEMIRLQLWIDDRNILPQNEDNQWKTFNAIPQNGNDLHHIRFDTEGWIDVTNLLLSNSFKTQRNAKGAWDTDDMNNFWKRFVDIEKLNKPSQKFGFSFTTNGISAHLVRPKRCATVDEQQQDQQPSTSTSNNNNSNSRPPVIIPPDVQAAYETEKRITKIYGDDPGMKVMVASTCLDLETGIETSYRLKTKQWHHRSGTFRRRTKLFRYTGDFEKRCKQIRENHDEYPQQPSPKSRNFDKYLDYQIRVFNESCEVKYQDPVTRLKFDKYVEREKMFHVIAKEMTGLAKKIENRADRTIIYAVGDARFAAGSPIKGHLRMPIRGIIAILNKYYVLLVDVDEFRTSMLCSRCHCMLQKPKYHKPESRNIKDRFLVCPNCKPANNVLPVPVTWVGRIHNSKKHLPNDGMHFEFTADKQQQRMNRTKGKYLTIIWDRDNNASRNMIYKTLCALTRTPMHHHFSRDTSRPTVLACTTNHK

SEQ ID NO: 2362 - protein, 737 aa, unidentified
  REGION 1..737: note = Table 20
MSLRQFLRNSVNEKNRVGGTRNKDTLRANRNARNAVRNKDSERKRNLMKIINDFVIQMSDLTRLSLLYMHSQLGRLVDGQNDAAIRDEFLKPFDAHKYFFALKHCQNMAAYPLDANFENHLRRHNISVRPKIENASVPLKYADQLCATNMKNNVNMHGPSHIRKYFLRKNIVEEEVDVLMEYLIDERSEIELNGNIRGHLDDYYNELRPLLPLDRIEQYEIDPEDDDHVIPRGWLNTMTDEKIYYKHVYELINLQRFIHQHNLNPENEVKWRTFRAIPQPKNKRKHVRFDTQGFVEITNLLHSYRSAEIVNKNRIPHWSDDDYDTFWDKYVNLKKINRGNQIFANSFTTDGVTVCVRMIRRKRDPLVSGVPDQTKSKSKSKSKSKMGKKGQTYNRAPPQCPAAIRAAFDAGQIKKIIGDDPGAKVSRSTTSRDLDTTLEESYKVTAKKWHGMSGARRRKHKLRKYTGKWENECRDIREVYHRYGEMPSCASAYHEIYLEYQLSTFKKSCEVKYQQRVARLDLDKYIGRQKAAHQVARDLTKLEKEVPKAQQSIVYALGNAKIAANSPIKGHCRTPQAFITHTIDRYAHIMEIDERGTSMLCSRCQKITDRPKDRQENPENVNKKDRFLVCNNCEPARNHVLPAPNEWIGKIHHTFRQKHRPDLEPDLKHYGHSIANQQYNGREQTIVLDRDLNASRNMIYKGLCMLQNIPINPDFNRRAADLRQEAVNINHGRLPRE

SEQ ID NO: 2363 - protein, 741 aa, unidentified
  REGION 1..741: note = Table 20
MSGRKRNHESAFKPRKKIKIKEHQTIKKSARKGLKVNLPINTGKFAQLIDVYVLEMTRCYILGALNLHYFTSDHFKRSTDEQIEAFYSQFVDKNFFRDWFYGVQFIEHAFNDARESGYRLCYGIWYYCQKYGVRAPVIGGFGNVVEYAVQMFYTNYKNNICMHAHSRIRKFFTHQNASKAQIDDTMDFLFKQNSNCVPDLDLMWELENTLKPIRFDDGKGYFFAMESNWFKYIPIFLNLQQYIRNHERERKAALKRGERTELREYGNFTVVPTSSFERHYIRIDRRVFYRMLRQIECPHRLFRNKNGGPKQEKDIKNKEWDVLWRLYFDIDSIEREPRNKNDGHATIKFDNSIQTDGVGMSFLMERTKFIIEKDDEERMKETQEMLLKSQQVYGLDPGLRLVIGGVRINNFNDRNNRTETIIRLTSGQYQDMINSSRRNKWRKKLTTEIDEKMRLHRESFDEQPGPRAEDHKSYADHILRHFEEKFTAYTQYEYALQAFLQYIDTNRALDAYATKLIDGKQTFIFVGDRFIAADSPARGYIRSKVRDLFEKLKRRRKCTVVEVDEFRTTKLCSLCFRELEKPTKRGKVKEKYRYLTCHGCEPLCGENVLGKAQGPIESRKSNRKLTQQRKHRPRTDGPRMASKFRKYEEKTRIGRTITWNRDANAGRNILYKGWCAVMNIELHPAFQRHVEEEEENAGGGDPPPAPPARARQSRRAASNQNQQTTQRTLRSHLDQARSSRP

SEQ ID NO: 2364 - protein, 366 aa, unidentified
  REGION 1..366: note = Table 20
MKETQEMLLKSQQVYGLDPGLRLVIGGVRINNFNDRNNRTETIIRLTSGQYQDMINSSRRNKWRKKLTTEIDEKMRLHRESFDEQPGPRAEDHKSYADHILRHFEEKFTAYTQYEYALQAFLQYIDTNRALDAYATKLIDGKQTFIFVGDRFIAADSPARGYIRSKVRDLFEKLKRRRKCTVVEVDEFRTTKLCSLCFRELEKPTKRGKVKEKYRYLTCHGCEPLCGENVLGKAQGTIESRKSNRKLTQQRKHRPRTDGPRMASKFRKYEEKTRIGRTITWNRDANAGRNILYKGWCAVMNIELHPAFQRHVEEEEENAGGGDPPPAPPAPPARARQSRRAASNQNQQTTQRTLRSHLDQARSSRP

SEQ ID NO: 2365 - protein, 626 aa, unidentified
  REGION 1..626: note = Table 20
MDRDSIASENANDYKLFPAMRTLCQKHEVNAPSTAGLTNSLKYGMQAFFTNFENNMWMHAYSRMKRFLLHINSDRKKVHNTLDYLFKEKSSCEPDQDLLDAIVSILRPIDWKDNGKAYFFGMKSNWHKFVPLFIRLQSYICEHNKQFEPKKPKEVKQKSKQQPQPRKNNNRKRVIKRKRKIKKRKRDKNAPKKITNFTVIPQQTFKRHHICIDNEELLAMVKQIDPEKVQKTGKKKDENGKRIKVFKVYEDLKPKDWRDLWQTYFDFGSDSKKPLERKKPRRPGAASISFANFIRTDGVSASLTMDRTKMIVPKSEEQRKLELQEALRNCEQEYSFDVGLKLSVGGIRYDRSDNSETNYRLPSTKFHFETGCYKRKKKLENMTKVIDEKMRLHRESLAEQPGPRSKDFVAYADHILMHFNEKIEAYCQYNYALQSLLKYMVVNRYCSKLAKEMVNGKKTFVFVGDCFLPGNSIAKGYLRTNIRMLFDKLKQMRNCTVHIVDEFRTTKLCSRCFKVLAPAIRMGIVDMKHRFFTCKKCEPAQNLPPEYPAFPAVQISSQKSKRLLTVQRNMRPNVGVRQASKLRRYEVNLQVRDITWNRDVNAGRNIRYKGWCDVMNWDLHENFDRN

SEQ ID NO: 2366 - protein, 1126 aa, unidentified
  REGION 1..1126: note = Table 20
MTKIIASNAAHRQIVETIANELSTQLNQFTRNIKLNSNVKRKVEDLVEKFERSHVEALQRLRNGFGICVDTNTTAASTVADRNDVSTPTSSGDTVASGTRPKQSQSNDSNARQKTIPAKRKKRAKTITNAPAPKKRTTRATSMPNTSNNDYVSDDFDFNDGDDDGDNGDEDSERYQSIKMGKRKSFNENLQNKDELASIINKIVTDMSHNWRLGALNVHCSLMRIIQSNSEAAIRTEFWNSTCEYNRNYFDGYFRGVYGNCINGKTKLRKTWKLDQAIIKFCQKHKVIEKNAIGYGNIFTYATRQYFTNFMMCIIRSLYNNVRAYLNHCVISEELANHAKSNEPVASTSRTKKPPLPPQKCRTLKQIRKANYQLITNTMRYLFSDEAENPDFYKKKPQSKRPPRKKANDDEAAKRKKRQNEKKVKKPKRKRDPILLTPAIERLLKRIQTDFNPMDFEANRRGYFSKLTTNWYRHVPFFVRLQQYCRARNRERCLMINKQMDEDEKNQPAEVAAAKVKLQAEAAAKIHNKSKAKSKSICRPIAEYVPRKRLPGVKYTWVRCAPNLTVYQVIPEARFGRIYIQIDRRGLFEILKRLKNPKEQEMKKNNGSNKPWQQPFNGNKELWDRMWRKYFGISKIERHSAGLTFANRIQTDGNAFVFLMNKEKKTKKKNDATDAETKERLQNILRHCDREVSFDVGDREIIAGQIIDREKDDTGAVKVKSVRNFKISSKQYHWMTKLPQFKKQRDRLVGTLEDDRADDRERIERECENHVQPSSRTIDFKTYADHTLRFFNRAMDVYGSEAYVLTNFLHWIEIHRTIDELVRMIVAQGHGKHTFVFVGKAPFTHANSPCKGYVRTSVRLLFKALEQHPQCTVRYVDEYRTTKLCSRCFNVLENGSRNGRKTTKSRFKVCRQCKPSPEALPDGGSFIYSHKNSKKLKKQKKYRPRYSNEDGRQPKVELKRFNMVDGLLVPGAENAEIVKRPRTHLRRRRLDVIAWKYIRNDDDIGDTTKVRSVTLNRDTNAGRNIRLRGYHELLGIKLPDAFTVDAKIQDQHAERRFKQFDENKRKKQQKYQTSKNSIEAEYDSDQSWWSSSSEEDAIDLSNSELSDNSDDSNDSGSGSSSDDGEN

SEQ ID NO: 2367 - protein, 468 aa, unidentified
  REGION 1..468: note = Table 20
MNKEKKTKKKNDATDAETKERLQNILRHCDREVSFDVGDREIIAGQIIDREKDDTGAVKVKSVRNFKISSKQYHWMTKLPQFKKQRDRLVGTLEDDRADDRERIERECESHVQPSSKTIDFKTYADHTLRFFNRAMDVYGSEAYVLTNFLHWIEIHRTIGELVRMIVAQGHGKHTFVFVGKAPFTHANSPCKGYVRTSVRLLFKALEQHPQCTVRYVDEYRTTKLCSRCFNVLENGSRNGRKTTKSRFKVCRQCKPSPEALPDGGSFIYSHKNSKQLKKQKKYRPRNSNDDGGQPKVELKRFNMIDGMLVPAAENAAILSVKRPRTHLRRRRLDVIAWKYIRNDDDIGDTTKVRSVTLNRDTNAGRNIRLRGYHELLGIKLPDAFTVDAKIQDQHAERRFKQFDENKRKKQQKYQTSKNSIEAEYDSDQSWWSSSSEEDAIDLSNSELSDNSDDSNDSGSGSDVDGEN

SEQ ID NO: 2368 - protein, 607 aa, unidentified; identical to SEQ ID NO: 620
  REGION 1..607: note = Table 20

SEQ ID NO: 2369 - protein, 770 aa, unidentified
  REGION 1..770: note = Table 20
MKRRRAKINSAFKKNTAKLNDNEELRSIKLSAPSVFKSEYSEALTEHFFHKCYNGTVICYLGSTLFLYVVNLAADNDDRQYFIDSDGKNVIRECFAAVSRENLENPKQPKIPRGFLEMIADDQFEWPSRYQMGNAFEYLNQQYLSNVTTNLTTHLDNILESFLQMIRYQLNEDPNRLIKFDGIDIRNAKNNLMFNQDCTGGDQHRTNKMNELYEQVAVRCLPSFRERLSMIEYIEKKWFESLFFFIFIQREISIFLEEHHDLVQLWLRHQRHPLFYCKPSKPLPPKIRNFTVIPICDSQLKHIKFDQVDLMSLLAQWKVVPKIFNNDDGGHNMYSRNYYKENEDEAWAILFNMDKINEIKKPNQNFHHMIVCDSVSASVLYRTPKPEIENTELHRQRIKQKLENNEYKYIVAIDPGMKTYLAGIRRNIEDRTEENFKISSKSYHWGAGQKVRDKMGKLMTARFTQREQLDRESYPSIPSPRGIRWRNYVRHRLTMVKDAVAAYARRRYARLSFDKYIGSQGEKDWLAKVITKNEPSLINIGAVDMAPNSPIGIKKGKRCPGTRNLQCSVKKLGHSDVHKVNEDFTSQHCANCQKKFPIQTQKYRFKVCRNCTRDAPIPQEIEPYISLPRLIVTKKSQRRKKKDSCVKKLIARGIMDPANQPAEFQPGRLESKKMYFLKNWLLNPVNAIQMGGDADKYPEQQQQQQHQKRFCTVWHRDIVAARCIMYKGLCYIFNLEMHNSYVRAPAPPRPPLRRGQPARRRANANVVPDQ

SEQ ID NO: 2370 - protein, 321 aa, unidentified
  REGION 1..321: note = Table 20
MTYASAIDPNEKTWVAVVRRHIKSNIEENIKISNPRFHWQTEQKKRDRKADRLTWWFVEEEQMDFKSYPVIPSPRGSTWKAYILHRIKMLRMGMQAYATRKYARLDLDHHIKATKTSDKVAMRVTNNKPSWIWIGAGEMAPNRPWGIKKRKRCPGTRKLATSFKKQEHTKVSFQDEWGTSITCANCHERFPRETKNHRFKICRNCIPKPIVGLPPIIVTNLSRQELKKERIVERAINPDRENIERLVPKIKVIFKTWSLTREYHELGDAAPEDMIEHVVIWHRDIVAAKNILFKGMCRLFGIPLPDSLKRPDNPHHANNVN

SEQ ID NO: 2371 - protein, 549 aa, unidentified
  REGION 1..549: note = Table 20
MLYDMVNDFNVFPEIDLHDLTTDEKHWFKAMPMFLSMQREIEEYNLEWPHQHRSKRKKRKRKKSKRRPKRKQMLDDLKFRPFIRNLVVVPMCDFRRKHFKIDCSSMHQVLSSQKLLPKVEVENKNGTTSMVILPQKGFNDARDHWWNQYFYMRKIRRFVRGKKKFDFSINTDGIAVSLQYSAKKKTNNTEYDRSRIVEMILDGKFENFAGVDTGLKSWNTTVTHNIITGTETNFVMSSKQFHWQTGQNVRNAKAKRWTKAFIEEERRDRENRELYPVMPSPKGSYWLNYIKHRVKMMKHGICAYSTAKYTRLALDKHIKSSSVVDNWVEKVTDKQSTLFLFGADGEVPSDSRISIKKYVRCPGVRKTLRSIKKRRNCVIDLVDEWGSSQTDARCMKRFQNQPKSARFKKCRCIPDARTLLPIKIVSKLGKKDLSEFGLLQRAMNEALEENEPLLSKVKSYYKNWQLNLECSVTWHRDVVAAKNILLKGLWTLLGLPIPDAINRYKVRDAVAEAAEVAADVAEAAAAAAANVDNDVEMFEYDQQPADHAV

SEQ ID NO: 2372 - protein, 773 aa, unidentified
  REGION 1..773: note = Table 20
MRRKRAKNGRSTSLKMTLNQVLREEYRAPFIDQVTYWCLSATMITTLASLLFLFKANKAFDDENVRFFKGESDEYTNDEFNKYVNGVIGECFTSVLQENYHKLPLAFRRTVEQACPDFLCPENWPAREGMGNAFNHLITQYITNVKNNIRVWAFSRIKKFFTLRRYELNLNRQGNLITELDVKRATKIVMFQSRVERNANIDLLLNEAAGIGLPINVHFQNLIRDRWFQSIPIFINIQRQIFDFHAKYEMLKQRWFQYRRDPNNNVMPTTPLPPKIKNFLVVPIHDFDMKHIRIDIHLFYLIARKFGALKLAKGKRGQPINIEKTEYDSNPAIYWDLIFDLPKISKLGNGKEFDFAVATDSVAVSLCFVKPERNTPELDNNTIKEKYNNFEFDYVLGIDPGVRTWNATVRKHVRSGNEENITIDGPKYHFKAKYGKRKRKSDQWTELLQKQRELDYKRYAFFPSPKGRSHWMCYIAYYVKMMKPAMAVYTTRKFIRLRLDKYIEENRASDKIAASLTKKKSALVFIGAAQIAPNSPIGIKKRLRCPGLRRLLNSFKKLGNCIVRLVDEYNTSQTCAKCFRPFDRRTKSDRYKVCQHCIPSEDESSQWNLPNVIITMKSNRVYQQLRKYAVDFVNRLNAANPDHIPMDSDGLVSKLQVCFKNWQLNTGIWKDDRAPFQLKTVWHRDIVAAKNIMYKGEKISLKLKMFKNVLANNLLFTILFLGLCTVLGLDIHPQLLRPQNQNAAVQNQAADDEDSSDDEDYVYVLDVSDDDQF

SEQ ID NO: 2373 - protein, 592 aa, unidentified
  REGION 1..592: note = Table 20
MRAFELNDYAIKYNYFNNLYGMIEFELPYYDEEDIKNAINYTYRRRNTAIGDVEREMRLGELLDELRWLGAPDDCNIRDFVKEDWFKSIRMWSEIQRDIRNFHFAYEDRRDKPQIKNFVVVPMCTFQRRHIRIDTDALYVILSNAKLVPRKCGKRTRKDGTTNFKNITSNEFRTNKILSWNLFFDVEKILKLVHNKKEFDSQICSDGVSVSLMYKKPKVPPVETTDDEIKAMYDSNELKYAVGCDPGMRTWNASVRRDLHTKEEVNLRISSKRYHWDAKQGRRNAKAERITRLFTFEEQADRNRIAAMIGEMPSPKGPSWRSYIEHRLRVMNDGIETYSTKQYARLGLDKHIESVRAIDKTACKMVHNQPSIFYMGASGSTPANSPIKIKKHVRCPGTRKLIAAIMKRGNCIVRMVDEYMTSQHCPLCFKRFPQETRRDRYKKCVGCVPNPIVGLPRTIVTNVSKRLLQMRRTIERMWREMRDIGDVIAATLRDGPNAGRLVSKKQRFFKTWLPNVANVEIEGAAGAQPTLTTVWHRDIAAAKLILYKGECVVFKRTIHPNVRRPRRVDNNQPLPLYRGQNQNVNNGHLQPQ

SEQ ID NO: 2374 - protein, 758 aa, unidentified
  REGION 1..758: note = Table 20
MSGRKRKGVGAICGSRPKRRKVGKLPEESGLLAIKVSAATAVKEEYHDIVLPWIAKKSIECTKICELASLLFLHKVKLANEEAILTNNWKFFDEGDGIHIIEGCFFAVLRKYKEENDMVPEFRDIVEALDGDNRFAWPNNDYFGNLMRYLFQQHARNAITNLTTHDDKRLREYLRLLVWEHNVDNLDPNDVFDEHDVNNAVKWAIERYDSTRGDAIRLDKRNRLLTCVRNIGGPKDDNIAKDTKENWFATLPMWLHMQKKIDDYHNWVQNNLENIPADIELPIIKNLSVLPICTHLRKNIKIDADILYRMMCETKIIPLDEYGRQVDGTHVCENKVHYFNEIFDMNKINGILNANKEFHYHVVTDGVSASILYDVSRNTLEQLVSDELIKKRYEDGVYIYELGIDPGMKTWNATVRRHIDSGKEMNFKTSSKKYHYLTKQGVRNRKAKRWTRGFVAFEQNDRNDRTRYPQMPSPKGENWRDYISHRLRIMKKAIDVYTSERYTRLRFDKYIESNRVCDKIAAMLTNGKPCIIFLGAANISPNSPIKIKKNIRCPGNRKLIKSFKKMLGNVVKMVNEFRTSRLCARCFEPFPLETLGHRFKVCEWCVPDNNDWPEGLKLPEKIVTMKSKRMLLSERQELRDAMVANPNQAVGFVSKVICYRKNWRQNAAYDAVNNVAQLPGIIRDENVIDFTEDYMLLDDDFYVAEEEDYLAVLNTIWHRDIAAAKLIMYKGHCGLFGFELHRNFTVERLVYPRWIRIH

SEQ ID NO: 2375 - protein, 821 aa, unidentified
  REGION 1..821: note = Table 20
MCIRESSFSILNITSVVSINQFNMSTTGETSAAQAKKKRYKYQTKKQQEEEAEDENFNDNGLLAIKMRLTTIVRPEYHDVVIHWIEKKSVMSTKISVLASLLFLDKVKSAQNNRQWDFFTNRMYVNQKGKLVEKNRAEDVIERCFYAVLQKNKENEDMEPHIRHFVEQGLSRDNQFAWPNNNYFGNIMKSLCQSYTRQLKTNQTTHAKKRLRNYLQMRAWQFNAVSTGLRFDKKDVDNAIDWAIRRYDAIRDTHQNAPLKRYKRKLLLDMVRAIVEEVGGLANYDNIKQFSKGKYWFKATAMWLVMQSEIDEFHNWAQDNNVTIPKIKNLSVVPLPDYQRKAVFMCNDVFYRMLAEEKLLPKVEGKQVTETFIRENKEHFWNQIFDFDKINRILKKNKEFHYTIVSNGESVSVLYKLSKQHLQRLLDDDIVRKRYLDGTFVYELGIDPGMKTWNATVRRTISTRKEVNLKTSSKKYHWLTKYKMRDKKAKRWTKQFTLDEQNDRNNRQLYQRMPSPLGTLWTDYICHRIKMLKKGMDVYTTPKYARLKFDKYVESNSTIDKLCGTLVNHQAALIHLGNADMSPNSPIRIKKHVRCPGTRKLLKGFRKRGNCVVRKVDEYFTSQTCAKCGGRFDPNTKSNRFKVCENCAPVPNSIMANFLPSKIVAQFSKRRLKYNKVYIEESLAVFLARGEMTEHDFDIIADRLLSKVAVYPKKWQVNAVSGVLEYADVKVDQQPHAVDDENAAEIDGEVAQQPCAVDDECVTEIDDKQQPMIVHQTTWDRDIVAAKCILIKGHCNLFGLDIPLTLQRPRRQQAVQNNQQP

SEQ ID NO: 2376 - protein, 664 aa, unidentified
  REGION 1..664: note = Table 20
MEPEFRQFAQNLDDDHRFEWPNNKHFGNAMGDIIDIYENNLITNLNTHPGKRLREYLNMKVYKINSNPYSVFKFQEKDVSACIRLAIYGNDVVIRGMDDVAKRERVQWLMDYIRRICWWDIPNNNLGLFTKKQWFKSLQIWLTMQREIDEFNIDQELREERKEQRQEQRKQRRQKRKQDGQQQSNSSEDNAKNNVPKIKNLTVIPICQFKRKYFPIDTFTLYKILCGLKLMPKNDNEIQLTSKEFQRDKEWYWDKIFDMPKIKRLGKRKKMFHYRIMSDGEGVSLLYDIEREPFKPIDKAAIRKRFVENGPDKIKKLLGIDPNEKTLNATVQRDVETGKEVNIKISSKHYHWIAKQKVRNKKAKRYTKSFTQEEQNDRNNRALYPVMPSPMGKHWLCYVHHRLKMLDKGMEAYASDKYTRLCFDKYVESNSAIDQIAGMLVNYEAAVVYFGAAEISPNLPFHIKKHVRCPKMKNAFKKRGDCVIVPTDEYYTSQTCPKCLERFDPRTKSHRFKVCQDCKPHPAAMLPSMIVTQMGTRKLQTFRKIDRIANAEAEANHQNAGPLLSKVVVYRKIWLVNPDSGVLEYADTDAAQQQLSAAEQLNALVAAIEVEFIDFEGRIKRKTVWHRDIAAAKCIPIKGHFWLFDLEIPKTLQRPAPAAQNNQY

SEQ ID NO: 2377 - protein, 1097 aa, unidentified
  REGION 1..1097: note = Table 20
MDDKMNRDRSPQLHNLNEQDQSVVSRVLQIERQRAESETNESCAQVQFQSVFQQFRPLLPSNQQQCKVPQQFRPVLPSHRKQYKDIPSRSKKSAVFSSFKPLFPRNQNQYETGASTSKESIHRPEQREFLVENDDTRMSFTTDDEPSTYNIAESCASTSWQHNLGLLDIDSTTGNYSDNSNIEHMDVDSGENNQAPQEDSRQSPIPKKRYKLSEFQEKHIDNAREPQPSTSRQADLSDLKQLKEVEFKIPAEPDIKRKKKKAEENVVSQSKFTIKTGFNETFCPDNDMRQLITDKAKLISRMFVLITIFVNFALRHPTKDYLRNLWSAKGPDYVTITYLFKQKLGKTNKTEILDQLKKQFVQEFIEYMGRPFEKFDCVNLTPTINEMAEQLNVNFKTNLTHHARSRLAKFFEMELFKNEEKSETYEEHRKKQEAKREETKKKRKKKNKKKRSRWKRKKKKGKEASRRMRRVRHERLMKKYPEKIKRDKHIFNLLRNKKRSYRILQRKCFYDATNTTRRNRGKKMSKEEKWKQKGKSKNTSSHQRNDKDNETNPTKINNDKDNETKMYDKLKIIKNLVDELLLENKCENKTLNKMNEENLNFQNIDNPDDCHKFLNFFHRLQLYFAKKKCKSFNIVPVMNCGLKYVTITNSALFELERELKKIKGKTYVVRNPVPVKTEGLSHSEIRKKITAEEELHRNKMTPLKAKSNSLTEDKKKLTNEIKALKRKKNCNEAKKELSNLQVKLRKLNDDLKTINEDEKKVRQDHDEILGKRHENKYKENANRWTRLFNISHLRINEEKMKFSGTIMTDGIGVSVIFNLNQPKKQENFSIPKNPILNEEKLENFHLLKGLDPGLKFCFGGVEREVNGEFDINSDDRHIKIKSSSFRWLTGQNRRREILQKHVPQNYHQQLLEREEFKGKVNNKDPRLIVTTTKFLLREFYDTQPILEKRKVARLKWDKYMSVRRETNLLANYIIGDENKKQLIVVGQPDIPPWLKGHVRMSLRAVVKRLIEKQHKSKNLSVVFVNEHRTTVMCSKCNVRVKIFRNRTTYCSTCKTRWNRDVNAGRNILHLGLVKTGLIEKECLPHWEMFNALTASVD

SEQ ID NO: 2378 - protein, 1226 aa, unidentified
  REGION 1..1226: note = Table 20
MSDNSDNRDISFPLPIDEDRLQVARIVAHNRRQVSRPFIPLFPRANVTRENVEVYRQRSITPDIEGQQDSHQLSRESVRRQLFASPIEQQQESSFIHQDEETRMSTSSDTTVSWQRHFGILDIDSSSSIIDNQQPMDIGFDNAPLDLLNQCPIPEKRFKLTEFEDKPSTSKEADSREAQLKQTSAPRKRFKLTEFEDKPSTIKEAGSREARLKQTSAPPISFKLTEFEDKPSARKEAGSREAQLKQTSAPPKRFKLTEFDNKQSTSKEAGSREAQPKQTSVPSKRFKLTEFKDKPSTRKEADSREAQLKQTSAPPKHFKLTEFDNKPSTSKEADLREARLKETSSPPKRRKKAANKKEELKKDEQKKFTIKTGFNESFCPDEELRNVIIDKTRMLSQMFILVTLFVNFALRHPKHSYLRDLWSTEGPDYLSIAYLFKNDTRATGKKEFLDNLRKIYVPEFTQLMGRPFQTFNCEHLSAPIQEMARQLNTNFRTNLSYHAEKRLGLFFKTQYIKNKSSDRKKKKINKFTVKKKIAQQQKQEKRKKKYKKKRKKQMEKKRRKKLFQKEVRQLREASLLLSKPDKRERDREILQQESRERKINTRKQRIFVYDAREPFRKRRKRGKKIPNSNRMTGNKQGEEKEEIEEEEEEEKQDENMEEEDKQEEDKQDENMEEEDKQEEDDETAIDIDNTDSTEFENINNKIKDDVNNLLKDNTCNNLILKQLNEENLNFCDVQSHNKCHLFFKFFMRLQSYFVAKNVSSFILVPIMKPGVKYFTFTNTGLHDLEIMLKKKEILKTQETPKKKVSTVSEIEAKKKSKKEISAVEKEYKIKMSPLKKSIKLLAENKKKLDRELKTLKKNKSFDKKQLTKLENEFEKVKEELMAKESEMNNCRLQHNTIVSERNAGKYIKNEERWEKMFRISKIRTNSNKLKFSGTIMTDGVAVSIIYNVVKPKTVIDFAFTETEKKSLNLNDFQTLKGLDPGLNLAFGGVERNGQCNFNINSQDKHIKIKTKSFRWHTQVNKRKSILYKYGNNPRKYYNDLSSTEEFRDKVNHKDSSTIFLSTKFALKAFFDNQPYQEKRRIAALKWDKYMMVQRESDLLANYIVGDEKKKQLIVIGQPNISPWMKGHIRMSLRVVVKKLVEKQRNSQNLRIVFVDEHRTTRLCSTCNENVKIYKNRTTYCETCKIPWNRDVNAGRNILNIGLVKMGMIPKENLPHWDQFRALSKDE

SEQ ID NO: 2379 - protein, 1139 aa, unidentified; identical to SEQ ID NO: 625
  REGION 1..1139: note = Table 20

SEQ ID NO: 2380 - protein, 1173 aa, unidentified
  REGION 1..1173: note = Table 20
MSTSTTTATPVKKRQTNRKEASFPIHSPGLQTLSSSQAQSRKKSFHELNKLKMDKNTQHETSKVKSKAESVKSTSSSDSKPVEIRRTDMKKTSSPICCPPGSQPPQSSPAQSHNKSIQELKKLKMDETMVPGTSKDSKKRKFEEESVKSTSSSDSKPVEIRRTDMKETSSPICCPPGSQPPQSSPAQSHNKSIQELKKLKMDKNTQHETSKVKSKAESVKSTSSSDSKPVEIRRTDMKKTSSPICCPPGSQPPQSSPAQSHNKSIQELKKLKEGEQSLPSTSTDVPPPQSPPRMLIRGLKKPQIDTKQEKKQDSYTTYMSLNSILRNDDENCIKNKIEHDVENASRIKILTAIFINFIMNKPECQLSKEFAICGFNHYRVMNCFKKRKVEDYISCKKKDPELYTLLEEFKLAMADEESEIDPVLFDEFIKNSEKENQVYENKEEQLKQYNKFRIEKLTNINCQYQTNLLLQAAREMDKDFRVHLHMEGPKILKKYLKFKEFGVQTKEEVDKQDTSVKNEKTEDIKEKEKRAKKNKRRLENFERKVEKRKKENKKLKEERREVTAEEVKETHKNNKKIAREEANKVYTKTICKNREEEKVKILRKKNEKMDKEEAEKNQQARIEQKNTQIKERKEKGRNVVKITFKKNGIKQSLTKEEIKEKEKKVEKALDNLLFYNRCTDEKLCSYLEEIKRETEEIDIRLEKKMDEKEKNEKGKGKGKKQKMKKEKEEVQLLDFLDLDNEYECCKFLPLYMRIQREFVDNGLKGFVLFPMRRFGLQHVTLTQTILEKDFLPYLNTLSKKKVVEVSEMKQKLNEQDEKNKIKNTTKRENAKKGKNALEKKFDKLKILWQGMFDLKKVTKNKKKRECSVPRAMQTDGVKVSLIYNLKKAEKIKSSSNKRKKKNNYDRLVGLDPGLKAMFGGAVRDGDPHVKIDQTSKKISKTQDTPIYVNAKTFRFRAGEYRRKKMLHKYSKNIEERFDSFLKKNVKYNNVEKRDPRKYLLLAKFNFKQFEIKQAALTRKCFRNLRFNKLISVQRETDRLVNFIMGDVKKKPCLVAIGTTSISPCMKGHVKTPVQRIERRLRERSKQVGEEKLKIVHCYEGNTTKFCSSCNQQNVVSRSPKRYAFCQKCHVVWNRDVNAGINILNIALINEDILTGENIPNAKVFKGIKSVKDM

SEQ ID NO: 2381 - protein, 747 aa, unidentified
  REGION 1..747: note = Table 20
MGTEKHTVKVCLGKLCKSANIKNRIEEDAKVVSSMMYEATTMALFGLYEETNVENVENCPSLLEKWTNNGPDFLSFLISLKQKVNAQRKVTEQDAKINTMVNEYKELRNDIPLYDGEHRTAIIQEAALVLNRNFKTNFTTHAASRLRRYLQLLMEIEDEEKNHMEVDEIQEICSVYRIKNDNDEKIKIRSFKNSIKNEQRKEFQKSQKKIPDEIREKNTSDYCDERYVRQEKYHKHCDKVYYKKRPRRRRKKSKKEKEEEKEKNKEKKKFRKRRPSFYKQSVAALNLLLQKNECQVKGFPTDLLLKKDDNDRRKLDFTKLTKDEEWHKFLPFFIMIQQEFHDKKKKNFTLIPQISLGVKHVVYTNTALKELQTATVIQEIKEKKAILQKKKRKSGTNKDHLQRAVDKMDDEMKRLREMNNEERWNSMFNFKSIQRGRKKLKNGGKFSGTITTNGVDVSVIFDLPTKHDVVQSKKKVGSYKKFCGFDPGARATLAGVSRENDPNPTTNVKKDSAIYIGSWMMRWQMGDYRRRELMKKKGIDMQKYYKQLAEDPWMENFCMTNPRDRHRITKYRIHLLQNFQSLHQKRSVTRLKIDQYSAHKRQVDQLVNWIVGDTKKKPCFVAIGGAEIPNFIKGYTKAPLKRIEQTLFQRSAELGKDKLQVVKVNEFNTTKMCSRCVRPLKISKSPHRYTYCAKCKTTWERDVNAGRNILNLALVQEKIIPKDSIKNHHLFRITNDDAQHQDAELQK

SEQ ID NO: 2382 - protein, 441 aa, unidentified
  REGION 1..441: note = Table 20
MKKHVNDDEDEKQNSDWTKFIPFMLRVQQFFHNENVRNFVVVPQTNLGIAHVLYTNTGLVDLKKGVEHDKCQYLMDEMNSRRGISSVQRKAQIQRVKTERDDEIRRFLQIEGKEARWRDIFDFSKVERGKEDSFGESISSNGVDISIHFNVPKVKQQPPANDEENTMPVNQKYRMFYGFDPGKKATFDGVRRTGTPQPSSTNKQKDQHIYVKSKSFRWQMDEYRRKEKMKQLDLDLQSYFKQYVRDFPTMENFTWTNPADYARIVRYKLHLMDRFQVVHEKKNVVRLKMDKYMSQQRECDKFVNFMIGDTKKKHCLVAMGNASLPNFTKGYVGSPMARLKKSFFNRSNQLGKRLLKIVNVKEPYTTLSCSTCCALQFKSKSPNRFTRCDVCRLTWERDINAGRNILNIGLIDEELIAKDPPFNEALFRYRNSLRIDDDDDE

SEQ ID NO: 2383 - protein, 870 aa, unidentified
  REGION 1..870: note = Table 20
MKRKRQSITLKDFLPSSSTSLNNTSNSSKCPATAACGNSSNKNKENAKRRRADKDKKDTNLKKTKKDDSLEKNKKKVTKKRTANNEEDEEPPMDERKRKRLKRLGTRKSTVKIFLGTICKSNAVKERIIEDAKIVSRMRIEVSLMALQSLYHDTNHYLLEKWTNDGPNYLELFIALKRKINTQVVRDPQFVALIEEYKVTRGNMPLYDCEYRSAIIQEEARKMNREFKTSFLKHFESRLTRLVQHLLSSKDNASNSDASNSDAADDAEEENIVKDALDNDDDDDAEAERILKMARRERHNEKKRRNRKKFKAKRRKLKRIEATAAAAASREENHRRTAKEIANFKIQERRENRAKDNSHREKVFSKRKTRKRRKHPKTHGKRKDIALKSRWSSSASRIRNNTVSTRKEAIQVVENLLNNNDCDIAEFNNFLNPQEKLNFQNMKRDVNDDGEEDDRNSEWTKFIPFMIRVQQYFHDNNIHNFVLVPQAQLGIAHVLYSNTGLEDLKRGAEQDVFLKKELQIRRQSIPFKQKQLQIKEAKTCKNVEINRFLQIKNKIQRWEYMFDISSAERGKVGAFAEVMTTNGVDASIIFNVPKMESVEEKEGPAPETRFKVFYGFDPGKKATLGGVRRVRGAQPSMEDKLKDNHIYLKSSSFRWQMNDFRRRERKKEFGLDLQKYYKQYVLENPERMANFSNTNPRDYKRIIEYKLHLFERFQELHEQKCVVRLKMDKYISRQRECEKLVNFFIGDTFQKPCFVAFGNASLPNFTRGYVGTALNQLKRTFVNRAKQLGDKRLKFVKVNEYHTTALCSNCCFDVIKSKSPHRFLQCNKCRTTWERDINGGRNILNVGLIDEGIIPKEAPFDEATFHYRNN

SEQ ID NO: 2384 - protein, 642 aa, unidentified
  REGION 1..642: note = Table 20
MKRLIEINKKLEKITNQKCFLSNFCKSSIVFDAINKQVIEMSNFVIEASIYCHYKLNTYLLQGKVDVLLQSSRFILDMFYELKQKSKAKYQLEPDYEFIRNDYNLNKYKVVCGNSMNFLATQYETILKNNIWMHAYSRIRKFFKNATKVDAHVYTPTVIYQTLDTLFNKKSQHSTNEYLIELLKNELQFDIGNFHDIEKYPLKYIPLFYNLQKYNELNNIKNFKLFPQITAGRKYIRYDSFALFSLLASLKLLERGHTTWYGFAPEAMNYWRKYFKVEKFETGNKKFGKSISTDGIGVSIQLVREIIHATIDDDDDETMKKKRKIKKPKVSYQQDYNNLNLDDFTRYLGIDPGERLMLGGIIKNKEGVFTPLKCKSTTFRYDTGEISRRNRLIKYTTDHDIKQYEKEHENITQTNEPYNKVSDTMQKFINDSIKAKRKKKQKPSPKNKSLLDMENINEKLKVNISYNPSNYINYTKWRLKWLLYLQQLYCKKKVARLKMEAYMRIEKTLHKYKEQLAPSNEKTLIVWGDATIAANSPVKGYIRTPKNKLLEILKQNKNCKVLMQDEFRTTKLCCKCHEPLNISTDKHRYAVCPNCHTVFNRDVNAGANILKLVITRLKKEITHKNFCRSVKLTTITGSSFIV

SEQ ID NO: 2385 - protein, 553 aa, unidentified
  REGION 1..553: note = Table 20
MSHTCKTCGGSDHTRKSSKKCKKYLPPIRKRHLEDAKTELELYTVKRGLVSILCPLLDPEKKLKLLTEIRRDVRDLSRVYIELGIWINYYMKTAAQVPPKPDILNFFYAMKGKGPYSDAYRAMFGAKKYDDKLRSFVVQEMAKQYETVLHTNISTHAYARLARYFKVKRNNPALYSAFFKKDFPKDNEEMRQICTIINADTVKGTKWWSTIPEWLKIQSKLEDFKLFPQPSHGLKHLTYTSRGWHELIRRVDPKSITCYWARIVDHRRDLWAPWLNVDMKKFGCSLQTDGNSVSLSMNRFKKPTKDSKRAKKSYARIIAVDPGSRIPIAAVESQRFHFWRITKKFVRSHTLEWKRERVRSKLCQFSEEAEQNARAKLDFPVSSKNTKHVIEYTVFRMTWFNVRQEPYEKHLKLTRLKLDKYIRVAKCEEKIIKHVFDGKGSTLVLYGAGSQFINTASFSGRKFKHDSLIKRLRSKRNIDVEIVDESYTSQACSSCNKNTGEFTKIVMNNKLRWGICPNCHSEFDRDANAAKNILINYTRSTICRPGCSSNGAS

SEQ ID NO: 2386 - protein, 425 aa, unidentified
  REGION 1..425: note = Table 20
MDKSEVPSSTYDAYYNGMCKSNRIGEWFTENKINSKELKKNFWRFIPLFLRIQHELYDEGKLSFNVFPIYSHGLKFITYDSRCIHEFLRRVDPNNTPSTWPVFSENTTMYWNRHFTLPRKFGYSLSTDGVSVCLSMNRIVQKGQKLKSKKAKKCEESLENTAFGSKRNYSKVIAVDPGAKTPIVTCARNGDDFSYKVLKKERVVYESKECHRVRKRLRFIKDIEERIRVDRESVEQESGVELTRKSRNAEVYTRFQLKWFDEKQRFYEQIRLQRLKFDKYINDQKMLHKIVDDYFGKEPDTLVVYGAGFDLMNKGTFKGHRKFRHNDVLNIIKRRKNLSVFVINEAFTTKNCSYCHDRESVQRKLSVSKSPHRYVYCSVCRKGIHRDKNGAKNILLKFEKNNNNKLPIRPSSVGTDMNVMGGGSS

SEQ ID NO: 2387 - protein, 712 aa, unidentified
  REGION 1..712: note = Table 20
MVRRERSLSPGEGPSSKRPRMEPSEMENVNEDDDEHSNGLHKACGMYGHLRSTSKDCPLYRPRPGKQRPTSKAPPPPPPPDPPDDELEPPPFPQPIDSFWVKDHRVYKCGLRQLLRTPHLEDHICSRVEYITKLSFQASRLIQLHVQTLIEEDLPFPDIRSENWIRQAFRILLGNLDQPNIRDIDLIVTYRNFFVPELGQYQIDTLPRTGQLLTYAVRTYRVNIGNHINSHFESMCRRWLRECLRIRGLPQRHARLMAELIWQHATNGNDQTARQEADTEWAQVEEIEGEVDDVEELDPVFQPYADRIRTNTVDDQMKIKLIYEFNLMFTLWSTKVYSLVPLCSWEAKYITIDTDGLYYLLGGKPSLRLEPGEFGQRQQEFWRQHFNLPARLFTEDIEQGHQLFDFMITTDGVGVSVHICRWKQVWRYDETPEQRQERLERARAARQELLFARIRQSAEQENLPWVGVDPGRQSMLTAATLDRPRWSYQMSSKQYHHEIKANDKSHHRQFQVQRNGLGEWQTELRTMKTHSAGSTIESLRDLFSTPHLSRMFAICFNRTIKHKRFRTYIHKQRTLEKICQELIDNHNPHRVIFAYGMGGFNMRARGYKPSPSKHWWITSRLIKLGALVVNINEYNTSQVCSSCFQGTKLCAVGSRRDPFVTRPVSVAKPILLEDGPTTSVVYGLDRPEVFSVQLPQPEVARDPFPSEHRGHE

SEQ ID NO: 2388 - protein, 906 aa, unidentified
  REGION 1..906: note = Table 20
MKDDNLSETPNENDNNKKNNIKEIDDEFSYTYEIEAATSIKCSLLSVLNSNSKTRKKKMAIYIQGLIEDYNKISLDGIYLFNILIRTLIKKRLYSKINSVTIRRCFGILKEGDKYITLKDPPNPSEIDMIYEIIESYFKNNNYLRPEFNHDEEGFMKPLEACADGYLNNLILHIRTNFFRFQRKYLKSKIESEFENHKLSRSEINILTLVIQKKLVNLEYSPRTDKNIKKLQCLLGKIPNLNVFTDNEKKLLKEFIEDLELLETEEKMIKKISSDNIIRFLSYFSLMLEYLKSIEKERFSLIPIFQPKMRFFRFDPMTLCTLYNKWESINGYNPKLPAAYFKDNFDNYFDVMFNISDRFHKILNKFPTIKSIQTDGIAVVLTFEKRKEIKYLTDKDKREENRIKRETEQKKIKKEFLEKMKGLRTKISSLKKDIGEGKKIIGKYIYLEFDCICIKNQIIEMSEQIKNSDNDTVREKILRDLKKMSDKYQNIQKSLDDCDKDMFLKFKLELKRKQNNLDTLEKELESLRKKPEIIDLEKKLNPKRQDIGMYESTEVRCSPEFLKEYRLVGADPGNNPMVDMACEDGIHVTISKNEYFDLAQVFNNNNKINKLREEANMNDITTQLSKTTYRTASTEEFMEYVKVIKKNWNEIWDHYSDYKLSKIKLSSYRSSQKAISGMARRIIERLNDEKNINKYMKSKEMKLDKSILEKPIIIFFGKGNGSLTISNTKNTSSKGPIKRLIEALSKYVVVILTPEYNTSKMCHLCGEKLIDIETYNFPKRKSLERNMLKRMKDNKENKTAKEIEKSEIDDNIKKIKEIERLRGIIHKLKKIRKEKKNRVKIEEIEREIEGMKCGRRNCYQTSYKLRRCAKHHEENLCKLFERNLNAAINIRKKGIKIITTGICDEA

SEQ ID NO: 2389 - protein, 777 aa, unidentified
  REGION 1..777: note = Table 20
MDEVDKIKEDNPEKIKYETKLDGITSVVCKLNSVLNGDIYLKEIIYQKVIKSNKIILEGIHLFTIYVLYIISQDEHMPITETTIRRCMRYCLTNPNSSRSTGDIDEDDIIQHVKKIYFDFDIIGREDDFFDDSQGLMKGIEATADTYHTNLIMHIRTNFKRFQKRYLRHRLTKFLENYKDVENDAITFLLPALQQMINGNHKYSYRTEERRVRFNTLVIKYDLDSFGLIETLLLKEFIPFSINFADELPKVTDKEIYNYLSYFSYILKEFKEHDLKRFKLVPHFVPKIRYITFDARPLCAIYNSWKQTDINVKIFEKDYEKYFNEMFHIKKKYKKLLKKYPSVRSISTNGYTVSLRFQKITKKISVPKQPQPQKKEIECSPIIPKIKDLKTEYIKRMEINKEKHHHNDKTYRIPMSFDVKEYKADQSFLDNFDLGGGDPGNDFMLDISMKNGIHLNIHKNYYNNIAHIIRNKMLMDREIFKSEMNHIYSELALENIKTTDIRDYMSYVKVIRKNWNKIWEFSTKPQIFSLKFDSYIYKSKAISRIAKEIVGGLKDDKNIKDRHANYFDPIMFEENKEKVIMLSIGTGNGSGTISNTKGSGPKGPVKRLIKELAKYCVVVEVPEYNTSQLCSECDEFTTDVYGYKIPSENGRKKKDQNKMEKEVEKKEIGITIKATHRGRRTKEMLRDALGENGIKLDKKKIDRLKKDIKEYDKMAKKYNYYGKLYRLRRCAAKHYHNDRCILWERNKNASMNMIKMLENLLLRGTMGHFMKKRKKSG

SEQ ID NO: 2390 - protein, 926 aa, unidentified
  REGION 1..926: note = Table 20
MTMATKDTLLTLLREMGLFELAKNLATIPFQSIYEYSVNDWIEFGAILLQAKAIYNHLHASPQLDYHNVAAVELVGINVWPLLESLPKAEVLGSVLNSPLPFSLYDSSQDVLPGILNDQHSANAVCCTELGHICGGILTMYKQLPSATASEDCWHYVYDNLITAPLKMVSKCRGIEIDTQRNSIDITGTTKRLQRPDYLVIMDNHLLVMKGEHKSALVNIRTSTEELVQKMSSGWSVLTYGSLDYIIGFATAGSQIQFFAITKAHQLVPLSKILDLRIIDQCAQIFKIAVNLVRVFEVFSKYWPPKWANFSVQAYQSVNRSDGVVLEFGDCDLVKKTSGLSLEKLQRLAEIHECLRSIPGDAQSLHMIRVYNLKVYSTTIRAHLGPLGFQIVPKDLGELVEAIHSVLRALSIWHSLGWCHGDIRWSNIVYVPTSVENGFWMLIDFDHSRKPGTTYVNWNFHPATKLGQKLIPLHDLIQVGNLMSERLHAVDKAPELLELMQLLCDAPLEVKFADNEDVTFTTDGYGCSVVVEVENRAWTYANKKEDLLTKHHRKDVSKLMYGAVALADCDNLNERLQNCESFGVDPGQENPLVCSTETEVDNQTSMSGAKRQFQQSPHLTGVHWRKLTLEKQYEAAESRLKPDAIKEFERLASEMESKVEYVALYKRYFAEIFEYYSRAFHRVWRLRKFMARQSAYDRVLNHILNGRDKPSVPKVNDAARTKQSANFQRLQRARYGKMLDPTVPVDKRPKPPVIGYGIAGVKHMKKHPPVPVRGFAYKMSRRALVVMIPECCTTKLHANCHHELHMHDMSVNRCNYTKKLRMPPDRDRVDDRGVVKLRRPVFWCINQKGQQLHDASNCPNREQKLVQSRIGICQNCRVQDEPVFVDRDVNSSCGMKQVLVFYADNHKRPYWNQRRVVGHTQTIQGV

SEQ ID NO: 2391 - protein, 804 aa, unidentified
  REGION 1..804: note = Table 20
MVYETTRKCTLRQALNMNQASKKELISWLRVASEHLSSASRLVYIALNVWHERGDKMPDLSHQQAFANMLEFLVNSQFNVARHHPETVTHIDKLAESVGAAAMARLKHPSLEGPNPNLYEYQSRHMIAAVKWHLTQTLFDYQKRVLKVQLEPFGITGGKLVVFLILLNTVMTEGKSLAKEHLDASFLDIDPDTPVQLSADDDLSSEGEEVNSTQQLKQDVLDIIGNNEPLQALIQVHREFLLDILFTSYQKREPRQRRQHVRNPNPRSLSVLKVARKSREVKSKKPVAPNKKVATNMAGRAGNAFENLHGQNVLLKYMEYLQLTANNLEIKSFDCLPMGTDQPRYIKVDKRILVSAIGKLELAVNDRQSLLAKNYAKDFVNLKSVKLGQKGKALQEISLSTDGFGCSITVALNKECPPYANTREDLLVKKSRSVDVSQMRVGAVALTNCKQLGSRVQGANVIGVDPGKINVMVWTAGPVLAAESEAAAHRQLRQTGRLTAKHWRKLTLESQFDSAERQFKSYYPEVLQFEARLSQVKSKAEYLQIYLEMHEHVWHYYCAPFHRQWRLRKFCARQSAFDNVANSLVHNREMPSAPLKDDYYRRYAAHRRKKRLRQSFGRMLDPTVPAGDRPKPPVIAYGNAAVQHVKKTSPVPVRGFAYKLSRCALVVMVPEPNTSKLHAPCHQEMHMQNVGVMRCHHRHKKRRIDGHRRPVFCCVAEGEDGQLNVLHAAGQCPDRERKVVQSRLGVCQNCQVEGVTVFVDRDVNAGVNMREVVVYYAEHWEDKARRNFRPEWNYRAVGRIRNIQ

SEQ ID NO: 2392 - protein, 772 aa, unidentified
  REGION 1..772: note = Table 20
MAKKVTRKCKLNSVLNLDDGDKEILISQIQLSSVHLTFASRLIYLCLNVWNEAGKALPELSHQQYFASMLEYLCNSAFHRDNDHTRMLSETIAPQVRQRLRHESLIGPNPNLYVFQARKIIQAISWHLTETIWVYQKKVIKAQMEAFNVKGRRLTVFLQLLNSLLTEEAVNTMEHFGGEYLEIDPATQIHLPPDYDAGEDQETIAQQDAAIKDELLQLLQVEEVRHLVSLHRHHLLDIVTTSFQDKAPRKRYSKRKYESSRQLKGSIGFKRQKSGKLKQRDTHHTYMPSRAHHAFQNQEGQKVLVQYLMYLRQTLKELGLSSFKIFPTGTDVPRHISFDNRVLAQWGFGQYHLGDQSEEKEEHVQTQEEEKQCILKLKYLGLQQRMANSQDVSISSDGFACSVSVSGQGGKAYANEAKDLERKARNTDVSQVDVGAFALENCRNLAQRLDGTRLIGIDPGKKNVLVWGDEANVEGANTQKEAKREFKDTGRISSGYWQRLALTTEFEAHLQYSKPAEITLMEQEMAQSNNSQKYLGVYIRHFEDVYAFYSKSFHRNWRFRRFCATKSAFGNVINMMHGRPKPPVPKINDLHRGRAAKKRKRELRKSHGTLLPPDKPPVIALGDAGVKHVRGNPPVPVRKFAFELSRRALVVITPEYHTSKQHSICHADLHWEHEVVLKCRDKKVKKILPGRHRAQTVCIKADGPEILSHECPDRFNRRVQSRFGVCQNCQNTGSDVIVDRDVNAYRSMAQIVRHYAIHGCRPQWNCRAERRA

SEQ ID NO: 2393 - protein, 759 aa, unidentified
  REGION 1..759: note = Table 20
MVYEITRKCKLNTALNLDAFDKSALIAFVKTCSTSLSSAQRFLYICLNVWQEEGTQLPDLSHQQYVASMLEFLCNPQFPHDRQSFHTQLLGDAIGPAVLEQLHHASLAGPNPNLYEFGARRVMQAVRWHLTTTLFVYQKRILQAQLEPFGITGRKLTLYIALLNALKFDNPSEAFQFDHPELLLLDRSVKVSISAEYDADDQEHQEVADAELVSQIYDQMDWDEDLVWFTKVHRSFLLDIVTSSYEPPEPRREYVMQRRSPRNLEKKVGVHRQVRARSRQQLSMKSRAGPAFDSLMGQQSLVQYMGYLRDETKGLEVPSFSIFPMGTDVPRYVQVDRRVLHYSGIQSLSDCSVKSIINLKKTRLRKIAVDVDEVTLLSDGYGCSIAVKVKDRPWQYANVKSDLESNRQSDVSGKLFGAVYLTDAKKLAERMEGAQVFGVDPGKKNPMVWTKDRDPVLAANRSLAQQKYRRTGHITAGHWRKLTLEKQYEAAASRIKPVSINVYENDLAQVSSKRQYLNVLMANFPQVVDFYSSSFHRSWRFRRYCATQSGYDNVMNHMLHGRETPQAAVVHDHRRRKRARRRKKKQRKKHERMVDPAAPTKPPVIAYGNAGVMHVKKNPPVPVRGFAYHLSRRGLVVSIPEYQTTKLCSCCHHGLRLEKVGVYDCHHTKRRRRVPEKSHPVLCCFDASGSFLQVSSNCPDRQQKQVESRLSVCSNCQVLGQPYFVDRDVNASLNMLLIVVYFAETRRRPDWNRRAGRRT

SEQ ID NO: 2394 - protein, 564 aa, unidentified
  REGION 1..564: note = Table 20
MSYTVVKASLNQFCNNEVLKSKINDIVLNANKIMFEAYCFANLHVLKCIEENQPLPQLNQSFFQKCCAFVSTMYNRKEAAKKDQDLSSTYELYKQCYPDRYKIAYRDNIAIVLNYISKDMAVATSNHLTLNFYKRFSSFLKAKYPTIPNDERYIICKDIYDKEYIGNNELVLEYRNKLGNIPPYENNIKKDPSYIISVYEEILNFNKSNGKRLFSLLPLKGGFQMSYITIDNSVLRDLIVGYKLKDCDKLTVLKEDIEANPRPYWEEFFNVKKYETSSRKFAMVKTDGKSVSIVLEIPDKIIRQQKNNRKTKKTIDTSCIPSEMFDHVIGLDPGLRNTFVGYNNFDDVIRCSGKEYYHSSGVNITNYKQQRCYNRNTEFMDFKANMPCAKTTSLTELQNFISYSLKGVDNALQLHHKNPFRKWKFKTYISKQNTFLNICKKISKKSHKTDTSVRTIVGFGDWSNPRDSIIRGHKRGPVKQIKEELKRWCPVMDVDEFRTSKLCCCCHSNCKKVLFDGKEVNSVLRCTNNECGITIDRDINGSKNIFMLFNKMLSGQARPSAFCR

SEQ ID NO: 2395 - protein, 536 aa, unidentified
  REGION 1..536: note = Table 20
MINFHFLRLLEEDQEQPLPEINQTLFYQCCCLVSVMKYRKVKTGVKNPELVTSFEQMEKYIKKEDLPARDYLGTGYISNLNALQVVNTKNHLKMNFYNRFKKYLKLRTGETENAVVYRWLKDIYDPEYEGWNPFILYMRQWLKYTPTEANIMKHSSHFVKIYYVILKEFEKHPNTKGIRTFSLLPHKHGFTLNHITIDNAGLENTLKYIAMKLKKDEEGEVESCLDVNKLNFKENEQEYWRALFNIKRYETKNKKFGFTILTDGKSVVLQMTKPKQPERAVSDYRNQEYDKCVGIDPGVRALITSYDTNNECFQVSTKRYRHDSKMIHAQKKRVGWYEKWDHYDEWKLIPTIKTSKTSVMEEYFKFVFPKMQTFFEFHKEKGFRNLKFTSYCRSKATLAEICKRIGGGKDVKTLVGFGDWSQQHGFVKKHPTAPVKRLKRELRKYCRVVDIDEYKTSQTCSLCLNPVVLYRNRIRWKKNGVLEPEARLSNIRSVIRCKNNECRLCCVDRDINASKNMLTLLRHQYEGEARPACFKP

SEQ ID NO: 2396 - protein, 632 aa, unidentified
  REGION 1..632: note = Table 20
EFPNLIELTIQKVVWNMNKIFMESRHLLNLHLIRCFENNIQLPKLIKDEFITDETDADEKKDINAEIQGFYTSCCVYVTENWGNINKNVTTNKQHLQELANTANIFKSLRPNLNHNRYLPPQKEYTSLLINDYVKELRTNCENHLIFGIHPKLRRYVRIRYGINHKKSTEFINQAFSENTNLTQNHIHFRNWLIYAPTESNIKLHFNHFLRKTYEILNYYRQNPDNNQVKFFTLMPIKHKFTLSHVSISSSGLTNVISRALSESEGVTILGFDEIIPQAYVPKNQDIAWRSLFHINKYEDKKLKFDYRITTDGYSAHLQMVKPTPPEKKLRSKTQAKKEREYTKTVQLNEDDYDYFIGIDPGVKYIATAKYYDKSDGDPYEAVLHKKCNHIALSNKEYREIAQMNKRRYWLENLKKRHATYKPLLNTVPTFKTTSFTEYSNNLRTLFNIYDKLMHISKNHSFRKWRYKSYILSKKAIRVFCTRLVPDNKKAVVGIGNWSQQDSVIKKHPKAPTEKIKKELRRRGAEVILIDEYHTSQACSRCGNHCKSIKQLTVNSRGIPAMRPLHSSVRCCSNECRMSWQRDINSSINHLDLLMRIIRRQERPTYLTPGYKFPKRLPHTFTRLDLSPIGLL

SEQ ID NO: 2397 - protein, 670 aa, unidentified
  REGION 1..670: note = Table 20
MTSIQTKKRKNEDGETTTRPDVALRYARRKEFSNTCIYLKWSKMCKDPLVRKHMPDLLINVNKLTLFLYPFLNYYASRLGQLDPAAEVRWNADFIRMACIGLLQKSNWKDDQEFQPFFQKILEEYIFRIKKTEKGIHLLDAMTLEFKGLSFFINELAAFVWTMCENHLRINLFSRVVKWIQFRFNIPNKKYATKILLEAFDLNSTERKADYTDIPVDHKIVTEYIGMLPSEENIGKNFDLFVKLSIKLLVDMEALALEKDSITGGFKKGVRVFSILPMKEGFSLSHVAFSNSSLQQLLTWIQRKERNPLTQTYPTFNLLESTDTLVTKAWFDTHKELIWNTLFNIKQVEKGKKKFAYRISTNGYSCSITMEVSRTVPVLRKSVNAKANSKRKTDAEYQLPNNFDFKKINRIVGIDPGYTTLFSASTSNERSKKDCISLSTKQYRHESKMHEQRYYYQNFLKHNPELTTIILATPSFKTADPEEILKGIDFLVEHADMLFQAFRKSALPKFKFKVKTFSAKTLTQHCKKIVGSTPKTCVVGVGDWSQKANGFLKGGVGASPNKKFLKELKQRQGVTVVLIDEYNTSQFCFTCKSKLEPVYLKCKLKRQEEKEEPEAITRKVHHVLHCSNNECGMYWNRDINSSHHHQHLMFNLATKQGRPSYLMRIQTNKG

SEQ ID NO: 2398 - protein, 1067 aa, unidentified
  REGION 1..1067: note = Table 20
MQPHRSDNNHKSRTVSEAPPSQDDISQGPLPLAKTQPTAATGKKTRSKKITRKSMKTQLQTGKPIRRKSPGTVMENEFKKGKGYCSVVCRLESICSDSLLCDEIKRTAHAMKQIQLEAWHLVKPPHTTVPRERSFAAGLQRQDLLRPLLFGRSHHGTDASHRAKESGAVVYDPDLPIAAGRQKKEKANLVNAIMRFCYNTDETDLVEALQMRDVLTPNDAEWSEQWVPWPNHIKDNGMGFYVQLLWEFQGVIERRMEQVPNEKGVRAFSLFPVSTNYINAHADRWTVMRHAFDIASFETRRPECHLTKTEFAQLSVEKKYEHASHLFANQLTTDGYGATALLLRSKREVDKSSEDDPVVPAGYMPDIMIGLNPGMRALRTHGEYQAIVAAMPSFKTSSYSNYLQRLEYVWRHVRYLLPFCLDRPFLKWKFFRKRMTRVAVDAIARRIVPTVSSQTCVAYGDWSRRNGIKGHAPSPVKGLKETLRKRATVVSMDEFRTSKLCSQCHQTLSSVRYSVDTRLPKRKKRKGVVLARNRAEVEFEMKKCYAVLRCDHKQCEARYWDRDVNAAINMLELLKSEVLEAPSTEAAKPQPSMQDLMDEALALSLYEEECRSFERELNPDYHSSVFTNLQRSKDRRDQDRKTELFGADSFEPSGVEMDTDGGLTPSGLARVPASAGAAAGAAALARARNVAGSLSMEDASRGAGGGSGTGGKGFTSLRESQRRQLKSEKKGFGSGRVESEAHATTDGVMDERTTLILQKMINRGELDKVYGCVQSGKEAHVYYAVGTDEVTLQPVQLAVKIFRTTLNEFGNRHEYVTGDRRFDLNFQKKDLRRQIKSWTEKEYRNLCRAAKSQIRAPKPVVCKEHVLVMQFLGAEGWPEPTLKDVQAELSRKLQARAYADVLQATRALYQRAHLVHGDLSEYNILFSQSEKRCWLIDFGQAVDRSHPEHEKLLRRDLHTIHRFFQRGDLLEANEDEAGLLSDEQAFDYVVSETPEDVVAAFPPLHALLQEMTDVPEEEEGDEEQETHELQETQDVEVQETADVEVQETGEIRGAQEVHKDDRVEHRA

SEQ ID NO: 2399 - protein, 1785 aa, unidentified
  REGION 1..1785: note = Table 20
MAPSVLHAILKALTFIGDFDASLAKPLEDELIGKVMNQYEAEFGQRGPATSEKKGFSHAQTSDALARELVVNLIDDISTGAEIATATDHMLGAFKAEKTALQLVVTFSKAVNRKIVGLGDTTSESEHSSSVSSLRALNQTLLAAGTRTREHRVFGQVVRRFVLSTVTSTALVWLPAVFRANLTLISTLWTHYRRHLKVELALVLEHLLLRILRTTAPCAQSHQMDIMHELTAWLQLPHNVVEIFLNFDLDRVQQWKIFEHLCSTLCSMGEGNISHSVNPEEGEDARLPLQSQAISTILAIARSVMDASGHAHLISRDQRTRMLSMDNGGWEQDESGEEPSPKKEFIPSSSVVETSSNDLDSDRSRPPSSPVGTKAPPDLLKSPSSGRRYGITSVRMRNELQKHNQQLLKRAMEISSAKSLKKAIEYLVAMNFVKDTPRNVTSFLRIYHDFFDEMEIGDYLGEGDEDFKAQVRLTYVRAISFKGMTLVESLRHFLTNGGFRLPGEAQKIERMVEAFAQCYWEDSPSSFSSADTAMIIAYSIIMLNTDLHNPQVKKNKMSREQFVKNNRGIDDGKDLPRRFLEEIYDDIAHNPMHIKGSNVIPKASREASVSAADRDNEKFRGGLAKAVAQSEELMKDLSHTYNTFQFVGVDASISPDLIKIIFERVWFSLLALATSILSDNQSDLSMRMQCLDLLRFCIPTCLFLNMPVERQAFCGLLRKVQSSLNDATAEERQPNEATQDLAKSDDWVRNIEDAAASDDPWQVMGDIHLLVNDMKETIQCRQNSEELDSVIQRIHRGHFFLKDTTTFIHEGDLTKKCRSRNQVYRFFLFNDQLLYADRSMTGSWSPHNSLRLKLTRISGLPDGVLAPRFAFQIQNPVKSFVVYADSASAKAEWMRLLDDAIAETSKKSNRNAQHMSTQAAMGDTWSGSIVAAASTATTAMKVLMRLGSPLTSPTVAEREPSNFSDENLPVTPTLEDRVQAANASTRVDVEGESPAAEMPPLAVLDDDHDVQTPSADGQDNEDKESLDRVDLDALQTSSSRSKAEEEGSNAEAAAMEDGNVVNEVTDTASDRASTKKIATASAKTQTRTDRLKRKKSSGTIKEEAFKTGKGYCSVVCRLETICSDPILCEEIRRSAHAMKQIQLEAWHLVNLHALRCLENGLPLPDFSDATFFDHCCAGVATTSKTSLIAQKDPDLWETIKIYQSKRERTGLIEVDHLTGYSELKVELRQQMVVNAGVMIREHFRQRLKLYVNTTFGSLGSSLTKKQKKEKADLVKAIMHACYSADETDVAEAEQMRDVLTPDGTEWSEQWIPWPNRIAKNGLAFYVRLLWEFQSVVEQRMAATPNEKGVRAFSLFPLSTTFSRAHIKINGASLAGFYKRIQQRVRDYHWDLTSVSLSVSSFSKNRWSVMRHAFDVAGFETRTPECPLSKPEFAQLPVEEKYEYASHLFANSVTTDGYSASVLLVRPQTAEERAAKNSSEARVVPPGYVPNVMIGLDPGMRAICTAVREDFRSEDQRNRCRRRSRRKRKKDRPLWIRAPKAPRHRNGRDIVSVTTREYRHLAGFSRFRAWNEGQKQRHPDYQAILHGMPSFKTASYETYLARLGYFWRHVQFLMQFCVDRPFLKWKFFRQRMARVAVDEIARRIVPTVSSQTCVAYGDWSRRNCIKGHAPSPVKGLKAALRKRATVVSMDEFRTSKLCSQCHQTLLSVRYSVDTRLPKRKKRKGVVLVRNRAEVEFKTKNCYAVLRCDHKQCEARYWDRDVNAAINMLELLKSEVLGLGRMEPFTK

SEQ ID NO: 2400 - protein, 648 aa, unidentified
  REGION 1..648: note = Table 20
MKQIQLEAWHLVNLHALRCLENGLPLPDFSDETFFDHCYSGVSTTRQTSLIAQKDPDLWETIKIYQSQRERTGLIEVDHLTGYSELKAELRAQMVVNAGVMIREHFRQRLKLYVGITFGDLGRSLTKKQKKKKADLVKAIMHACYSADETDVAEAEQMRDVLAPDGTEWSEQWIPWPNHIAKKGLAFYVRLLWEFQSVIEQRMAATPNEKGVRAFSLFPVSTTFSRAHIKINGATLAGFYRRIQQRVRDYHWDLTSVGLSVSSFSKNRWSVMRHAFDVAGFETRTPECPLSKPEFALLPVEEKYEYASHLFANSVTTDGYSASVLLFRPQTEEERAEKNSREARVVPPGYVPNVMIGLDPGMRAICTAVREDFRSDDQRHRRRRRSRRKRKKDRPRWIRTPKAPRHRNGRDIVSVTTREYRHLAGFTRFRAWNEGQRKRHPDYQAILHGMPSFKTASYAKYLVRLEYFWRHVQFLMQFCVDRPFLKWKFFRQRMARVAVDEIARRIVPTVSRQTCVAYGDWGRRKGIKGHAPSPVKGLKEALRKRATVVSMDEFRTSKLCSQCHQTLSSVRYSVDTRLPKRKKRKGVVLARNRAEVEFKNKKCYAVLRCDHKQCEARYWDRDVNAAINMLELLKSEVLGLGRMEPFTR

SEQ ID NO: 2401 - protein, 344 aa, unidentified
  REGION 1..344: note = Table 20
MRHTFDIARFETRLPECPLSKTEFTQLSIEEKYEHARHLFANQVTANGYGASVLLFRLKSKEEKSDKKSAEGPVVPPGYVPNVVIGLDPGMRAVSVRRVAYGDWSRRKGIKGHAPRPVKGLKEVLRKRATVVSMDEFRTSKLCSQCHQTLSKVRYSMDTKLPKRKKRKGVILVRNRAEVEFEEKKCHAVLRCDHDDCGARYWDRDVTQWHRRSPVRYCGAWKTPREWRRENVSWCIRRCVDGSISGSGSATGNTVGSPSVDGSISGPGSTTSNTVGSPSVDGSISGPGSATGNTVGSDMSGLANKTPAINTPTTRPTSSRAVDAPTLSTCTVITVLAMLVVAIL

SEQ ID NO: 2402 - protein, 542 aa, unidentified
  REGION 1..542: note = Table 20
MVVSAGVMIREHFYKRLRLYVNIAFGGTTTQDMTKQQKKERKERISSIMKACFSTDTTVDPGAQQMRTMLTPEDCAWGEQFFPYSNRIKENGLGFYVRLLYKFQQKVEEHMKELPNEKGVRSFSLLPVSRSYLGGHITINASTLSGFYSRIKRIEQYEWTGVSLSAPSFVLLPVEDKYRHASRLFANQVTTDGYSTSILFLRPKTEEELLMESRKYSKENIERPVVPPGRRSGIKGHAPSSVKGLRKALTKRAMVVSMDEYRTSMLCSQCHHTLSSVCYSVDTRLPTRKKRQGVVLVRNRAEVEFEKKKCHAVLRCDHKDCEARYWDRDVNAAINMLALLKSEVLGQSHHNSPSTTRVPKYPSTTMSAANKTVLITGATRGIGLTFAEYYVNAGWKVIGTARNLDKADKLKALAPFKIVQLETNDEGSIQRMTEKLDGVPIDVLINNAGILEEGEYETVTKDYYRASKSALNMSNSSLAVNLKSDNIIAIVLQPGYVTMELNNGNGVVEPVESVAGMTKVIASVTTDDTAKFFDFLGPELPW

SEQ ID NO: 2403 - protein, 352 aa, unidentified
  REGION 1..352: note = Table 20
MLNSVGVANTRCQLARRVAVAALVTSTRDLREEDAGHLFANEIKSDGYSASVFYYRPKHEELGGEDDSLVLEGYSPDIVIGLDPEMRSVRRPRRKNRKKGRSKRKLRRKRNFPKLIRRAKRARHGNNRDIVSVTTREYRHLAGFNRFRAWNESQKRKFPDYKSVIEGMPSFKTSSYEKYLKRLDYFWQYAAFLLRFCLERPKTDRTDCKQAHVRSLRGLEPTRWHKGSRSKSGQGVEGGAAEARDGGFHGRLQDKQALLAVPLVTFQRVESDSGLPQGRPEPKRRKMKGKVLPRDWSRAEIKSKHCHVVLRCENKDCEARYWDRDINAAINMLELLKSEVQGRGRMEPFRRG

SEQ ID NO: 2404 - protein, 385 aa, unidentified
  REGION 1..385: note = Table 20
MTGYSELKQAMREQLVVNAGVMIRKHFRKRLRAYMRDVLTPDGEEWSEKWIPWPDNIKKNGMEFYIRLIWNSRARGGSMEAVPNEKGPPSKSCDDCHATSICIDRFETRKRSSCSYQSKRSTNTPAILCQEIKLTGTAHQFSTTDKHEELGGEDDSLVPEGYSPDVVIGLDPGMRSLCTAAREYLRLQAPRQRSRRKVRRPRRKNRKKGRSKRNCGENAISQSGYAVQSVRAIATTENRSVTTASTGIWPGSTLPRLERESEEEVPGLQEVIEGMPSFKTSSYRRPEAADYFWQHAVPDSGLPQGRPETQEEEDEGKSPPSRLVAAEIKSKHCHVVLRCENENCEARYWDRDVNAAINMLELLKSEVQGRGRRGQSGGLMQSTAE

SEQ ID NO: 2405 - protein, 548 aa, unidentified
  REGION 1..548: note = Table 20
MLEEGSEERAPAAAVKRLVRACYRAEGGDFAEDELLLREWLGFIPYEDFIRKNVELAVSKLYEISQKVEASQQKDPAKKGIRTFSLLPYSKSYAAAHIVINGTTLHGFCARIFKVTGGHNPLNIPLTGPGGVLIYKEAFGKQKELFLRRGFEISEFETMAPNAAITKQAFDAMDHDVKARFASRVFANQITTNGYSASVLLTRPNTTLELEIAEITNERKRKRLKGERTNETIDVEWYALPDDYETDMMVAIDPGMRTLCTAVSKGGISPLTRESANKKNKLSRVRRKRRKKGAQARLTKKHRRQLRKRRKISRRIVRYPREVDDQLIHSISTREYRHLAGMNKHRYWNENLRKCKHEYSEAISRIPSYKTASFDKYFARLHIFWKCVSFLIKFCAENAFLKWRFFVSRMKTKTLDALVKRLVPVASPRVLVGYGDWSRRDKITGHAPGPVKGFKRALKKRATVVPVDEFRTSKLCSCCHEFLEKALLPVKTEDGEFVLEETRNVLRCSSSACKATFWNRDVNAARNIFALLKSKLLGLSRPKAFRRA

SEQ ID NO: 2406 - protein, 770 aa, unidentified
  REGION 1..770: note = Table 20
MSPKRKITDEEKTFLKNRVQRSVICKLSRICKHEPIVGEIQRSAHELKQCQLEAWHLVNVHVLRCLKENLPLPSFDKTFFNRCCAGVMKEAEDEDHKMREPKKVMKSRKRQKAKVTQSAPDSGEDEVEDDRDDTQRKKTKAQSKDEELNKTLRMFWEKRAHNPAYEPPSLEFSSAIRGEIARTLMENSHNMIALQFRRRLHQYIRFRYAEEGELQLDAKTTRRLVESCYRVKEIPAQAKVPENAAEAKPMSVKPTKISKLKKPKKPKMIKLWDEWDNTDDPVECELRGWLVKVPWDWNIRNNLEHFVHKLYDMLTWMEKFAKEHPKTKGTRLYSLLPYSTSYSGCYITINGSTLHGICARIFKRTGWKLDSIPLAPRGGLVCTSFFQENRSMLLREIVNVAQFETRVSDCPVSRAEFDTMDHKTKKTYASRYFADQVSTNGYGASILLTHPKDVNELTEETNDKVLTDSRDPFEKARRRLPSDYSPDVMIGIDPGMRTLCTAVSVGCLPRRRSRSKRQKQHQRRKRKQLNQKYRRGQEIIEISTGEYRHMSKMNHFRAWNERLKKREPWYASVIHAMPSFKSASYYQYMNSLLFFWKHLRFLLALHTENPFLKWRFTRDRLKTKALDALAKRVVPIPSPQVCFGYGDWSRRDGIKGHATGPVKGFVEALKKRATVLPMDEFRTSKLCSCCHKRLKQTPLFTKVRQIKDEEKEKVDYKIVITNNRNVLRCVNSRCEAHFWNRDVNAARNMLELMKVYFLNLGRMTAFMRGA

SEQ ID NO: 2407 - protein, 705 aa, unidentified
  REGION 1..705: note = Table 20
MSGKRRKTKEEKELSKKREFTSVVCKLSRICKDSDLLAQIKSSCAVLKQVQVEGWHVANLHLLRCLNENVELPILDGTFFRRCCAGVLAQAEAWAQQRAANNATQSTRPRKRATTASTPAIASNDRVLDGREDSERKGTRGQPEDLHLSATLRIYRAERAEIPGYQPPSLENSGSSIGELGMQMFANARNMIVLQFRRRLHQYVRFRYAKEGEMQLPLKATKQLVSSCFSASVEDDVVVWDTTDVQEEMELREWLGMVPWEPVIATNLVHFLRKLYDMQTWIENYAQRHPNTKGLRVYSLIPHSTSFEAGYIKINASTLYGIHRRILRETGKKLLLVSPEERGRLALRDYVTQHRDSMLRRCFHISQFETGPRRFAFEVKTNGYGASILLTRPILVASTTTSFGKPKPTPPNGELDELTKGVASLPDGYSPAVLIGIDPGVRNLCTAVSVGRLPKRRRRRRRWLTTRGRRKRKKKNRRYQQGQTIHEIHTKEYRHLAGAKSFVFWVENLKKREPWYAGVIRAMPSFKTANFDLYRERLKFLWLHLGFLVAFSAEKSFLKWRFLRSRKRMAALDALARRIVPKASPLVCIAYGDWSNQDRIKGHPTSPVKGFKEALKRRATVLTVDEYRTSQLCSLCHRRLEWARLRYPNKKGEVVLKANRNVLRCAHSECKANFWSRDVNAARNILSILVSTLSGLGRPTAFERE

SEQ ID NO: 2408 - protein, 609 aa, unidentified
  REGION 1..609: note = Table 20
MMAINTANMIALHFRRRLHQFVRFRYAPIGKQQLSSAKTRKLVASCYRVKNIPTQDSNDAPTIDSDASEWTTWVDTNDPTELELRKWLGMIPWEYVIRNNLGHFVSKLMDMLAWMETFAEAHPKLKGTQLYSLLPLGNSYAVDYIKLNESTLFDVFNRIYDGVGIKDFVERELKMVRAAEWKRRPPAQQKELKPFNVDSFRSDNDTIQRKVFDVLWLETTSRKFAHEVKTNGYAASVLLKRPSLPKKKKRTQKQKRRKTKKRKTNTGNAVECSQVADTEEELDDFTIARQQLPADYTPDVLIGIDPGMRTLCTAVSVGQLKGRRHRRRKWLQWRGRRKRRRRNRRYQKGQKIMEISTREYRHLARMSQSWSWLENLKKREPWYRAVIQEMPSFKTANFKLYLAHLNYVWRHLRFLLAFCAESSFLKHRFLKDRMKMKAIDTLAKRVVPVASSQVCIAYGDWSKRDGIKGHPSGPVKGFVKALKKRATVLPMDEFRTSKLCSSCHHCLKQARLFNKVKKMNDVLPANKRKLSKKELKEIDEANKFKKPELQMYKIVLKPTRNVLRCRNSDCKANVWGRDVNAARNILGLLWSKLFMGGRGMEAFRRGNQL

SEQ ID NO: 2409 - protein, 1529 aa, unidentified
  REGION 1..1529: note = Table 20
MVNEMAKLMEINALNMIALHFRRRLHQYIRFRYAKKGDTELKYRETRRLVNSCYRVRSAPEKDDDDIPTDKTVKWQIRANCAHFLHKLYDMLAWMEKVVDKHPKTKGARLYSLLPVATTFQAAYVKLNASTLHGLLARLIDLPKVENFLKKELNIVLARKRTGSQLPFDKKTFQKNRSEVIRKVFDVEQFETRNRKFVDEIKTNGYGASITMIRPVTTTSVVVVEKKVSKKKRKKNDDTAELVSKEKKMRKKKVKTPEEIAEENMFAKELFKLGPDYSPDVLTGIDPGMRSLVTAMSDRAKMKALDMLAKRLVPEASKQVCIAYGDWSRRTGIKGHASGTVKGFVEALKRRATVIPMDEYWRSITCCCCHQRLKQARLFTKMKRKEDEVGIRQKERLSMKEVKEIVEMARFRNPKQADKKVVLKCTRNVLRCTNSGCKANFWNRDVNAARNMLELLKSGLKGKHGARRLRAFRREEDLTQQLQDQSQDVEAPVNDQLSAQVQQSVALISSNVVGQHTLFDSPFGARALCYADFTASSKPLQCIEDYLVKEVMPLYGNTHTTTSITGLQTTCFRHEARQIVAQAVNAKITGRGAEDCVLFTGQGSTSAVNKLVSALGLQQFSNSSSNDSSSQRPVVFVGPFEHHSNLLPWRETAAEIVSIPENEQGLMDLETLKTQLELYADRPLKIGAFSAASNLTGVLTDVDAVSALLHQHGALACWDYATCAPYVNIDMNPVVTDEKRRPFVYKDAVFMSGHKFIGGPGSPGVLIVKKRLLTNAVPTVPGGGTVFFVTENDHRYLSNRAEREEGGTPDILGSVRLGLAFELKQRVGAKNIMTLERRNVQRVRESLRQNDHIVLLGRQSDEVEQIPVFSFLVRFGDRFLHYNFVCALLNDLFGIQTRGGCQCAGPYATRLLGLARQDVLALEGALIEKKEMLRPGFTRMSFPYFMSSAEVEHILAAVHFVANDGWKFLPQYKFNHKSGVWKHSTRFTKFPDRKWLSHFATSLEEKSRSQSLSGDEKMLAAHRAENLAEAQRLAAQVSGKNASSQVVAASASQMLEEADDEALRWFVYPSEATEAIKRGEKPVLTETIRGPYQPARYLTGEIRDQWKDVSTTVTASSVCGLATCCPVPANPSTSNNSNNHSKTFSTAAGSDRETGGKYPLRSTSNGLDVVDTPVVAKTNTDCSTANCSTGRCPVRTPPACSLGVTATTVQETTTAMAQKTAATKLFPTPPKKLMRWVGQAMMQWDMIQDGDRLLLGVSGGKDSLSLLHVLLHFQKRAPVRFELACATVDPQTASFDPSPLKEYMRALGVPYFYLSENIIERATCEMSGDSLCSYCSRMKRGLLYTCCRKEGYNKLVLAQHLDDLAESFFMSAMHNGQLRTMKAKYWNNQRDVEVLRPLAYVREVELKKFAYDSRLPVINENCPACFEEPKERHRVKKMLAQEESLYPDMYNSIRRALLPLMDDASYAPLEAVRTRIEQAKQQRRCVPSNKGKGQNKSAKANSTASSTSSSTEEEGGVIVNGEAVVTATS

SEQ ID NO: 2410 - protein, 612 aa, unidentified
  REGION 1..612: note = Table 20
MKQVQLEGWHLTNLHVLRCLKEGDEVPELEQMFFYRCCTATLGNIEKHDRGSTESKYPAFHKTCLRYWVDRERESAYDPEFIQNAGDMVNEMAKLMEISALNMIALHFCRRLHYCYHVRPAPEKDDGGIPTGKTVKWQIRANYVHFLHKLYDMLAWMEKVVDKHPKTKGVRLYSLLPVATTFQAAYVKLNASTLHGLLARFIDLPEVENFLKKELNIVLAKKRTGSPLPFNKKTFQRNLSEVIRKVFDVEQFETRNRKFADEIKTNGYGASITMIRPVTTTSVVVVEKKASKKKRKKNDGTAELVSKEKKMRKKKVKTPEEIAEEDTFAKELFKLEPDYSPDVLIGIDPGMRSLVTAVHLAQMNDFRYYNENLKRREPWYAGVICAMPSFKTSSYDLYFQRLQFFWKHLRFLLAFSAEQAFLRWRFTQDRAKMKALDALAKRLVPKASKQVCIAYGDWSRRTGIKGHASGPVKGFVEALKRRATAIPMDEYRTSIACSCCHQRLKQTRLFTKMKRKEDEVGIRQKERLSMKEVKKIVEMARFRNPKLADKKVVLKCTRNALRCTNSGCKANFWNRDVNAARNMLELLKSGLKGKHGARRLRAFRRASHIHIF

SEQ ID NO: 2411 - protein, 593 aa, unidentified
  REGION 1..593: note = Table 20
FVAPDERLPFAILRDGPQAQEGDTNKHPVHVPVCKVKQVCGLYFLREELKRTTIVLSQVGLLGRKSAGMHFLRCLEQREQIPDLSQMFLYRCGTASFRFTGERDRHMANPRYPGLHKTFLMYLGPQEQISSHVSPTLAYWSAIINEMTSVMAINTASMLALHFRRRLHHYGRSRYAKKRVKFNPATRKSRSLLIAAILAKNSNILTQMETKLLQQKCGIHGPNRGLQKSVSYVNDSVWCTIRLRHALVDGWARREAPKNKRCSSVFDTITSGLFRTISSYTERVDFVKALFGRIYNDPVAKVFGSGYLGLECRSVTARSAWPLKNETVLRTIFNVNALKTKTRQLVTDIVEKGAFDLALDKLPSGYTPDILFGIDPGVRALATAPYAGNNSRRQRRRHHSRRRSAAEYYHWAKFETKRVWYLNLRKGEPTYDMKLKEMPSFKIAQLTTYVDRLRYFVEHVGGLVSFLAEKSFRKWRFQAKGSKMRAMTTIVRRLFPVRSAHVCIAFGWSSWKLKSYRKRELERWATVLPVDGFRTSKMGSCCHERLHPARLLMKKRKNSRCKAHVWNWDVNIYWMKLLKYMRLGLGRLAAFEP

SEQ ID NO: 2412 - protein, 1054 aa, unidentified
  REGION 1..1054: note = Table 20
MERAACRPPGRLRDWKRRYACSTVRCKLGRVCPHPELINEIQICARLILKSTTEAWALANFHVLRQCEERGDIPDLTSSTFSPGAVESSAGAFAEETTFPDDVTKIDVLHGEAGGLMSVNATNMVVTQFRKHFTLFVRLWYGISAKETRKVVRACYSSDASERREVLEMKAWLGSAAWGEDGELEQVFPRKTVIKKHVGYFVRKLYEIMVFVEQNQIEQRRQQETIQEMEEEKRTKKGKGAKKPKEKRSKTIKMFSLLPLSQSFALYNIKIDPSTLAHLCSRIYKRTGENVLGVELTPNNRIPTRPYFTQRGSELMRRAFNITQFETRRTKIGKARFNGLSVDEKARHAARFFGDSIRSDGYAASVLMVQLTRLARSVGRREENEEDEELGDADEFDDDPDSESLVTETNGEEITEDEPELEPEEDTTHEQDPSIASEVSDSAPYPAPEPALRGIRARGFVGVDPGKKAPCTAAIIGKLCSKKKKPPPPPPPSPKPPRWHRNKRCPVEDRVSSTGPPRTPVRRRREPKLPKVQHEQRILQIKAGEYQHMSGSKKFNKWHEKLRLRFPEYQIAISSLPCLKTADARVFLVRMEQVWLSLDYFLDFGIAHNFRKWRFFSHVKHRIAVDDVAKWLIPEAGAHKAMRKRATVVKVHEFRTSKLCSACYQPMKMAVFLDPNDPGPDELDADERPLYYDRSVLRCANKNCKKNFLNRDVNAAVNMQTLLMARLQGLPRPAEFAAGQEDESVIAREEADPRCIPHCGSLSRMVVRLRDDIERLDSTYEWLAAQVGALENKWAQLDAQLEASTPRSYYDRVLQELSCSGDVSLLLEALSSGPELSGASESPREHGMGEASTGRFMTLQERAEHEQAVTPLTGTIDQSGATNGSVLEAWLAMERKYRSRQGVVDQVQKLESDVAQKEFLLAAVAPERLLSRVKQTLSWVGDIGLLREALDPSAVSASKAGLRQLVLLEVGSPPRDADSSMATLEERVAKMEPAPVEKLPASRPRVVGRKRSGARAVSEGDLGLAHSEAKRPAIRSTTSRPITRSMGDRELWHG

SEQ ID NO: 2413 - protein, 588 aa, unidentified
  REGION 1..588: note = Table 20
MPKRPESGLWEHHPHLCLPLARRLLAERERRQPAAPAPAQTSGDAPPGQAGEEATQHDANHPDRRGLGKQRRAALAKRKEAAANAAGRPAQSPQKPPPPRHIGRLFSLLPCRQGFEAVHITGTLTTLWALLRRHEKFDRGGVARMTGLQLPTEKEWRMYTVPEALQFLNLEEVHGIPARKKQAIEACLRRKAEEYQVDAEGKRGRKKTGETDEKKTDWFVHVGWAFFALLFNFRRFEGCGWYSAGHWRTNGYSVTVTLRRQRGPPRPGDPPPRPPDAPKTSGKRTRGGAPLGAPNSRGIADEYYRRDPLPEDAKVHLYVGIDPGRTKMFTAVDEHANVTSCSSKEFHAMSGSKRREKTIAKWHAKAPPYVKKLHQCPTYKTASTEVLLSRVGLAWHRDGKPFRKLRHQAYVGRQRAITRLAEQFRAPPGMTTIVGVGNWSAQDRGGIMRGTPPGPWIRFLRRLRRVCRVVVVDEHRSSKLCCACHATLHAHQYVREKLVDVWDTKRCGNKACKVNVVNRDVNGAANILMLTKCFFAGALRPTAFGGPPASSSPALPPPPPPLVCRSRQPTAPVRSRVREAAVQPAQAR

SEQ ID NO: 2414 - protein, 1377 aa, unidentified
  REGION 391..689: note = misc_feature - Xaa can be any naturally occurring amino acid
  REGION 1..1377: note = Table 20
MDVDVVAADDAPSTSRPLASAGQDSQTPPVPLGVVNKLDDAEKREQQWQNDATVNEWRKAPGEAGTLGRFRKQQQPVLDALRPTVDDVVAVISELRTVGDLFANFHAIRMVEEFERRKQADRADADAALQPLDEIFFARCMTLIWRPRKAASTNAGAGARAAFTPLAESVALFRETLERTGVTLQPPDLEHIRPFIDEAAGDLATATSTYYKRELLRHLQQNAKLELGAKGNWPRHCARAVLSVSFATPLAPTEDSDAAPALPPAAPAVGADAAAVPVPDAAPDQTPPALDPGVSTAAPRAPAAAPDQTPPAPAASNVAAPPSAPAAAPDQPPPAPAASNVAAPPPAPAAVPDQPPPVPTTGSDAAPPPPSGRAAAWWHVPFTQEQVDWIXXXXXXXXXXXXXXXXXXXXXXXXXXXXXXXXXXXXXXXXXXXXXXXXXXXXXXXXXXXXXXXXXXXXXXXXXXXXXXXXXXXXXXXXXXXXXXXXXXXXXXXXXXXXXXXXXXXXXXXXXXXXXXXXXXXXXXXXXXXXXXXXXXXXXXXXXXXXXXXXXXXXXXXXXXXXXXXXXXXXXXXXXXXXXXXXXXXXXXXXXXXXXXXXXXXXXXXXXXXXXXXXXXXXXXXXXXXXXXXXXXXXXXXXXXXXXXXXXXXXXXXXXXXXXXXXXXXXXXXXXXXXXXXXXXXXXXXXXXXPPAPGPGVSAAPAPAAAPNQPPSVLGPTVSAAPSPAATPIQPTPVLGPGVSAAPSPAPAAAPDQPPPASVTDSGAAPPPPSGRAAAWWHVPFTQEQVDWIVELRRRMPKRPKWGLWEHHPHLCLPLARRLLAERERRQPAAPAPAQTPGDAPQGQAGEEATQHDANCPDVSELKRKVEERAKQHAANKGAGIPSKRRGLGKQRRAALAKRKEAAANAAGGPAKGPQQPVQERHIGRLFSLLPCRQSFEAVHITGTLTTLGALLRRHEKRNKGGVARMTRLQLSTEKEWRMYTVPEALKFLNLEEVHGIPARKKQAIEACLRRKAEEYQVDAEGKRGKKKTGETGEKKTDWFVHVGWAFFALLFNFRRFEGCGWRDPPPEDARIDKYVGIDPGRTKMFTAVDEHANVTSCSSKEFHSMSGSKRRERAIAKWHGNAPPYVKKLYQCPTYKTASTEVLLPRVAWIVPTLRQGLAWHRDEKPFRKLRHQAYVGRERAINRLAEQFRAPPGMTTIVGVGNWSAQDRGGIMRGAPPGPWIRFLRRLRLVCRVVVIDEHRTSKLCCACHTTLHAHQYVRVRNGVEKLVDVWDTKRCGNKACRVHAVNRDVNGAANMLMLVKCFLANALRPTAFGGTPASPSPALPPPPPPSWFADRGNQLRQSDPTCGKQLCNRRKPGSGISSARSKHTPHPLVV

SEQ ID NO: 2415 - protein, 557 aa, unidentified
  REGION 1..557: note = Table 20
MPSNKGKVIPVADLAEASLVPGVVQRHEAWRRQAAISLAQSSFVVGSVYLKSVITDLEEVHGGSSHPGFNPVVFAFAREATAAPILLGLARYKGTLVPARRDLPLVVLLGVCLFASQLLYMLGIDLSGVVVATCIQPAIPVFTALLGIALRQEAANPRKLAGIGLSVLGATAMVFGTLVPARRDLPLVVLLGVCLFASQLLYMLGIDLSGVVVATCIQPAIPVFTALLGIALRQEAANPRKLAGIWLSVLGATAMAYVGRERAINRLAEQFRAPPGMTTIVGVGNWSAQDQGGIMRGPPPGPWIRFLRRLRLVCRVVVIDEHRTSKLCCACHTTLHAHQYVRVRNGEEKLVDVWDTKRCGNKACRVHAVNRDVNGAANMLMLCKLFLEQATCCAETGLTLNSAWASIAVYCTAPTIIPASCIRVEGPSNVTVVDTNVPSPALGRTFRFVAGWTPDEGYVGWLTVGLETECALAVPRCSVGRRNYDAVLRPVADLEAQVEEAGQEEACPWRPSGLAWLDARSGECGMLEPGLLPQSLFTGINYLTPKGVQASCNATFF

SEQ ID NO: 2416 - protein, 936 aa, unidentified
  REGION 1..936: note = Table 20
MSGAKRREGVIAKWHADAPPLVKKLHQCPTYKTASTEVLLSRVAWIVPTLRRALAWHMHEKPFRRVRHRAYVSRERAITQLAEQLRAPRGMTTVVGVGNWSAQDRGGIMRGTPPGPWIRFLRRLRRVCRVVVVDEHRSSKLCCACHATLHAHQYVRVRNDEEKLVDVWDTKRCPTYKTASTEVLLSRVAKIVPDLREGLAWHRDKKPFRKLRHQAYVGRERAINRLAEQLRAPRGMTTVVGVGNWSAQDRGGIMRGTPPGPWIRFLRRLRRVCRVVVVDEHRSSKLCCACHATLHAHQYVRVRNDEEKLVDVWDTKRCTEQRLQSQRQDKSIVYRLFTAPSCAIDSTCAPEFDFLQHAVVQITNPMTSNFCTGTLLKGPGDKIYVLSAYHCLAFMGKRFMYPWSTFSIIFDYKLPCNASYVEDVPRTFDRYLTGLAVVFQDVYSDVGVFELLQDIPPEWGVVLAGWEAANLGSNFTYTCISQPAGDVQKIAYGKVYNQIPSVILDAVNEEVDVYNVSCSTHACNFYATHVQHGSMTHGSSGAGMFADELGKIMGVLSTGRGSVCPGTVNKDDPRPSRVVFGSLGGAWEHGLHRIFNRSVEDEGGAEFEEYTRALPTITVGNIVPEVNPRKGSTSFSIALQQEPDKDTTISLTPTQTDLVSVTPQTLTFTRSNWRTPQFVSVTAGRAHPEATLQFDVALTWPVVSEAGGWSSRTKTISGVVWAERKGNSFFNPQEVRVPFRHVMDLERYNPQIPLITEHNGPFIPAKYFVYTAQKTEVTRKGWAYYFVAHPRTQVTIPGQSKSLNGKASMTIASMPLAEAVTESLNPTRLRIPAVPSHAVLPITIAPVLAWLDLEEDHTLNITTCSNKTDVGAEITVMDDQLEVIRTTGLARDNACVSIPSVVVEGGRRYFISITPVQYQFSLGKKTHQVDIHILDA

SEQ ID NO: 2417 - protein, 612 aa, unidentified
  REGION 1..612: note = Table 20
MAMKRPRLDAEDDPGPNSQVKKIEDISSELSHLTTETKRRRQDVAARRAANADKDVSVIKISLKSFCTEQSKTLPWEEVLKDMNKMVLEAYVLANTHIVRLCHLRLPVEPLTQNFFHQCLSTVSSGRPLGNEHFRASVKLYNSWRAAGAPRASNRHIARGWQHNAALQMKTNSENAVKLNFYRRLHKQIKRSYYIDGSEAYLMLKSILNPVYDGDDVEILAWRARIPRKNNGYLDDKPHLLLPLTFMFRSDIEEWNHRNRETQGYEEIRHFSLLPTKKGFECSHFTMCNLGLRALLKRAGIAVPNEDVWIAEADSWWRKLFKIEKFETVNRKFSGVIETDGKAVSIVLRKPKREIVETALDEKDYDVLWGLDPGRRDLFVATNQFGEKIFCTTREFYEDAHYKKSNQKTKVWQENCPDVLEAVRNMPTKKTASLEQLEAYVKFMTPRMDLLLDFRMHKPFRKLRFRRYILAKKKLRQLCQRLTAQAGRRTIVGFGDWSNTDVSGLIKKCPVNSFRRELKKHCRVESIAEFRTSKLHSVCHREMTNQYSKRLCKKDGVERTLKVHSVLHCTNNGCHGMTVNRDENASKNMLMLLIECKLRSQPRPLAFSRPRT

SEQ ID NO: 2418 - protein, 1006 aa, unidentified
  REGION 1..1006: note = Table 20
MEMSGARGPKNDELLLSRDEYNSFRDPTAPRSSRQFIHRGWVHNAADQMATMAQNAVSLNFYHRFHKFLKRKYGVDGRDAYSLLEHILANAYDGHDAVVLEWRAQIPRTATGAPKMTAHMLVPLTYRFLQAIEERNRISQGDPEFRQVKSFTVLPTKRGFEWSHMKMCKLGLRALLQRTGSNPLSVDNVPEDLRFYLDVSFSDGLVSYQCRKCSRQPKQVWKTGFSNLRKHLASCVGSDYVAKFEESVREQPNPLGFVRERFVSSKELTVFRWLEWVIMRDMPLSEVDNPVTRGISNLDNFCSNSLALYITRLVVRVEALVRGMLPEHFGIMVDGWTDVSTHYIGIIATFMEGGQYREVLLGCSPPLDEKQYTAAEHYELLEYVLSLYGRSISSPSVLIGDSCSTNKALADMMGIPIIGCGCHKLNLAVKSFLERRPAVQTAITNVDKVVTQLRNLKAAGALRELTPLCPIKRNVTRWSSTHKMLERFLKIEGEAKQLDEVDTIRRADAERIRSIMPTLDDFKSVMTDLQKQGQHIGEVQGIFTGMIEDYPELNDYIAADANISHSPLFESAVVKILDGKKETLTDAERALVARFVVRPVTARESTATVGNKRSYAFRLRERKRQRLEQTEEYVDLRFISGTSASAERLFSSAKHVLRSTRKRLTPVNFEKILFLKHNRFLWNADLVSQAMKGVKGPKWNAVERIYWRRLFNIKNFETANRKFAGQIVTDGKAVSIVMRKPKREPDIEQMRVFSASEFDVMWGLDPGRRDLFVATNQLGETVSCSTKEFYEEARYTKAKQKIKGWQDQSPRVLEAIRNMPTKKSASLETLRYYIRFMTKRMDLLLGFARHKPFRRLRLRSFIFMKRKLRQLCLMLAREGERAVVGFGDWSNQDVAGIIKKSPAGPVKRFERELARYCTEISIAEFRTSKVHFDCECELKNQYSQRLCWDGEIRTQKVHSVLHCSSNGCRGITVNRDANASRNMLRLLQCKLNGIDRPVAYTRQART

SEQ ID NO: 2419 - protein, 648 aa, unidentified
  REGION 1..648: note = Table 20
MAPKRKPPDLEEECYAFMQKMFYRRERPDVKVRKALAKDTVVSCVKTTMNSFCKDEAKTLAWDGILRDMNKTVAEAYLLANLHVLRLCEAGLPMPKFDQDFCYNCLSAVSVTGRKKSNIKDVHLRESAELYYTWRPENYKPPSSAYLSSGWHQSTSLQMVTNIHNNVSTNFWRRFRRYLKHKHSLEGKDAYELMMNISSSEYDGTDTRVLEYKAWFPTRNIGPIQDHPQQAIPILYRILCYFESQHPIQEYTKEAKHLRLFSLLPFKRGFECSHFKMCNNGLYGLLKRSGVEDLPSNDKAWRAVADTWWRKLFNIDQFETENRKFAGEVMINGKAVSIVLRRPKHPQSDSAPAIDLPSFDTIWGLDPGRRDLFHAANVRDEFQSCSTREFYEDAHYKKSNQKIKGWYDRSPDILEGIRNMPCKKTASLVQLKVYADFLLPRLDRLLAYHMERPFRKLKLKRYIMAQKKMRELVRRFAGDDKKRVLVGFGDWSNLDNGGLIKKCPPGPVKRFKRELSRVCTVVEVDEFRSSKLHWDCHQTLVNQQSHRRCKDGVERKLKVHSVLHCRHNGCNGMTVNRDRNAARNILRLLVESCRGRERHVCFQRGHDLTAITNCSWLPRKGLAKGSLGAVGRSGIITLGSSQVTASLQ

SEQ ID NO: 2420 - protein, 873 aa, unidentified
  REGION 1..873: note = Table 20
MEDEVAPEADDKHLKDMIVPEYDNESENVIRNTDFKRSSRIFTSLEFARKVFRNWIIRSSIDVFIECTKKAKQLRLFSLVPLKRGFECSHLKICNNGLHGLLKRGGLQVPPSDSRWREEADSWWRKLFRIDRFGTSNRKFAGEILADGKAVSVVMRKPKKTVASRRIDLSDCSQVWGLDPGRKDMFVASNESGPKVPCSTREFYEDARYTESLKKIKRWQDSHPDILEAIRNMPTKKTASVKKLKQHVDFLLPRLDLLLDFHIRKDLHGLIFKQHVFAQKKLQLLCRKLTDGTRGRTLVGFGDWSNRDQVGFIKKSPAGPVEHFESQLERYCSAIAVDEYRTSKLHSECHGELKDQYPKKPCRDREVRVMKVPSVLHCTHNGCRDVTVNRDANASRNILLKCEISGVSLPVAFRRSRQCADVPTGGIYIARLLEHYLRHPTCMAPCFGKRSTLVSTSAASLLTKKSEMDATEQDASAAPRALTAAEKRAARRARVLQGGENRLKLVTGQISTLKEGSSAESAFNKEMDDALNELLGATDDSNTKSTSASVREEQSKTGAGGGATGGAAADPRFALRPDPAQRRRDAALRRQKKEAVVQELLAPLTATTQSRAEVTNTTVLSPAVAAKETTNVVPKSTTAKAPATFSRHAFALRLHSLEEKAITLVIFAAAVYLGFNYAFWLAAAMTIDLQSISTDLDAKDQILLSYQELLAQGLPLDSIRQQMEREHLEGPVVERIERLLSAQFSEAQPNVSFTNKFLPNVWDLPEYFSSLVCRPPVIVCVLLVRLLLTLVANGVHLAFQLPDVKNPQEDDLGFIVNLALSSKPALKDSHRSFVVTGIGYLIKFRKSFDDVFFFLYVLLLAVALRAIWAASFA

SEQ ID NO: 2421 - protein, 633 aa, unidentified
  REGION 1..633: note = Table 20
MRRPKKPPKDPQLRLQEQCLVYAKNKLFKEKVVREKAVRQDVKERALTNTNSTFTVVKTTWRALGRRAVRLLDLETALSEVNKTIAEAYLLANVHVVRLCTAGIPLCKLDQSFFHQCLSAVSVSKRRKPEAKDFELRMSVRLYRSWRPEGYVPPVSTHLATGFQQQASQQMATNMRNSTVANFYRRFKRYLKVRYSLDGKQAYEALQSIRAVEYEDEDPLVKRYRDLLPPKPEKGRLEDNPELVMPLQHLFLRTFEAAQSDQQTDRPPRLFSLVPTKQGFECSHIKICANGLYSLLKRNGIKHLPKDADTFRPVADAYWRRFFHISKFETANRIFAGEILTDGKGVSIVLRRPKAEACTSGAAIDPNAFGEVWGLDPGRREMFVASNDAQKVQRVTTRQFYHDAKYRESNAKIKGWQDRAPDILQAIRNMPSKKHSHLQGLQAYVGYLLPKLDTLMRWHMRKGFRDLKFKRYVFAKKALAAICLDLTREAGQNTLVGFGDWSNQDSVGIIKKSPAGPVKRLENVLRRHCRVVSVDEHLTSKLHSCCHHRMKQMYQKRMCRDGVMRSVKVHSVLHCDNNGCHGMTVNRDVNASRNILHILRATAGGGPRPETFHRSRTKYSEAPATSGLPLNGQ

SEQ ID NO: 2422 - protein, 562 aa, unidentified
  REGION 1..562: note = Table 20
MNKATTEAYLLANLHVLRLCVEGIPSHLEFPTVNQLFFDRCLSAVSKGCRERKVCEDAQLQQSIDLYKSWRPIEYEPADTSYLSSGWMSATAKMMAVNTNNALRQNFIPRFQRYLRLEYRWTKTEARDVVNRIIADTYDGSGGSNVILEYREEIPRPFSLTLEKPHLLIPLMFTFLKSFEAHHPVDVTNENADPEIVKLLRLYTLLPHKSGFGLSYYKINSTGLRGLLLRAKDPNRTADGVPSQPVWGADDGRVANEHWRQLFNFSAFETENRKFAGEISTDDKGVSILMKRNAVPSGLTSHQHASPSVGSRDSADEERWGLDPGRKDLFVATNQSGERARCSSKQFYEDARYTESNKKMKVWLEKSHRVHDMIRNMPSMKTIQLHAVGSYVKFLIPRLDCLFGFYSAMRFRNLRFKRHVFRAKKLHGICSQLTAVSKANIIVGFGDWSNNDAEGLIKRSPSGPVQGLKRQLRRYCRVVDIDEYLTSQIHSNPFCHQRLTNQVSLMRLKDGSVRNKRVYSVLHCKFSGCGMTVNRNANASENMLLLLEAQLESRGRPAVFSR

SEQ ID NO: 2423 - protein, 366 aa, unidentified
  REGION 1..366: note = Table 20
MLIRSGYDVPREGSDWNAVADSMWRRLFNTNLVETSKPDGSPSRFFAGEITTDGKSVSILVKKPVQGRQELQMSPETAAFFSTRWGLDPGRRDMFVATNNHGETIRCSSKEFYRDASYTQSNKTTRHWYDYADAEVSETIRLVPTKKTCSLERLEAYVRYVVLAFTMRKKFRDLRFRRYCQSRKKLHELCTRFVAGRDPTRTIVGFGDWSCSDFGGVIKKSPGGPTKRFMRELSKYCRVELESEYRTSKVHHGCRQAHPGDLVNQYQRQECRDGVVRNRKIHSVLHCLRNNGGCGITVNRDVNASRNILRAFELRLSGQARPPELSRSSQQRSTCAAVLDRRWNPRTDEVSSIDINITSGKSKYIL

SEQ ID NO: 2424 - protein, 578 aa, unidentified
  REGION 1..578: note = Table 20
MTMNHAAAEGWLLANFVVMHTIENPTGGGVLPPMDDKFFRRCMATVSKKSRPKKTFKAVFQKSKEKKVQPDLALEEWKWVDFERAADEYLMHRGGARPPDCKYICLGWFEQAATQIAKNTETSMWKNLARRLRQYVRVNCRTKKRQKKPAPTECQSCDAVNDIVGALREDIPRNQNQKVDWKSTDVLRLFHKYLKAVEEFNETNKDNPKIRQERVYSIIPTKQGFRSSYFSMTSTGLWDLLRRSRDRLDLDTIVYTEGGGSISLGDSIKKENWSGIENYDEIKGADPGFTDMFVACTYNVRSQTFSDDFLSYPAKKFYSDSGYSSSNRKIRLKIGHNTEIKKVFKDIPTKKTASLTKLMEYLDYTVAKMERLFSFFMTKTFRDMRFRRQMLAEKNLRAICRELAGKPDTRTLIAFGNWELNNSSGIIKKKTPGPVMKLQRMLMGYRGVDVMIVDEYLTSKMHHRCYSLAPMENQQVKHRCRDKVVRTVGVRKVYHCLKRNGGCGATVERDVNASKNMVEMALTQMREGEGVRSERLHGQIDLRITDLNNDYPKASSTDGDFLAADGYIRMAALRSSTN

SEQ ID NO: 2425 - protein, 598 aa, unidentified
  REGION 1..598: note = Table 20
MRGRKRFPPDKPVYEDEIVAETPPSPTYSQPPKRFKRQDVADRIDKNTTADFFVMKKTLKSFCKPEAERLVWDECIQEVNHAIAEAYLLANYYTLSQLKAGRPLYKIDTPFYQLCLSLVTSVPRRAKYEKFLATQATKDRRKLWIDSGKVGKLKDFPATVPEFSKTGYQEWLKTQKVKNADLENANDEFGKMRGDRAQTKTEHLNQGCVVRNFAKRLLTYVIKHYGLKRAAAHEVLNKTFDTEEFNSTYVRVVEPVITELRKKIPRTKDDAENMGKPDFVEKPTFSLLPTKRGFEASYCKVDSTGLKSLLKRSPKLAVWWRRLFRVDEMEKPGARSFHREITTDGYGTEKTKDKNVSEVLGLPLAKTPKGRNEEYDVVWGIDPGERISSRPSTKMIRWFAFGRLTSIEQNTPTKKTSSVETFCNSIEFWFQHGHELLSFFMDPFFRKLKFRRCTLRTAQLDRACFALAGARRTKVVVGFRDCGMAGEGLIKRSVAGPVKACTCKLARYCEVVVVDEFRTSKKHFDCQTTDDLTNQRVMRKCRDGVVRKVPVHKALHCLRKHGGCGKSVDRDVNAAKNILSILQNQLAGISEQPLRLRR

SEQ ID NO: 2426 - protein, 688 aa, unidentified
  REGION 1..688: note = Table 20
MLGKKRLPPDKDPNNDEIVPVMPPDDQEEPPSKRKRIDLLKRKMANKVIDFFVLKKTLKVFCKEEAKALAWDECLTAVNQAVAEAYLFANFYVLRQLDANRPICQLGHGFYQTCLSIVTNPTRTAQSLREKYDSAVLVQARKDRTQRWQEGRVGKLKDAPIIVPEFSNAAYEVWLASLKADGDLETAGYEFNKLRNGRPMANTEYLNNGWFQAAAKQMATNVQNAVVRNFAKRLRTYVIDCYGVEAKIAYTVLNGVFAPTFESIPARVLNPIIVELREKIPRTSKKKISWAPHDLLPVFHMFLQFIEMTNEKNTKTPRYVEKRTFSLLPTNRGFEASYCKVDSTGLRALLLRSPLVDRALAIMYQDELWTLGASLKAEPTTWIAMADLWWRRLFHVDTIENEDARKFHREITTDGYGVGVHMSRPTRGKKEKKKGKDGKTEKAKDANVSDALGFLLPKSPKGRVEDYDVIWGIDPGRTDSITATNQEGKSVRFRTSDFCRASGFSQSNRKSKRRIDRSPRVRELLQTTPTKKTSSLMTLGQAIEFMFEYVREVLEFFMDPFFRKLKFRRYTLRTAQLDRACFELAGPPGTKTIIGFGDCGAAGEGVVKNSPAGPVKSFARKLAQYCEVVVVDEFRTSRVHHDCPASEDLVNQRVGRVCRDGVERSVPVHKCFTASPRTADAGRRLTGT

SEQ ID NO: 2427 - protein, 343 aa, unidentified
  REGION 1..343: note = Table 20
MASNVQNATVRNFAKRLRTSLVDRDLTIMYQDKLCTLEASLKEDPTTRIAMADLWWRRLFHLNAMEKEGVRKFHREITTDGYGVGVPMNQPTRKKKEKNKGKDGKTEKTKDASVSETFGFSLSMYSKGRVEDYDVIWGTDPGRTDFITATNQEGKSVHFHTSDFCRASGFSRSNRKSKRRIDRLPRVRKLLQTTPTKMTSSLTTLGQAIEFLFEYSREPLEFFMDPFFRKLKFRRYTLRNAQLDRACFELAGSPGTKMIIGFGDCGAAGEGVIKNSPAGPVKSFARKLARYCEVVVVNEFRTSRVYHDCPATENLANQQNGGCGATVDRGVKMAKNFLSVLLN

SEQ ID NO: 2428 - protein, 528 aa, unidentified
  VARIANT 434: note = misc_feature - Xaa can be any naturally occurring amino acid
  REGION 1..528: note = Table 20
MSGKDAYSTCIQMLDGLYRGDNPTLVYIDLTLPRRQDGSNKIADEPSLLLPLTFNILRAREQRNVDIRGRQLSERPKLKPRRLFSLLPLKNGFRASYHTMCAVGLRSLLLLVNAEIKAYKSVQDMDHTMRSLPNAERTRAISLLHGARLGWFDVPTKSEWKATIRAQWCRFFTPQKHERTSGAASCREFGDQIKTDGFGASVLLRVCKIRPADCADGQHGFNDVNGAETAVDRHELWGLDPGRSMLFVASSSTGRSARCSSDEYYTDAGFKRRLRTIQHWQSNNAEVRHAMANMTSAKTASLERLELHVATVTRAQDLLLSFESHRPYRQLRFRHHSLARQKLDQLANNLTMLSGRSTTIGYGNWSGSNSGGAIKGCNGVPVKKFAARLAARCRVESIDEFRTSQAHNDCPTRNSPAPEDHTNNFNHMHRRQRXARQRSSRFTVFSIAQEAMAAVELLWTGTSTRCSTFCNSWYTTSATKIARQLYLAHMRRLLCDSAHLLPSHRVQASGPGRHCVFGSTTVGCARPS

SEQ ID NO: 2429 - protein, 241 aa, unidentified
  REGION 1..241: note = Table 20
MKKGFTIGHVPISSMAMLHFLKKYKLSNHVGDGRDYSASEQTAAWAIACNLHKFETASSRFDNYITTDGKAVHLLMDRTIAIEAGRSSQLTPAQSVQLLYDPKVDKVGVDPGVDQVTTTARLDGSVSAFSSASYYEQAHFNTSRRRIDKWNSDEASQAATQKLKEVTAETADFDQYCKFLRTPSAVKTGNSLENSEGSDSCCGTTWNRDVNGAKNMLMLLMCILHGYKRPHAFRLAHAKNG

SEQ ID NO: 2430 - protein, 433 aa, unidentified
  REGION 1..433: note = Table 20
MSAEVLASVAEFDSFRPKILVETEAARDALEILGNDPADHKVRLRLFKLLPTKNGFTTSFIPISSMAMLHMLKSMGLENLAGDGRSMDATLLWRKYFNLNLVETKKRRFGGSIVTDGTGVSVLMAKPAAAATCHCGEPLCAEMRTILRERAIARVVGVDPGFRDVVTVAAADGSEPVSYSSRKYYEDAKIFLSQRRTDAWNQGTVELVDSIPTVCTSDLTRMRLHVTAYLANIRELLRHRFDKGYRNMRFLRSVFKRKAVEDICNLIAPAGKVTLVGFGNWSGGKGSPISRRTCGPLQDIKFCLRQRPDVFLKELDEHRTSVTCNGCLQVLSNMRAMSTLVNRFDGSRTVRRTRVHKVLHCRSSDGGKTNRCGASWNRDVNASRNLLMLMMCHVLGYERPPAFTRAWQSHSASLLMGSAIHIIPRGFTSSREV

SEQ ID NO: 2431 - protein, 589 aa, unidentified
  VARIANT 302: note = misc_feature - Xaa can be any naturally occurring amino acid
  REGION 1..589: note = Table 20
MTCGVFKEMRAGATGAKEAEQEALEELEFELLAAAASTTTVADDATITAVKMKLNSFCKDSPRLRSQIQALVLSMNRLLGEAYAFATFHILHLHDCGMYPAIDRNFFYRCLVAVSANNSRPATLGPELVNSRDVYHALRPLQGSGSQPVNTVGYAQVLADLSIVMATMAGNHLWENLEKRIFNYLKMKYPGQLMGDPLRKKVVEALVRKPLVCTADLFQLSPSVPPDSAAAERLRHARAVADELRVLLPLPSGDHYQTRAHLTIPLYIKMLQEIEEARAAAAAAAAAATNLTAGKTVRGRVXMMQEMVPLIASYRQPLSDAELARARATSGGTVVGVDPGVTDVATVATLEGETRRYSSARYYERSKINLSNHRTRKWNAETRERVEGLPSARTASVAEYADFVQRYLVVLPELLQHRAAKGYRNMRFLRYVHRQESIHEICEVIAPREGGLVVVGFGDWRGVGTTPIRRRCSGPLQDIKKHLQKQAHVRLVIIDEYLTSRGCHGCLNRLTNMRAAPHTHGPGKERVQGATTHVHKVLHCRPSSQAAARSCCGTTWNRDVNASKNILLLTMLRLKGYQRPPELSRGHQQ

SEQ ID NO: 2432 - protein, 1040 aa, unidentified
  REGION 1..1040: note = Table 20
MEEGADDCEKAQRKRPDITLRRALRKDKETSVVQTGWKFLCQERGIRDRIEEIIPEVTRIRVETCLLLNLHFIRLLDEGRPIPVIDQNLVGRAMQCTYSKNPQADPDLHETFVHHYLPLCPNRPNNGCLPRITNVLLDLRNQLLSNIKNHVAVLFQSRHRAFMKLLLREAAPEVPFFGDADEDLESCTRLLTTATLWRPNESVRELLPEYPRIYGKIPEAAIECLQDLVDSVRPEVGPRPAAPQSRPHLYMPWMRTISEEFSDRDLWSFSLVPHASFSAPFIAITPTTWPELQPKTGKRKAPGELRDAFPSIGRLESGGKTFADRITTDGVSTSVYFLVEKRTPPPEDRVVHIHPEQRVVGLDPGKHPDFLTGIAVTGDWDGIERQEEIIGLGTRDFYHRAGFKKRTSLMHSWMSRDLDVAAFNKDAPSGNTVSLEDFGKRVTFVCANLYVLVRFHTARRVRKLRRRVTIQRQIEVDRACRAITAGKKTVVAFGAAQVWAGRTKRQCGPCESVKRRLSSHHKATVVMIDEFRTSQVCSTCHSDVDKFAVLKRQRVMEDGLPTVTEGGRRKDDDEDGGGRTSYKTCHNVRACTNPLCRMVWNRDVNAARNIAWICMSIVRGEGRPAEFTRAGILYPSRVSDPVLGANLGTYKDMPIGLAIWRDPTNRFVCKSEPLGTGGSKRVYRAFDRKTGREVAWSRAPLPSEGTRETTDILDEIDMMKSLDHPNIVKLISFWIEKRTNEVILITDLYHGSLDAYVRKHGKQEPCVIRKWTIQICEAIEYLHCHFENPIAHRDIKCANIFVNNYTGDVALGDLGFATMMSRSKSDRSVLGTAHFIAPEVLSGRASRKGDIYSLGMTLIEMATLKKPYSMIKNQSQLYMLVLDGASPDELVFIKNKNLRALVEKCIRPLETRPSIGEVLREPFITDWFPLKDFADRDVSKILSSTSSIRVMAKCGAKTASGKTCRRTVSSGHKRCYQHKRAKSGRRAVPKRMTMRAHPANADRIHRLTEKLLRKGLTRAEMKELKRRVRSRDEMMRSFWL

SEQ ID NO: 2433 - protein, 1581 aa, unidentified
  REGION 1..1581: note = Table 20
MVNPTDLIRKDIIMDSGRQFFTNTLNNLENIYKRFSNNSSSYLKIKDWEEENNNNIDTLSKYNISISEYQQHNRIKSTIEKLKKTKSTDIRITEHLSTISDLYNDSETIIFIRILKKEDNNNNNNNNNNNNNNNNNNSIGPGDSEMIDISVTPTPVPVTPTPVTPTPVPVTPTPVTPTPVPVTQNSIPVHETLETTPDPHQYLWMVGLPLVIIHPLTEDRHLEDFCNYINITSTETQIDINNIKNNLYYIFKKSKSYSNSFDKSSYYTLSPSSPPSSSSSSTPTTTTTTTTTTTTTTTTTTPQTTSFDEYYLINNFLNKTNIKSSDISLSITLLKSFCNFVKESISNTPLTSKFSVTLENYIKYLSSNVISEDYFYTIQKHVFTFHLFLKIYNILSKSKVDKAKKSLNSDEAVSIETLRSIISKEELELKKPTADEINQFKKQRLCPRHLKPMEECSQTCKDEFQGYQWAVDLFSEGFFSKSKDLAKLWPKYRSTYIDDIKIQFKEPQVHDIKFSTKQPTPEPTTSNLENQDIPTQFANTPAVVSCDSNLLPIKVTDHKDIMVVMSDPISSMHLAFNREDNDLCKTFANLFKAFGIKKPSAMPTDKPSAMSIDSPAISTNDNPSVKPSEKPSTLPIDSPSARPTDKPSTLPIDNPSTMSIDKPSAMSIDKPCAMSIDKPSALPIDSPSAMSIDKPSALPTDKPSALPTDKPSALPTYKPSAMSIDKPSAMSIDKPSAMPIDKPCAMPIDSPSAMSIDKPSALPTDKPSAMPTYKPSAMSIDSPTIPPTDSPPTNYSKQSIKRKKPELSIDSPTIPPTESPTDSLSVTPTGKPLAQTKQSKKSKKQAGKPSENTPNKKQKAKQPAKQPAKVKRVYDKRVSPKKMVKEVQFKLPIGTTISMTDIYPQINLSELSIPSEEEENINQWVDTIMVGEHKIYLLCGLNAQVLFLNRAATQYEVFNITDEIKSSVPILLIKTPNYYSVAICLSHPSRPDFSKWVTEAIEFCHQFLKQGEIFKLNDIKARISKRPQRKKIYSPSWLISKEGFTPVSIYEKSAPVIRTDGISLSITRGVARRFEPKLKEQHLPYQKAGTAKERRSIETLKMAVATDGTNPICYSIDPGRSSHVSYSTDSKERRASVKQYYDWKSNRYSKKVKKLEEKFKLFQSKMPPHSNAYGRADYFIKNWEVMKLYIDFRLNNIHRQRRRLEFKLNQQSKSKLVKQLVPTTASEMKQGVIFLGASSFNHASKGHRTFISSKGLKKIFEAHGYNVVSVNEFCTSRVHHGSYVEQEMKLLSAIKRVDQHVSGPKAQWPPESKPKVNSSRGSVYEKVRNDYENLSKFESDLNSGGSMQEQQSTYDYYGHHSIYSTELSKKTTKSDQGHHSTHSTKLSRKTSKSVAKREWKKVLSKDGFLKVNVNDLNYMSNLDHAAIIKIIHEARVDCLRQLGLSERNLLPDKSRPYSVQMYIKDLSVQYMNSGELFDDLIVESGFTEKQRCGFKMCHRVRSLVPIGSQDFPANADNHNFDQPTGSTFKSIALVEVGVVAVDAITKSPVELPLPFFEKLGFSRSELETHLTKTNNSVHPTP

SEQ ID NO: 2434 - protein, 1176 aa, unidentified
  REGION 1..1176: note = Table 20
MSDSDFYSETDSEYVSESDSETNSESDSETNSESNPPPPTTCGTRHHSLFVGQNEEPSNRPTRCKNCLTLASFLSTHKHLDKSSLCSTSYHSIITDSPSTSTNNNDICEFCQSFQTYFVKKFNTEPPIQNNNNLPPTIHSSSNALKYQIFQDLLRQRNTNQLNLFENKFSNILKNSSISHVLRDLNEQSSIITNHQLTLFGISPHEFQNHQLIENLIKDLSTTKSAQLNTTQYLSILSDLYNSPDIIISNNILLSYKVNSDKIKKRKHEDEDDTNKNNNNKNNNNNNNNEFIDNNKNKINIIESKIKTRELNLRLMLIGLPIIRLHPLTNDKHIIDYYKYIKLNNVIIDYNYICNNFIYIINKHSSSSLSLSSTTTTTTTTQDLNLINNYIFNNIEKKDISANNVAYFKPKRSHQEFGHPIPGSHLSSKFVLLSEEVVKQINKHGNKYCLEDRFIDRIRKIYPGLSSNHLWNNFHHKRQDSDPNPPESSVVTIDSLLQIANKHSISLPKPTTREITSFKANRLCPHHLSSSDKCTKDCQSVYGDYQWNFNMFINGITDNFDEFKKVLPSYRSTFTDTLNMGTLPESHLSTKVNFSNRSPTLPTNTFDLDKQQHVPHQLTNVPAVHSCDSNFMPINVKDHFDILVMTSDPISQRHLAFNKTENDICQTFKSLFINFGIPMNVKPKSPPTKKTTSSTKPSKGKKPERKFKKKNKSKTVKQQIKCPTKSLGFTDTYPRANRRLVPLETEDSVDSILMCLPHPAYKSYDKWSKEAMEFSQCFLAKKGSPIDIDSIHARMSLRPSVKGIYRPSWMTRKIGDTSIYLADYAGPEFRSNGDTLSITRAVARPFNPAVSKDKLYLPYQMPGSKREKQHVEDFRSISDTDPTCYSVDPGRSSHVSCSSHGLVRRASVNQYYSWRTNPLARLDYFNLNWSIFVEYIAFKMDPRHKYLRRINYRFGQIAKSKLVKQLIPTPASHMSGGLVFLGASEFRHNSKGHRSFISTKGLKKLLEQHQYRVVMVNEYCTSRVYHGTYLREEKNLMVAINDQCEHESLPKVEPTKWPPDNIPPVPPTNQPSTVFEKVRADYAELVEFGSDLNSQGSKQEKLLNYDYYSHYSIYSTELNLKKTQVPTRDWKRVLAKDGFLFNRDVNAARNILYLGLFMSLYSFRPKVFMSVRKYTV

SEQ ID NO: 2435 - protein, 605 aa, unidentified
  REGION 1..605: note = Table 20
MNNNNLFHFLLQTKRHCTSSSSERPLKGVKLNECTVAPTQEADYSSTVKQEGISSSSSKPGPSEKGQQKIDKKAKVHICSPGERVENSVIKASLPNVYNNQQLVQHIKNLADYTTKVLFVGSLFANFIFIKLLHDGQTIPIIEQSLFTNIFAVMTGNGKRAPHYLKEYFTLFCELITVDRESLKSINYSIIFSIAVVLFSVTRSAKKVFIMENVPSKFASKAYVYRKLRELPFTGALIKKSFDSLREETLQSINSNKTFAPGKKLAKLTSQQLKQEYKDGTLTPAKYTDKRTKSIQIDAQAFRRLVKQCGIPNYFKGKKTESDLIDFYYHLFNYIKLGFHTRDSLTSGKKKFKNVITTDGHSISFHFTRTVKRSLATTKNPSDFIDDIRNDCDIWAVDPGITSMIISLDSSGDNEWQRITSLDEYYHLCGYNDATFIRKKASKSSKLKFKTYLRRQKAVDEICKRLVANSKKYRQGSKTGVKTATKSNSRHCPSAPQDTMIPPAKTIVAFGNATFAATMKGKRAAPVKLIKKKIQMQTNVLQLDNITTINSKRRIHSALKCNNNSCNIVWNRDINAAKNIFDVFMFAAEQENKRHPAFERSKEQA

SEQ ID NO: 2436 - protein, 216 aa, unidentified
  REGION 1..216: note = Table 20
MKSIQIDTQAFWRLVNQSGIEGYKKVVKKKKVGPKEKLPADFQEDIENGCNIWGVDPGVNTIITSVDTHVIKIEVQMLYAAESTGVKTSTNNENTYSPPAPSDNLETPGKTIIAFGDGAFSGNLRGHKAAPVRLIKKALNKYCGNNLEICMVDEYLTSQILHTILKRQQTTCNIVWNRDIMTAYNILDIFLFAAKSNNQRLDAFKRQNTTSEQSSV

SEQ ID NO: 2437 - protein, 151 aa, unidentified
  REGION 1..151: note = Table 20
MMWQRDVNASKNMFKGFRNTQDLRNDKRLFWNLMQTNGYSVEFTFKKKPIKKSSSKPLTAADFCEDIKNNQVLIWGVDSGVTDIYTVADSGDASEKGKIRSTSSKEYHHIPFFSHTGEEMIDIIATSSLVKVINDTLLPYESFNLTPTYAF

SEQ ID NO: 2438 - protein, 298 aa, unidentified
  REGION 1..298: note = Table 20
MQTNGYYVEFTFKKKLVKKSTSKPLTTADFCEDIKNNQFLIWGVDPGVTDIYTAADSGDASKRERIKRTSCKEYYHICGFNLAKQKRMQHQNNNLQDFDFISKLPILKTSNLIDFVNAAAQRLINYQRTSAYYNYDNCSIGEKKQTSTIDKWILSPPKDKATDSSVKTRIIAYGNASFGTSMKGKLPASSKRITEAVKKLSKDSKGTYLVYVDEYLTSQTCNKCRQQKLTNLNAAGSKRKVHAVLKCNSCDTVWNRDVMASKNIYFIMHYMSQHNNERPPEFARTSDTTESITCMRSP

SEQ ID NO: 2439 - protein, 376 aa, unidentified
  REGION 1..376: note = Table 20
MPPSVRGRKPTVQSFINTIQARIQDKTFMPLKYTDPRGSRYFSLLPLYKIDSKSIQIDGQAFWRLAKQCNNKIKLGYKTLESLTSRSKKFTNVITTNGYAVSFMFKKIVSIQDEPRRELKTPKDFVDIVDDAEIWAVDPGISTIFTAVDSTEHERVRTTSLEEYYHLCGEFKYINELPTLKTANFTSFLLAASIRLQNYQRIHNYYCQDKWSQKLKFKTYINKQKETQEIVKRLFDNSKKHGKTSTAGAKNQNPNKSKHVPLSPADLPSSSQRKRIIAFGDGTFCSSMKGKRAAPTKRITEEINRKCKQSDGGSEFVYADKYLTSQICNKCKMKEMNNFSVSESKRRVHSVLKCGSCGTVWNRDANNALNIYNIFV

SEQ ID NO: 2440 - protein, 884 aa, unidentified
  REGION 1..884: note = Table 20
MSYIKCPLAVDRGFPSLFEQTQTSLFKTTAFEASDDDFQEIQLLKKDKNIRTTLKAVKDTSAPGPSNVVINEKTSIPIVNKDTSVQAVLPAPTPSTSSTSAPIKTSEQKQVRCPSCGGADHSRSSSKLCPMNKAKTKSPKPKDTVEKTFVIKTSLANTCKYPKLVTLVQEVVDHITQLVYAGSIFANYYFLKLLENGEELPTITQNLFYNIFSIFAGQGKHASDSIKKSFKTFCESTSLTQSDLDKDASKGYMTIVSSMAKQYETLVRNYVCSTYEDRTLRHILNVLSEKASPYFCGDSLTVKQRKSLAKHMFQQKINPKSAWPSTVDRIERYETIVNNFLSFWSTYDASNDADVPSEANMYAKPQCYMKWLHFIQKEMEQKKFIQEMKPQDKASSSYVHRKLQELPFVKKLNISKYRSLKENTLTAINSNKTLEITSKLKNIDKKDIDAAQSFIKTVQARIQDKTFMPLKHTDPRRSRYFSLLPLYKIDSKSIQIDAQSSWKLAKQCDNNIKSGQKNDNDLTLWYFNVFDFSKIGYKTLESLTSRSKEFANVITTDGYAVSFMFKKTVSIQDEYKREPKTPKNFVDIVDDAEIWAVDLGISTIFTAVDSTEHERVRTTSLEEYYHLCGYNLATRRRKEHQECHLDEFKYISELPTLKTANLTSFLLAASTRLQNYQRIHNYYCQDKWYVALLHGVYFNNAAYGIGLKRTQEIVKRLFDNSKKYGTSSTVGAKNQNPNKSKHVPLPPADLPSSSQRKRIIAFENGSFCSSMKGKRAAPTRRITEEIKRKCKQSNGGTEFVSVDEYLTSQICNKCKSKQLNNISITGSKRRVHSVLKCESCGTVWNRDVNSALNIYGIFVYKSKHDNESSPPSKDLQRINGAPWI

SEQ ID NO: 2441 - protein, 782 aa, unidentified
  REGION 1..782: note = Table 20
MDVPMSASLLTETSLEEEQRREVNNNTSKENDTMEKKTETAATTEKDPEPSVSKRSRNKEPKTTSTVYTSVKCYLSSIIKSESSRSNVTSTKERFEERCKSVSKMMVKGSLFLRLVVDECLRRYNHLEDEIDKWPDMTKDNFYVQLLRKGLDKKKLKEGSTHPVVEDVWNSPIVQETFLSQQGEGNNPIKRHLMDFNTITYAAKQLKTCFETNLRTHFRTRQQRAISGWLAENGFDKKYTKLVQHWIIGCTYKSDWVDSGDLERVKEGTKNFVTLHRKHLCVISDKKNGTISYSPEEKYPIPSILNYYKFLQTEYPQNKKIQKMIVVPKHKLKIHYCTFDQTTIQGICKDLGVWKDMEERHKQSEDILYKQGWYLLFDVKKIKKLRPNWNFHSIQTDGEGVSVLFSREVEEVETVSKKSKKNKKPRDEDRRNYPPTNAKYVVGVDPGRTNVVSCSVFDTRQKRVVRKHRMTAKQYYQESWMTDRRKANETYKKNNKEYKEALEEITRYDNGEEIINDGNGDTSTPTKKFEAYLKVVNEHYRLLWNEKGKKKYRKNAMKVYSRKQKCISNFIDELIPKRDKIEDYHIAFGDAKFACTGRGEQYASPARIFAKKIKERVGGDKRFTFVDEKYTSKVCHRCNQPLNMLEKDCFSPNKKRKPPTIVTTTTTTTTEEDEENGKWKKATPLRENRDTRRCSSEKTQFGYSSNRKVSTGDISMETPVPSSTSSSFCTPTSITCVLGGKFVDRDFNASTNIVHKFLGFWDKKLMEKKDKMPLKYHFIRVA

SEQ ID NO: 2442 - protein, 587 aa, unidentified
  REGION 1..587: note = Table 20
MPKRVRPPDKEEKTICMGLKKHLLEPSLLPVIETMVDNVSRRTHRASLLANHFFLKHIQHPGFDELAKAVTDQMFFYTALSLGKGKKYENLIEFFSANDSLYESIPALPLGGGRVMNSAARQMKTNVGNYLWMTFDARIKRFCSKSDKHAQAFVLARTRNWTPYREVVLNKNESQLLDLFSNILSTSENVTDSWILENPGPVLRLYHRIQRMCEEKQKEAKEKKQKGAKGFSMLPIFKMKSHFITIDATLLRELLVHGGLLNKNADGSAFEKLEDDHFRSVFKLRGSWLLGNEIKTDGFSLRVNIWRNASETPQRQRKRAFGQLEIENPSTENLLPGDYHDYFSNDPGQANQAFVHHTIDHKVVRKARLTYKQFCVESHHSANLKKQKRWLQEIQDENTELSLYPVRTSDVEIFKGYLSTKVPMYERLWKHHMHPRAARARWDYQIHSRSCIDRFWSGLAYNRPAGMPLHQRPLLKYGSANWGTGGAPNKRMLASAKKYFRVVLVPEFNTTACCADCGSRLKAVTQAFIGPLEEGKNRYPRTNRGLKHCSSNVCRSNPLKSRDGNAATNIGYAFPDRPEYLCPKITQ

SEQ ID NO: 2443 - protein, 575 aa, unidentified
  REGION 1..575: note = Table 20
MEDTTKERKRPDVVQRLKDRKGKQERVVKCSLQKALKEKRLMPEIQKWVSTVSKVTNKGSLVFNRLLLHCLRNDLPLPDLQDQTLYLQCFNIGIGQVRKSIEPLRDVWENVFSGFPTIEKARGDTQAYVYASKQYMTNFKNSLVYPFERRQKAFIARWCRENGLEKDQVYAIRCAINRWGCRTDIVPQATPFVDQQRKLLGTLTEDDEVTHTWLGAHMDNVVRYYWYILCYNEQFDDARRFTLAPISSIKSHYLTIDTTVLFEMMKNCNLTSGKKDAFVELRDDHFGSCFSYSKLCRKGVYTHMLETDGASVCFHFHVPKAEKVKENRILKKSDRVIAIDPGRSNLIYAVDDTTKETYRLTRQSYYTSAGMKTMNRKASKWEKDIEGAELVYRKHSLKTTKEETWDLFLKDYSSVYDTLWNAKTEKKWGRERFKVYGLKRKTLDNFFQTMKGEKQPVIAYGAARFNPTSKNELSAPTTFVSHRCAKHFPVIMVDEYNTTKVCHCCNQKLCPVVKNQQEVRGLRWCCSTNCRTFLNRDLNAALNIARCFRSGTCRPHSLCRNSGISLVASKPLRIY

SEQ ID NO: 2444 - protein, 739 aa, unidentified
  REGION 1..739: note = Table 20
MGRRAVVTRRCSFRCGLFIGGRLTRARIRRLCREVGTASKHATRILENYFKQKFERAQNEDTVDEVVAHLRENLDMGRLYRQALVSCTTAGNRRKSGYHDAELQFLCGRYFIEAGIERVEVLSGEGSGNLYTYTSNNYRDVLCKNYSSPATVRKLMESVVNWHFSAHRADEKLCRKHALELLKHGKRFEPHMVRGQDSETHVCEHCVGHPSVAPAVDKFAEYIADFEEAKSVFKPPPKRGKKRGRARSDASDGEDSDNEDDGEGGQPEAAAKKNTVNARIANAIALRHWWNAHVRATATVKEVTNRKTGVVELREIGLAQLVPWARKHVPYVRIDFQIMKAILLSLEGHKEGKVKCPRRVRLPMKQAVQGENPLSMQDFLNVPAWKKVKFFRNLTRPGRARGVLSFPATFMTNGFVICVPFEAGEGSRKTRAQRNGKGWAPVAAPAAAEADGRGEVDFMTAKCGTFRLDDVQPDPQVPWDVEAADTGRKIPLAISNGNMWTNDEHFGSAKAATVPDEIVKQRRDALCSEASANHMLHLDAVTAWQGEYILFLSHAVTVSCCATVTAGAVASAARMDAIATEFGSNRSLKRVFWRSRLVQARTMRVVFEVIFPGGVTENTVLAWGAGYNPPAVLSKGTKFPPVVKGLLKAVARFVRVVLIDEYLTSQMCVTCHKKLQETANDRWKYCPYCAETVHRDGNAARNIRAVLVAHLNGEERPDYLCRPGAPRAVEARAPREASV

SEQ ID NO: 2445 - protein, 411 aa, unidentified
  REGION 1..411: note = Table 20
MATTTAPTTTTTTTTTTSSSSSSSSSSSSSSPPPPPPSTTTAATTTATTTRAQDMACNGAHYYAPKPTNLQESFECSQTTTTTTTTTTTTTTMATATTTTMTTTTTTTTTTTTTTTMPKPAPPPPMPTLTLSANAARAAMHSNTQTSEALFINMGVPAPKVLAANVDKDAQKVARGSNGVLPQPNEHHVVRVVVALYCSDDVVRQCARADLRRWVDAKQPTQREQRHQQRRRAKRAVDRLLHLVAASVHTHLLRVCKVRACDTTLWFGAAAFRARIPYKKLFNALRALGVDVRFLNEYFTSQMCSRCAWRHDADRTTDLRLHAASADQSYLDNHPHSRTLYKVRVCKVHACKATWQRDVNAVRNMLGLVAHAQRNNGEREYHFTVAYHDVLDGVPAAAAAASAAAAAAVSR

SEQ ID NO: 2446 - protein, 961 aa, unidentified
  REGION 1..961: note = Table 20
MEDFEHALRAFVEMTEDPEPGKDQEPSGDPDTAISQMDLDWELSKTLDGMQTPMEIDGAPLELTPAPPPDQASALQGSTPHELVVSVLYQLELDELVRGHSVTETGAAPSPATASVEPQTATAPRQSNKKKKKKKKKKEKKKKKRKKKKTTPSSAPKTRNVDALPTPALLKDAFKAAYKTVTQTVGSIKACLRRGIDGHGVSDEEITIIASRLESAAHLMADTRESEGSQITDPLDLLLSKAPGTFLIRNLATLILDGRLGKRTRQDVNGIAARNLAQRTYDRYKEIAHGLRSLNTTSINMGDNVMEFGLSVFVPVQTHSKKSPTPSWPRYFRHASTVYCFEMKKLGWDDSKIPRLPGEDKVENANGHSLDHELEDELDEDGCSDIQPVPPEFPINNQSSSRYAINNFIRTGGLQLQVLAYDMRSRYQSAFAIDPVMRMEKVLPDHATIMRIVNGQIPKCIGRDPGELVTAALYMVHHAHNWDRQPEAQDPPVSNLLIRRPSLYSPTTSARAERERIKNRPPAAQAIEAITGDLRVREQDSTAAILRLPSLADIESAGAVHGGRDRWAEKRAKRAELDMAVDAILRFLEYVGHVVVLVDEYLTSSMCPSCAAHDVRSRVAKPTQRLCVCLECGRWINRDSVGAYNIAIAERWMTPATLHNCNVHELNIVKIAVIGGSGLYNLEGLTHVAEVNPDTPWGKPSDAITIAKTASGLHIAFLARHGRGHYLTPSEVPARANIAALKSLGVEAIIAYSAVGSLREELKPRDFVLPSQIIDRTKGIRHSTFFEDGLVAHAMFADPFSAVLEQVIWDQRGVIEGGDFHRQKTLICMEGPQFSTRAESHMYRSFGADLINMSVLPEAKLAREAEIAYQMICMSTDYDCWKEHEVAVTVEAVVANLKANSDNAQRLLAAILPGLEEVVENGKAAEGLKGSMMFACMTAPERRSKKAVEKLEFLLPGYYAV

SEQ ID NO: 2447 - protein, 512 aa, unidentified
  REGION 1..512: note = Table 20
MANSTLASLDLEGTLIGLSEAVVLSEALKTNSTLTTLNLCKNSIGENGAAALSEALKTNSTLTTLDLQSNSIGDNGAVALSEALKTNSTLTTLILKNNSIGPDGVVALSEALKTNSTLITLDLYYNSIGYNGAVALFEVLKINSTLTNLELGENSIGDDGAVVLSEALKANSDLTTLSLPSNSIEENGAVALSEALKTNSTLTTLDLDWNSIGENGTVALSEALKTNATLTTLSLYNNLIGPNGVVALSEALKTNSTLTTLQLCKNSIGDNGAVALFEVLKINSTLTNLELGENSIGDDGAVVLSEALKTNSTLTTLDLNWNSIGENGTVALSEAFKTNASLTTLSLYGNLIGDNGAVALSEVLKTNSTLTTLRLTDNPIGPNGEQALSKVSKAAKVEKPDRLDVCDGNNRLYKRLERDAKRAKEEEFRTVANRLLNAIGGLEENMAVIGARSLGYILVGVNEFYTSKKCPVCFEFVCQANIRRLYCSFIHSDITAGHNMCNIVKDHLMNQE

SEQ ID NO: 2448 - protein, 1409 aa, unidentified
  REGION 1..1409: note = Table 20
MDLADLKGIRVSGGIVVTSQDLVEDAGRPILQDRTFTAIWRFYKYTTGKRVKDSFWHISNWIPTRPIEQVPVLTRGWRTEEFAPETSTKSPPKPKTNVEKAPASAKKPLAEMKKECFRLAAGKKREAQRLIGIFVETLRIRTDSAEEALRIKLPPGKLTVSEEQRTKARRGAASGTEREIFDHLCERIKPKDYVEDDDEDATDKKRENNSDLRDLKGFGARELLPKDKDDDRDKDKGKKEKTSLGIVVNYLIDWLVTGHFYKPSRRRGEIEVKMPYTPTYVVRSVAGQLAVELKKLYGNGSHELRKKVLTVHKKGVLDASIDIVIQEQVSAFENFLFLNKLTSSSRRIVPLTTSHQPFVSFSERIDQQTEEEGWTSTSCLDALDDIRSHLQQFLQEDEKVKKNIKDDDEGVFHWAMYKEKGYVLRGSILTDGFRVKLQSFKLRELQDVRYRRWKEDRLPSRLTSTVGGIDFFLQEIRNVLTCKEDIERLWPGVDVKDIRTLTLDAGQACIIGAFAHLPEEIAKRARSLGYLVVGLNEYYTSKKCPRCGQFVGQVDMRRFYCSQFQVFHHRDVMAAENMANIVQGYLLDLQRLDCLHPIAPDGNMPWKEASSGLGTPSTTGPTATKIAATSGPTRVALRSKGQRKRSSTASSLKQATSNQSLWCIVDGDPMLRAFELVIPSSVTTLGQLRSYIHLRKPIWFKYLEAEDLTLWSVSIPITKDNEDTPILLEDVPSSDKNKLGPTDDVSELFQQVPLKKTIHVIVQRPPPAVTMKRLLEQDPQYLPQKKRIRIEEGWKPFTASDGILVDLPPYWIDILASTEFVPKPRAAFDHLKGNLQAGDAIIVPSMGQNPKDFGLYGQDHNLFVTEQMLELWDEMRGDQEFTYRRILSGPMGVGKSYLSYFLAARAYAEGWLVLYISDAGVLDKNKQDESALQAVKRFLALNKDILTGAEMEMLVNDYNGTDDISGNAMSVIFGTLLKSRDRKTLLLVDEHGKLFEKEPYVPDKFRSLVPLLLYNWWGEDAKGSRVVFTGTAHAKYEMGILEESYRFTSLVLVGPLSMHVFSKLLDMYPRLAAPAIRKEVTAITNCVPRELVHLSVYLELFPDPIAIDNLQVWTSKRTKVFLSTAKTYYESRTPFRKNDFYEALVHTFLGSTSIVDFEWDFLDLGLIYRCKDVGRIGTHHHILCRPAQRALLELFKNISLPDAIKKRICDGSLDENEFEGVLYHQLICATKPIVLGTTDLNGKNPDTISLDFSLCETLRAGMTCLESDHEMALTRGYDSHPRFDFMLGPMFMQVSVSDFGKHNTASAELGKAFNDRDNNGTNQIERYLNDLYGPGHSAKIDNSKFIVTKNGVDVLGFRIVYICGSPGQPSHSKWVKKFPDVRHVSFEEVKENLFKNIVTSTVAIAPMTT

SEQ ID NO: 2449 - protein, 1233 aa, unidentified
  REGION 1..1233: note = Table 20
MQPRQSLLVLGNPLGSGAFGSVFEARWGCQQCAAKSFFNTQSDLYEKEIQKEITILQKLRHRNIIQLYRTHKQDDRVYLIMELAEKGTLTKAINRGLLDWSAKTRLAHEIARGLEYIHQEGVLHRDLKSSNVLLSRHMEAKLADFGLARVHSTVSTSLSMSSAGGKIIGTLGWIAPEIFETSKPPYSTKSDVYALGMVMWEMAANCTRPYKEQDNGLMIALHVKSGGRETLPDESRRCWHQDPNQRPDASEIILVNSQEKESDDDDDDDVVPISLTFSNVESTLVDTENQPTTANHSNNHTASERVPQTDDDVVRYFCKEAQQGNMDAQLFLGWFYRHGGSDTMMNVEDSAWWYRKAAERGNATAQLKLGEMYENGEGVDKSDIEAVRWYRNAAVHGVAIAQVKLGVMYEEGRGLQQDDVEAVKWYRMAADQGQDDAQMKMATWYSLGRGVEQSDVEAVKWYAKAAEQGNTEAQYNLGVMNDHGYGVEQSEIEAIKWFTKAAENGSVEAQFNLGVSYEQGQGFDQSDVEAVKWYTKAAEQGYADAQLNLGVMYSRGQGVEQSDVEAVKWFTKAAEQGHTKAQYNLGVLYNLGQGVEQSDIEAVKWYTKTAEKGDASAQLNLGVMYSRGQGVEQNDVEAVKWYTKAAEQGNTNAKYNLGLMYEGGRGIEQSDVEAVKWYTKAAEQGNSHAQLNLGLMYEEGRGVEQSDVEAIKWYTKAAEQGNIDAQNNLERMYDQGRGAEALAWEHLTVTLDIGTPCANAKRAFAQHEVVVETIQRAVREATDVKRRCQEIISMFLECVFSSCILLKNEDRELLNYLCPYPNTNITAKATRGARTTNKAKNSNIANDNSKHDRDDDDLFGPIAPTDKIMFPPTLLVRSVATQLPQQKQHVPPTVLLFDHTANTTIEELIWYRHLTNSGLFQKSPILQRELKNLIYDQSNNHYANAADQAFRAITQAEVIDDWLPTQPSSVNIEKFVANTPKESLMVRQHGKAGHAAAVKRVTLGEIKNHINGLPFKLKELQSARYRRYKDTLLPDRLQLAIAGTDYYLTEACVVGACALLPDGKTTKGKQRWMETTKSMPIMQDQQSDSNSTEIQHDGPTINSDETTTIACALGYITVGVNEFYTSKKCPTCKEFVAQTESIRRLYCRKCEKYLHRDVMAGHNICNVMRSCLESGRLPDYLQPLDVDGKPLWNQQEQQQQTSALGYSQKKRALMKESEAMSGATALLCFASVM

SEQ ID NO: 2450 - protein, 266 aa, unidentified
  REGION 1..266: note = Table 20
RGGLDRDNDEIRYSPPTPIGAPNDRHSYSTSDNSGAALTWNPDDENASLVGGYGQQHNQQQYHQGEERDLLSDENGFRPPSESFVATSMMPLAQNDPRHQRFSGGRVQGAFSPEPEMRELTPGQLRVVGSPSPSHADVEPAQGARASLEVRSEGADVRSQHGSIRSNVSGKDPQTDELKYLAEENARSSDYIVVGVNEFYTSKKCPMCLEFVYQMDIRRLYCKSCESFTHRDVMAGHNICNIMQGHLLEQKRPDYLQPVDAEGRYP

SEQ ID NO: 2451 - protein, 642 aa, unidentified
  REGION 1..642: note = Table 20
MKETTATTPKTSPLTLKRSPMNQKKKNKKRKTTTRSSESFSGSNKRTLVKRLVREHRMSTLTVGALTTNVKRTTLPVHLQEVVKTIIWNCVDDANSVKREAQLALALFIKSSAAPELESLKTILHKAKDDDKDTDEDAYTNQGEEGSDPNSASFLLTLLRCLYYREDAPSTRSPHQVLIRKILSSFYEVFTESPNRKTREPGKKRKGETANCLFTSVSITMSVEYQRFFHVCAGGKPSKLPLSPIADGFISMSERELFYILCENSEAMDAYLGGLIQEHFPETEKMSIVPTLDTLPPGWLINQVISPVGSTSSCRKGLAKITTVTTKDEMAAILDGMGNSSSSATLQDVRRESAVSTDETMKEDVQSTDNQPRFKYALYGSFQTNGVELHLRAIDLSIRRSKCFALAEERHMPCSDQLYDPEEGHDQFLKEIRNVLDSKERVEQIFGQGPGPLGEDVDILCLDPGQACTVAAYAVRADHPGVGLSLVAKSKAIYQPTFKFRQELQQRKDNEENEAGVSIADIESSIPSLDQDPKGRIKAEMEHGKDLWKFYNGHNAKFLRARWDADKAREGEYGIITDRLLSMLGGVHVRSLDYLVVGINEYYTSKRCPKCQRSGRDPLDFVSSASIRRLFCESCKTPFHRD

SEQ ID NO: 2452 - protein, 966 aa, unidentified
  REGION 1..966: note = Table 20
QDSVSTVLHRYEQNPEVQAAKARYNQQEEAIRLEKPVNIHAACRVYVDGKETPLTKAQTDGKRLTEHLQEQHVHGLKSRLVQASRTRREVIKSKKSQALTADQQQQLHCQRHYNRFKTMDCPSVQAPPPLPLYSLPQQAPPLPPPAPAHPLPPPASAHPLPHPPPAHQLLDQRQQQHQETINRQRQDRPTSVSTRAEACKKEHKAQGFDKLKSKRYGIRVRMVQPQQQQDNVSGDDGELPEGLVFKPFKPYTSVSPIAPKKTQRHSTYIPKDCQMTKQDVVKSITGFHQITTLSVGQLGRNIGHTVLPQCIPTNDPVDVKMYYAAKAGIATTETIQRIVRVANALLRHGQKALALFIASATSADLHRLKDTIFHKHRHCTVEVAISEAARKRLGKLGKVNNSNSTETLATIEAISEQGEEQEQDSSYPEEEADESGTKGDHGGFFGSLLQYMRTPTATIKYNNRHIALIRPIRTQYIQACPLDEAEFKILNHGLESSIVQTIGASLAVQNIRHYIGLTTGEDPSFIDISTKPPGWLLTHLITPVGGSLQSPVHNHMGQAHNNFARITTTATVEELNVLREAIRTQAIGNESSSQFLMDRRPNEDHVIINPKPGQPTNLLPSYLLRGMIVTDGRSLHLSAINLQLRKGKRFMTELTTNSNDGMVYRHHVLAPDPHRCLPSLTTAIPDQAALSQLFPDVSKVDVGAIDLGKEFMAAFTCRRYDRPDFVYTVHAKTKALYQPTNKAAKELERCLDNSTVTHVAGNESAISVYQSALPSLRSDPKHRVLLEQTDEYQQYAAFYNNHGRQQKRKEQAKRARCGEFDVLTNHILTAMGTHRARSLGYIVLGIDEYYTSRRCPSCKCSGSDAQDFVGYIGLRRTYCSSCRTWFHRDLLAASNMVEAGRYYLQHLSRPAHLLPISEDGKWVYNPWYGPVPPPEVPTGQLLDRRALQGQGKAQQMDVEMQDATAV

SEQ ID NO: 2453 - protein, 897 aa, unidentified
  REGION 1..897: note = Table 20
MGNHMANVVPDTGDDEADEDFSRDHFVTCDDIYNIWYAFINKANRSGLKMEYLRLLRSDNRELVTYLDQAIDGLAIQDYDDSVGIRAAKRFKTELVTNPDDGNLYRHHVLAPDSRRYLPSLSTAIPDATARSELFPDTTKVDIGAIDLGKEFMAVFACTRYDRPEYSYSVRATTKALGAFYERQKKSRAQAKRAKKAELDTLTNHILEAMGTHKAMPHDPDRRGLILVGLGDFSPTTKGHRARFTTFLKHFVQGARSMGYIVIRIDEFYTSRRCPRCKRSGSDQQDFVGYVGFRRTYCTKCHTWHHRDHLAATNMVDAGRYYLQHLSRPVKIDGQKQATKRYQPIRDSQNLLDWGNPKSSIIGLQLPLAVYCLSAACHGLVDHSGHRHPEKALSLSDPMSIRHPRYRHPSDPAEKGWNRLPGIHFLSSSVPYIRPMSSQRFYTGDEHGLVKVVTITEPVAVKVKRVRRNQPTPEAPPKPIPTVETWGTPDRERAIQLLCWDHEKKHLVVARKNGLVQLLDPKDGSTVAEFKHTLTKVGKVDTVFVGLFANSESIITCTNTGLLTKQSIQDPSQSSVTNVGQDTCRMRVHPREHHIIVTGGKEQEVTIWDLNALFKEDASSEQVAKEDKLGKNGKNGKTATKSSAAAATTSSSSSSSSSSEKKTGAPEARYKSKEILANGQLFKAKNVKNDHLDLRVPVWNTDLLFLSQYDFTRVVAGTRFHQIRVYDTKNGARRPVVDVEVGEMPVVAMSNGKDASEVVFSDTVTNVYSVDTLTGAIIGQYKGFTGVATALATFIPFEGEEATHLVSVAMDRCLRVHEMTQTRKLLHKVYLKQRMTAVVVGEYTPAEPVEDEDERVNSKGKNNQANTNNQDENDDDLWESMGKLEDKKSKKRKIGKE

SEQ ID NO: 2454 - protein, 1770 aa, unidentified
  REGION 1..1770: note = Table 20
MGGPGLLAVAGTAKELPKVDLPDCKILVDVGSFYPFLVRSVYNSKMGKPEEFAAIWILNKFNAPNVEFFIDGHGNKEKHATSMARRDNQADLDSAESIVKEMEDRAAVGKSTNKTDYRTCTKLLRSCTSLTYDFKDKLSKQMASQLADRFMNDYQLGRTLEQSPRHVQARRRIRDEVNVGLETLNYHQLKQHFDTAAQKYVKLVDGEADLAIVRRAKELVIAKTKFVVVGNDCDYAIHPSIPILLRPSGKKYIQYNVDELLAKSERTRAQFTVLGCVSKTDYNANLAGFGIVTNSRIIKSCSKDIIVDGVPVKDAALKILDNYYEHKDVKEAIEKIDPSDVEMKENQRASSKRIFIDGVETPLSDDVKLTRANLENQTRDKVIDLKKRMLAAGKIRRQVLKSRKEKSTQQTSVEKYKRKRYNRFKTVQCPRLDDPSHPGYSPKPDDSATPDPARQERQARQHLHRQSVNARRLTRDDNLAIRAGRCKAEYKSKGFHKMPSKQFAIKVHCVGGAGTQVNATLGDPPKDLEFKPFKPFDPDYGKKNKDPENPEARTKPETKPKQSQKKTTRKSGQTPKTPKAPKPATPPNNRALRKSFFLKSLTGRHACKTLNMGQLGSNIDKAISASWLAEHSNKTKYNTLRKLTQNDVRLAVVKTMRRIARVANELLRHGQDAVGLFITDTKDLRPLKEALFLPKKLRDAAEAAKAAASIARTAAEADPTNTDVATALAAADAAAATAIANADVDSIINNAGKKRLANIEKKKGSRRRRGSKTKSADTPGSGPTGMDVDALAVGLSDMDIDTSSLGPMDMDIDSPAPAPVSSPKEDMDSDDEVNVDYEDDELEENDDAPDEDNTGDGDDDEGDTEDESGMKGDNGGFMLSLLRYFRHQFEIGQGNTNRHLIEDIRSLYSKVNTNFDESTLLVLTGIQAKGSRNVYLEGGIVAQLGIRLACQLRRYFIDQAAGIATSLPQSPIRNGYIRLSELDLWNHFQYVWDIFNFIMVIWNAEKTLQGLPASTQQNFKLELNELPPGWLLTKLVTPLGKGDKDKVTTATIQEMSDLRAYLVNDASDKSVSSSEFLMAQRRIPDATNLVRGQPKNFLPSYLHRGSIVTNGSHAYLSTVDLRIRKQQRFITEIFEEGGGFRRRHVLSPDNRKLLPNLSTAVPSQESLTAMFPDTTRVDIGAIDLGKEFMVGFACKRYDSDDFIYTISAKTRAVYQPSNRRRSEVNRLKNNTIIDIPVGESAKLIPPRKFTPGMTTTGQAIAMYETRLESMDNNPKGRIQEKLTPEYHLLSSFYNKGHRHQKSEAQTKRATTAELDILTNHILTAMGTHLRVQEDGQPRPRGVISIGQDGKRGFSSVSKGHEMSKHNTFLDHFVPRARRLGYIIVGLPEYYTSRRCPKCQSSGISEQDFVGYIGIRRAHCVRCGTWFHRDLLAASNMVVATRYYLDHLSRPAYLLPITKDEKFVFDQRYGPNLPPGVPANKIIRRGESGDQPDIASSSSSSAPPPPPPPASPPGTLQTPKLSRKDAQKQRQAQTLAQLGSGSAAGSSSTQVQAEGPPPKKRRTRPAAKRTAPQTLAQIPQGSWTSSALGSQTHSQAQAQTQAQASWTPEQRSFLSPTQSSQRQSYAAIAAVGVAQAQARQGPASASSSQARPRMQPQTRQQTQSQPQSQPQTGAQRPPMRLWSYAESVRGRQAEAGSSTGGPIRRGQSIHPQAGQQTGLAFSASPSTPSPAATSASASVSSSSAPRRQQQQQQDPTAGSASSSLSDTNQLA

SEQ ID NO: 2455 - protein, 1946 aa, unidentified
  REGION 1..1946: note = Table 20
MGGAGLMAVVGTAKELPKVHLPNCHILVDVESFHPDMVRAVYNCKTGKPEEYVARIILNRFPEGGDVEFYLDGLGNKEKHATSMARRDKTSNLDMAEKIVEQMMENAKLGRSIKKADYKKCSKLLKSCTPVTYEFKKRLSVELEKQLLARFTKRSATNISAPSDADRLRAFLGERYPQCPSEKVYLVEGEADLAIVHRAKQLVSTKTEFVVVGNDCDYASTRRFRPFCDPLARSTSSTKSMSSWRNLGGLGLSIQRWAVYPILTTVRTCLALVLERTRVLSSPFLRDDVSAILMGYSMDVMVIAAVTAIALDASASKKVDMAASRRIFVDGKETILNEEQKNEKTTVEMAVQAKAVLLKKGMLDAGILRREVLKSQKQAKSSEGGKPPRRYKGKFYNAFKTVQRDPRADPVKEDESSMLQVVQSQGQGLVVPPATVLTGPLSAGIQDLSITSPAQGFGFSPLLPIPGQSQGRPIAQSSQAHLSAQGSSDISDTVMQDADTDLASATVNENDPAARQKRHIDSVKARRAKRDEQVSLRAEECKKEHQDRKFHEMPSKQYGIHVHKIKSINVVNAEDGDTEMEEMTTAPEEVVFKPFKPYTVFASEESKKAKPAAKPTSKPKPFKQPDLENPRTKTSLVKSLTARHAHTTLNIGQLGKNIAEAIQVPNRFDPTAGEDETKKAPETIKAAKLATIKTIRRIVRVSNELERHGQAAMSLFVNSASADDLRDLKAALFISKKIVSAAKTGLSDQEFKAKIDGLLKDVLGSASQKRLAKMKKNKGKKKTSLSAPTSSQSDMPTSIQGPSAMDVDQPAQGSTDMDIDQPIQYPEDEGSIISDTEGSLDVEESDDDDGGDDEEEDDASSDDGGEDGDEDKDGNDGREDETKDESGVKGDNDSFITSILQQIRQKSPSKTTNYNHTLVKKIYDLYIDMVKLQESNLRLIAKGNLLSGTTDLVLDGVYIKQLGVRLACQMRRYFIDKEAGIPITLPQSPVRYGYIRLSERDLWEHLYRVKSIAAYIKLIGGGNLISSELSRKEPGWLLTRLITPLGNGADGKITTVLMKEMADLRENLDTLPESCSSSQYLMEQRTPTYTSVSSVPGEPAGGPKQNFLPSYMHRGSIVTNGSHVYLSAIDLRIRKQKRYITEIDHVRNAEGKIIERTKRHVLAPDCRRLLPYISTAIPDVSALRALIPIGAEVDIGAIDTGKEFMVGFACVRSADKDPEFMYTIRAKTRAVYQPSNRHRGEAHGLKRNTVINSPAGGGDQSTPPLKLKNLISPSKFTPEMTTTGQTVAMYETKLTSMDNSPQERIAETSTPEYRLLSAFYNNGSRHQKRMVHSKRATVAEMDILTNHILTAMGTHIRNKKLRKGEPKRIGIIAIGYDGRGGFSVVSKGHQTSLHGTFLKHFLPRARSLGYIVVGIPEYYTSRRCPICKRTGKTEGDFVGYVGMRRAHCARCGVWFHRDLLAASNMVVATKYYIENLSRPAYLLPIDKQDKFVFLSKYGPNLPFSVPADKINRGDQPDSASASSSSAPAPPPGSPFKKGRVQTSVHTKTQLHSRQESGSGSGSGSGFGSGFGFGFGLGFGLGLGLGLGSGSGSGSGSGSGSGSGSGFGSGSGSGSGSGFSGFGSGSGSDSGFSGFGAGSGPGSGFGSGSGPGSGSGPTRSQTQTRPGQKRNFAQSIADHRARQAQSQAQTLSPKKLRPSADVSKPAPLPPPQMQAPWGLGSSSQAVPPSQMLAPQGLGSSSPTLPPPQMQAPRGLGSSSQAVPPPQMQAPQGLGSSSSTLPPRLMKTRSQTRSQTAQASASSSQTLPPRLMKTRSQTRSQTQSQTLAQSQQHRERRVSRQPSALADYIVENPVQARRHTQTQPLLSGTPSSALSFRSVRPRHPLAHSEARQQTSSAPSASTPAPASGSAPASGSTSLAPASASGSAPASGSTSSAPASASSGPRPRQ

SEQ ID NO: 2456 - protein, 326 aa, unidentified
  REGION 1..326: note = Table 20
MDTECEKRPRDKVYSLQDGPADPPGLFKWLLRPWCSRYIEYDIPTRLDKTGLSRAQYQALGVVSHTDCSFNLPRLGIATNIKIIKAISYNKDTASAILQRYYIDPKVVAAYAAHTSDNLHLSRPHSRAAAEKVYLDCQETPLSPYDRNNRLFRETLTQMRVSKVNDGESIGAMPPLHQDQYDCRPKGTRHRSRSSTSAGAWSQARGLGYIVVDVDEYHASRRCPRCKCSGSDKKDFVEYIGMRRAHCVRCGTWFHRDLLAASSMVEASHTYVTDLSRPEYLLPIAKHGRFVWNPWFGVELPPKVNPDSDRRQASPRDKKKSLGGIR

SEQ ID NO: 2457 - protein, 1584 aa, unidentified
  REGION 1..1584: note = Table 20
MIVTNGQSLYLSAVDLRKRARQRFVTKLTTGPDGRIERSHVIAPDQRRLLPSIATAIADEESRDRLLGADNEKVDIGAIDLGKAFMVGFACRRYDRKDFVYTIKANTKAVYQPLNKARGEAEAVKQKATITQKNGPEVSLEDFELSLISLAANPILRILQEHHTELKAAYTEYSAFHNKYGRHQKRQAQAQRARLREFDILTNHILTAMGTHTSGDPDRRGIILVGTGGFSPTSKGHQTSMHGSFIRHFIPRARGLGYIVVGVDEYYTSRRCPRCKCSGTDEKDFVGYIGMRRAHCVRCGTWFHRDLLAASNMVEAGRTYVADLSRPEYLLPIAKDGRFVWNPWFGVELPLKVDPDSIVDRHPHGTKRSRSAVSGSTSSSAGRPPASSARLEAPASLVQTKLVRASSLHTRLPRIQHLYAWPFMVLYPLWTFAYFFKYDQWIKSEEITFVTLGSLLTINALLFLAGQWSVSIKAAVTCKKESDPSKADLICIVPQKDRGLGALCDLHKEENGDIYFFFQKKKYTWNADKKVFVKLRYPSDEGLTMSVFQKSRGLSEEGVHQATAKYGLNRFDIPTPKFVELFKEHAVAPFFVFQVFCVGLWLLDEYWYYSLFTLFMLVVFESTVVWQRLKTIGEFQGMSIKPFHLNVRRGGSWINIMSDELLPGDLVSIVRTKEDSGVPCDMVIVDGTCIVNEAMLSGESTPLLKEGVMLREEDDVLDLNGADKLNVLYGGTKVLQVSPSSGSLKAPDGGCLCYIVRTGFGTAQGKLVRTMVYSTERVTANNLEALLFILFLLIFAIVAAYYVWVVGTEIGRNKGKLLLDCILIITSVVPPELPMELSLAVNTSLIALAKHHIFCVEPFRIPFAGKVDVCCFDKTGTLTGEDLVVEGLCGYDTKSPDSLVSAPDAPRSARHVLAAAHALVQLDDGLVGDPMERVTLEALKWTVGKNDKVYPESVSNKTEHLLIRRRFQFSSALKRMSSISTLSSPEFRTTKLFVAVKGAPETLKHMYKSLPAFYEDTYKQYTRRGSRVLALGYKYLPDGMNTDQINALHRDDVESELIFAGFLVFHCPLKDDSVQAIRMLNESSHRCVMITGDNPLTACHVARQVDIVNRDVLIMDIKEDANDANDLAWKSVDETISIDVDPSKPLDHALFRDYDICVTGPALACYEGKPSFAELIRHTWVYARVSPSQKETILTTLKDSGYTTLMCGDGTNDVGALKQAHIGVALLDGKPEDLERIAEYNMIQRLKNVYENQIKFTARFNMQPPPPHAKIAHLYPPEVIAAKQQAARDALGIGHVDENGRPIPPPKPTLDMNSLSGMMEDMDEEAPPKIKLGDASAAAPFTSKLSTPMSIVNIIRQGRCTLVATMQMYKILALNCLITAYSLSVLYLDGIKHGDFQVTISGMLMAVCFMCISKATPLEQLSKERPQPNIFNFYIILSVLGQFAIHIVSLVYITREAKLLDPDRETDLEKTFVPGLLNSAVYLISLSMQVSTFAINYKGHPFRESLRENTYLYRGLLAVGGVAVAGATEFIPEFNEWLQIVPFPEDFKAKLVGVMFADYFIAWGIEIVCNKLFGNFPVKDIVRQ

SEQ ID NO: 2458 - protein, 419 aa, unidentified
  REGION 1..419: note = Table 20
DSDDDDDSDDDDDSDDDDSDDDGLPESRSSVRYHPGNRAPPSPNKRWTLRETERKRERRRRRSGRGAQPGNAQANPGGRRRRRRNRRGKRGGARHRPEAELRRANRYVLLDQYRTNDDDAEDVGDVYDAEDVGDDYEDDEVPIGVVVYENGDGSFVGQVLDQEPIYVGAQGIDPGLTHVFKAVPMDERLRPIPEEEWGAERRDVRILLNAHAREDSLKTMIMRRLRKRIRRFYRKSHDLWRLMAKPYKWASLKFHIKNEKQSVLQRAVNSLLLEEHRRTGTRPIIFLGDGGMSHGYWFPGTRAVPQFFKDLLLRNGFEVRMVNEYRTSQVCPRCNCRLHDTGTKCKSAFSGKIIHRGLKWCERCHQFLDRDYVGAFNIGRKGGPEGHPVILDRGHIEWQGRPDVKYIPNCPPQKERLTL

SEQ ID NO: 2459 - protein, 458 aa, unidentified
  REGION 1..458: note = Table 20
MAESVLKWVKESIPIYKFRLQRYGGDLLKLDGCKNGFSTIREISNQLNVIGQLIGDKKDSSESVAPPVQPDHPIDDQLSLRPKLPPRLPPILPTSKSGMRFFPLSRSLLNAAKNNLFSAYGLRLLRKTLKRCKTKGLVYVLTDGVGARLVMGPKTSDQYKISVSSLVSSPAPKQTASLVSSPVSKQAASTLCLGVDPGRAVIAGTALVLKHEAGDPASEKTEFGIIPKGIRRGKNKRNEKQARNRKKLLTLSLNRLNLPQLRTPNTEVLKERLRKEFAIWDSFRQLSEAKFWRRQRFGRELMLEKKIMKYTSDHIKMARKIGANFLLAYGDAGEGYKKAFSSSGKGHPATPAVRKVPRIMSHVVKNMGGIFIKVDEYHTSKLCPYCYKKLGTMNPKTRLRKCPGCHHEGHRDSLAALNIANLGYYEFLGIPSPPEFCYSHQDLHHPRPPPRQRLSFRL

SEQ ID NO: 2460 - protein, 1577 aa, unidentified
  REGION 1..1577: note = Table 20
CVYSSKEVEVEKIDYYPPPPPPPPLYPSTMVVGVDPGRAALAGVAVLSCSPSGTVSNQSSVICTLIPAPSRKISTRVNNIMKLFNKIDFISTREDPIARLSQEFGKYEIISKLREKRVFRRKRMGLRTKKERQVRSFATSMVCTAQKEMKTLLVAYGDGGEAYKKCFSPTSKYYPPNGSTKWFPDRVKKQVEAANGFFVTVDEYHTSKLCPVCHAELKTIDAKNRIRQCPNCGVTGNRDCFAAQNIAMLGLLQCIFFATPQVIFSKPLFIMMPILFDKFRNKGTAFTREEREAHGISNLLPWKVETLDEQIDRVYRMIQQQPTRLQKWLVLYHVQNTNETLFYATVLKHIDELLGVVYTPTVGDACTDYSRIFTRPRGMYFSLRDKGMIRRRLDNWKNPVDAIVVSDGTRILGLGDLGVGGHGITVGKLSLYTCAAGFHPERVLPISLDTGTRRDDLREDSRYLGIKEGRAPFAERKVLVDELVWAVQDKWPECVFQFEDFSNDTAFDFLEAHRYHGLAVFNDDIQGTGCITAAVFLAALKSIGLTSETKKTLMAKDQRFVFLGAGAGGVGVADCLAELLVEEGLSWEEAREKFWLIDSRGLITQTRADFKAGKLAKHKVPYAKKVELTEGKEMNLLEAVKFVKPTALIGLSTIANAFNAEVLKALDEGCPHQKPVVFALSNPTIKTEVTNADCYKFLKDRCIYASGSPQAKVTRADGVVVNTTQCNNFFVFPAIGLAASIAKASEVPQSLFSTISHRLADLVPEEKLMRGECSPEISDIRDITVGLTVSGIKNLVGKGVARCSVCKSLVAAEFSGKAIVGFVPSIISQIRLCELIRERIRYLENPFSDNFEKESPDNYSKKNQSIIGIVSSLSQALLESFAQCMKENSDECIRICICCCFNAEKKEEIEEREEESDIKETSSIPSKSSLNQASTTHIKSSEGLYSKELTTLDESPPDDIVPTNLDKEDSRSEDKKPPPSNSSSSQSFVSPLLPGTPTPLGSPWVDEDDADISSIVIAPIEDTKKYLHVHSHIISLKSIIISSFLKLLGEYPSIISPSASHSIVQTVCVELRLIEEVCRSIHAARNQDYHELGSSLSKDSSKEAIDIDTLHCSKGEDDASGIVGHGEDSESLLTPAFNPVTIEDNDNAVIECADSKKILFRMLLSYFSYLLEIVAMCVSLFPEAHSSFLHSNGFKALINVFRVLDVKGEREEIGQRVRTRLWNLGIEHVNLSQLCFVYNIDSQIFPDDVAIAHSSFLHSNGFKALINVFRVLDVKGEREEIGQRVRTRLWNLGIEHVNLSQLCFVYNIDSQIFPDDVAIGERKESNLFMKKSKKREDKEKIDLAYNGESMDSEGNDDSYLRKCSLEEWKTLMQTVSVGNSNFSDSSKKIGYNLPCWISDGSILPVLLAHINSCCGGNNISLLETKSAPDITHPRAYDSRLYHMELLVRDLERVTGIALRRRIEVERMVSLGNIPSEVSSFETFISSFHPLLITNLSRVFEHNKKILSFYSFDVINSYIADLCSIFSLSCTDQTKLEGNSHFSPVQKLLSPDSIDSLCREFIDSVSSPLSLQSSPLLV

SEQ ID NO: 2461 - protein, 328 aa, unidentified
  REGION 1..328: note = Table 20
VGFRSVPILPTSSSSISFFQIPNSLIKKDLLSLKGERFLMKTIRRLRKRSDCGDIGLVKIKTDGINVRILFGPTSANYSCVYSSKEVEVEKIDYYPPPPPPPPLYPSTMVVGVDPGRAALAGVAVLSCSPSGTVSNQSSVICTLIPAPSRKISTRVNNIMKLFNKIDFISTREDPIARLSQEFGKYEIISKLREKRVFRRKRMGLRTKKERQVRSFATSMVCTAQKEMKTLLVAYGDGGEAYKKCFSPTSKYYPPNGSTKWFPDRVKKQVEAANGFFVTVDEYHTSKLCPVCHAELKTIDAKNRIRQCPNCGVTGNRDCFAAQNIAML

SEQ ID NO: 2462 - protein, 596 aa, unidentified
  REGION 1..596: note = Table 20
GHAPAPGVFFIGGFEGQLVMLHILRKANEAWLKDRASRLPAATARLAADAMREANPTLLRSRSTCALQEQEPAPADPAAVEEVKRLVLAAISGIGERHLRCKRPVEPRERDQAKTRAGANQQQLLQAAIDLDLLADNTPLTPRAAWEQACGALSSRAPPAELPALAEHNFAPALRKGIVDKAGVLLSTSALTQHLSSSRLRASGSSAGGSDSGSDSGRGSAGASASGSAGGSARSSASSSASGSAGGSSGRSSGSSSSSGSSSDDCPSFFGDEPDEYVQECEAAHLVVFRFLKRVLPPGVPVRLLVAGQRAGASQTAVLAAADGAGLCFADIKQVQHPSHELRRWLSPRVFVESTAGFRDATGQVAAARKAEQCLRRADPADRARAIHNITTGRTASLAAFALHCRRKLAGFDAGRRLYGSKGARHARLRKHILRNRHFHRLVQMLAWGATSVTGRWWDPTRRRRRAVRKKPAVSIIGWGAASVGAGGPISRKGLGPSRDFERFVRSHYPTVLFAKVDEYCTSKVCTACWKKTHVNFTAGGRPTHKLQVCPDHAPPLVVDRDVSASYAIMTALLSHLFVGGAPEWQRRRRRAGPPA

SEQ ID NO: 2463 - protein, 958 aa, unidentified
  REGION 1..958: note = Table 20
MPGMPPRPVPVSKDYEESLLSGCIFVLCRCLLVVHGHSKTMVCVGLVATVKGRNGKGGSLPTGVAELRKRGYRSVTEKLDLLQDERGLFDGVHQLPDWLLQDQRDQQAGGAYGPHGPTIVAIGVDPGQKSIAVSVRARVSPDLTAADLKRTAVDTKTADFKYEALAKNSQRYWKMCRKRDPQLDAAENLFTPETSLRRPGAPAANYATVTYQTLSVRARHYLSHTRRIRTFDAYRARERAVAWVARDILGPPDPSVRKVVFFGKAEFGSGSRGPIPRKRLIRHLASLAPVVLTNEHRTSITCPQDRAPLHRLALGSRVFCCANARPEVPVESQCNVRAIDRDHSGAANIVMCGVEEMLYGVRPPEFCRGPAGFQSQDVRMRASLCCRRGVARHLRSQHQGHTSGPRNWGCSVKRSEALALSQARTLTVGSLQLHHKLIWQAHGGPAHDMREQQLQPKRIVALSSAIAESSQTKGTLHKWYRVCRALLRSVLTLLGWSPIVAAGASVALLNKLRLAPQSLIDGWWSLALWAVEMTGPAYIKLVQWASSRPDLFPRDVCTRQVVQNCNSAQQLCHRGASDDTLACLLNCSGSVQLSRVLAAGRCRLGKLHANTTPHSWRSTVKALDRAFGPQWRDSFDVPDTKPIGSGCVAQHTIASDDVSVGVCCIACTLQVYKGVVKTANGDMPVAVKVIHPAVKAQIEMDVDIMRGVAAVVEALVPRADVALARNARLGDMTYNCGSAAARCAAPSRDFPMGELVAGNKHNSGGLADIDPRHRKALANVGLKAFLKMLFLDNFVHGDLHPGNILIGEREGRGGRKEPMLMFLDAGIVTELSRSDRRNFIDLFHAIATGNGREAGNLLIARSRSNQCEDPKAFVDAVDKLVSEALSSGLTLSKVHVGQLIGTVLSLCAQHRVKLESNFVSVVIAIGVLEGVGRALDPEINILKAALPVLVQAKMRGNV

SEQ ID NO: 2464 - protein, 746 aa, unidentified
  REGION 1..746: note = Table 20
MPALSQQGLQAARATASSPWRCQVPWRLGAGTHQQRAVPLGSPGDAGARNNDLPQLSTKTHKRSEVRQKAQAAQPLNAQYKTQVWQSAGQKEKGWLRTMATIASPARAWAQEGPELLSPEEQAEWRRYVVAAANIRSLAFQRRAQPGTLRPQARFTLLPVTALRPAFLQLSQDTIGTLVNKVVDAHIPVLKARVNEARPRRRADLAVVQPLFANVTGVAAWFDATLAQGAAADELTRNHYRHLDYYIGAGTQQREALKSALQQGQSNTAWWGGVFDFHTRRRRRRRERPRHRRRPDPKLRYRRRHGPKGQQRRKPLRPKGGKTAGGLPLLWGLGWTLAPPDGSGGGGARGQRPVWLVNHLMTDGLKVCVGLVAVIKPRQQEREEAGAEREGEDTEGEGEDTDDGTEHQVQVNCGRLPTGVAELRKRGYRSVQAEFDIKRDKRGVFNSVKKLPDKWLQALHDADETEGGAIPEKYAIKAIGVDPGQKSIAVSVRGLVTPSLSAADLKGTAVESRTADFKFEALAKNSQRYFERCNRRDPQFQAAEAQFTEQTSLRRPGVAVAANYAAVTYDTLSVRTRHYFTWERRMRSFNSYRARERAVARVARDIIGPRDTGVHRVVFFGKAEFGSGSRGPIPRKRLIRHLACLAAVVLTDEYRTSITCPQDRAPLHRLALGSRVFRCANARPGVPVEVRCNVGAIDRDHAGADNILMCGVAMLLGGVRPAAFRRGPDCGKAASQAHVWVNPHAG

SEQ ID NO: 2465 - protein, 729 aa, unidentified
  REGION 1..729: note = Table 20
MVTAARRHVIDEFQGRLEAHFSWLVEIAMWQWRAEPGFDAAVKSAGRCLFLTACFRDDAAAEAKLRDFLTRPRGRARVPLGPHWAAGMTSLAREEREALSHLRTPLPNPGRAIDPPQLREYRFNVKNFPHLCLDVKARTRALHAPFRARRGEIWTSINEERPSLRGGVKTRAAARAQRGNLREAEAPAWLDEGPELLTRDEAREWRALASASWEARTALWLARQEPGTLRPPRGYTMLPVFKLKPAFILIDANVLSVLGKKLRKGAGAADDALRTGRSDRLWWTKAFDLHGRGTTEQRGQAKRGRRARRAVIKTGRKVRRRGLRILRREGWVLDDSAYEAAKGGRRPPPHLVRCITSDGERCHVTLQTLVAARPAGAAELVREGYDAIRGTCVVGRDRRGLFRDVAPLPEELLDCLDAGDHACFVEAIGVDPGQKQLITHVRTRVTRRTEAADLKGSDRCISGREYRYQNLALRAQRFERERREANAPYRLALESYARDEASARCPRGMELFSRTVYQGLDAVAGEHLSAQRRRFAFARARATDRALAHLARDIAGGDPDAAAERAERRRSAPGKAPVSPRRRELLAKVQERLAGGRGRTWTRVVFFGNGQFGSGAAGPLPRKALLKKLSEICCVVLTDEYLTSKTCPCCGGRLAQVAGSRVFRCSSTTDEDSGAGGRCSVRYLDRDCAGGGNIAMIGVRRLQGRGRPAHLARPPGRSAVSDSSDGEQE

SEQ ID NO: 2466 - protein, 817 aa, unidentified
  REGION 1..817: note = Table 20
MASITRLFVGCSLHVLFTCSLRKYALRKEKVVLAMCSLQVVVVANEYKRDFILRTSDVFTKQYGVSVTAHVIKSFTLRIQDHLMCYLERLAWERRNGDHFSYVIKTGAKLLQRAGAVQEDDTAINMVEEFIVRPRGREGDQRLHEDWRGAMETALKYVRDRLSPFRVIPPGGFGRVQVDDDEEDDDDEQLDEMGAFFKNIYRNKSLVLETEAAFRSEDEQFRLAKEGLWTSINNDQPYLPQVMTKEDARKQLPAFRDIEPPAWIQDGDGPLSTDQKVEWGVLVRRISATRRTMVDSRRTPGTLFPPKRFTLLPMAELHPMMLPLDSRIVTSIVALALDNIQPSLDIPTKKHYVETGMGTSQEWKILQQKQLRSRIVRREWKARLEGGMMDSGWWLCMFNLHEKVRLRMPRRAEVNWKPAKPLGRKGKTAWGGIRCLWGTGWTIEDDLSKHGNKKPPWFVNNITTDGLQVNVTLATKVVDPVIPGVADLVKKGYTSIKEVYDPAIHTRGLFGSAAKMSGELLSAVNEKDPRCFVEIVGVDPGQKLLYKAAAARVTSNSSAEDFKNIETASRSASDHRFLSLSKAYTNFDKERRRDNMSYRTAIAELSGVSMRTPGGTAAYANTLHTNFKAMTEEKLSWGRRCKSFDAKRAKMREIARMAREIGGKSSEAAALRKVGPESEERAALLSRMRDRLAGNHRTWTRVAFFGNAQFGHGSRGPLPRKALIRAIALLVPVVLMDEFRTSMTCCGCGMNLVQVDSSRVYQCASCTPESVNQNCSVRFIDRDVNASVNIGMCGIRMLLGMSRPLHLCRTARGEEAE

SEQ ID NO: 2467 - protein, 421 aa, unidentified
  REGION 1..421: note = Table 20
PAKQAKSTRGKRGLLRTNRRKVLRGIPLLYEHAWLMDDDQFEEKRRNPCTPVPFVVNNIKSDGVRVHTTLVTLGAEGAPGRDQLVKKGYDNITETFVAGEHTRGIFKDAAPLRDALIADLNHEDSTCFIEAVGVDAGGRKVINSGSARVTSTTDHQSFKGSTVHTTSGDYKHQCLATAALKFATAKREQNLAYGGAISSYVKQGASLKIGVGTATYANLAYSNLRTLGRELLSRERREFAFARQRAKDRAIARLAREMGGADPEAAYKRHLHSGRVVEAGRVELQDRVKTMLDRKGVGRTWTRVVFFGNAQFGHGSAGPLPRKRLLWVLAAVCVVVLTDEFRTTVRCCGCGEVLKQQDGSRIYGCPTVSDEDHCSIRFIDRDDNASVNIAMCGVNMLLGLPRPIHLQRERPPVAVDGVVEE

SEQ ID NO: 2468 - protein, 627 aa, unidentified
  REGION 1..627: note = Table 20
MEGLLSEFRGLFEPLRVKRPPPKDPPDHPKTEEELTGREDFLYNVKARLNDVLQIEAGCRKVDFHLRKRRGEIWSEVNERQQSIKSSKTKEGFLKQRHLLQEIPVPPWFDEGIEMSKKDASNLVRDVRNTRRDMWKSMKEPGTEHPPKAFSLMPHFSLTRAFVRYDSQSIGTLAKSLDFPGVSENQVTLKTTGVKCAGRAERLWWTGIFDFYSERIVNRRPSTEKNQTQRTRKVLRLNNRYRKGIGVCNKDPWFTDEVLYSAKRDDPSCETPWIVNSISTDGLQVKVCLATLAKTNPLPKGVKELVKKGYASIQDKLRVSKSSKGVFKEAFPLYDTEKSRLSSPDNHIEVVGLDPGQVSVYATVRANITSPETFKASDFKGSQSSISSREYKHQSLTRFSARAEVGRRLDNVEYGQAVQAFDSVSLKQPDSSVAYSSVIYCTLRVRVVELLSEERRLQKFARLRARQRTVDGMARDIAFGNTYRQEVRKEQRSSAEPLSPERRKELLKKIRDKRRVVFFGNGQFGHGARGACPRKALIRALGVLCPVVLVDEFRTSKCCCSCGVPLKQVDGSRVFRCSSQMDEGRSCPVRYIDRDANGSANIGVCGVFQLLGFKRPSFLCRKSSEGK

SEQ ID NO: 2469 - protein, 1918 aa, unidentified
  REGION 1..1918: note = Table 20
MAAGKRRRGRCGRPRRRRRRPQQDARHAARRQRRRRARRELARTCSPVEAAERLEAAKRAAAAAQAGGQAAAIQLQAALADVVHWERVGRAIAARACGRQRWKANRRQRRTESRAVLGATAVVFTAASRAEAAISACAVPRAVRLRSTLPPKPLPGVATRLPNFYRLAPGITRLGPPARRPPADGDGDGAAGEPTRGAGRSKKRARDDAADPGEGGSRGGGGGGGGGNDDGAANAGEGGGGGGDDGGGGGGGDGGGGGSTRKPNYRTFKKTLNAATTHRAVTTWLREVVDAVQPSLYKGRLILGALCTMAVSFPAASVASGEKAGRDDAGGSGNGGSGAQTRAQQEEAGLTAAAAIGTSAGGGGGGDDTRAQIGARRLSNRQRGLLMEALRAESAPVGEQPRQKARRRRLSKVAAKGTGACPSKSVTPRGGSAAPVLVAADTGETDSSSGGTSDTGVGGNGKSAKMRVLQLVERIVTTELALAAAPSLSTAALRRLVRGAAAALLDPKDGRIWEEQAWEPDDAGGIMPPLKQPLVEAQLSALAAARSALCSLRLDLERTVRVGNADLRVLDFLADGGELVDVARPGRAQEAAKEVADEAAAADGDSGGEGGYEDAEEDGDQAEEMPAEEAGPQPAGEEGNAVEQETDATEELSCGERGLKLLVVTAPAKQLILAGALLLHGSAYADKCQSRRDARIATRCAKALPLASTLQSVCSVWQGLVQPPQQLQPPQQPQQPQPQQPQQQQQQQQQQQQQPPQPQPQQLQQQGQGPTCLQGTAGDLLAALAHQPVQAHPSGPLVKAAQHEEAQQNAGLLRMALELLDEGAGAGAGAGAGAGAQAQGPADAYDILCDALHHVDARLPAALHHNVAGTLEAMRSYQHRGAQGPAVLVWGNCPGRNAVSGLDETWGAGAGPGCALSSHVMQAFDEGVRAAGGFVFFMDALTQHLSPRALRDMGRLPDAAGFDGDDDCPCPSGGCNEASFQEEAAAAAQLVARFLRLALGGSPEVRVLFAGARATAFAPQLRSALESAGLSVARSRSAKHPSLWTPAAAAGHLRWAGVRGRSDAALAALAAVKAAAPASGEKRGARSRAGQQHPGARYAEWHRVSLELEARCAALEKRVDESVAAMQETAAAEAACREVECRALLRAAAAEAKAADAALAAARATDKQRLREAAERRRKTAGARHYLKCREEKRHKRRRRSAELAAARADLERHREAKPPLPALPAADPQEWHRAVAQALSAFKDAVDASESARHSLVAATDAYSRLVRACRAPAPSAQSAAPDPSSLLAQLLARLHHVGTAAQLAKLCVEHACAALASAAGQQPEPAGLAAEAQQAAQMAKTAAAWVQAADNGERRVDNALPWDEAASRELLRRAERGAIEAELGVGYAARRLQATIFDAAFCVGTAQAAAQGPQPGGAPPPAAPPAAPPAAPPATPPAEPPAAPPAAPAVAGAFEGVAEGLCRRLRAAVRRAQKLRFSLAPVPHFTTNFVDITDDGARCLHFEFSRHPSRLASFVRATQLTYTKKPERDAATQAAWCALFKPAALQKDASEPFAGGVATDGVSLCVRVLRRPLPGDPPPRSRMGARAVRAAANAAALKRALTEIAGRVRADPDFEDPKRLPAATDIAAWDALFIKWGVRFVAVDPGIRHFITALILGGPFAPDAPSPNPLDGIPEGSVGAPQRPGPGGQWHRVHSWRTNSRQHRNACAFDDHKRWRAGHLRRADPADRAAVAAVPTAKTAHAPDFFSYCRAAVAAFEPGMKLYATLAHRRWAVRVHAAKQKQLHRPGLTIIAWGAASIGAGSPIPRACIPPVRALEALLRRHYGRHVIFLLIDEYKTSQVCPFCWQIRRDKFTLMGPKQGPKSRCTAVLACHGCMHSHLNRDASASMAIAARAIGQVAPAAPRGGLDGFERKRKAP

SEQ ID NO: 2470 - protein, 763 aa, unidentified
  REGION 1..763: note = Table 20
KDQKKVSMCVSSNPETLLGQWKEKHKLHDTIRSSTITCGLCSVVSPTMRVPKGCCDDHVDIVSVINHTAECVSRMKVAGSLFASWQVHHRMQQGESYPVIDTKHFTQIFLCITGRQSKSIYNEEFTLFKQETGFADTIQIVKRISQVLEHTKNEMVTVFKNGIVLNFPKRIRSCLRWEIFNMLRDDPEFIRLRDRNAEAAKLVDKCVACVSAMKGLLTQYEPWSVETISRVNMIIESHQDELRTSLVDAHRMVEQRKQEKRDTAIKRKMNKEIKMGIVDQKAKLNTAIEEKKTSSQKKAKKSASLLAETLSTLPHLVLPYLYWARSRIDSLPLSQEYEEVRLSAHENKKAWKSWKFGNRVRLPMFKLLPINHTKIHFIRIDKAQLHLWGLPVPSDRWWLDEVFDVYSKTANIRPLRRYMDYRTPSSTVELCDLVDHGDKGPYLPGLSIQTDGCQIKIPILSLRNVTPNLSRLFERAYTGIPVEPEKMVDISSITRGIYKASGCVLAAKEVNRDVLGCDPGRKRPLTTCKSKVQEILHNTTNVILNSVGKEKYIDNDTYHGLIGSTDFHAYDLQRRTLNTHYKQAIEALQCVRKKTCNASQMTNYIKIKLEHEKHLSMELHTSRRKRMKFMVYRRTQSTVAQYVKDMLQGCQNPIIFFGDGCFPAGGHGYAPVPKKRFIRQFAQYAVVILVDEFHTSKLCPRCHSELSDVESTCQSERLRMCPTKVEGSPCFEADRDCIGGINIMQKGMFQLCGTPLPAFERGS

SEQ ID NO: 2471 - protein, 757 aa, unidentified
  REGION 1..757: note = Table 20
MVRPSSDGNSHKKKKHKKIPPRAPPKNIPGFLQTVASLYPNQYLTASGNLPKSCKGTYCCQLFSRVRFGKEVSQQLRTRTVSVGFRAATTDEKRDTFQSKVNDAVDHLSRERVLASLFANFVFMERLQNGSALPEPDRAFFKSCLSSCILSRGGGSLNADFDRFSEITGLTRLVPPKSMNLDQQREHEAQRMATATSTRATHHAEKRRISITRWFLRGRISRGDLDCKKYATKLYKLAEKIITNFDGTPEDTQKLRIMSRAIDPGTDTNIIIDFAWQEKEFSDRDRGDGKSAETIKHLNWMFNTYVAESRRMYEEAVSRSHLFAPGKDKACRKKRDEFVKHELGEEFTYAPPKDTAVLPICSTGAVFIYIDMKTLGSWGLLHSNDAWWYKDVLRPFSKEANVKCLVNKENARYASSEHGYLSSLLESGPDKCPWMIGESFLTDGVQIKLLLKTLEHGRKAFSGSSELNEEGYNKLPRADVQLESLLGEGRGVYNISSLLKSTSIREDVVVMSADPGQAKVINVSSATARTWAKQDPGVILKTSTCVFGDDYRRDTLASRSDEYETFRRKGQPYGVAIDRLGNEKKRTSCLATFIQYCRRWCVNGPVLFRETLQTGRKFMRFDRFRATQKTLALIADKYMGHVEDTCRVMLFGKASFRAQKGRASAPRKALIREMASRGVVLMVNEYNTSKMCPGCGEDMVEDKERRIRSCKNFKIGSPEESCRLHRLTPEFEMDRDDVGSTNIGMRGFGKLLGQVWF

SEQ ID NO: 2472 - protein, 771 aa, unidentified
  REGION 1..771: note = Table 20
MPKKRPKRELTATEIEERRKDVADKRKKKKEDTSVSNYRNRLIHAFGERVVQKLDKDGVVQGLYSESQDQEELFLRAFDRMRNKHFVPRHRVVSIGLRTVLKDTALKYDILCKMNELVEYFSKVRVYASLFSNFVVISCLDSTTPLPQIDSAFSRDCFGVFCYPTRQNPLSEYMERFTSLTGLPAFPAPPFTKEVKNDQATKLWTATKTRMEVHYQSRVKGISNWVLRSLIRPHHTDITDKAFSAKIHKLVTFIDTCASSEGVDAKLEELGFDKPPYVDAVKTFAERAKKQTTVTNQIQHWYDLQKEYVDEPRRRFELMVRIAIKMYPGKDKPNKTARSTYLKAQLIGKAPPKILAPLPMASPKAAFIRIDKSTMKALFPSLDIQMGPWGYSAFLDPYSKLANIRCLRNSTWGRSKRGMMAATGNQDMTECPWLVAPTFETDGHQMKLCLLTSDATNGGAPGVRYLNDAGYKLRTKNVPLQTILDLGRGVYNDTGIIYGRREAVDDVYIGGIDPGIIKPINCIYGTGAAWRDMKGALTHDTAFEYVVVTEDDIKQMYNRGRSSHNEAVMRSRTPYGQALKTLWKYRKKSSRLQDIIAYCRTWRSVESLYWAEILKKVRKVRRFERFRNIQTQVQNIRKKITTHLQGRRGLLVFGNGSFKAKKGHISVPRKQIVRALAIECAVVMGDEYGSSKYSPLCEHELVNLDNGEGRRPRVCSIPLCRTDTFDRDDGGVGGIVKTFLSRFGAGSCRRRRVEQDDGYSTEEESSDVELW

SEQ ID NO: 2473 - protein, 543 aa, unidentified
  REGION 1..543: note = Table 20
MTKNAFARRLHDIMTAVVARPTPSLQQLNVLFVHHGLFGVEMSQFQPLLDALSARPVEDSTDIPSKITFCYGLQRDYLSADHRLYESVRAESWRLVSQDKERRSAFMSERWQHDGKPAREMSPLPTCKTGAAFVRIDQKAIRKLFGCALKDCGGPWWYQDFFDVFSKRANIPCLRGSGGQYARSEHGAFIALKKTQQQAAIRATLCDPDAIAAFDATALRCPLFVDASFLTDGVQVKLHLVTSALDNGGAPGLWGLAKAGYRALGSMPRTMREIIDIGHGVYNVEAITSESLSDLDGVIVSAFDPGQEWRRPNAAALMSTATRRGFAGDRYQDGTLAKLSEQKEEKRRRDNAAYGGALDALTGQRRRTSALAEYTAYCRAWAHESPHLFEELLQDTRRHHAFRRYSSVQRAVAAVADAMVPVEERGKRRVVFFGAASFQAKSGCASAPRKKIIRECCQNFVVVMVGEAYTSITCPGCRRETIEEGYRNRTCITNPGVAGTICPLHPDTAHAVFNRDVAGAVNIGLRGVYRSAAQEPEGDRPLG

SEQ ID NO: 2474 - protein, 724 aa, unidentified
  REGION 1..724: note = Table 20
MTRKRKKDDDGPDPGPAPSRPLTQVQARQRALKDDLDADNLRNRLIREFGAGVVLKKDGQLPSEKQVQQEMLIRAFERRRGSPPGQGEYTRSRVVTARLDKVLLKSNGKAVGDALKGVVAVVSRCRVLASLLANYIHLKLWEEGAPFPDADAKFLMACLTCVRGGGGGQEEVRDRWEDLKGASDLTEVEGGTASINQVMMYQAKEMAVAAQNLTDLHYAGRGRRPQAAAGEAHDRAVGSDARALREQLVAADLRDVADDAERLRAAATSLPARSPLPVKRRHLADLQAAFVEEDRRSYDALWGGILGELPGDGLEKERGKALSAAWAYGKGPPKICSPLPHCSPGATFVRFDSTCLKQLFPALRGEAAGSNACNRYSRSEKGMFQAIAAASNPKARCPWLVAASFQTDGRQIKLQLVTSRRTRPAPAGLDRLHEAGYSGVSTRDVQLAEALGAGAGVFQLKHLRGGTEEMFAELDVVGVDPGQPAHAGGARRLYRGARCLRKEGQDRETVRRRTNAAYGMAVEALRRLRKRTSSSAELVAFCAEWALREEEVWRELLDARRLKLAFHRYSAVQSAVEHVAERLCPRVAASGRRRIVFFGAASFKPRKGHASCPRKKLVRVLACRAVVGMTPESGSSCRCPGCGERTRSGPGYRTRECTSTPADCPLVAAGLSVFDRDNGAEVTIALRGVCACRDILHVVPGFSRRGAPAAAVADKDEDSDTEEG

SEQ ID NO: 2475 - protein, 795 aa, unidentified
  REGION 1..795: note = Table 20
MTLITIVHDCNAPPRHQQLLTYGVCTTLLVRCRAVCVPVLQPRLLGLLSLNFTEKSVAYALAIQLALSQGPSTLAPALCGLVIGAAYRLDLFKLQRAHLPAAVYRLCSKLHPCFRSLRRPEAVPVAAARGLRRRLTPPRQRSLLPQISGGGNGGGTSTAIGGGAARSRAGAAQRAQQQQQLSPRSALMPDAAEEAAAARVLVGMGFRHADAVTALRATGNNNVEMRYFERCTRRDPQFQEAEAQFTEQTSLRRPGVAVAANYAAVTYDTLSVRTRHYFTWERRMRSFNSYRACERAVARVARDIIGPRDTGVHRVVFFGKAKCGSGSLGPIPRKRLIRHLACLAAVVLTDEFRTSITCPQDRAPLHRLAWGSRVFRCANARPGVPVVVRCNVGAIDRDHAGADNILMCGVAMLLGGGYQRARLHGTWQLDPVSFGYPSAIVSVTCTDDVAACIKYAVANNVKFSVAGGRHTYLCIVNDRLLIDLTTHMNKVTVDGDAKTAAAQGGSKLGDLDAACEPHGLGVTSGRVPSTGVCGQMANTGGRGHLERVYGMGIDNLLKAQASLHLTMHCVVPSPLTFKLHELPNGGNLLSGVRVHLPLNFFGKPDRYKLLLDYAARAKTAPNEFSSDFMVIGGGRTTPIIEIVAWVGEPSDGEKYFSEKVKTIGKPIADSTGIYNYHKGLQGGKAHDVSVDAMACPDRSSSIFLVLIVAWNPVNDLVVRKAAQTGGEVITADTPMPAYWDWGSNLPRLQELKKKYDPDHWFDRAYDSIKTGAVMAAPETKAAPAELGSTPEAATA

SEQ ID NO: 2476 - protein, 713 aa, unidentified
  REGION 1..713: note = Table 20
MFRSGRCWCLIWLAGAHVVGAQRVPKATPAPTVAETLAPENCKFTQTVCKGIGAAAGFTGDIGAVSAVNKGILCCNPDHKCEQDSFGAPRCVLNVGEEICDSGDITLKDLRSASPQDSQISVPLPLFSSVSGISNTPAPTKEFEASLTSSAPFFKQFDKSEDGKFSRVYSPLVYAKCNTTETTCVRKTFAGVGTAVYCMNIADAKAKPCDFGFKKVVCKPNAECVKDPQDEGHCLPTKGANSVKMCTNGLKGKDGRYTICKSEATCAVSSSKVPVPLCIGDGFKLCDGGGPKPNICLSSEKCVIDKNKNGQCLKKDQFLCDAGTPKGAVAVCDGTQSCVFDSASDGNCLDKGQVLCDNGFAIGTASSSSSTFNDAQDGVLYCDTNKSQNCLIQLKTNSPTCLNTAASKTACRDDNLNFSCGSGFKCNKSTGACEATQNYGVAPDQLQGAAFSAGANLAATALAALLATLALFEALAKNTERYFERCTRRDPQFQAAEAQFAEETSLRRPGVAVAANYAAVTYDTLSVRTRHYFTWERRMRSFNSYRARERAVARVARDIIGPRDTGVHRVVFFGKAEFGSGSRGPIPRKRLIRHLACLAAVVLTDEFRTSITCPQDRAPLHRLALGSRVFRCANARPGVPVEVRCNVGAIDRDHAGADNILMCGVAMLLGGVRPAEFCRGPDCGKAASQAHVWVNPHAGERLPALLLLLLWGM

SEQ ID NO: 2477 - protein, 193 aa, unidentified
  REGION 1..193: note = Table 20
MCSLPSFEALAKNSKRYFEKCTRRDPQFQAAEAMFMEQTSLRRPGVAVAANYVAVPYDTLSVHTRYYCTWERRMRSFNSYRARERAVASAEFRNGSRGPIPRKRLIRHLACLAAVVLNDEYRTSITCPQDRTPLHRIALGVRAIDRDHAGADNILMCGVAMLLWGVHPPEFCRGPGCGKEASQAHVWVNPRAG

SEQ ID NO: 2478 - protein, 667 aa, unidentified
  REGION 1..667: note = Table 20
MFKSFILKKKLSIINKNKSEENVDDPFKVVKSSRAKRSQSSDLKEDKQAVNKRVTVHRDLMNALIIYHQSPRCLQNNLGFPYKDLKRELPFDIAVNNEYKELPINKIIITSNDLRNIIFRAMMFINSYCLAFSRDSIPNSIYKQAFWYSKIKLRAKGNTKAFYSFIFISIIIGSRIELPQKKVTKSANVPPDLVQSWDTHRASITNSVYNQSLQSESRQFLSEACTELATCYTNYIVENFEKRLLSYLRYTLQNLLVFVCGGDPSWPSRAPSLEELQKSSIINTCRLLKSHLPDKVTLAALSAHPEKHISVFLQILSEYELEHTSHNPFDARWLPLPRLFGLFSKPSFHFRSDLEPNGKNQIMFGNLIRSNGFSIDCLFYKRSPTPIEVRNRTLQLELSDFEFNEVQNYYKPVFVDLGRKVVFAAAEGLSIKAHSLLRCTIREYYHMTGSTRYQADQLQQKRQNGVEAIESHIPSHKRASQAAYIERVQYILTHLDVLYNFYGSSTAKSQFFLYQRCQKVPEQTVNILIHEDSKYSQKRRKKKAKKKKQEEPTNPKTLKPTSRQNEYNTSKTCNNCQAKNLESADHTRGPSVLVCKACNTLWLRAVNAAKYMMTVALSTWRGTHRPTASQISDKSKQTSSNYHNNPIIVPKLACLFEPFRQIDRLSE

SEQ ID NO: 2479 - protein, 571 aa, unidentified
  REGION 1..571: note = Table 20
MFVPTNSNNQSLEALRDDSPWAADEHRRFLDALEQFGGQAPGVNETWHAIATAVGSRDVAQVVQHARLYFAHLQLVNAQKRREHQLMASVDQRWTPEEDAAFEDLLAAYSASSVCYPWDVMAAHLPGKAPMDLKERYQKLCYDVARIESGQHVTMHLGQFARHPSGFPSSTKAGQGTGAFDASMTTPRVLDCVVTLTPAEEQILVSAMAEVFVPPEAPADLLADIASAVAAFTSSNGRLPPQRVHPLFTKEQALEVLNGLLTARQTDPQTVLETLAERLRLHPHALDVSAGVFFSGNASSAAACEAEAAEPNLHLLATTGLTFGSLLPSPFGSEFAMPFSSEHMQCAATTPRFMSSLGLLMQGPVDSLRLHAFLSGMSGNTNVLLDNCAMHQASHVLAKRGETSISQVAKASKQVCISYGDWSRRTSIKGHASGPAKGFVEALMRRATVIPMDEYRTSITCSCCRQRLKQARLFTKMKRKEDEVDIRQKERLSKKEVKEVVEMARFRNPRLADKKVVLKCARNALRCINIGCKANFWNRGVNAARNMLELLKSGLKGKHGARRLRAFRRGQ

SEQ ID NO: 2480 - protein, 1305 aa, unidentified
  REGION 1..1305: note = Table 20
MSDEEQAWEDESSEAKRARKGKAAMTDEDYRRAEEEEERAAQERDAMALLVGGLHVSPEEARQLMDADTAASAYYETATVMAQRQGRRQPMEHTAAEEEAGPSNAPHRRLSQAAHRQGRRQQQLSPAQQTPPQPRTYCEVAASQGQATPPPPVRQAARSASKKQATRAQKLQAGGGRRVAQPTGQAAPRPGPQPSRGQHDSINKQIASDAILAQYFTALDDLPPPDETTSESADLTQSPQEEQSDPLEPAEDVEQAAAAAAPAARRKDRRSKTQRKNQNKRLRKQKAREEARQDDLVLEEAYKQASSNSDRTASEEEEEGGAGGQQADPQALAPPKQKRQKKQAKLKQEGAELFTIKTGLGSIIRLSVLWRAIEAAVVDMTQVCVETWNGLLILVARSCWAQQPQQPHDLEDLDDELQQLLQQPLPLMDQKFILSVMIALTGTRMPARANTIAPSAFVQKVLEHFYKPRNFWKRLRGWITMKIRQLESWHHQQLSCKKRKLLVDAVQKSIWNNVAFASPAAVAADHRALSDDVGALVAHVRQARVGLLPVKEHLYSEWHKFFPWLHTMLQDIEEHNRATRQRIVIARTALNTAKGVVEDLEAKLHAAQHDQPGQAAPRHKKRKQKQDPPTPKGRLRNVLRKPRALDPPPPQQGAHPPLAAQQVQQERQMHRPPMMPTPSWQHNASSARLTKHRNKANHSTWKQQRSRQWHYKDRKKAATAAAGSGVGEDEPAALAGHQPAAFVGNAPAGTSAARIATGPAAARDPRTPAQLKQALKEARKTVAALLEDLVKLRKTLAKTFKLVPSAALTPHFVPITPEIARARVNAFLEEEKELEEADKGLAQGKDKKRRSRTYQKYPRLDRPANITKAEWRKMLRQRRMPLLWETYFDLSGLRTAHHEPQAFLMTNGVQAHVQVKRKSQPARSLAVIADELKRHPERGEELERQLQEKRRELLKGKQWVAVDPGKRAWITAVSRSDNKSHHVAHQCTTKHHYQQTGSIKRRMRMERDLAAAPNGLQHWQSHLQRQDTANPVALETRLANLTTRLREVLVFYDAFKQRKWKWAAVVQRQRVLANEARRLCGGLPKHEYATVIPTREHLTSQSCPRCRLGWGRGQRSYSVRRCDKCQTYWDRDVAAAKNILQAARADVAGVARPRHLRRKPPPQPAPAAQHQPPPVQADDYAEDVVVWPAHLYDEQAPMEEMHGLEGGLGAMEVEFAPGWGVQELAAAAPWADPFYVLAALAGCLSDPEAEAADLNTRLLQRFSEAFGYWNADKRHAVATALAPLIVHRAYHHLVPNLKSYLGEVP

SEQ ID NO: 2481 - protein, 405 aa, unidentified
  REGION 1..405: note = Table 20
MPRVDQSTGTTHAKRETSRTIIRERDGVQLGFVDGKTVEGYFGSNRVVDLESSDSTPPQLAVGASVKVLTLKSEVVAWAICFKRQVLQVKELKRAEGNAAAAAFDHGVDDDLEMAFQQLGKRGGIHADNEARRKPLRSGGSPFQNSNLTSKWRRVCENQYILDEVAERVVTLQQVKMEATHVANLHCLRHFEHKYRPRSRHDHEATLVLNNTFFLSCCTLAEYRAERETVSGYKPPRLSYAGASLVELANAMVVNAANHITIHFNRRLSRCLELSFQLSRREMRVMMARLQREECEFTVAENEGLDWLQEHPQRGATALSIDEFRTSKLCSECYGTLQKVKFKVENDSSVIEPRDCRHVLRCSDRAYNLVWERDVNAAKNMLQLGLLRIHGELCPQALTRGHNIG

SEQ ID NO: 2482 - protein, 289 aa, unidentified
  REGION 1..289: note = Table 20
MLNNQLHTVPEVGANAAAIAASRRDAAQHNQLLETYVKKSQHTQAPPNQTGKWRSMSKGMMQEKRGRVERSQFMDKFRSARPALRRFNANMPMFKTLDLAALHNACQYVTAWLPVVKPMALSNSLASYEFGAANAERAFFDRLAAPLMLSPDPTRPALVYFGNVGHLSPHPHGVSTPVRKFLCMLVHAARVVLLDEWKTRKTCSLCGSEMPNDACRWGAKRCRTCKRIRARDRNAYLNMVRVAVMDVLAVSFPQHWRDRGHPLCKRAPLVISLGGAQQVGAGGEGGGAA

SEQ ID NO: 2483 - protein, 204 aa, unidentified
  REGION 1..204: note = Table 20
MNTLNTTFSMFGVFPFQVVYYFTKATLNYGIQQQKRSDCKKNEKKKGKNKQQQYRKQVQSSNCCLWEWYVQKGHSENERLTLRCCLKKGEDAGDLLVVPIDEFKTSRNCCWCETDAFGSVNDVKNNSVFIYKTCNTLWQRDVNAAKNMACVVQKLIPEVRLIFNSQIVVLITVFLANGILDYYSLTSLNFLLRLIQKSTKRGFQ

SEQ ID NO: 2484 - protein, 284 aa, unidentified
  REGION 1..284: note = Table 20
MALALIVLVFLDRNMDLVPVVNHSLDISGSRSGCDGHELNEIVVQTKENGRQVKKKDDIKADFFWNKNDSATLSGRKGKDAAVVSQMSGVNNLDDVSQLDFSSQASHLKTTIKASPKLAALQDLGIPPDASSPFDSRPCHKLHMCHWGLGAEIPPGKPQPWFVVGDETFGIARGPNFSQKFIAFLKQKVLGLNGKFLCCSEHHTPSRCYQCGQKGKLVGRERVCDICGQRLDRDHNAGTNMAKAALRQIRNQVRPRQLLRERSCTWGAQYRVMDPSMKPAGGLM

SEQ ID NO: 2485 - protein, 301 aa, unidentified
  REGION 1..301: note = Table 20
RLWDVDTGECVYTLQGHSQTVASVVYSPKGDRIASGSWDETVRLWDADTRECVYTLQGHSDIVSSVVYSPKGDRIASGSDDMTVRLWDVDTGECVHTLQGHSHYITSVVCSPNGSWIASGSYDDTVRLWDVESGQCGSTISGFNGVITSLALKSDSGSLFLVTGSSDKSVRRWKITKEVDEYKSTLCWSSTHEVLTVMNLSFKDVHGLSRMNRDLLIQRIELDGTLLVEALNFKIVRGDEFRTSVVCCQCKNAGTSVHSIRCVSCHMERDRGHNAAHNMARAALHWLKNSSWPEKLCRLEN

SEQ ID NO: 2486 - protein, 288 aa, unidentified
  REGION 1..288: note = Table 20
MTQEHVANEGLDPESYTVVGIDPGVLNTATATIIDSNQPRMFRSMTIPQGSQRYMTKHGDFTAKGGPTLHQKSITTLNTKAEARNKRIAYVNEFRTSITCCQCGTIGQIDRRALDCGGCGKGRDRDHNATINMTCVAINLINENLDRSSYSEKMTNKTDEGRIQLEMVTTRNRCKSGLASPPPLEIPLPKARRARQSKPRSEVPPEEEESETVESSSPTPTPDSNSPPPESSSLLQESYKDSSRQQQHNGNCHQLEEGVHSTDEESEKDGENIDKAEEDSEEERDDDE

SEQ ID NO: 2487 - protein, 558 aa, unidentified
  REGION 1..558: note = Table 20
MAGPSSTPSHTYTRTGSGNGRCGSDGGGGGGGGSGNGNATESGGDTQEKLERQQADAQAEANSKLRKKQQEKGDQKKMKQRGQQRRRPLLPKEVRAVLRELRQQIKERTHKMFTPIPVGSLTLSHITVEPHVLQFIDPIARVSKLSKDDAFKARFDFSSVIPEGSSWSFSGMTTNGVEACVHMQRAARPPPPPPPSLDDMPAYDTSGVVVCWGADPGRISMFTAVSHVDCKMWHDVRQLSTGKYYQAVGFTQHQRWLQQQLASSEITAAGGTGLQAWQSHMPTANTSSADDLCKRIRHMSEGLRPTIVHYSSMQHLHWKLMLYGNKRRMLLSLVRQMTGGRRKDQVLVGFGNGTGGWRGPIKGHRMPPIKEFRQLLGRFATVVLVPESYTSKRCPCCEGLLKRTSTHAVNRCPECCYWDRDVAAAKNFLNVLLSHMAGQGRPAYLQKAANPPRAKKQSAAKAPAPAAANAVAPPRGPKQPAPHGLPDHIGPGFFCPDALAPAVATVDASLGGPQQQAPHGMPAATALPLPAAEPAAAPSGSGQAGAGGEVDGSMMELD

SEQ ID NO: 2488 - protein, 985 aa, unidentified
  REGION 1..985: note = Table 20
MTTDDVQEPVRLADEGDGRYRTLLKRGVKLPLGVAPCIDANGAAVLISSHRISMQQPDEFVLPEVAAKQHLPWDLRSFMRLDDKGYHIASARLQTMRLGGALISDNLRRTIEWIHGGCQGPGPPSTYTYTAAELKGLSKEELKELCRAHDLPLTASNSGQLTNRLLNSHLCAKPSTDLPDVNRDIITLPFLLTPDLLHPRVRNIIPNIRKRTKQLTDIYSTFWDEVAVWLHDLHNRERLTAILTSVDTARAAPRKQARAKREKEWAAREKERQRQRDGLADSDSRVGDDDSDGDDENTDSEDAPGAKRRKPTAVECDHDETWLQEVLKSILHQLAGVRCVKPSADGHLPTPLYNEADGFHDMKDLLQVILRQVLTTELPVFVKNVVSEARKMIVAMIPATNGALRARVASDTRPGEVDPARLEAYPEYLATLVHETQLLADEVDDHCRFLRAMRLGIMFQAERERQADCDPFLPEFKLLPKGSLSRRHAEIGHACADQLLRHYGYMELVGTGLAGLFNWQAPKFAGILHHPRGGQPLLGRPTTVTTDGYWVHFRFERLVRAWTPSATGRPTPRVYNNHYAISKIRQRRKAMTTVDELHRWRLRRYKPDNQGEQVDEEKLKWTGVVDGEALAADIERLLATRDSTLAKQREWAGQLKKLLTCEDGCVGADPGLHPIVALSNGYVVERKFVYQQRREQWPKQIQLLVKELSKKSVNVFSMNALRAAVAARRQLIPLATEFFGSGKRCRRRGFMANGKQSVRDRVTAGLLQKRDDEGKAIGKDMYNVVFFGSGFSGGSVKSLRKQLGSRALVVMSERLLLNWPPYKYRFISSCSSLSTAPEYFTSQRCSCAEGRASGTVWRVTAPGSKWQICNQCGVKRNRDAVSAENILFLGLHLFKTGQRHELFQEQADVTAKRVTRIAVDDEDSEDEFSDVESMYDDSDDDSSDSGRLDDDEDDNEDNNDSNNEDEDEVDGEGGKEERKLANDGE

SEQ ID NO: 2489 - protein, 693 aa, unidentified
  REGION 1..693: note = Table 20
MSDSKANEPKKRQRGNVSRLQLDALLKDVEGEDTVPWWNHRLNFAASNGLISDLQLRRSLSYRNSCVKTSLRSIGVAKPLQDRFRLYSIACSKIQHRLGAVLNMAVVIHKDNEASLCRLASVCQDVQSLRDIMLDGPNPKPLEVVLAETRYPSLLRLGPSDEEISLMSSWDQAKTYIANRFVANVQVHVRSHLQRRIKKSLRSRINNTENDVAMKYVFSDGTAPEDSEDREHCERMKTRLYALKLLSRDGFTLPKREKVSPDMMLLHFDLCKEEIASFQPLPMATTLSRCHARICERVYGTLTKGMPNVPEFSSLVRERRKRVVPRRKWTKKAFRQVRRSQKAKKSGKRKQQIKKRRKQQKLKPDQQIDSLETDGYSVSLALKTPHKNPADNLSPEEKFEKHIARLKKVMTKPDAFVAGNDPGRKNLATQALLSVGSEVSSTQASRVQFTRSQWNSVIRSKQQRAWEEKRRNGPVKTALDALSSSGGKKSCNEDKWAAYLTASVENQRVLHQEFLENDERQRRRFLAYGRRQRAIDRVASRMVNTPDRKPLVIGYGNGSFPCHGRGGSDTSVPVKSLYRAVIAAFKKKRICGGVIKVWEYFTTAKCYRCHNRMEKMFKTVDGKKVEDRDFRCCATCTHEEHPKLRNRDWNAALNILVLTIAILKGEDRPEYLKPEKKKRRSAKRKADGSSIAH

SEQ ID NO: 2490 - protein, 1353 aa, unidentified
  REGION 1..1353: note = Table 20
MVRGKPAGAVKAPVLEAGLRGYCDSLERDNALQQFRVPQRTPLLQLLGWALRHGVLTGDEVAASTPLACQTRPCYLQPLLQHLPATLEPALERYVVASSLAGHRGSVILGIGANTAIGARSPSALAPSMRRRRAAASRHSTASTPATATVASLSDGDVLRDLQLAAAAAVFSGVPEWARPKPALPSARRQAAAGSGGGGGSGVGGAGGGGGGDGGGRGRSRSSSSGLGSIGNDSWSSSSSRFCVDPAWASLPQRHPEQQLVAAAGQAVAASGGHAVVASVAVGGAVDISIDAVTDALRQAASATSRRRYPAWHASLPTGHAAAASGLLARPRWLAGAGATTRPAAVAELRASTASAGQRAIAATRAQPRLAAAVTSAASSCSEAAAASMASASNNDVAAFCLENERTDASSTQLWELLNTQKLLKQAFLPEYYPSPRGTPLHPLLATVMTGPFTDVLPPAPDWQGVFKTPGCWHKPLDQLASKYLANVKVHVQARVRKRVEQHVRAMELQPDTPRGTKGLLIASVLGRPRPLIAHNQDYSQVMDFRTAMGAVGTEPPPKDPKYSHDLFLLHLHLARYGPKERSYLPVVKLGRRFCYVDGRVAAGLTGVSYECVESNSGGGGGGGTPRRGRRGGRRRGQAASGDAAAATIAVQLALAGLPGRQLPDAAPSGTPAAGAAGGPGLPLHAAAVAAAEQSQAQARAVAAARKIICEAAPAAAAAASSQDTEPSSNRHRSLAELWGLTPGQLAAKGKAERRRKRQLLRRAARAATKEEQPELRRHERQLGRRAVHRTVQILSMETDGLSARLTITRPQDVRPHIQPLPLSSGTIADAATTAAHPAAYRSSSSAAAGRVAASPSSATAAAAAAAAAGRVAASPSSATAAAAVAAAAGRVAASPSSTTAVAAAAAAAGRVAVSPSSRPAFAGIDEGCVKLLVVAYSHDGKTPPHVIVVTRSWYYHEMRYRELTAYGKDWRRQQRSGILVAHQALSASGGLYNCDPAKWRAYLAVQRQYWPALLQESVISKQFAQRRMLLLSNKRSAQDRAANRVMRALTHGLPKERPLVIGVGSASFSPTAGGGALAAPNTAMREALSRVAQRERQATGRSVKIVPVWEHRTTLCCSTCGAETQGAWVRRNGVLSRSGRIRHCMECGTSRDRDVQGARNMLRIVEDEYDGRGRPLYLCRQEHLPKPPPMAPAVPRCILPQLPDGLIEALDGRPRGTVAVIDALSALQAEGDVAAQRAAQAVAAAMDQQVEASGGNSLVGEPQLQAIDVRLAAGPPAEVMDAASGRPRGTVAVIDALSALQAEGDVAAQRAAQAVAAAMEQQVAEASGGNSLVGEPQLQAIDARLHRDSVLS

SEQ ID NO: 2491 - protein, 754 aa, unidentified
  REGION 1..754: note = Table 20
MGRRNPEGFVKKDELLARLGQQPGADLKKLKKLGKDELVWAAFDAGLMDVATRDASFTRRMSTIPCYLWTHIEDPELRAAIEQYVICYSQFYSRGTYLANLVALAALPEQLPQNVIDVEPAALAPVPDILLDENMAKHCFLPERWLDDGRPIDQQVMAAYAANQGVMEALRAGTDYKSVMDNRGWDNALNHMGTMFLGNTKVQVLTHLPKRLRRYLEHEHPCHPDTDRHQFVRAALGPLWTPSSALHQDDLDWALRLRAFLEMEAADATQWLRLYESSVLSDLCRKAWNLHLWLQGRASPDRGFSLLPVSALNRKYAYIDARVAEYLLKKGVSLAARKRLAAATQGHEGSELARMLGLTRKAFNKRRCKLRAQLRKKYAGEESAKVLHKKWRKIGAGCFPQHGDLKVIETDGVGLRLKLEFPNSERRPAPASGSCASGSCASGSCASGSCASGSCASGSCAICHGQVLSAPLAEGASPPGKPPLEVGIDKGRVRMFAAATSDDTLLFMTRRAYLYAQRDKRSKKWEAERMTGTAWGEALAAMSEAGGFKNRNMATWQATLGVVAQHLTVLREEQLLPKDRALARMRRFRWKKAFLERGVKKLVKPAIEEKRQVVLGMGDAKFASGGRGEISVPTEGVDAALRKVIRMHGIRELVKQRDIDEYLTTKCCCRCGKETVAAPTKRPDGKGSLRYRLCVNCGAGTAGKRRNRDVNAARNILLLLQAELRGLPRPEYLRRPIRAPQQKQTTSSGRRRRT

SEQ ID NO: 2492 - protein, 155 aa, unidentified
  REGION 1..155: note = Table 20
MLKEFREFAVKGNVIDMAVGVVIGGAFGKIVTSLVNDLIMPLVGLLVGGLDFSNLFLQLIDDGNTYATIEAAAEAGIPTLNYGLFISSVVDFLIIAFSIFIAIKSLNKLKRKEELVEVVEEAPTTKTCPYCKTEISIAATRCPNCTSQLEEVIEV

SEQ ID NO: 2493 - protein, 157 aa, unidentified
  REGION 1..157: note = Table 20
MLKEFKEFAMKGNVMDLAVGVIIGGAFQKIVSSLVDDIIMPAISMITGKIDYSDLAFTVGDVSIKYGSFLTAILDFLIIAFSVFLIVKYLNRMRELSEGKLKTNKLLKKIVKDDGQVVEEVVEEPTTKICPFCLSEINIKASRCPHCTSELENKENV

SEQ ID NO: 2494 - protein, 629 aa, unidentified
  REGION 1..629: note = Table 20
MSSPPPPPPRQGSIDSNDRGTRRERIIYQIQNAEDAALMSLLHGREVVTRKATSLWTHFKDFIDNGNVLGLAVGLILGASFTSLVKSLVDDIISPPLGIALGQASLDNLFVVIKDGKNATEHYMTLEQAHDDGAVCIAYGRFIQMSFNFIFVAIVLFLMIRAVGIPVTKVDEYKTSSLCPRCDAAKRKEMRRVTCTACNVPMHRDRTEGQYTHSSILHPHPTHVYIPAITGISLMALQELDGYEDDYVFLPDIENDDYAPRIESTKATSIHSTTSLGQQQQQQHLRSAQPAGLEADDDEASDLDDIEEIEYGYDNDTLLIMPAMLRDYSHHATNYHPELWRAPNSDGQSSLARCRHEDRVLDRTELLKNSVPPTTCGICFETFTVFDLDPQPQDATTGQDEISPRAQFARSFTARLARSFALSSNSSSSENNHAESTPSISTLPLGSAPINPSRASTVAMNLATPSVSSRDIGIVMPCDHGLCLSCLQSFLTNAATQNQARFPTLCPQPGCRTPIPTESAELVLDPETLEIWYRKLAEIYVANKAQSQGGESEEDRAMLQLVRDRHWRHCPSCRFVIEKQQGCNHMVCHCGQSFCYKCGQPWNEMDARCSQDCESRGVHEDFGLDCNIM

SEQ ID NO: 2495 - protein, 252 aa, unidentified
  REGION 1..252: note = Table 20
AQAFFCITQPQDLITIFVEIGYDETPLTREIVQNKVTVATVYGRSYYKIINALKLMDIQFESVSPEEAALSNAKIIITTRDEAEIVRRKDVLLDTELDDYPVFTKAKILRNIMGPYHDDQLTIGIDPGVRIGISVIFLHNEIDSVVESSPESAIKLVSHLISRIRSNKKVVRIGNGNIVMANQIAMILKTKFKELVDIEIVDEHGTSQPQNTEANRRGARDRASARTIALRNGRPFKSSSSSSSCITNGGIK

SEQ ID NO: 2496 - protein, 722 aa, unidentified
  REGION 1..722: note = Table 20
MKKFVSATRTFASLGLDPRVAECVEHVEWVSDLVCKASDKVLEQLLQSTEGVDMKSELQERIKKRKEEEEKKKKEKEKEKSEKKRKRKRKRRRRRRRKGPGQGKSSAIPQVDGFGPEDVDTLLAVICKKKVPAHDVSTREAQRVLARELQPPPTKQPRRAVRPQKRPRHTTCSKKQPRRAVRAKKQPYQAPGLWEALKVSTTAFTRQTSALRGVSRTMPNATTPVNTPPQIKAIAHNLLDMTCRTLQGALKLHIRHAPARWLRTFRYVRQKAKEQEQEDQEDQEKDSVEDDLEYAELRDLLTDCKTNEERLGFVFAVNQALRQYSHIRYKHPPLLPLFRGTRHLRFSKSTLRLLKIQPRQGDGSRLDDFFSPRRPRDHERLKEATSFVTDGVAAHVCLQVEEKPKGAAKNKNGGKVVADQNASKDKLTKSQRRTRSRRRRRRRRRKCRLRQRTAQPTVVGCDPGVRVPVTLACVQTGRVLRYRQQRWANFLHCRLLSSKQKKARREKRQAHKEAWQAAQQGVEQQRPIRHPHTIEELAHRQHTRTKFTRRHRKQLLHGFLARRRDLRAFALRVAKTFPGAKVFWGDAASNGFRTRGAGLHGPTGQLRKHISKLLDVQTTSEYRSSKYTYCCGVQGQYSSATRLTRCPACGVARDRDVVGATAIGLIGLGLRHDLPLGLWTPPEKPFWLHPGSTPTRHLPKTPDFSLRTIKRLTHSFSCASTQ

SEQ ID NO: 2497 - protein, 948 aa, unidentified
  REGION 1..948: note = Table 20
MLLFHHLQELTLTRYGVRLSLRDLRLDTLQLAAVLSGCDYLPKHSGAHIHGIGMRTAMYVTHKYKTYTDIMQHLRQKYIITDDLDARVRHAMLAFACQVVWDDTEKARRRLPPLAPEPADDDGDSAHPATTPLFEFTSDPANEGHTVAGVVHVENAVERARGRADPDTGHTCHSVRLRPALKAIVSDMRNGRLETTSHRTRRPGRKPHDRNGRDDCGKSTKQGKRGQKRRGQDQNKNPRVAVLMPFKRLGVELERSKVLEMCRYAGQMKCTATTALYLHILRTAEQHHREILSTLADLAQTTRKEIVERKVAFREAQERAEGVEDLKKKKKKKKDHKKSRAASPSDNPCKRAKGAAATTAATATTPPATATTVTAAATGKSPRPAYCFQHLAPQLTADKLSNLFTTLRNHKKHSQHPMLSILRQHGVGIPDPPKWMTATMAYKLLNLASKEFTPLLQRDLKNKARAAQRQLKKVAEHHDEGARFACEHTAELALYIGAAQHLARTLAPPDTDLTSLKIFPTFTNKHPFIQLDAGLLRDLTCFKCGRLGHSQRQCRQPAAVRPPPRQALSLLDFLGADVARQFRKRRVTSIRTDGYTAYLLVEPSARRDTVCDTSPITPVVGVDPGTRIPLACVRIQDGKKMIVSQKRIVNQLYTGRGRRHHKPTATVPARSGGSDEGGEQGGAMGKGETGSRRKKRERGKRTKRERSRRRKEKARIEKEEQLRRQQQEEQGGRDKGEGQEGRDKGEEEREQREREEQGGGAEPGSVDDVVASARECLREGVSRRELKWRLHEKLKHCRFRSRVAGELATRFGRDCRVFFGDCVHKGRGGGTKAPILELRRAIGCRVDTKIVEEFRTTKYSLCCAWPNRIDEQTRIATCTHCGASADRDVAAAKTIAARSLVEEANGELGPWRGSSEPDRPDMDNGLVTVSRRMCREWSIANHRHHLGL

SEQ ID NO: 2498 - protein, 501 aa, unidentified
  REGION 1..501: note = Table 20
MRWAVTEAIRDMYLKCAEEHDILGELQELAQTTRKRYVQAKIDFRKTGKWDKEVKTPTEPATFSSKVVELSAHGMGRVCTRMRQHARNKEARQPDPQGIERFFGDRVPTRPSFMSATAAHTLLNLQFRLMEGNCRLYLRVAARKAAARSSRAGGGCLASVLSKNVRSIRTNGHIAYLIQKKAPATSTATSSSRSTGTSKKAGKTEATDVKPDVCRVVGLDPGTRKPLVAVRLGDGKKYTVSQARLVSECGVKAGRTSARGATSTDGDDGDNDGDDDEGDDVNCDDDDDGAIKDSKVGHGHPEDRGGDDAKGACEDASSGDDGRGPPALSGRRLKRKLHTRMKAIRPYQQRALAAAGANVHRGRGGGAKSSTLRLRRMLEARAPLQTVDEFRTTRYSLCCAWPRDIDASRQSRCKSCGDTRDRDAAAAVTIACRTLTAQAGGNLGVWQRRTCSPQIPDRHNALRRTHRRVQRMWSVRMRAATVANRLLKLNSRLGKTSPHRQ

SEQ ID NO: 2499 - protein, 232 aa, unidentified
  REGION 1..232: note = Table 20
EKGLSVRRHECPRCGLRIDRDVNAGMNILERGSARDPGPVRGPNRPAGRHGPADPAQKAAGRLPDLYHKIQELELLLMLNIPHGMAIVSLKCTNCAGDIELDDSREFGFCMYCGTKVMITRDVNNITVEMSVKDQRSSLKPLAAAYCEKGDYERAEEMTNKLIAINAADADIWRIDGVCELMRGGYPFKDVPEQAKRSLENSCVLSGIKYSKEYVEKLAIDVLQSPAKSGDA

SEQ ID NO: 2500 - protein, 470 aa, unidentified
  REGION 1..470: note = Table 20
MVDESMGHTLSGGKNVIVAIGMGDFSSNKSRHVMFIRYLIRKLRPLGYTIVGVNEYFTSKKCPCCQEFVETIWDGAEFGLRWPDTTNPGAPPGAYLSNPSKCRQHAESTLAAHLFKSIIEISMSKMLALSSLIFLVTLSTSAIAETCTSQVDGQSVCPFHLLPGCTHNITVRTGDTINGIASAYGWPGAQSLVPLNPGLDLGLSVYPGNRLCVCGPAELACPKPPPSCNKFYKVKSGDTCFNIAVSYDYQGSDPAAKLVALNKEMDIGIDCTNLQPGANICVDCFLGQPTPIKPSEGPMRSKEPAGGGAPATGAPFPSGLASPILPSPELAKPSPDAHLGGNSTGGNNGGGNTNPTTTSTRKGQPKVTIPATALNGEASSVPSATRAIIPATALNGEASNAPTAPKADNTNAAQVPKADATAATHPTGSTLAGTNGAPAANARSHGFKRSSSAAYVSFLLLGAATVKLLF

SEQ ID NO: 2501 - protein, 293 aa, unidentified
  REGION 1..293: note = Table 20
MVKRKCRDGVVRSVKVHKVLHCLTLEGGCGKTADRDVNAAKNILRVLVLQLSGNMERPERLRPSMKLRCAVTMAAALLAVLPAIPGVLAADAVVVDQRAAVGGLHILHLRRHLQETAASSDDADDEEDASDAAGEDDNESDAEEGETDADEGEEEAEEASDVAAEEEEFDEAEQEEDEATASPQPSSVPDAVVGSAEEEAEESTGADQASQQEEEAEDGESASDGVETSGSTSKMGESTAETTADDTSAVEEEDDDASDITDEEDSDTSEVVDDDDASAVNEAYEEEEGGPRQ

SEQ ID NO: 2502 - protein, 562 aa, unidentified
  VARIANT 140: note = misc_feature - Xaa can be any naturally occurring amino acid
  REGION 1..562: note = Table 20
MMLAYKMERSGGRMVECEEHYTTKTCWCCGRINYSITSQKVFECNHCELVIDRDVNAARNIFLKNEELLTWVPTQVPGDAYSEVVSARPQPQAFAFRLIHRLSQTMSNVNETIRFGDVVKLQTKSAFVESTPTFLGFLEXPGKAQTQLLVVPPVKDEVKERFVEAEFIVAPIRGDKQQANGTPLTYQTPFVLRTSDGKDGSTYSLNNKVVGQREGVSLQLSATKGEMYIQVEKEGCTNATSLRYGDDGLNLRVVDSNRVRKTHNQLLTHVAKPKSDTPGGIVTCGAKGTSLTFTFQLSVDGGGKAKTETTKYIKNPQARRGSMEALSPSKVDQLGRADRIDSSEFSDVDAMSRSSSIAGFGSNPTSPRSSSMTNGLASPGPVDAAAVAARLPAVKDDEDHETEATVSTSSAPTSTHEASKAAPAVTLKPTEVAKTEPVKVESTKSEPVKAEPKVETAKTPEAKPEPTKTATTTKAAQSGPKTVVADASTFPPTPAINGPAPAPVVVSPKAAASPKTTPKATATPSNAPASPKMMKEEDVAKLKAEAEVENLEPACGAKCSVM

SEQ ID NO: 2503 - protein, 445 aa, unidentified
  REGION 1..445: note = Table 20
MSYTLYIGHRLRPHPSQLPHLDRQFEVSDLAWQALRARAALDRTDFDLDALLRDAERADATTCVLRDPPNRRGWLRDLARHHGWTHDVGSDVIDGVARAFGQVIGALEPGARLRDLPRAHPDEPLDVGNLARPLFDDAVELLGVEGLVPAAAYVWPVAADRVVRAWRAQSFDRLRDERADLERRLTTGDVDANVELLRHLARHPYEPPRVEEAATTAEGGVRLAWANRATLRRMPSPSGPIYHVSWGFEVLEVPEPRHPGMIGVDPGMLNLVTTAGEHVVSRVPTVLPAALRLDVPVPRAPGVRRTHDERVARLKRDAVLFRTVRPAFEAATSLLLDHEEVAIEDTDYAGFRRRESPYAEWADALGSKVYVRYAADLVRARGGRVELVDPRDTSTTCAACGTPGAMKYWAREGRCVCCGAREHRDVNAARVIRERARGTHAQRSR

SEQ ID NO: 2504 - protein, 396 aa, unidentified
  REGION 1..396: note = Table 20
MPDTLDIEHELYPTPAQRARLERQRQVAADVWRALSARPGLGRDRLRAVAGQVGWTDDLAGATLDDLAAAFGRAACAGPLPAGPPDVLRVAARPLSDHAVELGGLETPVAAPLFLLPHAARHAAAQWQAQFLGRLHAEQTELTRLAVLGDAAADARLLGHLARWDAPPAPPLPAPPCPVVRLTLLERPRLRWGPDPRLIWTFRVEDIAPPRQAGLIAADPGMRRLWTLRSARGVTRYDNPMPGRWRPPQAAAPPGTLRRRWDLDAARLRRQALLVTTCLRPVHDAALRELLDHPELAVEDLNLRGFERVRADYLAWAGWSGALIQHRYLLDVARLSRRLVVVPAHAGATRTCARCLTPRGVRFRGRQGRCRACGAALDRDDNAAENLYRLGQAGLR

SEQ ID NO: 2505 - protein, 478 aa, unidentified
  REGION 1..478: note = Table 20
MPPPDPHIHLRHPLYPTPTQQRELDALWALARQIWRVLAVHARLEADGQPQSLQEVAALVVAGAMPPTSRAARSVPRRTTAERRNELEAVARALGWRAHLGSSTLDGLVQAFGRSVRALGHVADPACISLNPPETFALTYRGLARPVDDLHVEIAGISGLVLAPVYLMPGPARLAVHAWQNAFFASLSTTRSDLEAALLTGDTDAGARYLAHLARYGPLELHLAAARSTPALGSPITLHLAQGVQLHRSVAGDEISWAFQLTHLSPPRHQALLAIDPGQRALWTWITAHHGQGQVPNPLAQTHPWQPGLPTPPDGLVRRSHDLRYAHVRRHQLLYATQLQPRLERALAHFLTFAGVAIEDTALARMAQRGLDYAPFVAFSGTRQYERFLTDLAQHDPARRIAVWVPPEGTSVDCSVCGLPDAMRYWRRVGRCRGCGVRLDRDVNGARNIYQRAAAMWPVTTLPWVPAALPRPRRRGTR

SEQ ID NO: 2506 - protein, 452 aa, unidentified
  REGION 1..452: note = Table 20
MTITLNHSLHPTDTQAPALDQRFDAAGAAWRLLALHARSEAAGEPLSMQEAAQRLRSQVRWPTGHGRIPQRSGAAWRAEFNPVADDEGWTALLGRHALDTLVAAFRRTLRDVGAQAPLSAISATPPSGLRLRALVRPVSSLCVEVVGVGPVLAPVFTLPGPAGLAVDVWRQQLGVRLRETRETLTRRLLAGDAQADEEYLRHVARYGEMEARLAVPLAAPCTGPVTLTFLEEAELEQCVRPGEPAQYRVHWNFRISDLAQPPDPGLIAVDPGIRTLYAWATRYGVGRFDSPLSGSWVAPLPAPLRGQVDRVLDVGLARLSRQELLHCRQVRPVLDAATSLFLGHRYLALEATDLAGMRRRQLDYPAFAEFSGLDLHMQFLREVVRHSDGIRQGLDIGPAGTTVDCAACGGANTMRYSGRLGRCTACGTRRHRDENGALNVYTRAARQLGWAA

SEQ ID NO: 2507 - protein, 454 aa, unidentified
  REGION 1..454: note = Table 20
MNKNVKNSTIELAVRLYPDAPGETRLLKAAGVVREVQRAVGRYLLAVTAGQAGSLIDAATSVSDPAPSTRSGAAPRVTQEMLLRQLQDARVPLGWHHALPASSVRLAGLEMLSLYQQGKPEPTWTNSWIPLNGGVWPINPFQVMVHALGPDAVQACDLFALPDVYRAALSRRQQRHMLGEARRFAAARAAFLSGDRLAFSECQRIARRLPPLDLDALDATESEDTPDLASCRERAYIRRVLQPWCVWEWELVLTFRVAGNLPQAWISDTAGVDVGADNLLAWASGSEQGLLDQKFIEVPLPQGPALPDDLGPVPLNHALGEAQARKILFDALRPGYEAVIRQLLRYRRIALENLDWSSFRGYDFRFDLFARDAYLHTALAWLEAYAPLHGSRIVRVDPHYTSRTCSRCRPDWVNPTRPVRGQPFRCQRCGHVQVSDINASLVTRRRSLTDGGEV

SEQ ID NO: 2508 - protein, 458 aa, unidentified
  REGION 1..458: note = Table 20
MPKPPLRLTTRIHPSPPQHARLHHMWTTLLAAQHTLTAWLHHRAAGGTRSLLDFASGHGPVTAGHPRRPARALPPLDQLNAEVRAARDALGWTPAVPPGALRWMTAETAREWRAAGQRRPHGPLPGPWPPSRAPELHLDNAVQVLDPVTLHLACLDADELIPADLYLPTPYWHALLRRQQRRAAHERARCDTLEHTWLDAGDGKAAAELLTRRARGGPWTELPWPAVPDALPGDPVSREGTVLRWVTGDGLPGRWVAEWTFGTGDVMAPPWVFDDVLGVDLGYHHPFACASGGLSTLTPRPFRGSFAPPPLQASNARTAPPRHGAWARARHRRALFLRLRPIFEAHLDLALQHRAVAIEQVAWGGFARRGFPFASYALDVGLVAWLAWLDALATSHGVRVLRVPPAYTTRTCSACLRVGPRPASGQPFRCVGCGYSAQADLNAARVIRRRGLAKLGRP

SEQ ID NO: 2509 - protein, 482 aa, unidentified
  REGION 1..482: note = Table 20
MPASDDAGGLLLKEAIMTNVVSVDLAVPLYPAPGMHRIWDVVLRAQATVNTHLQLLAAGHNITLLEVAGAAREAQATVPLPRLPPHDTYVRVSVPTTNEYLVSFRSVRDAMGWLEVVPASALAWMVRQTLREWRAHVGNESVRVSELPPPWSPFRPVELHVDQGVLLVDGATIEVARVGRVHADVRLLPDPYWGALWSQRQRRLLSEQQRLHRAEQAWLESGNHEASRLALRIRARYQAAGISLDDPVVIDAPHASDLAVTERVVIQRVERPGESHAWQVVWRFRVRAPASPRWTIDDLIGLDPGFQNVVGYASGTLRGVIRRPTGGAWEEPELLPTRVVPVSMQDEARARVAHRLALIERMRPAYAELHALALAHRSVVIEDTDWGAFQRRQQWFGEYAARVGLRTALDHLVALAPLHGVTVQYTRCQYSSSTCSRCTWVGRRARVGARFRCPHCGYTAHADINAASVHRQRSLTGEGRQP

SEQ ID NO: 2510 - protein, 435 aa, unidentified
  REGION 1..435: note = Table 20
MASAVRAAQLTVHTALLHHAAGHPLSLVDAAPGRAAPLPRLAPDARVWPPTVTQQRLVGELQHLRGSLGWPSMPASALGWAVSSVAQVWRAPALRPRRVSDLTTLDALPPPVIALRNVLPVDEVTLEILGLGDHALVEADLYLLPTPFAQALWHRHHARLGREAERLTQAEAAFFSGGAPQPAADALRLRARYASVGLLLDGRSAPPAPPPGAPTCRDQVVLRDVGTPTAPRWEVVWSFHVPAPSRWLVDDVLGVDPGQRHTWAYASAAMHGVIPRPHAGAWVWPALDPGPGITPHGERRARAWARRALFERMRPGHEQLIALALMHRVCAVEDVAWGGFRWHGSYADYAGDPGIGIRAALDWLTALAPVHGVELIRTPPAYSTRTCSRCGRVRPRPGSGRPFTCPCGQREAADINAARNHRQRALQMLAARRDG

SEQ ID NO: 2511 - protein, 461 aa, unidentified
  REGION 1..461: note = Table 20
MVEFRQALHLTPAQESALRQLWTGIRDVQHVLNTYLHHLAAGHSGTLQDAILRAVQSQGVPALPGLPAGQARVPTLTLKALKDEIRAARQQSGWGDALPATAVTWVATEILADWRALGRSQNVQASNLPHAWSADRRAELHLGNGVQPLDEVTLEIAALSPTTDAVVLADVFLLPEPFRAALWHQHAQRLAKEAGRLDAVDRAWLDHGDRDAQREALRLRGRYAAARIMLDGQQLPPAPPKNTPLWQEKTVVRAVPGGGWEVVWSFQVSGQQVRWMHDDTLGLDPGQRNVWAYASANLSGVISRPCGGVWEPPDHGPAGQPLTRPHNERRAQAELRLALYRRMAPAHAQMLALALMHRACAVEDVRWSGFTWRKNNFAQYAVYTGLRASIDWLITLAPLHGVQVLLAPPGHSTATCSRCGRLGSRPRGTTFSCSCGHREPVDINAARNHRQRALAGQGRRP

SEQ ID NO: 2512 - protein, 438 aa, unidentified
  REGION 1..438: note = Table 20
MGKLIPSPTPLRPTTDQAAHLTRLITEARSLHIWLRRYLRLRGAGIPLGLPEALRRVDAGAALPDVDDFQKMQMPNDALAELRGLTFAERPARWQHVPQSVALGIVAANTNRLKRHRSGESARYMFPLLRLDDVPLDAAVQPLDLHHVLLAGLPTPIVTDLWALPADLSTALMIEADDRARAVHARTAAVHERVRSGCPDALLELYPHAELLALQRDRTPTLTRDRERPHRADHVWLTEVTESSGEVVPALRWSIRVPDRHLPAASIDDTIGADVGLRNLVTLADRSQVWHVPRRAQVRSLPSTDPRSAAALLVDAQARRMILEAARPELEAALVRTLSYRRANIEALSYQGMRDHGRVPWAPGAMHLSGAAVWGTWVELLAPVTGTQVRRVNPAGTSTTCPHCGLLCVRPAPYDIVECPTHGAMDADEAGARMIRLV

SEQ ID NO: 2513 - protein, 448 aa, unidentified
  REGION 1..448: note = Table 20
MTNTLILAPTPLRPTTSQVLSLELLYDTAEQIHLAVRTWLRAVGAGLHMHVREALWQTADGHLLPRVDDHRLIDIRLDALHQLAQVTHRDLPPRWQAAVPPTVLARLLDIEAQRLQRFGNDVKAGTALPLWPLDRVALDSAAQPIDEYRVMIEGLPDPVVADLWALPTDLTCALLAEADAHAAAVNAEWNAQMERLLRGDASAAATLYGLGRDAWPWLGRTVRHTVDRTVPHRYQHVSLVRTTDESGARSLILKWTIRIPRTYLPQARDRSAYGIDIGYRNIATGASVLEITSVPRQVDVRAGLPEPQDTELLTHAVMRQQCLEPHRTGLEAVLWQALQHQHVHAEAINWQGIRERGAAPWSAAAMALVGAPLLIRWIAMLAPMTGTCLHLIDPAHTSVTCSRCGAVGERPWPYTQFHCPTCDTWTDADHNSAAVLQGGRVTGALTRR

SEQ ID NO: 2514 - protein, 449 aa, unidentified
  REGION 1..449: note = Table 20
MSNTLLSAVTPLRPTVAQTVRLRSLMSAGEGLHSAVRLWLRAVGDGQCLPLRQALSAVAEGGSLPSVRDETFVHVPRSAHAELGESTSASLPRPWRDLLPDETFTTMLSIEARRLQRFDSPAPAGRVSPLWPLPRLPLDLAVRPLDAYHIVMDGSADPIVADLWALPDDLSVALLAQAGTHAREVESRRADLMACIQGGDLGMATELYRLAHLRPSAHEDRLAGHRPDRSRPHRVDHASLVRTTDIAGRERFQIEWTLRIPHGYLPKADIDDTLGIDLGYRRLATAASAEGRWTVERRVDVREGLPEPAAHLLAELLAHAQVRRMLLDLHRTDIEALVRRALRFRQVNLERLDWPGLIAHGDVPWCPEAMALLGAPSITDWISLLAPVSGTRVELVDPSNTSTTCHRCGGRGLRPRPYTEFVCPSCGPMDADLSGALAIRRGDVASWAN

SEQ ID NO: 2515 - protein, 448 aa, unidentified
  REGION 1..448: note = Table 20
MIRSGPGGRFAMTHQHPRSTPRPDRALVRLATALHPTPAQAASLAHLEAVAQACQSHMLAWYRHGGLADPASPLSAPSPRSRVTVPEISIDDLAGVCSAFFPGVSPSLVRGVASQVHRATSRYHGRTVPAETLQTGFQHVHVPLDAGIQATGPDRVWIDGLDTAVVADLWQLPMGLTGALVSAGQAFRHGTEREVSTMLRAASDGYRPALSDLDVTLRRYGALLGVDEPRVPGGPAVPARADHATLRRVTRPDGTPGWTVTWSVRIPHGWLPAANVADAVGVDVGLRRVLTAASGGGRWMVEGHPAIDLNLAFVSASTSALVRRSVFERQAAELDEVLKVVLAHEVVGVERTNWTRMSGRVDGRERVTRMMLTGATAVLDWVRALSPVSGSRVVEVSPTGSSCTCSACDQSGTVTEWQFTCGTCTHSDDADVNAARYMRRRALEEAGS

SEQ ID NO: 2516 - protein, 399 aa, unidentified
  REGION 1..399: note = Table 20
MSDRVLISLSTPIHPNPEQAAWLQHCLATGTAIDTLLRGAGRHSRDPAAVSRLAAQVSRTLDLRDSVPPSLVRGAVSRAMHAGTRRDSASVPLDEAVVAMDPYQVCIEGVQAPLLADIWRLPLRLSAVLLRDGAQVAQACHQHYAAWAERDAAGTTTALSELHMLARRHAALLVRPIPAAPASHPQVERTRHATLRRYRQPDGTDGWAVTWALRVPPAWLPRASVDDTVGIDVGVHQLITWVSADDEGHVPAPPLPTGCWQPPGGISSPLSDAMVRQVQFARRAAQLDEALRMVLRYRGVAVEATNWRGLAGSAELEGMALSGVTEWRYWLTALSRVTGSRVVAVPPWRSSHRCGWCAAEGHRDGRVFRCPEHGVADADTNAARYHRREGMRMLRGLHS

SEQ ID NO: 2517 - protein, 412 aa, unidentified
  REGION 1..412: note = Table 20
MTHPVHSNADHELIRVTVQLFPTPSQDATFRAWLAALTQANGALTTVLHGTTLRAGAPALTRDEIAYLLTLVSPALEASLPPSVWPSVISQCCTRFQRRRDSSASEPSLPLDVQIQAIGEMHVHVTGQPDLVVADLWRLPLGLTEALVCTGNDHVRAVQHQGHTLRTADTAGSPAALTQLHDLIRLHGPVIGRPPGHTGVHRTQPHRAQFADLTCQIGVDGKEIWLLTCTVRVPPGWLPRAHRQDTVGVDVGVRALVTWADATDAGQLLRTTLPVGDWRPQQPATLLSAAWVRRMQFERTQAGLDQVIRHLLTYRRVAIEQLAWRGLTAGIREAMTLNGVSSLGVWLTGLGRLTGTVVCAVNPAGTSVQCGQCGQRGVLQANRVFRCQNCGDIDRDTNAARSIRRVSLEGWT

SEQ ID NO: 2518 - protein, 511 aa, unidentified
  REGION 1..511: note = Table 20
MVPGHTGVDMTIRRAVRLLMVGASGARFVPPDPRPYRDEAVIGNHSAPGIRRGAEREPREGVERRRAPPLHTTEGTGGGIPPSWEELTVFDFRQDHRLIRLSTPVYPTSDQALRFSHWAQVVRDAQCRATSAVITPQSGPSTGMVTLPSLSRAEVTDALLRTCPELTESLPPGAWRGVASQVYALWRPLMGQAVSTAQLPQLVGAAVPLDESVQASGLFGVQIDGIPEPVVADLWRLPCDLTDALLRSAVDHRQSVQGDVQRWRAADRAGDPAALARLHELACRHGVLLDAPDVGPGVERDRPHRARHATLRHGRQPDGQRGWMIDWSLRLPPAWLPAAWRDDVVGVDLGIRAPITWVSGTAHGQLRRSSLPTGGWMPGSTGTALADAVVRHTQFARMRDDLNATLTHLLSYRHVAIEDTNWSNLTPGVRDAMDCTGVTSVLEWLTSLGRVSGTRVVPVAPAGTSQHCAQCGRAGRLDGVLFLCPGAACRPVDRDLNAAGYIRWLGRRSGQ

SEQ ID NO: 2519 - protein, 238 aa, unidentified
  REGION 1..238: note = Table 20
MGLAHASNYVGIIGNYLISHVRVVFPSFNDNEIEKLLTVAFTSWGNLSNAGWMDFLRLGTTRFRQSLRQERQREAMLMIDALHVAVSFMRSMGMEVALGIEDLHAMEKIGAMYDFEIDFINFLNNIESMFHLNPLSVERVETRLNTGTTWSGSLMRGNNVYLILLNPMHTSKLCSSCMRRGQINEVRRFGRRNILCSHCGSIIDRDENAAVVIAVIAMLMLGGYLPQTSMRQCFKHPH

SEQ ID NO: 2520 - protein, 254 aa, unidentified
  REGION 1..254: note = Table 20
MRGFLGQLHDLYHGDSRRAHRYRYGLLIFDVAMIGFIVVSSFFHGVLAVELLDGLFGFIVLLETAARILAAPQRLRELLSLGTLVDLVVVASLLAPITGENLAFLRVLRALRLLRSYRILRRLRQDIPFFRRNQDAILATVNLALFIFVMTALVFETEVDRNPNINNFADALYFTVTTLTTTGFGDITLPGTIGRLLSVAIMIFGVSLFLRLIQVLFRPARTSWRCPGCGLTKHESDAIHCRHCGTLLNRPHED

SEQ ID NO: 2521 - protein, 185 aa, unidentified
  REGION 1..185: note = Table 20
MESNNDLVPGFDDEQNDVLKFQLQKINNIEKGCVVSVSGYIDTYNSSFFQAQINKVIANGFVNIILECSKLTGVASTGFGVLTNLLKVVHFNRGEILLVNVQQNIYETIELLGFTQFFKILPSLEEAVMFLSANSGGADAASIFPKIVTCPSCGKSLKAQKAGRFRCINCNAIINIDDNGAVSVE

SEQ ID NO: 2522 - protein, 550 aa, unidentified
  REGION 1..550: note = Table 20
MSPTIPLKGQDTKVTWYLRFWLYMRAVYNALRRNTASWRLHHACLPCGYKLQDELKLIPDWLQLMDSNNLLKRVNRAGHADSRIFESDYFISSAEVERFKDDVRTRPGAVYSQAATAGEDPLPYGFDQITCMENWVAANTVSHQTIDMFEQTGFGELAKYGLATLDRIIDTFGDDQAVGYDIACSHIATVTASSIAHKTRTYERVFSSSNAVARIVRYASHFHWWQSIHLHYQQWDEDKYSELSKFIFNNYRQALAIIREYTPEVEAYSAHFGLKDEDFVKWHDEQVEYLNNLKDEPQEDMFQIQCIEMLRFQDRAVYGGTTSVQFLDYVPADFSSKGSLSQASQAHARAKEHEHWVAHRKLLLAMNVANDLERRLGLSKRWTPEDEAYQRAAVYLKHHHFIQVVEELEQLVVQRLFELSKANLMKTGYKMRKHIGQAIAHSSAAMPPCPILEYSAVAAYLWLGEFDLLKESRYEVLQRPWAVPANREVATKYYKIVRAHEELQCLNVEARCLHTWVVDEGVHLNTVITQLHDTDPILAAAIQAKALVQQ

SEQ ID NO: 2523 - protein, 582 aa, unidentified
  REGION 1..582: note = Table 20
MDPQPRHQLPCESPSTPLMITGKRLLNNQVEHDQLGPANSQLYMMRPTFYNPPKYGTTVAVLPHHLFGRSNTFPLSPAPSSPQHHDHSELARHSWPANQENISPTATATSVHEPQQDDKAGGAECDDLIDDYLTMEEADAVYINEQSVGTKIKHNALKIFRRWKDGELVTDQQLHWMACGLSSIWDLTNVKLAQEFLECSFEDMEHLTRPFITKYKCTQYQPPATFDQTLAIAASIIDKENNARKAIEYVQNVKTRFIETQKLLQVITVIVHIIESNRFLLDQDNIDRVTEYDFITQVWASLLKSLLDIHGILRMKVGESSTTHGVIARKRSYSEACVGFKVDLRLLYDSRQNEHDLLAMEVAKDGSTSKIYADVCKLMREAKDNLDDTLQHILKNKVASLPSSWYDPTLYAAYLAQRGLHEATMVAYYRDATNTTGTNPLIRKLELNAYIKLQLSNKRLVHNLLSTHGQDAVFILGDWSAGSMRFHAPIRGIGMRRMLAHEHLEVYLLDEYTTSKICPTCQSPTRLRPYLQVENPRPFRRAQYAFVRCWGLLRCTHCVSALAMDGLQVQGHHWNRDVLACT

SEQ ID NO: 2524 - protein, 154 aa, unidentified
  REGION 1..154: note = Table 20
MTGRLPRVYETSYLHIRYGRAAYRPRCTRRGHDDAVLLEDTVDSFLWSAQYVVDHAFKGEYVTTSKTTLDDETYDDVREKTDGFNGELVQAARNKAEEYGIDVEQVDPENTSRRCSHCGFTHPDNRGVGEELNRRGASATTLCGRTHRRVRRLD

SEQ ID NO: 2525 - protein, 306 aa, unidentified
  REGION 1..306: note = Table 20
MSTSQVDNFATNRNRTRDEYLKEARIALSGKDKTMEFISTEQKLRWKSGAWNHGIMELKHVPLQEVSLQILEKLVTRQTFLESKVEELKKENDQSKATIERLNEKLEAMTNLKNSMEQTLYERFLEVLNSKKARIRELEEQSKKSCTPGTSESVFDADTDGSETSDQDGTENGVPEWNKSKEKCNSTLFPLKTSASGSNIRKEKFSKRQMEDDDEKMIDSDYEETKRRQKNHRPVASKPSSESNGLKVSKFPVNKPSTSKNYNDIEADKVDSNKVEGNVVVRTTESTSKISMLNLTSEESEEDLFA

SEQ ID NO: 2526 - protein, 533 aa, unidentified
  REGION 1..533: note = Table 20
MMIGDRGTGVGSRIKGHLHYGGKWKHDIHGKYTPVCIANENNTSQTCAYCYNKLSHPSQKKLKENTSESEAKELSNVLILASVNPILNLRFSPLPSLMKEKDRAVMKSPLELVNIYNVTDTKEDMSPTYYLSVNNSVDQLELKNPGRMRRLWHSHSNYLMGLASRIVALIIIIGVLIALGIGLRYTDGLPKSEDFSHLSFDWKINPGSYLTPYNTSFQYNVLLDGHSHSTYSDGKMNIRQLLDWHLANGYNAVMVTDHNSVSGGLAAEKLALKEYNNSIVVIPGMEYSCCRIHMNFLDINETIPTIDPSPSDEELQRVINKVHELGGLVIVNHIPWSNATEFGYQLPRLPNHPSVDQLISWGVDGFEVVNQDVFDLNTFQITTQRNLIQMVGSDIHHPSVGAQVWLTVNATNMTKQSIMQEIRNRRTSFLFDPAGTHPRTYVESPSSFNLLTPLLLLGDYFSMFYYNRKGMYSFQGTFCHPEVLGVNGSIIGWFIFWVILFLVVFELTRLFALWVLSKFKWYQRYNHESNVYK

SEQ ID NO: 2527 - protein, 1580 aa, unidentified
  REGION 1..1580: note = Table 20
MDAKVSCFNKKIVSFSLLYDWICWKISPLRLFAITVCANEKVVSDVQISMNSRLLPYHLKKRQKLEESFPEQSLVSQKNGQDGTPMDDSDDDDDDDDESWKYLPMVCEQCDATIPILSEHEKRLDLCGDLMDLYSVDIQLKRNAFEKMPPFDSKDDQFPPPVPLIAEINHRLVKFDQPESPHVEIFLHEALNTTSIALNSNRSGIAPSMRNLFNLIKTTSDPSMQFRIRDAYPFVHDSSTGGFENEIKHEIMVKELMNHFSMTTSKLIIVCGQFPCKAAKEAFNANPLDYEMVDYSQESYHTILDKAKGTTEDKEVDVSRIVPKRLIAIAPHPSVMFALHITAAYILIAHDIYKMAPKVSQFDPVQTFKSNSPSSASSSFSSTSLSSTSSSSSASSSSSALPPSSSSSSTSLSSTSSSSSASSSSSSLSSTSSSSSSSSSSNQKTTKRPNLSNKTKDFPSLKQWTLEHLVEEATSRKIDVENIKEDRLQVECVLLKSVLGFQIWSEQKIEQFDLEESKSKKDILAYAREKKIPLTDYWFFMTLETLKKAVQRCLASTSSPSPSSYLPTPSSPLTDISLPSSPSLTDAPPTSSSSDTSTPPSSTDTSSLTDTSTTSSDTSTPPSSTDTSSLTYTSLPSHSFSYSSYSKPFVKNEKCVYKDEEKHIRAKRDFYHSGMCRRRRSKWKVMRENNRGNYLYIGIDPGRSKCTIVDSMNRARVVSVASYYNLMGTDRLLARQQNYKKNPVLSKFESGLPTYNTFDTLFNVESVLRRIEYERITHRDQCRLYSHVVTSYTFQTMDKNRNIDKKRAQYAYAKSFVPPTTIPKNRIVIYIGGSDFFRGSRGGGRTGCTSKTLLRLFLNMGYKARLVNEFNTSKIHNACASKIHSTNNNKFLEKAKHQKVKNVLPESFEKTHVVGAPISSTFSDNGVRWQGKDSKLCDGCKLTDYNCQCSKAQLADKENDSTLKVSQLADDMNETLKVFISLENTSPSPTMLLESLFSLSKKTVKELIEFCNLNSIKYNQQEEPTKGKNKRGSHKDSKGGATNSKKDQLINAIIKFNFEKQKRDASKNKKKRSKSSSTTNDRCKDQDQSNSQKDGNKSTSNSVSTHDYGFERKKEITYASQYIYSYQITRYDPNPLVQFVYLEGGTFSISINAKPQNHPLFFLLCSDDDWKNIFGYKIPEPTCNLLENPEMLKICDVGVNFTDTLSVYKVITKYNKYLVNILDCQDSVVQEKPVNITLDLKMINPDNNNLSAELIPAPFMYTIMGILWCIVLLFWLYNNIKHVQRISKIHFFMTLYPLLKLVICFYNASLIRDLSHLDTSPTQIFFRKFLDIFFNLYIQVLLLLLGTGWYVTQNTIKGDRYNMMALVGGLSVAMILDELYVSDSISYLFVELFILSIRVFLLFYVFIAININSRQLEYHILQYNPSQESQTTLSQEEIVLFIKKFKLFVMFKLILLFWVALITLKFFTSLLLYGGIINNWVSMMNSENIDLILFICIGYNYRARSENIFKIIRIRPPELDSRVNREHMHHNLVRNQQQNQNNNNNQSDEDDNNNDNYDDDEDHGIEMRDLSNNNNRHNNI

SEQ ID NO: 2528 - protein, 519 aa, unidentified
  REGION 1..519: note = Table 20
MSAGFGFSIGDLVLGLKLIKQSIEALEDTKGSSANYQALHHEIHSLQDGLEAVQELRLEKRLGPKSKSGIAIQDAVRQLFQSLIESNRQLVQANERMADEIQQMRRAVQLQVELPPQVPLQKPITLLDACGKVSAFHLDFISCSEAFLAVLKIRFQQYGVEDRGIQMLDDSQFVLEDHKGKLDLSRPWSKVLKPSQKVHMSMVFRDNISSSTCPACQMVNGNNLESRIECSRCGLFYHRVEEETTDLDLIAKAERGTNMDETNHKEDPDDQQRNDLFDQFRRVQLVCPRPRPRLSFRSKDEWKRHVNSLFLHRRGLRNPSWDRAKSSLQNLHDANGTLAGLRAEGSKANLRPNPAREASEVEVSRRSSMVDSSTTTLLLERLDERASQMSAHLSENSKPSGYQVPDDIGRSKSGLEMEQSLRVTEVGPHSHPDDFEDLDDVLGAVTHGAVLSRSMTSFSRSVAQEDQGEGMDKSQPPKDSPISKPKRSKRSRQAPPNSPFHLFDMAAALLNNVEENLNK

SEQ ID NO: 2529 - protein, 289 aa, unidentified
  REGION 1..289: note = Table 20
MKAKLCLSERNFTCDHCGHTADRDYNAARNRFQGHNYPDPTACWRPAVCYRHREPKPWSKPWNHLRRRTSGNSTARNLVVAPSLSARIRSTALSESLMPATYTFDVFSSLDGFGAAGGNWSGYWGKQGPELLDHRLARYNEEQRMVFGANTYRAFTQLLAASTEDSDVRDPWVTRMRSLQATVVSSTLQDPLDWPDGKVVNGDAVEVVTRLKEESEVPLRSHGSLSMNRALMAAGLVDRVQVTLFPVITGRTGLDPIFRGAADFDLELLEHRTFDGHIQELIYRPSLHG

SEQ ID NO: 2530 - protein, 562 aa, unidentified
  REGION 1..562: note = Table 20
MVQVCDRDYNAARNILYCFLYKRAFAERPRPFKCGPNRVGLTTTLNSSRRSDDLDQIRVPGPDTFFYLLTIDRQQKRVAVSTTNICYKLTTNDKKETRCITTIRFESAEPYTMIATAVSSISAVLPSYASSQGYKIMSPPGNAISRSSMLANGRPFWSRLTTSTPPAHTINWSVGFERGYRNNVKYGALGPQIFKEDIHHHFEDNHWPTTSEQQRVEGSEGATKFWILADGHGGEAAARFFVARSVELVKALIREGEWNFDLVGSRERFRISIENMYQSMDIEFCDSKVAEYSAWRRAGSDMRLRPIDDGCTLQLILLHKTYFVVANVGDTRTVIATRAASLRPSVTRGGNWSVMFGTEDHDMTHPERVHFIHSAGGEFVDQTGRTFPIQIDPPSVRGGRPYTELAGGRVYRPPVASNDAVKSLGVSYRRTLNMTASLGDLLFKLDPPVLSNNPDVSFIKLEPKNDYILIAATDGVWDHMREQGPLQNETAVDWVGSQIDGVRNPEDRSDLPDSSSLQSRINQAARDLASREREGGEDLYHQQMVRYDDCTAIIINVKAKLS

SEQ ID NO: 2531 - protein, 556 aa, unidentified
  REGION 1..556: note = Table 20
MVRNCTTPRGCDRAQKEGVPYVYTVSDPEDRGHYRRTVQGWIGNCYSLPWQRDRPIPTTPRIPDAAGFYPPEWCEGDREEPIVWTEGDQTKGGLSKVVKYLVELLEKKGLPKEIADIPNTFQYGIIKRLSTSWDNWKSYRFGKSKGVVYGRPRFRRTDTSDNTLSPKPGPGNHRLRIVGRDRCSIKELGDFAVPTLSDRWVNCEDGKPIIPEIRTYNIVRRPSGYYLQLCGDIQRSPRLLKKPKPVTAFDPGIRSYLTFEDGDRVENPKFYERIARRVAKLQQEISRKQTHNLILWLNQRHRTPDELVSLCPGLGWEAATKAIACKSEDAIVKAIGIYFFGHLREKVGNSKSIDKLRQQVSKLHEKAKMQRRHFIQKQTTWLARKNATIVMEDGMQSPVLKKRNQPKATGDRAGFEKTGQQQKTEITKKLGDTGYGEFASQLERKAAEWGRVAIRFESKNTSEECPVCGHLEDMPLHRRKFDCSKCGYSEERDRKSAILMLVKSVELGTVAEGQLPSNILKILEARRNFREPIGVQNEVIPNKRKRRQRKRSDSQP

SEQ ID NO: 2532 - protein, 716 aa, unidentified
  REGION 1..716: note = Table 20
MEKEESSKGMLVLEFKCYPTREQAEFIDRCLEVQRNVWNLGLRALCDFDEFRGYAPKTVKLLVGYPPEDLLDKKGKAQTKAGEFKKHVEDVGDLNLPCCPLPIEKRYVYIDNETKCWVNNYRDLKSDQQDQCDRILVPYCSLLDHQALQEIKKLKRYKNVTPKKDGTLPLILDHEKCVYTNAAFLNVWGWQWQKDEQGKPIVLYRKHPDWREPNRRDGEVWGDDELYPEVKRVDVYLRSTGFGQKGGITKMNDNKILKEMRSSEVHPEWIDAVIPIPTKFRAGTLKNLATSWQEYDKSRFGSNNNKRGKPRFKPRKETIETLIHPNPKTSVKPDTDKYDRLRGIPGFAKLTVDTLKVKGLTKRWRNPETGEIPLIAVFKICKRVSGYYVQLTGELPSRIKPTKSKKAVGIDPGLNALLTTDSNKKIQNPRFLRNSEKRLKRLQRKQAKKLIKRLIIWLKEPGRTVEEIREVSPHISIKDAESLLREPLHSEKDIKAIISQSACNTLKYRHYEHWQGKKQSQREAKLQQAEKRLHEQVKLSRRCLNHKISTYLVRTFGAIAIEDGVQSANLRKKAKKKLREDGSGYDRNRKQQKSGLSKSLVDAAPGQLISLIEQKSKVAGVEFKRIESKNSTKECPVCGNIVDITLEERWYRCDRCNYEEDRDCKAAIVLLQRAKFDDKYIYSENYEDAGGRRCKWNEQNKQPSKVRRKRVTGDDA

SEQ ID NO: 2533 - protein, 631 aa, unidentified
  REGION 1..631: note = Table 20
MLTLEFKADFSLEQQAKIDRWLEINRSLWNMGLAALEDFDDFYSYVKGQKEYAPCCPIQYEYRPLSEEEKACIPTHEKTSDRKYLAPFCRIISEKSRWYVKKLPIYKVPTPAEKKDSWGWLPSNHDEDRKYSNCTGYSCPIPRYGSVENPSWYEPMIRNPTYKGSGGLSLVSKTENLPQWMKDSDIPQRFRAGEMGQLDTAWQEYLKSRYGQSEVKRGKPQYKRKRDKLQTLINTNPSANERLVGNNIFAGIPKLGKVRCKGIDKRWRNPDGSIPRVATYKICKRPDAYYIQLSGEVQRSFSVKATNASIGIDPGLQYELSLSDGTRIQPQKFYRKSEERRAKLQQKLAKKLTERLILWIHHPDRTIQEIRKNFFPISNESYEALRAAKTEAEVIKAIGASRLNTLKYNIVPDAPPTMKDKSPFSGAKQKALEKAIRKLDRKISLQRRNHDHKITTMIVRNYGFIAVEDGLQDEKLRKRTKPKEREDGQGYEQTGAKRKSGLSKSLADASPGRKIAFLKQKADRAGRVFSQHPAPYTTKECPVCGSMNEASYNVDDEGNRLYLCIICGWECDRDVNSGVNIELAQFGNNPHTVLSANAQRARFANSVWEIAHPEASTKPRWKKTEKRKKRK

SEQ ID NO: 2534 - protein, 617 aa, unidentified
  REGION 1..617: note = Table 20
MLGFTIPPKRKFQPRLMICKVSEFKANFTSDQIAIIREYQEGLRRLWNFALGQLINADENWHYDKVSKTYVSKCTLVRHQVKDDLSKTWVAHSPVLDRRSRWIVAACQAYPTATTKAGHQRMADKDHVFTRAEVKASGWVGGYGYSCPIQRDHNPGLISNSAMKDSKRGLGILARARDLQDPTIITPDLLKDLDRQLILNVQQKYRMGLLEQLGGAWDKYVKDRYSKESLRRGKPKFKGTNTPVNTIRHPNPNAGGKKPQSADAVRAIGSDVLKIPGFGDVHLPGLDKRWGKSRVKIMQIVEKASGFFVQLTREETPRRVRKVEPRGYAGIDWGWKEENYCSVSWVNEGGETRSQQISKPRFYRESQEQLGKAQQKLDEKLYRRLILWIHHPDTNLLDYVSEGDADILKTCRTVEDLCAHIGVDLNASTIQRLRWKQCGDSQGVKECKQKIKRIHEKTKRRRRSHQYRIASYLTTYSSGIAVEDGLQKKVGKAKAKAKEDGSGFDKNQASAVTGQNKSNRDAAIGQQIDLIDKKTQEFGKSTQRIKFAADLPLSRICCKCLAYDPEMDISKPVYHCTQCGYEGDRDVNSSALIAKIGREPSLQKTIKQKIKKTRKKS

SEQ ID NO: 2535 - protein, 690 aa, unidentified
  REGION 1..690: note = Table 20
MAVKVFEFKIYPHKDFQEQFNRWAYGLKKFYNFCLQQFELLDEYTYWDKLSKTRVPCCPVPWSLKLIETLDPNPYLPELKNKHYVSYSNLIAPQDIPVIRNAPEARQYTLKKGETAKDVFKRVKNPDQIVVTTAKPESSGLDKWPRGWLGGVGYSQPPKQDYQPSLIKNFPNSEKTKDAGILVKKETLENSNLPDEIKKVILDVPYKFRSGTLAMLCTSWQEYLKSRSGQKDLKRGKPKYKRYRDRIETIIHPNPNAGSSKPASKDACRLEGDNILVLPSFGKVKIKGLDKRFRDNDGSIPRVKVVKVLKRPSGWYIQLTADINRSNKLFKKPLGAIGIDTGLKEDNWITTDRFAVTKPRWYRESEEKLARLQKELDAKKLQRVILWLNHPDNSIERIKTIFPSIAKEALEKVKACKRPQYLHELVKNNELSTSGLNQLKHFNFRDCEKVESCYLFDKLLSASNKEIELAQRIRKLHEKLKRRRRSHNQKQSTWLTRKYSIIRIEDGLQKNVGKSKAKVSEDNRSFERNAQNSRTGMNKSVLDAAIGGFISLVESKSKEWGRDFKRMKPGKGKAYSQRCPVCHHENKEQKDITNHQDYNCSNCGFTHRSRDVIPGINMILDEFEEQQQKNLLGIETEEQKIIWDDLSKECRQAWRLREKWLSENAPGGGCQDEVNSDKPSNTRKSRRRKK

SEQ ID NO: 2536 - protein, 588 aa, unidentified
  REGION 1..588: note = Table 20
MFNSDLAPKTIEFKLDLTKAQQQIVDSWLNSMRWVWNEGLSLLLEHQSLKYYEWLEKQLNLQRLPTEGIEKRRVSFSKKGFSATCQISSKKGDRFYPCCSLPLPPSPRLKGDGYKFLVGWLTRERYREQSALYGVPMKFVSGTLKHLADSWKAYKDKTQLQRHLPKFKSYKRGERITSLYCLQPENIKVKPNGVICPGVEVLGELKIVNKGLLKRWDFNIKPRTLQICKRPSGYYLQLMSNFPILKVKDSDRACGLDVGLQYIYSDDAGKQVDPPKYYRQSQKRLRRLQRKLARQVDNSSNQQKTKDAIARLHEKVAMRRRNFNHKLSTYVVRSFGGIAVEDLKISNLVRRPKPKKLADDEGYERNNAKAKSGLNKSFADAGLSQLLTMIEVKAKVADRELVKVNPAYSSQECPSCQNIIKKSLSQRTHQCLACGYLDPRDVASAIVIRSRADFVRSYRACTRNVKPVELSKVATEKQEPEKSGYVHVVNTTLSFSPLRPCGDAEEKLSSISTETNSSFSFEVIQPSLIPSAIGQLFDPKAFGPPKRNRKKWKKISQPNFETCAAQNDSGIQLSLSLWDSTGEIELME

SEQ ID NO: 2537 - protein, 558 aa, unidentified
  REGION 1..558: note = Table 20
MLVKKTIADIKLNLNATQRAYIDRWMDELKAVWNFGLELLMEYQLNKYYDELEKITGKPVKRVKRRLAKKPQFIDSLKNEKGKSLPNPLYTPKYLTGKQKVKIQIAREKRQKAGHSYPVHVPIQRRLKSDNYFGLCGCITKEKCPELCKDIPMAFVKGMLKKLADSWKAYTKLDKKNLDRKLPRFKRKEDKIKSLYSEISDCAVRKGNKISIGSCGKTLGDLKIVNNTLDIRWGDRKASTVSIIKYPSGYYLSLFGEFEVDDLPDSDKAIGIDVGLEYIISTSDGQQVDPPKYYRKQQKRLARLQRKTARQYKAGENKDGKNLAKTRAKVAKTHEKIARQRKGFNHALSADIVKNHGAVAVEDLNLKNLMRRPKPKKREDGKGYERNNAKAKGGLNKSFADASLGQLTGFLETKMKAPNREFIKVQPAYTSQDCPRCGNRVKKSLSTRTHKCLECGCTLPRDVAAAINILGKADFVRSYPACTGEVKPLKNSDKESAQEELLDKSSRLLLGEETLETLLVLTSEPVTPKKKTRKRSINLQPAQTVNAGYTQLTLWETG

SEQ ID NO: 2538 - protein, 534 aa, unidentified
  REGION 1..534: note = Table 20
MKTLEFKIYPTVAQSQTIDLWLEQLKWVWNRGLEIRLEAQQRRWRKKVDRPIPESLKLKWKDGKLVGIGVRKTKAGHKFCEIRTCRDIENPKKFAQCEFFRSHRIPEWLQDVPCKFKSGVNDALNKSWKAYANPKHPGRKPKFKGKYDKLKSLVNLNAGGKYKELNPKRIPGGDNGHVHFPKLGKLYVKGFFKRFMTEEYGSARILKEPSGYYLQVCVPSEEVTLPANDKAVGIDPGVTAVIATDQGRLVPNPRLLNSKTKRLRRLQRKLARQQKDSSSAKKTKRFIALQHEKIRRTRNAFNHKLSTKLVREYGALAIEDTKLQNMTRRPKAVLKEDGKGHERNGAKAKAGLNRSLLDVAIGDLRAKIETKAKVWGREAERTHAPHSSQNCHRCGSKGNRRSQSEFICVNPICKAFGITQQADTNASRNHLLNSSFLSSGKYRPWGWELMPLKGGEMLSAQAEAEQSAPLPEYGNRSRGAGGFIPPTPPQPTSNLDTPRLPNERKRKSRFAQPWNKTFIQLTLWDFGEEIRSEG

SEQ ID NO: 2539 - protein, 612 aa, unidentified
  REGION 1..612: note = Table 20
MKTVECKVRLNKSQESYFIGNNTLESQWLWNLGLELLIEYHQFEYYKWLEKKASEKGISLENIDRYWLRFPKHSAWSLPMIPNEQRMQSLLTEWKESQEYKYFGLGGATCQIAFIDKDRNYQLIPKRLLPSEPRLQKHGQSVKSISRTLEGYLTKTRCNVFRQSQNLPPLQIDCGYMGGLLNHLANSWAAYIDPQRRDSHIPKWKKEAVKTFSCLDTERIKLIDDQLFIPGVKSGIKFVNKNHKRLKEGDEIRSVVIKNNSSGWYVCLTVANKLEVELRQKQNSIKKETDDDKKREIKLKIDHLKIKLDIRSRQEAGIKPSNKATGIDPGVKAMVATDGEALIKPPIALKLQEAKLTRLQRKLSRHKTHSKNFNKTTAKLARVHENIRRNRTAYHHKVSTYLIRNFGAIAWEDTQHKNLTRKPKPKLRADGKGYAKNGARAKSRLNRNLLDVALGGLREKTKSKMTTYRGEGYFILTKPHYSSKKCYCCGEKGNRRTQSDFYCTNPQCRLHGVKQQADVNAARNHLLNSGFLQSGKYRLWDWYQQNQEDTPLGAGNSVATPGEFKPVGETLSSGDVLLGETETLRSKSMRQEADTPAPSPEYGDQLYNFSEK

SEQ ID NO: 2540 - protein, 519 aa, unidentified
  REGION 1..519: note = Table 20
MSSNKIKTDKKADADKNVKTIKTKVLLTPEQLKIFDRLCAEADWVWNEGLKVAFQLHNRKYYDWLDKQLEKQGIDTEGIIKAPIYLSESNAFSGASCRIATCDRTWARDPDNPITYTNKTGKTCKKNGYRLLNGDNNWQRIPPEPFKPVTIAGKELTKLQSLDNVGLLNTVREAQDLPKLTPKSSDWIGGIVGVQGKLTKAWKAYLDVKQKKFSKPKWRGRDIKTDSLMQSQKLKYEPEENEIVVQTFGKIQIAEKDFAKRLKGEVGNSITIIKQPSGFYACIAISESVAEKAKKPTGRIAGIDPGVKNIVVSSNGLFVKPEQTRERLERHILKHQKELSRLYEKRRQRLELPSTKGFKPESLKEKYHAKRIARLQEQMRNSISAFNHKLSTRLTRTHDELAWEDTNFQNMLQQLKDAPIDERENYAKNGRSAKRGLNKSLKRRSIGQLRELTKQKMEALGKRFELSPAPSSSQICHCCGQKGDRRTQSAFYCLNEGCQLFSVEQHADLNAAKNHQSYL

SEQ ID NO: 2541 - protein, 668 aa, unidentified
  REGION 1..668: note = Table 20
MKTICVKVKLTPEQETEFDQAITELEWAWNYCLKIYLYNHCRKWYEWAANTKAKVDKAMADIEKLPAKQKEFVKQYFWGDPASRPAKLDASQRKLVDNEKGVLKILHLWSQFDIEGIIETPLRISERSAYTGASCVIAEGGPFWATEIVEKNNDAGEPQKVRKSKLIDGKKPYTPLRITEHKYPLVPSGQFKDREIIDWTDLTVKAVLNSVRESEGLPELNLHSNYINGLISQNGSLTKAWAAFLDVNRKQSKRPKFKNEQYKLNTLLNLYAPNIADKESGENWIEAKQLGQLEVTDRTWRARLGEDSLRSHCVTNKRSGYYVHITTEHPLQADKTVLAKQLTKVKKENGIDSVEYKELALKIADLDSKIKSSKTISRKKELVVGIDPGVNAIVATDHGALYTPNLSRERITTHLEKLQSRLKHAQQINDDLWKQGNSTKLENLKPEDQANFVIQDKRPKTKNELKLEHKIARLHERGASSSRHFNHKLSTRIARTYTHISWEETKLANLLKQAKAKPDMSGIGYLPNGAAAKRSLNWLLKQRCLGDLRERTKKKVDEYGGVWHDSAPKYTSQKCHCCGYQDPEQRDESNFTCKNESCKMYGVPQNADVNAARNHKKAIFELGEVKYNLLSLQYDISARKRHRKRHKQKPKVTVIKLPNNTFSTSNNI

SEQ ID NO: 2542 - protein, 626 aa, unidentified
  REGION 1..626: note = Table 20
MKTIKIKVSLSTQQKEIFNQYIDQLEWFWNLALANQFHNHCIKWYEWAKKQQQLLDKTKENFDKLKPEQKQLVLDFYSHKYGEKQPKLTEKQKDLINKFEIFSRWLPFDLDGIIPVPLLLGNSGYEGLSCRIAIGGPRWVRDENINIPLKNKKGEIIHKKGSKLVPGKHPYQPIKPTPHSYKTFPGGKFAGRELVDVKKLDNLDGLNSIRSAENLPPLTVPTDYIGGTMKFFEVSWNAFLDPKLPERRKVKFKDKERKLTTLSNNQKPPNRINPEKNTVSISGIGEVKVIDRNWLQRLNLENISPRTYTLSKKPSGYYLNIVVAHPLQEEKSKLDKQLPKVKKEYGEESQEYQEILSKYNEVSEQIKLSYFDDVKDLSVGIDPGVNAVISTDHGALFMPNITRERISIHIEELQSKLNKIKDINDAQWKAAGNKGERPKTKNEIKLQAQISRLHEKGANSANCFNHKLSTRIARTYRYVCWEDTKIKNLLKQVEPQALPEGVGYAHNGASAKRGLNWIMRQRCLSDLEAKTKEKVEKKGGKFNEPSANYSSQLCHCCQQKGERVSQHEFICKNPECSLFEKVQQADVNAARNHKQHGGFEVGEVKYNLTKLQYQKPKRFKKKKLTK

SEQ ID NO: 2543 - protein, 494 aa, unidentified
  REGION 1..494: note = Table 20
MFAIKSMSELVQHHITIQLKAYLSTTQTALFENWTDSLRPLYNLALGLLYEEQQRRWRTNQKFLKNYLDKSSLQTYLNEIENKPDIYPVEWHITKALPECDWLTKEENEVRKKDNTKSLACRTINRDGNFFTPIRPYWHLEEPQKLAKFKCFTNQWLISCNLLTNYHLQKLLNVNMKVRQSFISMNLMEAWKRYQKGDFRKLKFKSKRNPVISLCNKQTNRIKFDPEANNCQLLGKEFGLIEFRGLHNRHQGQIQPRNGSLTKKADGYYLNLVFQVEHKPIPDSDLQVGIDPGLVTLLTLSDGKCISNQRFLKENERHLTVLQKKLSRQTPGSKNWEKTKKALAKIHKQTADHRKYYNHKVSTHLVNKYGAIAIEDTKLTNMNKRPKAEKREDGKGYEHNGAKAKAGLNQSFHDAGLGQLRAFLESKANSYENRHIERVRANYTSQKCSRCGHTDSENRLTQASFHCLKCGLEMPADLNAAINIEQTAFGLDKS

SEQ ID NO: 2544 - protein, 624 aa, unidentified
  REGION 1..624: note = Table 20
MKAKKNVKKPDKYQIERVPSSSISSIRFNIVKKPPKEKEDKPKKVIEFKIHPNKEQVEEINRSFASCKLLWNLSIALKEESKQRYYRKNYKFDEFSPEIWELSYSGHYDEEKFKSLKDKEKELLIKNPCCKIAYFKKTSDGKEYTPLNAIPIRRFMNAEDIDKDAVNYLNRQKLAFYFREDTAKFIGEIETEFKKGFFKSVIKTAYDAAKKGIRGIPKFKGRRDKVETLVNGQPDTIKIKSNGVIVSSKIGLLKVRGLDRLQGKAPRMAKITRKATGYYLQLTVETDDTIYKESDKCVGLDMGAVAIFTDDLGRQSEAKRYAKIQKKRLNRLQRQASRQKDNSNNQRKTYAKLARVHEKIARQRKGRNAQLAHKITSEYQSVILEDLKLKNMTAAAKPKEREDGDGYKQNGKKRKSGLNKALLDNAIGQLRTFIENKANERGRKIIRVNPKHTSQTCPNCGNIDKANRVSQSKFKCVSCGYEAHADQNAAANILIRGLQDEFLRAIGSLIKFPVSLIGKYPGLEGKFTPDLDANQESIGDAPIENAEHSISKQMKQEGNRTPTQSENGSQSLIFSSAPPQPCGDSHGKNKPKALPDKASKRSSKKPRGAIPENPDQLTIWDLLD

SEQ ID NO: 2545 - protein, 548 aa, unidentified
  REGION 1..548: note = Table 20
MENMTRVVKFRLTLTENQQSLIDEKMRLLKYLWNLAVGLQEEVNQRRLRDKFEFKEFSPEFWETSYLSLYSSFPHIEKLPKDKIKLLAGNPCCKIAYLKNKKEYVLLKLEERKKRPYLGNPDAKKHTTKPPDKEDLKKYFYPDLADKIFEIGSEFRGCFYRYVISKAFETAKKGIRGFPKYKGKLDSVQSLIVGHPTLIKVRDGGIFLNKQIGLLVIDDINRLPKESDVRMASIVRKASGYYLHLTINLPVPMHFPSDRQIGIDVGCVNLYTDSEGRHIETKAYYRNKERKIAHLQRKMARQEKGSANYLKSKEKLALLHEQIKDRRAGYLHQVSHKLTQKYSHIAMEDLKLKNMTKRAGVKENEDGTYAHNGASAKSGLNKSILDQGIGELKRQLIYKSQEKGGRVVLVNPKFTSQTCFNCGHKHKDNRKSQSEFICVSCGYSANADENAAKNILTLSLISSTIGVLRSSLLSYPSLLGKAVSLLAYVCGSPKGTCEAERERSDPPINPPVKGGNCLDNFSTLTIKDPRHQSEKVSQPIDSVQLTIW

SEQ ID NO: 2546 - protein, 611 aa, unidentified
  REGION 1..611: note = Table 20
MKTLEFKLNPNKAQVERLEDWLHCLVQLWNYGLALLEESEQREWRAQLQEKHKSCGVPPGVWLKWGRPPASINSSEGETSSGVQDESVPLETKGKKKRGKKDKAQAQGNKKPARLRGSGIVRPKHSRGVVKGPYCKIRQYPHIEDPRKVVMGNKLQGKNGPWPDGPWMSMCSRFRNGLMEDLQYAWKAYKNPTQTIVRRPRYRRRGDIRILTNGNAGKYVNRETGETAPDTVKIHGDQISFPLGLVFTVKGLAERLPCHPTQASILKKASGWYLQLVCPIQDKPKRPKKPEQAVALDPGVSAVITSHEGDKVTPPKYYEKSQKKLRRLQRQASRKWQQNGERKSKNWQKMQQRIARLHEKVSRQRRAFNHKLSTFLASEYGGVAIEENTIRNMVRKPKPKARTDGKGYERNNRRAKAGLNKALLDVAGGQFREMLKTKVEARDAEFHLVSSRNNSQVCPRCGGSVPKALKVRVHHCPHCGYRADRDQAAAQVVFGKAEWQKSYTNGCGFDPSDPSFVGAVKPVAGETRLSVGGVPAGELLGASQEETMRQEAAHDGTQGAIYSGVPSPVGEQQEGKSGKPKRGRKPRGVRQNAEPRQLGLFGPESPPPEAD

SEQ ID NO: 2547 - protein, 548 aa, unidentified
  REGION 1..548: note = Table 20
MKTLEFKLYLSKQQQATIDRWLVDLKWIWNAGLSLLEEDQQRRWRNKNGVDPMDGAEKWQFYCNPDRWDWQPEDSKSKFAGVYGLACSCTHYDKASQQHYPACQIRNHMQVEEPFKLVSKIQTDKANPNKPWIRAICSRVRNGVIESLKEAWKRYLDPSNPVRRPNYKGKRDKLASLTNRNGKTTCLVTGANHIRLPILGVLKVKGIQARLHDRQFETVRIVKRASAYYLQLLVHEELKLDAPKYSDDAIGLDPGVVNALTRSDGWVAANLRHYRKSERKLAKLNRQASRRKLGSKNWQKTIQQIGKLHEHTAMNRKHRNHKLSTYLVQTFGGIALEENILRNMTRRPKPKPREDGKGYLPNQATAKAGLNMALLDVGVYQLRTFIETKSKVTGTEFHSIASHYNSQACVKCGTVDRENRLTQSKFCCTACGHQENADVNAAQVVLNKAPWTRQFRFRLREPGEQTSSWKGTVLPSRNRQSHLTKPAAESFVGCQQELACAVARSTQVGIPEITGKSLSKQSSRKSSSRAVHSNSKMPIQLTLWSIEH

SEQ ID NO: 2548 - protein, 480 aa, unidentified
  REGION 1..480: note = Table 20
MSTDNFDVKLLEFKLYPTSSQQEQLENWLRAQQQIWNIGLSLLLEFETFAAYNKIDKGIAPCCPLPWDYIWRPITSNQDWRSPHILESLPNKDPLRKKYIPVPIAKVGTKRRPNSSCPLPRQYKKPQLDQDSEYSLVKWCGYQKLPKQNPPNGAYIDVALITSCPQKHMTGTLKILATAWKEYKKGKRKRPRFKGHRNPMQSTTNYQSGDAKLVGGDYLKLPKLGTVKAKGLEHRWAKSTSNVRNYIIKKEPSGWYIFLCGRFPKEAIKTSNISAGLDAGVKHLLTDDVGNHIENPEPLKKNLIKLKRLQQKASRQFHMNNGKTQNWEKTQAKIKKLHEKIRRQRKAYAHKISTFATEKFGEIYVEDLQHQNMRKRSKPIERKDGKGYEHNKQSQKKGLNRALSDTGMGQLITMIEEKAAAKGRVFKRIDPKYTSQTCSQCGHVDAKNRKSQSDFTCVKCGHSENADVNAAKNIKQKGKL

SEQ ID NO: 2549 - protein, 507 aa, unidentified
  REGION 1..507: note = Table 20
MKTLEFKLTLNRSQKARLNDWMTANKWVWNEAVRHIEWFNEFNKYHKPDKKNYPCSPIRSQNFWKKFRGQEPLENYGLGEFPSCPIGWINDSFDPELPSFPVSRSPKHEQIHNISLFSFIKLFAHSRNQDKPWLLEVPSKFINGEVDCLINSWNAFVKSPANLKRRPPKYKGKHDKIDALIHNNSKGIGTKGDSINIPKLGYVRVKGFTDRWMFADGKPIDFCPLKICKKASGWYLQISGEVPDRKYRKSESMTGFDLGVHEILTDERNYHATSPRYLKTSQDKLKRLQRKMSRQFRMNEKDKTWQRKNWNITKAKIAKVHEKIARQHRAFNHYLSHKAVNTHAVIAMEDLKLLNMTKAVKTGEAGVQNGRKSKSGLNRAMLDNGLGQLVGMIETKAKVADRIVVKVDPKNTSQECPHCGHIEKKANKKNRHVTCSNCGASFHRDTSAAEIIKRRGIARLEGSDVEPKTKKERKPKYGKRSKPVEPVEAPRPIVDKDLQHLPLFCCA

SEQ ID NO: 2550 - protein, 560 aa, unidentified
  REGION 1..560: note = Table 20
MKTLEFKAHPTQAQILVLESWLATQKWVWNRSVGLIKDFNQFNVYHKPDKRTYPASPIVVEHRWLWQPRTLWADEAGIESPLLTREVVTKGDKELESYRVGGVEVKPWQSGEYPCCPIGWRVADGQNIEPTGKKGDLIHPVRMADGGHPAVSLSALGMAYAFAQKLNPGLKDCPANFNRGTVAAAAKSWDAFKKDKTGTRRPPKFKRKYDRVDTLIHNDSKGIRIEGNRIQVPVLGWLRVQGLSKRWPQGVPFCPLKICRKASGWYVQLTGEVGDRPPVKFTGKVAGLDAGATQVYTDDAGRSLEPPRYLKASAQKLARLQRKYARSFQQNAETVAGRKRWGADGPTKNAQKIQKRIARLHEKIARSRRAFNHWQSTKLVRQFDAIAVEDLNLRGMTRAPKAKARDDGKGFAQNGAKRKAGLNKVLLDNAIGQLFQLTETKATAAGKAFMRVPPHWTSRRCPKCGSEKPENRPRPGAPFRCVDCGHYDSDGDRNAAINIKAMMTGDRPKPEDKPKATKARKGKAKPKDTPVENAPIEIVGDVGDRDSQGAVQFGDQLSLF

SEQ ID NO: 2551 - protein, 426 aa, unidentified
  REGION 1..426: note = Table 20
MTKAERIRQAIQQTKQRHKEQVPVVYELKVNLNSLSKADRKNLIALFSEAKWLYNHIVADIDNRLKYESYKLSEVEVKVGDKFETRPIINLSSQMKQSIVERIQRNLYALHSSKEKGNKVGALKFKREVNSIPLKQYGKTFKFTNEQKTKVKLQGFNKPIRVLGGHQIPEDAEIAKAELVRKASGIYLHVTCYIGKEDFLKVWQNRVNRKQIVKRREWKTFNQAAAIDFKPTGVVLSNGLKIEWKIEETPRLKRLQRTLSCKKKGSRNRQKVKQKVRKEYEHIVNVRQDVVNKVISLLYRYDTLIYQDDNIQAWHKGSFGKSIQTSAVGMIKRGLRDSLRVSTVLIDRFQPTTKTCSRCGNVQSLELSDRVYKCPACGSELDRDLNATYNMLKFVGLDRSEVKPVEHETAVKIFGANPKVLISFVQ

SEQ ID NO: 2552 - protein, 421 aa, unidentified
  REGION 1..421: note = Table 20
MGAKNEKIKASLAETRARRENQRPRTFVLKLQNLSKNKERTLERAFLEAKWLTNWIIADIERLQLPLNKVHEVEAKAGDALEPCKLRVLGAQVKQRIGRRIQEDLRGLHALKQNGHKVGRLGFKRRVDAIPFSNQAFTLRSRGKENRVHLQKLGEFRALGLHQIPQKAEVANAVLVRKPSGHYLHVTVYVPKDEPKPLPDPGNPNQATDFKAVGVDLGLKNQAALSNGFVLRWRVRETDRLKKLQRKLSRKKKGSKNREHVVHRIRREHEKLRWIKQDIRNRVLALLRQYDLVAVQPDRIKGWQALWGGKVQGAALGGLLEALRTRLPTLVATERNAPTTRTCSSCGHLNPKVPLDRRVFTCEACGFRIDRDLNAALNVLTMAWPAARALGLDRPEVTPLEWEAAGRILGPNPRIRLSHAT

SEQ ID NO: 2553 - protein, 303 aa, unidentified
  REGION 1..303: note = Table 20
MGGQHGVTYRLDPARNRARIQRLGEFRVLGLHQIPQGAEIASAVLVRRESGFYLQVTGYLPKETLAARQKFPHPVGVDLGVRDKLTLSGGLKVDFEVPETPRLNRLQRRLFRTKPGSKNREHLRHLLRREHGRIANRRRDAQNKVLAFLRRYPAVAFQEDFVKGWSASFGRQVHHSGIGGLKARLRNSLATPLPVERFERTTGECSACGEALEVPLSARVVACPRCGRTEDRDLNAARVILRKGLGLSPNQALGVDRSEVTPMEREAAVRILGSNPWVRVSFLGEVGSPALWCREEITHQIGV

SEQ ID NO: 2554 - protein, 157 aa, unidentified
  REGION 1..157: note = Table 20
MTCYLPKEEHVPVIDKAIGIDFGVKSKLTFSNGMQIVFEIHEARRLKKLQRRLTRKKKGSKNYEKTLRLIRKEYEKISNWRSDAINKVFAFLRMYKVVVYQKVCVECGLKIDKDVNAAMVILKKGLGLSFEQALWLGRLEVTPVEWETTVKQEAHSF

SEQ ID NO: 2555 - protein, 454 aa, unidentified
  REGION 1..454: note = Table 20
MKRDNTKNIQKNKKDNCHRNNNYYSMDKRISQRKETTKRRKSLSCKVFEIKVDKSHLSTKTTNHLKQIFIEAKWFYNYCLSLEDINNADTTAKSVPVKVADTFEERYFTTLKSQMKQAIKTRIFNSLSALSALKKKGYKVGRLKFKSRIESVPLKQYKVTFDFDREHSRIRIQGIKPWIKVRGLEQIPTQAEIANANLIYRCGDFYIHVTTFSEKESRIIPEQAIGIDFGCQTQLTLSNGTKIEYQVSESQRLKRLSRRIDKKVNGKVGKNRQSKNRRKLQEQRRKEYDRLTNKKKDIHNKVVSAITKSYKYVCFQDESIHAWHAGNHGKKIQHSAIGGIIRDLKHKSHTPVMVDKFFPSTQLCPHCGCLNKLKMSDRVYKCDCGYSEDRDIKSAKCIENEGLTMLKSCGSIPVDHRDFKLEENVSSTCFDLLTNINGIKVSKICSMSQEAPLL

SEQ ID NO: 2556 - protein, 318 aa, unidentified
  REGION 1..318: note = Table 20
MNLKQHGTTYTLSSNGRLRIQNIKQRLRTRGIDQIPQGAEFANAKLLSRHGDFYLHVTCYLTAQQLQAHHHKKPKKNPKPALQQVEILGLDVGIAHQLTTSNGIQVQYRVPISPQIRKAHQKVSRTQKHSNHRRKARQRLQKAYAKTTNIKQNLVNQLVACLCLFVKIICVQDDFVKGWQRIWGKRLFETTIGGLMGKLKKLPNAVVVERWFASTQTCHRCAQKTPHSLKERVFVCGCCGHTEDRDVHSAKNIEEKGWKKRIGGEPTESSQEPRGRACEPTPVDIKTTALMVEFLNRIPHIRASLVAETGSLLDKDVP

SEQ ID NO: 2557 - protein, 480 aa, unidentified
  VARIANT 17: note = misc_feature - Xaa can be any naturally occurring amino acid
  VARIANT 22: note = misc_feature - Xaa can be any naturally occurring amino acid
  REGION 1..480: note = Table 20
MPPLAFVPFSFLLAQKXSSCYXTFILSYSRRVFHVSTKTAKQKKQSATRKATLERRKTQLCRTYELKIDTSRFSKKTKNHFILLFLQAKWFRNAVIASEDPFTFDEKVKSVKVKVGQLFEDRKLTLLSSQMKQSLLSQVQDDICGLSAKKQNGGKVGRLKFKSFVNCIPLKQHENTYTLTRKHGNNGRLHLQKCKQTLRVRGTKQIPEDAEITTAKLLKRGDDYFLHVNCYRFKKTVSLEKWEKREKLGLETRHEIGIDLGIASQVTCSNGLKVKYNLPIDENIRKYARKVSSTEKGSNNRRKARVKLQRAFAKHRNRKQEVINKLVSCLDLFCTDICYQNDYVAGWQRIWGRTILETSIGGLLGKVKTLPTSREVDRWEATSQRCQKCSEKTKHALSARIFRCGICGHEEERDVHAAKNICRVGMTEGDEPEVIGDVVHAERVEPAYKTPVDMKTAAMMFEVLKNIPFVKVSLVVEAGS

SEQ ID NO: 2558 - protein, 371 aa, unidentified
  REGION 1..371: note = Table 20
MKKKNPRTELRTLTTLSSQMKQGLLEQVQEDVRSLAKKKKEGFKVGKLKYKKIVKTIPLKQYNITYKIQQPNYIRIQGLRQWLKVRGLKQIPKNAEFANAKLIQKQNDYYLHVTVYLPKRKRKHDNDTRKQSIGIDSGIANQLTLSNGIQIKYNLQIRKQLRRTYRKLSRKKTGSKNYLKTLVTLRKLFNHWNNRKHDVINKIVHILTTHYKIICYQKDNIKNWQRLFGTKLLNTALGELFVTLNKRATTSGVVDQWEPTTKRCALCQTVLPEPIPLSDRTFVCLNCDWTSDRDWNAALVIEVLGLQELDLDLYSTHFLDFDLELPTERRNVKPLETKTSQMILNGLFQQIPFVSSEVLSMNEEAHSLRCG

SEQ ID NO: 2559 - protein, 460 aa, unidentified
  REGION 1..460: note = Table 20
MSRPSGNISKNQQIKTTLLATRERRKHMICKTYELKIVNHHLPKYALLHLHQLFLEAKWFSNAIIGSKDIFSFDSKIESVSVICPDTIDERPLTHLSSQMKQSLVKQVQRDIISLKKQKEKGHLVGKLIFKKCVETIPLKQHGNTYTVKRPNKSHIQGLKGYFKVRGLHQVPKDAELAEAKLRYISGDFYLLVTCYLPITSTSKKTITNEQQKQQKRVEIAKQVLGIDGGIANQLTLSNGIQITYNIQIPEKLSQLCKRLSKKKYASKKYVKTKIKLQKRYKKWTNRKIDTTNKIISRITNNYAYVAFQDDSITNWQRLWGTRLLNTALGRLFTTLERRVVSSCVIDKWEPTSKRCSDCGYILLKQVPLDERVFQCLNPECRLELERDWNASIVDKKLSIGELASINSEINHRFPQELRKKMPLETSTSIQELCQSLDRLPFVSAQVLSMKREALSFRLG

SEQ ID NO: 2560 - protein, 367 aa, unidentified
  REGION 1..367: note = Table 20
MKIEDKFEERELTILSSQMKQYLIKRLQSNNKSLIILKAKGKKTGKIRYRKSLHSIPLMQYGITYWINAKDKTVHIQGLGDFKANGIDQIPWNGEFANANFIERNGDYFLHVVVYVPKEKKVHNGRAIGIDLGIKNQITFSNGIKVQYAIPMPERVKRLYKAFSRSQYDKEERKRSRRGTKILQKIKSEFQHQNNQKKDINNKLAHYVTANYEYVAYQNDNIQSWSKLFGRRIYQTSIGGFRECLKRKASTPLEVGRFIRTTGVCMNCGTVQHLDLSDRMVVCPSCHSVFDRDVGAANKIKEEGLCLGNLGETLAEDYASTSSMLEYIRRIHVKASIAVEARDHKVLGESEALYAKWNSSLYIIIKY

SEQ ID NO: 2561 - protein, 290 aa, unidentified
  REGION 1..290: note = Table 20
MSIPLQQNGITYKIVDKRHVKVQRIGALKINGLEQIPENAELANARLIKRHGDYYIQITAFLPKEEHEQLPYYIGIDFGIKNQLTLSNGVRINFKVPLVDEKIKKLQRLLKRKKVGSKRYRETQLKLQKEYEHLSNIRKDIANKVGSYLVTNFALVSFQDDNIRLWERLWGEIVGATALGNVKTFLNDHGAQEIDPFYPSTQECSQCHKRTKMPLSQRVYVCPYCGNVIDRDLNSAIDNAEEGLTVRRSLGLNKPLMPADDRTSTSMVEYFNNIPFVDASLVNETGRAQF

SEQ ID NO: 2562 - protein, 423 aa, unidentified
  REGION 1..423: note = Table 20
MISKNEAIKASIKATKAKRKTQTCRVYETKIDQSYLNHASKEYLNRLFLEAKWLYNHVLSQENVFKMDDKIHEVPVKVKDAFEIRELNCLSSQMRQSIISRVYDNIRGLSERKKKGYKVGKLKYKSELQSIPLKQFGNTFKILNTKYVTIQGLKQKLKVIGLKQIPEYADIANATLIHKSGNYYLSITTYQEKIKPVSPIQSIGIDFGISKQLTLSNSISIQYSIPISPKPRKLARKLSKQEPHSKNWNKTRIKLNKEYVKSTNIKTDIKNKVVSHLKNKYEIICFQDENIKAWQRIWGRKILFTSIGGIISALKQNAHTPIEIHRMYPSTKTCSKCGNIQNIALDERVYVCKNPHCNNIIDRDHNSAINLDNEGLKKIDTERIESTPVEIETSTLISVKYFNSIPHIKASSVYESGSFTALA

SEQ ID NO: 2563 - protein, 511 aa, unidentified
  REGION 1..511: note = Table 20
MIETKRNKIKNSLRITRERRKTQNVIVLKLKIDNDKLNNKSIKTLNTIFLEAKWLYNYVINKEFNNDIFNIDPKIKNVNVYVKDHYETRELTYLSSQMKEEIINRAMDNIRGLHKLKEKGSKVGKLKFKSFITSIPLNQYTITYKIINNNYIKIQGIKQLLKVNGLDNLECYYEPASALLINNNNNNYYINITAYKNKYILEKPVNNQKILSFDLGIKNQLTCSNGSILNYNIPKSKREIRLQRSLSRKARYVEGTNSKNKLSREQSKNYYKNKNKLNREQTKTTNKRKDTINKITHYLTFNYDIVVTQNDNISGWQHLFGKKIESTGIGGIIDALKHKASTLILIDRFIPTTKECSNCHNKYNIKLDERIYKCTNCGFIIDRDYNSALNMIYYGIIKLNELLKIKNKKLNNYFKKYNINLNVPMERRELTPVEIIASGFEGLSISPYVKLSMVNEAGSLYALHEVVHLLIVTPDACQDNGRSQPTKLGAKVYWVSDYYSEIIYPHEIKIY

SEQ ID NO: 2564 - protein, 219 aa, unidentified
  REGION 1..219: note = Table 20
MLIKRNNNYYINITAYKNKLNTETNQILSFDLGIKNQLTLSSGLQLKYSIEKTKKEKRIQRILSKKVKGSNNYRKLKVKLNKEQDKTKNRRTDTRNKIVHYLTSNYNIIITQNDSISGWQRIFGKRIESTGIGGIIEALKHKASTLILLYRFIPTTKECSKCHNKYDIKLNERIYKCSKCGLISDRDYNSTLNDIYYGTKTHKFKKLKVPVEYREFKPD

SEQ ID NO: 2565 - protein, 427 aa, unidentified
  REGION 1..427: note = Table 20
MRQIENKLEKNNNIKASMKETLNRRKSQFCRIYELKIQNNKLSAKQKEQLKMLFVEAKWLYNDILNWSELNVENTVFNYTIKNVVDVKLKDGTFIQKELNTIGSQMKQSVHKQICSSIKTLSTLKKTGHKVGKLKFKSDYNSINLKQFGTTYRFYNNHKAKIQGIHGKIHLNGLDQIKNNVEFANAKIVKRQNGYYLLVTTYTDNKFKKSYKNQKSDVGIDMGCLTSLTLSTGEKIDVKIEESEHLKHYQRKMFKQKKGSNNRHKTINKIQKEHQKINNKKKDITNKLVNYLNSNFRYIFIQDEQLTKWHKTGHGKAIQHSILGRIKNKLKSQNNCYVISKWLPTSKYCYDCGIKHTLLSINDREFVCPSCGVVYDRDVHAATNILKYGLDLVPPEQRKFMLSDSESYTGIFDTSKVWDMTKEATNL

SEQ ID NO: 2566 - protein, 430 aa, unidentified
  REGION 1..430: note = Table 20
MDHTSTGRSDKNRRIADSMRATYAKREGQVCRVFQCKIQRNKLTAGQKEELKMLFVEGKWCYNAILNSGESSSIFDYDTKSKTVVHKDKDGNDIECEYAYLPQSLRQTIHAQIRNSIRVLTARKKKGLKVGSLKYISELRSLDFKQFGVTHKIPRMNRIKLQGIKGLLKVNGMDQFYGNPDYEIANVKLLNRPDGHYMAVTCWIDKDKVESKRKNNKVIGVDFGIETDFTTSEGEKIHASVQESERLKRLQKKLGRQIKGSRRHARTLHLIRVEYQKMTNCKDDLANKIVAGLVENRTVVIQDEMLTHWHKGWFAGHVQHSVLGRVKGDLMRRDDVVVLNKAVPSTRFCPHCGKLNSLSLSDRIYHCDCGADDMDRDVHAARNMIWFYENNVGVGRTETSAPEIRRAIEKAFMKGNLDCHGPLKGEASTF

SEQ ID NO: 2567 - protein, 409 aa, unidentified
  REGION 1..409: note = Table 20
MSNTDKNSKIKATYLATLAKRENQRVRVFTVKVQMNKLNKEQKQHLKMLFVEAKWMKNHILNLQKNNSDIDVFSLKYTDLLTVTHLDKDKNEIVSQLSYLSSQMKQEVLTDIHSSIRALSKAKEKGCKVGALKFVSDYTSINLKQFNVSYKIVNGSKIKLQGLKKPIKVNGLDQLSALSNYEFANAKLIKKPSGYYFALTIYTDKVSPQPNKPLIGLDMGCQTSFTLSDGRKLNCLVEESEQLKRTHRRLNRCKKGSNNRWKLRKKLRKLYERDCNVKNNLANQLCSALKEYKVVIQDEQLRSWKVRHGKKVQHSILGRVKQRLMALQDTVVLDRFVPTTKFCRDCGEIHTDIKLWDRDFVCPSCGVTYDRDIHAAENMIWLYENIIGVERTEFKLVDFKASVNRYFKG

SEQ ID NO: 2568 - protein, 208 aa, unidentified
  REGION 1..208: note = Table 20
GIDLGCQTTITTSDGDKRTLRVEETERIKNLRRRIESSVKGSNNRRKLCLKLRKACRRQKNRKDDWSNKLCHELANYQIVMQDEQVARWQESGHGKAVMDGALGRVKRRLLEREDTIVLSKWCPTTRLCTCCGEKLELSQWDRTFKCPRCGRVEDRDVHAARNMLWFYENKVGVGRTSTPDEIAAELEKIFQPSSQSSQEATESLDWW

SEQ ID NO: 2569 - protein, 362 aa, unidentified
  REGION 1..362: note = Table 20
MAVLRTYTVQLKLNKNQWHKIDSWFYEGKCFYNFCLTQEDIFKISACSVKNVNKLDKDKNSVSVNLENIPSKVKQNIHRRICDSIKALSASKNKGKNIGYLKFKSELPSLYFDNQSVNIVNNEIRLLGFGRQTIKCFGIEQFKPTDVVRCATLKRFNNKCTLNISVARIKPDRQNTNKQVGLDFGIKDTITTSEGDKFKCVLPETKKLKKLQKKLARSILINGKTKTNNQYKTRVKLQKEYQHIVNQKKDFANKLCNYLDKNFDIIAFQDEQIKGWKNIASTTVQHSCLGSIKSKLISKMSEEPDRYMMVDKFKPTTKLCPNCKTKNKLSLSDRVYSCNCGYSQDRDIHAANNVLRFALGLL

SEQ ID NO: 2570 - protein, 359 aa, unidentified
  REGION 1..359: note = Table 20
VSDKDLVNITHKDKDNNDIDVEITHIGSSVRQQIIKQIRDQIKGLSVLKKKGHNVGSLRFKSDYKAIKFKQYGITHKIKDNNHIKLQNIRKPIKVHGLKQIKDLDLELTTCTLYFDGYDYWIYLSCYENKKDLNINESNIIGVDLGVKDTITISDGTKIDVSVKETESMKKLQRKLAIQKKRSNNWYKTRSLICKEWTHICNIKNDKANKIIAAICNDNDLVVSQNDNLSEWKEKYHKDKNTKIQHSILGRLKSKMNERENVIFLDQWFPTTKLCTKCGHENELKLTDRTFVCKECGHTEDRDIHAANNMIWFYRWNKETTEKAGTVYTDKKPVSSKLFYKNYSTICWNQEATTSSALL

SEQ ID NO: 2571 - protein, 458 aa, unidentified
  REGION 1..458: note = Table 20
MAYKISDESRLARNQKVKDRQKETRERRKSQDTKVVTLKLDRSRMLPATLHTITNMYKEARYLYNYILSTAEPYNKKKSEEYFALRDALAESMKEQFPNTKDILKEKKFIEEFKKVREGLKDTEKTENPIFTFSDKTVDIKIKTKEGFEDRKLEFLPAKLRQSIIAGLKTSVYALSQAIKKGIKIGRLKYIKTLDTLTFTQVNMDFILNEIPYTEERSIDKPKYRIKLLGIKQHLYVQGSYQLPNEYELAGNAKLIRSGNDFYIALTICTPKEVQKRNDKVVGLDYGISTAITTSDGKKYGVKIEESDRLKKLQRKMARQERFSHNWYKTKNKIQKEYRKAVDKKSNFANRIVSTLDKKYGTIIMQDENLVGWQHGRFGKQVGSSALGAIKAKLKNNPKTVFVSRYASTTQVCSNCGHKLLTKLELSDRLFVCPECGYTEDRDINAAKSIKNIGLATK

SEQ ID NO: 2572 - protein, 419 aa, unidentified
  REGION 1..419: note = Table 20
MRMSEEDKKKKFDKQRKTLLKTKEKRKSQRPLVFELKIDTSHLNKEEQIKLKMFFVEAKWIYNHVLAMENAFEYDSKSPLVKVLNKDREIEERKLKYLPAKNRQDVHNTLKWNIKGLHSTKKIGKKVGKLKFKSEYTAIELSQYGVTHKITGRNRIKINGIKRYLIVRGLQQIKSQYELANGKLIKKPSGYYIKLTCYINITSDHIPRIKNPSTGLDFGIKTTITTSVGEKYNISIGKSERLRRIQRKLHRRRKSSKNRYKMQMLLRREYEYLNNCRKDKANKIVSKLLRENQLVIMQDENIKGWHKGLFGKEVQYSALGTIKSKLQKSKQVLIIDKYVPTTKRCYTCGNMVEIGLSERVYHCDKCGLTEDRDIKTAKTVLYEGLSSVNYIPIPTEHREITPVETKPLLQTSGCGASIV

SEQ ID NO: 2573 - protein, 444 aa, unidentified
  REGION 1..444: note = Table 20
MDDNARKEKNITIKEKGKVTRLRHSSMRPLVVELKLNLKCLNTSEINNLWMYFTQCRWLCNYLISLDADAFKAFNTRTRNITSLDKDGNAVDRELTMPAKFIQSVYSSIKQDMASLAAKRKKTGKKNGKLKFRSSYDSIELNQYGNTHWICYRDEGNKNGKYRNTVHIAGIKRPIRVFGMDQIPQNAEFANAKLVKRPSGIYLMLTCYVPVDEKKTETGFKPDIGLDFGIKTTITTSEGEKYDIQVREQGRLKGLQEKLARQKKGSRGWYATRHLIRREYEKLANVRRAKANQVYHDITVGRKLIVMQDENIKGWHKGLFGRQVQFSALGTLKAKLKASDNVLIIDRFFPSTRMCPECGVIKEDITLSDRTFICDNCGYPEERDIKSAKTMLLAGRHEMSCTLAEHKCTPEERMSDFDTSYEIWKQSAKRPEMGKRPEAPSSKL

SEQ ID NO: 2574 - protein, 213 aa, unidentified
  REGION 1..213: note = Table 20
VGLDFGIKTSITDSDGNTYDIRVRESERLKGLQRKLSRQVKHSNGWYGTVCKIRREHERLDARRKDKAVKVISEIKKNHDIVVIQDENIRGWHKGLFGRQVQHSALGTIKHRLVMNEDTIIVNRFFPSTKLCPECGDIHDSVTLSDRTFICPDCGYTEDRDIKAAKTILLAGLGKITSAPAEHRSTKVERMSDFSAFNNAESSSQRSLETGTL

SEQ ID NO: 2575 - protein, 498 aa, unidentified
  REGION 1..498: note = Table 20
MVNRERRSALRMLARTSVSIEARLDKNRRIRESIKATKAKRKTRTCSTFDLKIVGNKLSRTQREALVRVFLEAKWLWNECIASGDPFSYKLRKNVLVKTKDGAMEEREYRVLGSQMKQSLVKTIRSNIKTLATLKKQGRKVGEVGFTSDVKSLGLPQPETTYRIRGQKARIQQNIPGWVRVRGVRQLEGWEQAKAVLTREADGWHLHVTCYMDKEEYRKRREAKKLAPVKGTVVGLDMGVKTAITCSDGTEYDVMVGETDRLKREQRKLFRKKKGSNNRQRNRMRIRRAYMKQQNRLDDTANKITAGLLRNEIVFMQDEQVKSWHRRYGRKIQHSILGRVKNRLIRHTGQVVVLSKWEPTTQLCPICGVKTRTPLGQRIYKCANCGYTAPRDVKAAQTMVWMGQSKYSEKIPLERGEYKSAENASESYADNLRMFSVCSAKQENRDGFSLTVVHMKRRVVNHCRFIGVKCGGFRAFRILRRRCPENLHRHCCSGLPCT

SEQ ID NO: 2576 - protein, 450 aa, unidentified
  REGION 1..450: note = Table 20
MLDVKARNNKIKASRKATKERRQTQSCRVVTCKIDQSKLSATQREALRRMFLEAKWFVNSIIASDDLFQYEIKGNTVPVRCKDERDEWILEDRPIIALSRQMEQGLLQECKDAIHAMKAKRDKAIKEGRKPPKLGRLKYRKEVAEIPLKQFGKTYRFAGPDTVRIQNVPGKLHLEGASRLNPDHDTDRSLTVRLDALLGFENKPVEYANAKLLHREDGYYLAVTTYEDTDQYEARRNARESILHHTPADGSKLGIDAGQTDQLTLSNGETVNEYVPESLRLKKAARQFARRSKYSSGWWDALHVLRLEYLKEARQRKALADQAFHDLHAKAATLYVQDEQISKWKRKTSQARGSRKIQHGILGRLYAKFKQDEHTIMLDQWQPTTAWCPRCGRRTKHPPGRETYRCAYCDYTARRDPHAAGNMIILSWRPLTRQELYQDRSIPVGPYGSI

SEQ ID NO: 2577 - protein, 445 aa, unidentified
  REGION 1..445: note = Table 20
MGIKNALDADAIAARNKKIGDSGAATRMRREGQDALTVILKVDGSKLTTRQLEELEGQFRDARHLYNDAVLSGLPMGYVIPRRVWVRLPDGSMQRRKLSYISAQQAQGVVNLVRFALRSQHVLKTHGEATGWLRPKDDVSSIPLPQYGVTYWFRDSTGGRTVHISRITGDLHLTGYGQLNGWDEIGPAMLIRRRRGDYRIAVHVFIDRGRREQARQEVIGGVRDGLAAHYAVGGIDAGMLDTIIESDGTKSGLIVVPESNKLKHWQRVMSKHAVKGKPHDATWWRAKGCLDDEYERLGKERDRLAREWFHYLLAKYDVLYVQDEQFASWFRRDGFIRGGRTLQCGILGRLWSLLREESKRHPDRVIIIDKWQPTTSWCEECGRRTKHSPRRRTFVCKYCGHKADRDVHAARNMVILGQCPITREELAQPRDIPIGPYVPPLSKTR

SEQ ID NO: 2578 - protein, 413 aa, unidentified
  REGION 1..413: note = Table 20
MPISKDALQQRNRRIRESRNRTRKRRTMQVCRAFSCKIDYRKLKPAQLEALNGLFRDAKHLYNDCVLSDSVFDYRIPKRVEVRMPDGSHETRELSHLSAQMSQGIVQQASDNVRGLKTLKTNGHKVGGLKPVKTVNSIPLKQPGRTFRLNGSYIHVERVPGMLHLTGVRQLDGWEIGPARLIRRASGYYVAFSCFGNRDEYEREHPRPMPANPVGGLDAGLEHDLTESDGTTTIRRYPDTAKARYWARRRSKRDKANKGWWKANRQYRLEMERLKDQRKHAAIEEKHRLEAKYRRIVIQDEQIASWRKRNSWPKAGRILQGSILGRLYATLKQHPQVTVLNKWQPTTAWCRQCGRRTKTPLSQRMFLCAYCGIRESRDVHAARNMIALADQPISHAELRKPRDVPVGPYAQAA

SEQ ID NO: 2579 - protein, 451 aa, unidentified
  REGION 1..451: note = Table 20
MVAKASSPKHMSDAARLAKNAQIKATAKATRLRRRHMICQVRDLKITASHLSATQREQLARLFLEAKWLRNHIIGAEDFTPGVLKELGDQVPVVLPGGVIEQREFRVLGGQARQSILSGIVANLRTLSSLKKRGRKVGRLKFTRQVSSVDLKQSGSTHRIDRARNRVKIQNISGWMRVRGLRQLPDSSEFANAKLVQRPDGYHLMLTTYTPPAEAVGRQTQSFQPGTEVGIDMGVKTHITLSTGDKIDAMFEETDRLRRLRRKLARQKKGSANRAKTLGLIRVQAQKITRRKDDAANKIVHELLKNERVYIQDESLATWKRRSGRARGGKRLQVSVLGRVKQALVAHERVTVLDKWAATTATCVCGHKTKHDPSQRTFTCAACGYTADRDIHAARNMIRLANMATGITSTEHTGTPAEAQVRPAATMNFTFLDTTGTRPMKQEAATSSASP

SEQ ID NO: 2580 - protein, 406 aa, unidentified
  REGION 1..406: note = Table 20
MAPRKPHTKDLDDKARLAKNKRIAQSQKETRKRRKNMDVLVRTVKIQRNKLSSSQREKLDRLFLEGKWLYNTALAHDRFDEKFRKSLNHTAEVKLPSGEIEIRDLEVLGGQLQQGVLSRMRDNIKGLAALKEKGHKVGSLGFISEMNSIPLKQFGGTHRIRGSKVKIANIPGWMRARGLNQFSDTDEFSSAVLIRKGKDFFVALTVYRSKDEHSSLATKRFIPDTTIGLDMGVSTHITFSDGSSVNARVEESDRLKRLSRKLARQEKGSKAFAQTKELIGDEHRKVVNRRNDAANKITSWILGHENVFMQDENISSWRKKYSKARGSRSVQYGILGRVKARLVDHPRVTVLKRNVATTATCICGEKTPHSLDERTFSCPTCGYSAPRDLHAAENMYRLATKENIKE

SEQ ID NO: 2581 - protein, 406 aa, unidentified
  REGION 1..406: note = Table 20
MSQSTKDKRKASRDATRARRANQTLKVRELKITRLNKTQQDRLKRMYLEAKWLRNTIINDGILNYKPSNTVQVKLPDGTIENRELTVLPAHVKQTIHTNLKNNIKTLSTLKRKGKRVGQIRYSARINTLEFPTGDIRVKGNKAHIPKLGWVNVRGTNQLGSEIANVRLVRRSSGYYLLVTSLTKKQSMLGPKREPLGLDFGIRTHVTISDGREWSLVVKEPESHKRLQRKLNRQTKHSNNYYRTLDKLNRSYERLSNKKNEAANQFVAELKKHELIVFQDENLSGWHKTKGFGRTVQHSAMGRVKAKLRTLPNVVMLDRFVPTTQHCPECGSLNKLPLSVRVYSCSCGYHAGRDVHAAQNMLVLHNSNHSPAERGGALVEDSTSDTNIVSIKSGLLKQETRRSLVV

SEQ ID NO: 2582 - protein, 418 aa, unidentified
  REGION 1..418: note = Table 20
MSKSQKIKNTLAATKLRRQNQKCKVFELKIDESKLSTEKRKKLNDCFIQAKWIYNNLISQNDEVSFHSSQKEIAVKVFNPETQECDKTEIRKLTIGSQVKQAICDRFVQNIVNLSKAKAKGRKIGRLKFKKDVFSVPLKQFGTTYKILDNQTISIQCVGKLRARGLGQIKNAEIANAHLTKDATGFYVQVTCFEEKTKAETSGAIGIDFGIKDSIALSDGRKFSWNFEIPAKLKRKQKKLSRKKRGSKNYVKLSKKIRKNYKQHCNKKDDAANKFVSSLKGYSKVVMQDEAIHGWHAGLFGKQVQQSILGRIKSRINQLETSVVIDRWLPTTKISPITGKKIKIGLDERMFIDGNFTEDRDIKSAKTILYFGLYNPNLTAKELSGLPPEEITAVFKQFYCFESKLLPLNEEASPFKAG

SEQ ID NO: 2583 - protein, 434 aa, unidentified
  REGION 1..434: note = Table 20
MESKRSEATRNRISASLKATREKRMHQEKRVVLLKVNKSTLSASDSDRLGRIFAEAKWVRNSIVALDDAHSYKYDEHKKVVHYDKDKNAITDDITMPSVYHRGVVDAVFRDISNLAKAKAKGIEVGKLHFVKSVDSIDIKTGFVKIKGSEMISIPGFPKLRVYGLGQLKRYGDSCEFADGKLIRKPSGYYVAITVCIDKDDMPKRAKTGKAVGLDFGPSKITTSDGEVFAYYEEETERLRFLERKLSRKKKGSTRYKRCLMQIRVEREKAYNRKKDAAKKVIVDLMERYDTVYFQDEMIASWHASPSYSGRVQHSFVGAVKALLMGIFSGTNGKRAFCIQRGFPTTKLCCTCGEVNSIGRFQREFYCAYCESEEGDRDVHAAETIKKLGSAIRAQWLDEPCVEGDSSILGGVLERYRKGQDRLMKRRLSETAAS

SEQ ID NO: 2584 - protein, 424 aa, unidentified
  REGION 1..424: note = Table 20
MARSQLTEEERQKIRDSLKATRERRQNQSIKVIELKVNCHHTSKETFAKMNNCFRQAKWIENDMLAWSEKCDGNNIFKYEYLDHKKITRKTFEGNFVEESISLPVYFHRALVKQVKQDIMNLHKAKMKGNKTGRLQFKSEVNCIPVITGGIRIIDNSHVTIPGFSRLKVYGLDQLSEFKEYEIADGRFVKKADGYYIKVSVCIKKESNSRKKNYKEIGLDFGIKDNIITSDGEKFNCNVQESEQLKFLQKQLHRKQKGSKHYYKLLKQIRCEYEHLSNKKTDETNKLIHHLTKNYDIIYFQDESISEWKKKKHSRKTGKKLNCFSFGRQIQSSYLGRVKAKLVSLENDKSFKISKWSPTTKFCPQCGCLNKIGLNERTYHCDCGYSYDRDIHAARNVKLFGSTKRAECLEQTSVDSYASAALKA

SEQ ID NO: 2585 - protein, 272 aa, unidentified
  REGION 1..272: note = Table 20
MAHGIEQAVKGEKADPTISEHFAARKLNAVEEQHDPVMGHVPLQANTFVGLDLGKSSFLTTSDGFYIGAVDNRFDDLDHKLARLKRQTARQADGSNNQKRVLEKIRRFEQKKRDIRENILQMASAKIAYAHSVAVVEDLSNAQLAEGARLAGKDKKLREARDYLFLGRCRFVQLLESKLKRSGGALIRIPPQGSLSRCPVCGGIIEEAELADGAFKCPHCGYESSREFNKSVNIARRGLEFLLGRKRAHELCALWGQRLAAAGRFELKALLG

SEQ ID NO: 2586 - protein, 484 aa, unidentified
  REGION 1..484: note = Table 20
MSKENDHTVTCIKICLEPNKAQRAQFASFAGSARWAYNFALAIKIGYQKRWFEARKQFIESGLDEKAAGKKASEQVGRMPNYMSIATNEWTQLRDEVCPWYPEVPRRVFVGGFQRADAAFKNWFDSKSGRRSGAAMGWPKFKSKSKSRESFVIANDVQPAFVANLNRYIKTGELADMDYRHIKVPKCGEVRLTPGSAGQLRQLGRTMLAEAKTGELITRITSGTISRLGDRWYVSLVISGPFVPDAISTKRQRRNGVVGVDLGSGRFYATTSEGLSIINPKFVSKYEQELARANRALAKTAKGSAARKKALARLRRVHARSALARDGFSHQVSAWLTSQFAGVAVEKFDLASMLASAKGTVEKPGKNVDVKARFNAHLADVGIASTIDKLLYKGKRDGCRVQVVNTLDNSSTTCAKCGHTCVCGPEQKTFTCPDCGYNAPRQLNSAQYIRQLATVGFDELGLDMTASLTPDTGKRPIAFMTSAH

SEQ ID NO: 2587 - protein, 232 aa, unidentified
  REGION 1..232: note = Table 20
MSNMCTARAATSNIWRPSRRLFPATRSIPRTRTGAGRMQRPNPGRPAHGISWGFARTFCGNHVPTIPLWAAWLVRAQGSAYDDGSLVSRCHRSRENRGARIPRGHSRALQGRACRPPGKRSRMVKNHGVAKTIHDVGRSEIVRQLGYKARGYGRTFVRVDRCYQGRKRCSCCGCIPPSLGLSTCIGMCPACARERDRDVNAAINMREAGRAILSGAELSRPHEKSASGLAEP

SEQ ID NO: 2588 - protein, 437 aa, unidentified
  REGION 1..437: note = Table 20
MTSKILQKSINEFFEVQQLSDQTILKPNRKVKMKILDEGLMQTAICRSNVGRIDEKELKLEYRGHNVRELANNYSFSDVVYLLITGKLNSEGSEEFLDMLHNNYLSALKHIEKLSPVIFDTTPTDFLAIAVLSSQNKWLSDHSIKTKDERLIITASILATIAAAIAIYVQKYATSEPVFRTFFDTKHRFFASFLATCFGQQCDDVAEEMLNKFLILHAEHGLNCSTATVRAVASSSADPFNAVAAGICAFSGPLHGGASEEVGLMIDDIHDNSKNISTFIDELVERKQRLMGFGHRIYKQPDPRASYMSDILVKQKAKFDVISSYVNISQELASEDAGWHGFIKKLEYKAAEKGVHLVKLDQWFASSKTCHCCGHKMPELPLHKRSWPCPCCGVEHDRDINAALNIERKGIQELQAAGLVVSAHGGQRKSVIKTVAA

SEQ ID NO: 2589 - protein, 330 aa, unidentified
  REGION 1..330: note = Table 20
MQAMPGGVGPSAFALHAQLNGVGARLGVNQHFLRGLVDDVAGAWADYRAGEKGRPKRKGQRNRLFSLPFKSGVKLLDAKHLRIPSFGVVRLHDQKDLPALCGLEVGVNRIKCARLMRVRRGWYLTLFIDAPPRTVTVVDHAVVGVDLGYSTLAMLSSGEKIPHPREYQRAERRIGQAARGLNLALLGALQQRLANARRHRNHEISRDLVARHATIYLSKDNLKGLQRTFGKSVLSAGHGELRGMLASKSRQAGRVYVEVSSKQSTRRCHCCGALSGPHGVAGLSVRVWECVACGARHDRDVNAACNALLTGIGSMPQPGAVLALETAGNG

SEQ ID NO: 2590 - protein, 258 aa, unidentified
  REGION 1..258: note = Table 20
MFPALTDKLNSIPLPDPIKAPVGNRIAVPYLKDVRFHKQALPEGKIKCGRIVKRASGWYLCLFIDAEPNVILQLASNSIGIDSGFKHLLSLSNGEKVDHPRELEQSAKRLAQAQRGINRKLVARINERIANQRKDRNHKISRKLVSENSLIAFSADNHKGIASKFGTSVASSGHAQLRQMLAYKSIASGRLYVEVDNRNSTRTCSACGALTGPRGWAGLSVRHWTCGCGASHDRDTNAAINTLMLGMERASNLEKRYA

SEQ ID NO: 2591 - protein, 358 aa, unidentified
  REGION 1..358: note = Table 20
MIKAFKYRLKDRRARRTLAQHAYACNQVFNWCVAEQRDREARYKNGSPSRKMLNAFALSAQCKGIGAELGIHQQTVQSVCDQFATSRDQHRRCPRFRASFGLKRARGWVPFQAQSRRIDGNSIVYKGRRYRFFGSGKRAVPANAKSGAFVEDALGRWWVVLYADTPAPAVAASGSVGIDLGLKTLATLSDGVVVENPRHLRQKATRLAAAQRAGNKRRTARINSEIANARRDFHHKLSTRLSREYAFIAVGNVNAKRLAKTKMAKSIFDAGWSTLRHMLRYKSAQFVEVDEKFTTQTCSECGSLPPSRPKGIAGLGVRAWECSDCGASHDRDVNAAQNILRLARGVPRLGEGSRNLAA

SEQ ID NO: 2592 - protein, 358 aa, unidentified
  REGION 1..358: note = Table 20
MSYITYKYRIKDATSGKWLDRHATACNQVWNFCCNTQRQAELRRYGDRGHFWPSAFDLINLTAGSGKMLGLHSDTVSALCRRFEQNRDTQERSPQFRKSFGPRRSLGWVPITKRALKICGDEVVYLKRRFKLWRSRDISGEFKAGSFTQDARGRWYVSLVCKVEDGLARKDGCVGIDLGLRNLAITSDAEKISAPRLFRRYERKLGDAQRAGNKRRARAIHAKIANARRDYLHKESTRLADNYSFIAVGDVKAAQLARTRMAKSIMDAGWALFRDMLRYKAARRRAVYVDVDERYTSQMCSGCGVVPDSSPKGMGALGMRRWDCCECGASHDRDVNAAKNILRAGLECQPPAEEILAA

SEQ ID NO: 2593 - protein, 303 aa, unidentified
  REGION 1..303: note = Table 20
MTKYDFRPLLKGTSKELPINSQTVQAVSDELVTRRKQFKKAKLKWRGKDSLGWVPFNGQTIQVREGAVFYNGERYRFWEHRKIQGKIKTGSFTQDSRGRGYVHFQCEVDEAVEHGNREIGIDLGLKDQVTCSDGQKYTRENLTKKYEVQLAQAQRAKKVKWIKAIHSRIKNKRKDWTHQVTSKLCKSSKYIVVGQIHSKKLAQTRLAKSVLDASWGSFTTLLQYKAIRHGMVVQIVSEKWSTQTCSCCGVIPEGAPKGISALGVRSWRCSGCGAQHDRDINAAQNIFNFGAGRCTPTGSLSLQ

SEQ ID NO: 2594 - protein, 473 aa, unidentified
  REGION 1..473: note = Table 20
MGIDLGLKTTATCSNGDSLTRQDCYRNLELKLGKAQRAKDKNRVKALHVKIKKIRKDAIHTFTTHCVRENSLIIVGNVSSQKLAKTKMAKAVLDAGWFMLKTQLEYKSIATQGVFLEVNERYTTQTTDYFTTRLIMLLPHKLLAHLTTWIESIWYKDHFIGAWLAPLSFIFHDIIRFRQFLYRYKLLPSYAIGIPVIIVGNITVGGTGKTPLLISLAQLLLAQGYRPGVISRGYGGQTDQLPQRVSLANTAAQVGDEALLLAKYCQCPVVVGRSKVAAARYLRATTDCTIILSDDGLQHYALQRDIEIAVIDGMKRFGNGYCLPAGPLREPINRLQTVDLIIVNGDSYEDNEFSMSMRGTMAVNLRTGEQRLLSSFQMQPCHALAGIGNPARFFAFLGNAGLQCVTHSFPDHHVFRPEDCAFNDDFAVLMTEKDAVKCTSFAEEKHWYVPIEAVPDAAFIAQLTVLLKQKIHA

SEQ ID NO: 2595 - protein, 219 aa, unidentified
  REGION 1..219: note = Table 20
MSNRKSPKYSLGWVPFKGEGIKYKNGQLHFNGLQIGLWDSYGLSKYELGAGSFNEDSRGRWYVNIAVKVEVEEKRVPDGSDVIGIDLGLKTLATYSDGEKFEPKRFYRESEQALGIAQRANKKRRVKAIHAKIANQRKDAIHKETSALVKKTCGHLRRQRERESAGKNAYGEVRTRRRMDRVPDTTQVQGHQAMCGVRRGQRSVFNPNVLVLRSHIREQ

SEQ ID NO: 2596 - protein, 388 aa, unidentified
  REGION 1..388: note = Table 20
MITTYHYRIKDSGKANRVLSQMSRSVNMVWNFCKQTQQEALKNKSVKLIDDKKSGDKISIPYFLTKFEMNNLVSGSSKELELHSQTVQFVSEEYITRRKQFKTLLRWRGKKSLGWVPFKSSAIKINNGKISYNKNEFSFWNSRELPEDAKIKTGSFCQDKIGHWYLNVSFESEQIGIKRDDDKKIGIDIGIKTLATCSNGEKIERPNLRKNALAKMRYLKRCQKFAQRKQSKSKKYHSLPKAKQERKLHVKVANIRQDYLHKESTKLVKKCSLIVVGDVPCKFMNRNKKLSGISLDSGIGMFKNMLKYKAVRAASIYKEISERDSTRTCSKCSEILPRIGLGVRTWTCEKCNTIHDRDVNASINILNAYKNMFPIGHDRPTRTKKNSS

SEQ ID NO: 2597 - protein, 383 aa, unidentified
  REGION 1..383: note = Table 20
MKTTCRPVRSSIDQTADMPYAKGVSTATDQLVLKAFSFRVKDATSGTRLIALGDAVNTVWNYVNEISMRSAQRGPIWATKKQLRDLTKGSGSLLGLPSQVVQEVIDEYVTKRKAARRPKLRWRASRGPKRALGWVPFTNQDVELDGETVLLRGQRFRLWLHRAVEGRIKSGNFSQDARGRWYCNLVCEVPRSQGRGRDDIGVDLGLKSVATCSDGRELEQARFYRDLEPKLAEAQRKRRKRQVKAIHAKIANRRKDSLHKFSRALVNRARRITVGDVSASAMTKTRMAKSVLDAGWSMLRGMLRYKCDHAGVAYAEVNEANTTRTCSSCGCLSGPSGLAGLSIRRWTCSDCGAEHDRDQNAARNIARLGCETPCPPGHGSPAF

SEQ ID NO: 2598 - protein, 196 aa, unidentified
  REGION 1..196: note = Table 20
MDAEPEIPTGQDSIGIDLGLKDTATCSDGIKLEAGRFYRDLEPELAIAQRAGNNNRVKAIHAKIANRRKDALHKFSRSLVNRSGEIYVGNVKSSSLAKTKMAKSVLDAGWAMLKTMLDYKCVHAGIVFKEVNESYTTQTCSCCGCISVSSPRGRSGLRIREWTCSECGVTHDRDVNAARNILAVGHGRLAVGIPVL

SEQ ID NO: 2599 - protein, 362 aa, unidentified
  REGION 1..362: note = Table 20
MRDPNAVSFTRTLRLKVKCEAYPWLNAAAMEVNQVWNWANATSADAADRNKRAHAKFLSGFDLCNLSAGATEYFERIGADTIQRINCEYAIKRRAAKRSRLRWRVSRGARRSLGWVPFKAASIKRKGSGLRFCGKSFRVFDADRLTDTKWCDGCFAQDACGDWWLCLPVAYAAQFLPASDRAVGVDLGCKDAAVTSDGDRLTSGHYRSLEPQIAQAQRRGHKRQAKRLHRKAANRRQDAQHQFSRMLVNQYQKIVVGDVSSLKLAKTRMAKSVLDAGWGALKNQLAYKSEHAGRQFQVVNENYTTRACGNCGALSGPKGVGQLVVRRWECVDCGAVHDRDVNAARNILTAGLRCRASVRGNE

SEQ ID NO: 2600 - protein, 376 aa, unidentified
  REGION 1..376: note = Table 20
MQTVTLHLKVQPNAWAWLDQACREVNTAWNWANETSRRAIQTYDDGGRWLSAYDLDKLAVGAGDCFERIGSDVIQRVNAELVTRRIQFRKPVLRFRASGGRRRALGWIPFKAANLRLKGNRLRFMGKSIRLFEMDRFLEHRLMAGAKLGSGNFAQNALGEWFLNVPVQMPYPAGTTFDANGIPQLPVAPIECLGIDLGLKAVVTTSEGQVFEPNRSYRDNEAKLGNLQRAGHKKQAKRLHQKIRNQRQDYNHKLSSALVSQGQWIKIGDVSTAFLGAGTRAKSARDAAHGQLKAFLHYKGHRAGRSVDVVDEKYTTQTCSACLSRTGPKGSTGLRVRQWICSACGASHERDINAARLIKAAAPRCRRPIAGTRELR

SEQ ID NO: 2601 - protein, 497 aa, unidentified
  REGION 1..497: note = Table 20
MNDVIVPVETCVVPAAWPEDKSFVFEQADLVINTLTISSKVKPEAYAWLEQAAREVNDVWNFCNQTSHKAWNNYVGQRTWMSAFDMNDLLAGVGEVYNKIGIDIAQSVAGEHAIKRNTTHYSKLGWRKSGGSKKSLGWIPFKANTMRFSLYDTNGKRVKLKNDPQPIVPAWPKKNEGESKDDYTARKEKFAPIRYEAEKQLQAWEYRKIQAADTIKLSFMDKTIRLFNAHRLLEAYRLSKQGVGCLRSGNFAQDSLGDWYLNIVVDRVELQLAPLSGLDSSVGLDPGQVTAMTGSDGSHYIPNIQGANVVSNVLPELRSRRYREMESKIQQAQKNGHKKHAKRLHRKVKRQRKNDRDLFCKAITMTYSRIWIGDIKPQKLAKSKLKGQAKSIMDSGIGLASATLKSLGHRAGRVVQTVDERYSTRRCCCCTQLTGPYGLSACDVRQWTCSACGTFHLRDTCGGENIRLTGEISWNQVSFEDRVKSVAPKYWRPTGTR

SEQ ID NO: 2602 - protein, 238 aa, unidentified
  REGION 1..238: note = Table 20
MGKLRAGNFSQDAVGDWYLNVVIDHVELQLAPVFGPDSSIGLDPGQIAAMTASDGRALRSRRYREMEPRIQRAQKRAHPAQAKRLSRKVKRQRLDDRNTFCRGVVADYARVWVGDLSPKKMARSTLKGQAKSIHDAALGAAYTTLEAMGHRAGRVVGKVNEWNSTRCCSHCKALTGPAGLKGNVVRHWVCAACGTDHDRDRNSGENLRHAGETGWQNRLPDLGKRAAPRHWRPWAGTR

SEQ ID NO: 2603 - protein, 366 aa, unidentified
  REGION 1..366: note = Table 20
MSAKQNKPATHTTRVLRLRLKDKHATALQAMARDVNFVWNYVNDLSFKVWQRERRFLSAYDIDKYTAGATKEGLNLPATTVQAISKELVTRRIQHKKVKLRWRVSRGSRRSLGWIPFKASALRYRNGQLLFSCLDKPLSLWDSYGLSQYKLGAGCISEDAHGRWYINITVRVEKAQRSEATSAIGMDLGLKDFAATSSGDKVEAERFYRGQEAALAIAQRARKKARTRAIHAKIANRRKDFLHKFSTTLVAGHGAIFVGNVNAAGLARTRMAKSVLDAGWSTFRTMLQYKCDDAGVWFDEVEEAYSTQTCSACLARSGPKGLKGLGIREWSCLECGAAHDRDVNAAKIILARGLARLAGGISSLSA

SEQ ID NO: 2604 - protein, 368 aa, unidentified
  REGION 1..368: note = Table 20
MHKTLKLRIYTKHTPKLVKLASAVNFVWNYVNDLSFQVWRRKRVFLSAYDIHEYTKGAGEELGLHSQTLQAVGETHAKARKQANRSKLHWRTNRKDAKRKSLGWIPFKASAISHVKTYNTGKKALKSQVQLSCGKEKLILTMYDQYDLRRYTEIKTASVVEDICGNWYLCLTVKVNPVTANIATGEVGIDLGCKTAATCSNGDKLETKFTHQYAEKLATAQRAHKKKQARKIYRKIRNSRANATHQFTNLLVKNNRLIVIGNMKASTFTSGKLAKSVYDANWSEIERQLEYKCEHAGCLLVKVNENFSTQTCANCLQITNSSPKGVAGLGIREWICGCCGQLNDRDVNAAKNILRFGRETLAEGSPVI

SEQ ID NO: 2605 - protein, 527 aa, unidentified
  REGION 1..527: note = Table 20
MTPNPNPSPELREARNRLSHHEQMLDAQAGCVPCKLCGGKAVVSDAGEGYGYYIGCENGNKFRLSTGCIIDERRLGGWAYNVMEWWNRLHAQTATLPTDAQVREAMQTAWDDYCDDAKAFPGDLTKLSRGRIMFTAGTWADHTAMHLRAALSPQTLPAPGEVEGDLLATADKAVTFALDLACGYPTPEMDAGTVELRRQARAVNYVWNYCNETQKKAAQARRNWLSLFDLMKLTAGSSKELRLHSQSIQRICRAYDESRRQQKKAWLRWRGKKSLGWVPFNTNYVRFNGTGFVFHGVEYEAMHLRNSIQPGQRFGAGSFNCDANGHWYINLPVGVPCSEPVAGDGVGIDLGLKTLATLSDGDKIEMPRFYRESEAALAKVQRARKTKRARAIHAKARNRRKDFMHKASNDLCRKYGLIAVGDVSPSKLAKTRMAKSVNDAGWSGFKSLIRYKAIMHGRTFLEVNEAYSTQTCSSCGTLPASRPKGIAGLGIRDWECSDCGTVHDRDVNAARNILRIGLDTLAEGAFA

SEQ ID NO: 2606 - protein, 366 aa, unidentified
  REGION 1..366: note = Table 20
MLAWLQQANYIRRMIITYRYRVKDKTRAKHLRHMAGSVSFAWNFCCATQHEAHRRHARWPSQFDLVKLMTGAGAELGVHSDTLGAVARQFVDSRNAERRCPRFRSRKRGSLGWIPLNAARAFQIDEDRGAVKLLGRLYRLWFSRRLPDGKIKTASFNEDARGRWYFNVQIEIADGAPKTGPTIAIDLGLKNLATLSDGGKIEMPAFYRRHEARLALAQQRGQKRRAIALHVKVKNCRHHFLHVESTRIVRKHGRVIVGDVNAAKLAQTRMAKPVLDAGWSAFRAMLQYKCVYAGAAFEIVDEAYSTRTCSECGCIGGPKGIAGLGMRHWECSDCGALHDRDVNAARNLLLFAGAERRPLVEEIHLL

SEQ ID NO: 2607 - protein, 556 aa, unidentified
  REGION 1..556: note = Table 20
MNTLYENNDNLAEECEDPHCHGCQKVIEDGSVVQFGDGIWHFECFRCAKCHKLVECYSNLLLLRDGSPICEECSYSCHACGKTIKDEAIMTGEEAYHANCFRCIQCSKKIEDLVFTQTSKGIYCTKCHEARKLLRLKKRDERNNNKKSGEDTKRPILPNFRSSSTTSIVNAYAEDYLKDPIIDSRDITELNDMLDQRNSEETQRNTAEPNTCSLEIDSCDAMELKKELIETRKKLKEVEGKFNKIKTISRKALDEFHIVKEGYAAEVTARKEADRLIVRLKSEIVFYQQASIFSGPDFIQFTKDEIDELNQARGDLEQICFDLREERDNLMRDLERHSENIEKLLASQKPQELHWERLQHAYQQQMDSMQKDMALIKSNYTKLIKAREDIISDMILLNTKNAELTQMNNDLSRKVIEREQEAKAVIAGTSFLAVPEENTKPDKSLSSLSFSVDSMDIPSQIMIMDTLSFARPVFQRAEQKLIQDLRAKFGEDAVFVMGDWSASHARYHEPIRGHSFRRLLKKHGLQVYLIDEYKTSRCCPTCHNESLRTFRRVPNP

SEQ ID NO: 2608 - protein, 349 aa, unidentified
  REGION 1..349: note = Table 20
MSCTLNMSNLTTRKKFDSSFITKATGAYNFKSPGYPSNCKLEILTALKDHGIHGARQAICKLRLENDSQTDDNLRRSVFNILDALDRVCRLVERPSYGEGASEADHVQEWKGVFNDILKGSTVYMRSGECISEASKAIRMVNRGQKTPRNFGRKVDLNFYDIVANDELAIFEFKDAWVNRDREQLLEQLSKSIRLNRSIMEYSHYSKRGIRPTILFMTFKGDVYALYQFGDIFVSKLVKQVILPHDQGSLEKFLTEKDEALGIILGVEATALGYEVVLADEYLTSSKCPTCTAAGVDVRLAKQTARSCVCLGNCRRWINRDSVGAHNLAVIGRQWLNEQTRPKRYWSLV

SEQ ID NO: 2609 - protein, 870 aa, unidentified
  REGION 1..870: note = Table 20
MSITVSAIKSAKHIIVYKLIEMRILQPLFEIGLDQAEDGPGESFLEKILDSEWAERFIQNLLFFALRNSTVPQGRPPASDKSKDAIAEVISTFNEFKEALWPGFKALNSSNLALSNIIAELAPKICLDLKLHCRRMPETLRTKLSKLSIDCDGLPEMDQDDTDAGGDAGAADVGKDVDDDDALKRSKKIIFKLAAKQRSSYGGVIKELFIGNRDAIKEARNKQQTTYGKRTTNMAERQVAHPHIYGQLELARYLSRRIIVFRERHNASLAASEGQRVRELLAKPLHDPHYERHVLYDILSKAFDKELTIIYVDGSPSEQKRREHRRRNVTLKRALVKLQTKVSGSTRSTKQIFRTRKNNYRLPRGSLDQDILPVLIEKSWRIHLCPYQADTCLSRVCQDALDPDSVIVVTSDSDLIVCEEIRHIMMPVGKTRELQLFDRTRLLDRLDLTSEQHLLLVCIVTSNDYAKNLPYFGLLRSCDIIRDFDLTSLGPLGGSGDNDHRAEALMPFIQNYLDEVGRQLGKRKKRSTQQTSTRHKQQEIIHIVPEYYRHAVTAFDERMETPLQEHLEPDDGSPHSYDIITMILQELYSRKSQQQQPQQSRNDTHIFTQHLPSERVPIELSSTKDMLMDTDTNIESALPSTSMQHNSKKISVCTRKRKSSLRHKQRRKDRSYTLKMYRVSLNSYFSWHSSQSILDEFGVSSVEEIDVWGIDPGEANTAAFCGIVRACLTSIDTNAALQDDPGGRSQSNFPASSNRILPPALEVKNLVVNRQSLFQPEYAAAAGHVVVLVDEFLTSSVCPTWLETGDASRLAESTIRSCVCLECGRWIHRDLVGAHNIAAAGEVWIWTLTRTLPLSRKIPAGQSGGATLHS

SEQ ID NO: 2610 - protein, 1668 aa, unidentified
  REGION 1..1668: note = Table 20
MIKNPGKAVFPIEFKLEAKSQSIIALDPGVRSFLTGFDGEKFIDIGKGDITRIFRLSQHIDKLISNKTALKGRQKKYKRQRLMRKIDNLFMRIRNLIDEVHKKVAKWLTTEYRIIFLPTFESSQMVAKSGKKKRKLNSCVRIEVIPELEKIIGEQPPVPELSGTAAQNRFNLLFPKFTKVFSSASHPLVIFLDDLQWADFASLKLIELLMTETKYLLLIGAYRDNEVSPAHPLMLSLSEIKKAQATINTITLAPLNQIQINNLVADTLKCTEKSALLLSQLVFQKSHGNPFFATQFLKVLYQDKLIKFNIDLGCWECEISQVTQQAVTDDVVEFMAFQLQKLPQSTQHILQLAACIGNQFDLATLAIVSQHSEIETATYLWKALQEGLILPTGNIYKFYIEQENQTFTQANSQTVRYKFLHDRVQQAAYFLIPEEEKKTTHYQIGQQLFQNISKNKRAERIFEIVNQLNYGKTVITEQKERDELAELNLIACGKARSATAYQVGREYANMGLLMLGENSWQRQYKMSLALHELATELALLCGEFEAMEQFIETVIAKVHTLLEKVNVYRIRIQANASQNKLTEAIAIGKNLLQQLGVIFPKIVTEKDIQTAIAEINPLIGDREIENLVDLPQMKDLEKIAIIEIANGLMAVASISGSPLFPLLVALSVKLSIQYGNTSASAMAYACYGIIASNTIQDVNTGVKFGQLAVRVVSKFDVKAAKPEVSIVEGLFTFHRKSHVRETLALLKEGYTTALELGDLEFAGRNVYGFCLNSFWCGQSLATLEEETKAYCNQFVQLNQLITANYCRIYWQSILNLLGVAEHPTILSGEALEEVEFLPQLIEANDIFGLHFFYGCKLMLCYLFGEIESAQNHAVEIRRYLMVAAGTVGEPAFYFYDSLTALATLNIQRSHKEVLEQVEKNQTQLQQQWANYAPMNHQHKVDLVAAEIYRIKGEKLEAIELYDKAISGAKQNEYIQEEALANELAAKFYLNWGKEKVAQAYMQEAYYCYARWGAKAKTHDLEKLYPQLLQPILQQQPLQLNPTETIDLNQMLSSTHSNSTSSNKISDILDFTSVLKAAQAISSSLELDQLIASMTRIILENSGAKKAVLMLPQNNTWQVKTITLISQQEIQTILVPQLLDSSPDIPIKIIHYVKNTKQTVLINNCQTNIPGLIGEYMLQHQPQSVLCTPIINHGNLAGILYLENNLISGVFTSERLQVINLLSAQAAISLENAQLYSQQQEKNRQIAQKEEEYRSIFESVNDGLSICDLETGKLVAANPTIYQIYGYNQEEWFQAKPADFIHPDYIYLFSEYLTALRAGQEFYTQAIAKRKDGSFFDVEVKAVPFIYKGKLHGLTILRDITEQQAALRERQKAEAAVVKKSLELEAALEELKQAQLQIIQSEKMSALGNLVSGIGHEMNNPLGFISASLKQAKPTIANIIEHLELYQESLTNKSDEILDHAEEIDLDYSLEDLPKMIDSMTIACNRLKNISTSLRTFSRADKDYQVPFNIHEGIDSTLLILKHRLKANEKRPAIEIIKNYGNLPKIYCFPGQLNQVFMNIIANAIDALDESNTGLSFAEIEVNPNRIIITTSVENQGVKISIADNGPGMNEEVKAKIFDHLFTTKDVGKGTGLGLAIARQIIEQKHGGNLDVSSTSGEGTEFTIVLPLQ

SEQ ID NO: 2611 - protein, 243 aa, unidentified
  REGION 1..243: note = Table 20
MSTKHSKAAEAYLKDDAVVTRHDQTFFGVRQKRDRMAQALPEWEDLREAASQIKKHTETHLADYLEQFEKNALQNGVHVHWAQDADEYNRIVFDILSQHNVKKVVKSKSMLTEECHLNENLEAKGIEVVETDLGERILQMMKLAPSHIVMPALHVHREEIGDTFRRLIPDFNEIAATYSAVGGSPADKNDPTFLTYVARMHLRQQFAEADCGMTGANFGIAATGDVVVCTNEGNADMSTSIPK

SEQ ID NO: 2612 - protein, 523 aa, unidentified
  REGION 1..523: note = Table 20
MTIRVIHRPAKVVDGLEALDREFRSARWAHHQLLRIEDDQAEQLDLVADMCAPGLRRVGRILAKLRRRACRAERATGWSPNPRVELRKTMAARMRSLKAQRDADPRWKIARGWLDASADDAPVKACRRKAGESDALYDARVARRKRRSRREEKRLELYSQIRCHYDTWNELVKQVDQAIRSVRAVRKTGQSARWKHPRYDDPTTIASDHWDLVERGPVWWVIDLKLRAGVRVRLRTKAGTYDGVPADPDFRTLKLTRRRVGRFGWEYSCSIAVNLAERVPSGTGVVALDWGHREHGHATADQGIRVFTWAGDDGQTGEVLLPIACRDLLSELDELKGRLDTVYAARGEPELNRARYRRRLNMCGVLTREEQDWLRWETRQDRRLSAMRDRIEHIRRESYLKAIHELGRRYRVFAFEDLQGQQIKDLQTENQMGRRKRQNRDLSARYLFESLCKQSGAERITVPARNSTRQCPACGKLREKTADLLVACDACGYVGDRDRDACRTLLARAKEALAKRGASVQND

SEQ ID NO: 2613 - protein, 376 aa, unidentified
  REGION 1..376: note = Table 20
MGVKYGWKMILGLNVVTAILSATELFSIFTRPVKEPVSESSDDGDEPMTFEGMHRDWLDDREPPSDIECPSSSDDNDANENNPTDHVNIEDIRYIYVDVLGCFYPEILRCCSGSNPDEPLNLYPLIHMIEGMFPTGPTWMVIDGMACDTQMHIRNTHPNTHIIGIDLGVECMFAAVAYNPDDPAHLQTLAVRTKSITEPERLFQSWIQLTKPERLVGIERQCTKSADDEWPAFMKAFVIAYDELHCHYGGKSYMKRSWDAAKAKQGEMDRALEGLVRMVGETMGNKLPDKKKVIVAIGLGEFETKNSRHIGFTRYLIRKLKPLGYTIVGVDEYYTSQKCPCCGGVSFAPEKTHGQEESRDSIGRLKTRDKFTEFLC

SEQ ID NO: 2614 - protein, 920 aa, unidentified
  REGION 1..920: note = Table 20
MPRRPSTPTNLAQPRRKSPRTTRNTVVNVADAQPEDAADTPTNEPDRQQSMLALTTLNHQPRMAQSIDQQTTVKDQELSAASLEAIAATVFGPTVRGIRVKAAEFIMLVGGDAPPEESLTDFIKRSHPETTEAVLGLALKKARDFFGSQDNAQFATIRSIVDVAKVVAYFNGTLVVESVEEGTNGEGSSDFSAVQQLSSSKSPTNSSPSSNSKSGSSNGSTSTSTSLSPSMIRRMRSTFEANWSSYLGEDWTLRSGTNVDHLLRHYIVGLDYEVGLHSFIISDVGEVAELVTDSSDREQLMSMLVQERDEAAWKLTSSEMKHLDRYRRPRIALEEVLKNGYGSVMAEAAKDPEANLPDETFCDDVHDIVKRYHRVYRRNLWLLPDGKSESWYRDNIWWILDDLFNEPATIIYEPGEYHSKASGDRKNGKRKASTEHQQVGRKTDGIILCHEPSLELGVMEAAKADDGAHTTKAMSDTIKLGKVMKDQLDMLRRNVADPEIAEKLVTYGMRIAKRSVTFYTLAHVEGRWYKFTDQGTATLPHGWHQDGRNMLKLLTVISALMAFKRQVATMAANIEQWTVSAYTLPKPAGSSSRTVAPTLTTPKSSPRSSPTSRASLPPPLRSLGYQEIGVNEFCTSKKCLWCQQFVDHITFRRLHCRNCRRRFHRYQYILENCYHSNPKHRPSTTSTQPVQKEAKTAARPKQVAPSSIQASAELPPFSSASVAKPCCLYSMWFPTPSLFPYAHQQSSTVTELSIGKIESTLPPLPGEQSNFDGYLKHLGRYHRPRIALEEVLKTGYGSVMAEAAKDPEANLPDETFCDDVHDIVKRYHRVYRRNLWLLPDGKSESWYRDNIWWILDDLFNEPATIVYGHGEYHSKASGDRKNNSSTTSPSGACTAAAVGDASEIRWPYITCAMWFDRSFG

SEQ ID NO: 2615 - protein, 667 aa, unidentified
  REGION 1..667: note = Table 20
MFQYIAEANIREQINKFATNMVNRYKTSIETFDGDRCQLEVENLELGKAGADQEDLEEHDQKQEQERQAVGDILADLANNVHIQIENFITTERNLQVKGIRVSEVNLSECLGKTGRRGTNGGGNDEDDVFHRTHGGKLSKAKAARLIPFLIYFLERREGNFKSFVLYSLQAHHPFLSSIIEQLEQELQAGPNERGAHQLTRERKNLQNACTRLQGIGRTDPFSALFDICRQATIARDGSVDVRDRGYMRWLDQRILGNINKPRFTKRRVFRTDCVRLYCIYNDWLRSCSGNTTCKYLTELRRTTRETLKDTWEGDSHGDQFDYLQHYDGIVGLDFGEVCAAASVFRPREPGLCGSQLTIKRGYLYGRTIPNRDWLEARKAVNNIDDIEAALSEGSPRSTYARYQEYLRQLKENDNNIRPWKFYSNRSVRRRVWDNVISQRSYLDKACYLITNQAMHTFGMNREIDPTTRHVECPRLVYAFGLDRMSRKSRKGALAPMDHKIAKTIEGRIDNMPIYTLKSTNISRRSSIGQEKVLRIVQCANCGRTFHRDGNAADNQTTIARYMLRFQQRPRWFIRPSRRLETSSDGEATASGFRRSPSEGTTLISGSSQERASVREATRTPGPRRRPREEEALETTRSVRRRTRARRTQTMVEPPGSAGRTSQREEE

SEQ ID NO: 2616 - protein, 813 aa, unidentified
  REGION 1..813: note = Table 20
MVKEYKSPPPPPPSTTKTTTTTSTTSLSPPITSPSAVSPLIPTIPTLSSSSSKPIQFNYNKLSADTSATSNNNNTYDKDFKMDIDSQSTLAHVFPSPKSSMASSSQSSTTIHSTASTTNSDSSTHYYNDSDEEFNLLDYYQYCLENKLEDQAFTTPSKSTLQKNCESFLPDISFELERSSFSNSGSLYIPPPPPIPEKTSKFAFCIPNSSSSSTKSLILPTSSLSAPSSSNPPPSTTSPPPSTTSPTTTISSTKPQSSNTLPKLLKLKPSATTKSLILPTSSLSAPSPISNSLSAPSSSSNSLSAPSPTSNFLSAPSSSSNSLSAPSSSNPSPSTSNPPPSTTSPTTTISSTKPQSSNTLPKLLKLKPSATTKSLILPTSSLSAPSPISNFLSAPSPTSNPSPSTTSTTTISTTDSSRSRIETYNHVDKRPRTTNYIFQGGRFVKERDEYSLQSNNNSTALEMEMDIDYPSTTTTTTTTTTTTTTTTTTPNNNNINNKYIFGIDCGRSSHVSIDEHGKTHSFSVHEHYLNLRSRFNSEAQKKMLGPAMLKFESLIPPSKNINDICLDRSLISNRISYLRLHPTTTKNYVNIRLDEYNLIMKKNNYYNKLFIGSAKFSHNSRGQSSFISSATLYKWVKKKKHKALWINECYTSKVHNACWNKTEKEILAKLNNKVSNMKDPPPCALSSGPYSKSVSIDRNQVAECHKQLSTLHQTVTGYIDGTNKVNSSTNKSNERFDYMKHHSLYSNQMSGNNVNVDGLAKDHPILKVFQEKKWKRPLCRCCGHFYHRDKNAARNILLLGILHSNNNFISHLN

SEQ ID NO: 2617 - protein, 359 aa, unidentified
  REGION 1..359: note = Table 20
MEMDIDYPSTTTTTTTTTTTTTTTTTTPNNNNINNKYIFGIDCGRSSHVSIDEHGKTHSFSVHEHYLNLRSRFNSEAQKKMLGPAMLKFESLIPPSKNINDICLDRSLISNRISYLRLHPTTTKNYVNIRLDEYNLIMKKNNYYNKLFIGSAKFSHNSRGQSSFISSATLYKWVKKKKHKALWINECYTSKVHNACWNKTEKEILAKLNNKVSNMKDPPPCALSSGPYSKSVSIDRNQVAECHKQLSTLHQTVTGYIDGTNKVNSSTNKSNERFDYMKHHSLYSNQMSGNNVNVDGLAKDHPILKVFQEKKWKRPLCRCCGHFYHRDKNASRNILLLGLLSVRYQFRPVVFQYIKFINK

SEQ ID NO: 2618 - protein, 1220 aa, unidentified
  REGION 1..1220: note = Table 20
MNIKLLNHSIMENYKLTKAIRFKLENSSENNLILQSVEQIKNTSFDLVAFVSDLHNFIDGLRGYLFFKKNNDTLSTKQGLSIKTAWLKLYAKQAFHDSEAVRDKSRRKQTKTISDYENLTFEIQKRFDEFEQIYKSLADIANTPLNARSRHAEIGLLLKKLANKHNLPYFVDLVENTVDKKEEGDLSIQLKSLGKQLINNSLLGVQKYLPEQSSGLLIAKASFNYYTLNKKPIDYAKKKEEQLNKLKITDWNCQDFVRSSLSNVIKEEIKKGVTDLDELRQKLKNVKAQQKATFNELMTQDISYENLKENTELYLFNNISKQEFDSYKKQTEDIEAKATKLNQCTNDNEKRRLRSDLQKLKKDRGAMMNAADRRFSSNFTVYKVYANLYRDIALKQGRINATLKGIEREQVESQLLQYWALVLADAGGHKLVLIPKKHAAECYQLLTTANQNAVTEPNSIFWFESFTLRSLRKLCFGNLEAGTNSFNENIQSVLREHSYSEIDNRGQNKQVRIEGEFSFKGDTQKIINFYKDVLGSRYAQSVLNLPSTQLRVEVLDVNFENLDDFQIALEKVCYKRFALVAHSVLGIIEKQYNPQIFDITTYDLRKAVESNDKAHTQLWKEFWTTANEQNNFDIRINPEIAIQWRNAKESRVHKYGKDTALYDEKKNNRYLHEQLTLVTTISEHSNTPTKVLAFMTDDDFETSVNAFNEKFNKDDFKFALGLDNGETELATLGVYLPAFKQESNEASIAEIKKIEEHGFKVLTITNLSHQEIDKNGKERKIIQNPSYFLLKEQYTRTFGKTDEEYAAMFSKLFKQTQLLTLDLTTAKVIQGHIVTNGDVPTYFNLWMRHAQRMLWDMNDHAEKQTAKQISLKKSEELNQIEKEKFIEYLNVTKNNKKYFALSKAEKTEYTNWIYAIWNRQTTNLPAEKNKKYESVKKDQRVGYYSKHVILAVCYIGEDLQSVTEIFDVRNIFKLRKDFYAIKTEQEIIQELNNYNTNESRQQIGNEELDLKINHLRAAVVANAIGVIDSLYHYYKDKTQGEGLVVKEGFDTNKVAEDLGKFSGNIYRVLERKLYQKFQNYGLVPPIKSLMAVRSKGLKDNKGVILRLGNIGFIDPAGTSQNCPVCNTKFGNHQNNVVCENCGFSTQNIMHSNDGIAGYNIAKRGFENFSNPSLSTTNSNRAENNRNRSNNLPNNRNESQPLTALGAALAAAEAKRNKKRK

SEQ ID NO: 2619 - protein, 1046 aa, unidentified
  REGION 1..1046: note = Table 20
MRNKYEIRKTIRFKLDPKTKVIQPSVQTSLDMNVVQKNFIDAYKTVINSFEKLLFIQKFGEDCLNRLITVKHNWLRIYTKHEFYEFKDQIIKYNRNGQKIINKINIADPHVDFLYTYFKEWIINNRNAIENIQYLYARKDHELKRRSDLAYWITFISKRNNFESIFELFDGNIVHSESNVDIDLIKEHLVNSRALLNQLMQYIAPNAVFGIEIERASLNYFTVNKRFCDYQTEILTKEKQLEQVFSVGELDALYRRDRFNELPSKFLYYVGFIGYIQQDNKSNNMSIAAWHEKLKLYKAEQKKLFYERVAKGMTYEELKNSSDLPLLKDISPANFYSFCSGPKKRSSHFQYSFSNYKKYCDIKKKLAMVYGKMKAEVKSLEKARIDAERTQSWALIHEKDGQKYLLTIQRDANGTMKKAKKHLDGFLSDRNEYPNKLYLFESLTLRALDKLCFGLDKNTFLPSIQEELYKKCPSLFYGNTLKRKDQLSKDNSELLLLYQTVLGLTATKNTLAVDSFIGFEALTKEKFNSLSDFEQKLKQACYIKKQITMNENDFDAFINSYQVRIYKITSYDLQKNDPDFLNSLSKKKILDRSHPEAHTKIWLDFWTKENEQNNHNIRINPEIKISYRQAEKKDISLEQKSKPFNRAYHDQYTLSTTITLNAHERSINTSYLKKREIEEFIQTYNTDFNKNIDQSKIYYYGLDRGEKELITLGVFSCKEFDTSSASALQPQEITNLEVYTIPKDQYLTVKNGYTLYRSPAEFIDDHEYITPNGARSYLDLTCAKLLKGKIVTNGDIATYLKLKEINAKRMIYELVRKNRLTHAQVLYDKVKNKIILDQGGDSRYRYKDIYFCDDEYQQIAPPTSIEKDLQGFLTEILHGKGIIPTILEINRMRDAICANAVGIISFLQTKYPGFLVLEGFNISKKEGFIQKTMEHLASRIEWKLFQKFQSTSQVPPVYRELMSIIGDNTVGLSEAEVYQLGIMLYVSEKNTSTCCPHCETISTKNKDAKFSSHQFVCVNCGYIGNSDSIAAYNIAKRGLLAMKNKF

SEQ ID NO: 2620 - protein, 607 aa, unidentified
  REGION 1..607: note = Table 20
MSGVFKVAKFKLKLSNRKKRILRITLKKYTNSLADALQFLYEKRDDLEFAALDVKTSKSGKEIYKTNTNKIHLLVNEYLNSSQYKNYRFKERISEEISNNLSSYFALRLKNENPSYPIKVKVEDAKNRDIYLNKYYDQLINCGIGEDGIDENAHIKETELLGEINRLTKQDYQPFNFLRARDFKIIEQRFPGKPPRRIALLDILDSESTKKYLNKSQKSTPNFKGFEISTGASFEMKSTKILPVILEWSLFHDLNFFRIGEPKTAKLVYEKTENEFYLHVTFEFLTHIDKNGKLHYLKRVFDEEATRVAEKNLPSGKKLKVYVCYDAITKEFVEVTSINKTTHTKKRITDTYLGVDLGRKMLAAYAVVKDGKILYKNYAESSELSKTLYSIYENIGELQKAGKQNRKKLRSLYKSVSNITKNNVHQTVNKIIWAREYYNSQIILENLSGLKRIPKKKVQQYSRIANLITYKSQLKGFSLNYFTPPKAYFEVYPSQTSKLCSRCGFTHIQNRQIEISQDKFKCIACGYEENADINAAINIARLGEFIYKYKDVYSSFDEYLRNLCNCYNSNFDTYREGMRKRYIIKKINSIIGNQIKVQKKNNIIKLK

SEQ ID NO: 2621 - protein, 655 aa, unidentified
  REGION 1..655: note = Table 20
NKDNKHCFDDLSKFYAHGDDSYYELMQFKQLTGLYRQLPRMAFPKKKKAIIEVSQSVLKIKNEFDDFQKLKKEHKISSKEIFDNQKINILISYYRSFVKEYYKKENIYDFSLLDDGKTYERLSDFYADVDKITYNLSFIKVKKSEIKRNVCEGKLFLFSIYNKDFSGNSKGKNNLHTNYFNAVFNKENNPNGHLRLGANAGIYYRPASLKESDQKKEIIKTRSGKEINKKENPYHLKRYAQNKILFHLPVVLNADTYDEENVNQNVFKYIKNNFDNIKVIGIDRGEKNLAYYSVISRAADGKIKIEDCDDLNLGYLEPLNKLAEERQEQRRAWQSISKIKGKRDGYISHVIHKIVELILKHKAIVVFEDLSGGFKRSRMKIEKAPYQQLELALINKLNYLVRKKAKQEEAGHYLSAYQFAERIGSYKKVGKQTGIIFYTQAGYTSRTCPKCGWRKRIQGLYYKDRKSAQKIFTAERGVQISYDVANNYFVFKYHPVYNQKESKEWDKEVYSDVSRIKWDNKEKKYKKGYEGEITKKLKELFTGIDVQKNINIQIKDNDNASFWENLINLFRLILEIRNTDNKTGEDYIECPHCHFHSDKGFQGYKWNGDANGAYNIARKGLIILKKIKDAKEPEKLKFGDLVVNLDEWDKFVQKD

SEQ ID NO: 2622 - protein, 1547 aa, unidentified
  REGION 1..1547: note = Table 20
MFDQFTGKYQLSKTLRFELKPMPRTKRLLGLDNEDIFPKDKERAENYAIIKIYIDKLHSKFINAALALQDAYIDIADFAKEQKSMEGGEEIIDEQFVENNGNEEKRAKSKHHQKIIDLFNQLSKAEKIGGVENRFKGWVNISKNKVSGKLFEKELIDVLKTEFKDEMDTEVPVPVLFFNKDEKGKTRKLKEVFNSFGKDKDGNGQDFTTYFSSAFHDNRRNYYKADGKAGRVATRVVDENLKRFITNLEKFNTIKAEHPELFNERWKEYFVEKGLENENWVKNFEETKWQEDIFGFKYRHFLQSDIDRYNYITRKLNKDINESGSGTKNFQKLHKQVHGEIKKQDEEFKVDKNNIFSSNSSFIKKFIEHSRAKLVFSQKIFSKFFNEEFSDPKNVFLSSRAITTISNKCFASWHTFGGGILDYLNSELPEKKRRKKLPDFVTLQIIKDVLDTAKDTPFQDLFKNKYFEKIDSKDEQRKYEREALEKLRQKLKEGEHWKNFLWIVQFEYKSLVKLHNDTAQKLLAETVYKKGNKDFSKEEQDKQVGILFDFAESANGILNMTKYFALRKRGVMVEDKKYKDRDNIHEQVESYLDGDNEGQERCLINGYYKALKDFVTKKPWIEDKVVLNFDKSQFLGGWAQSQETVKGGVILRKKQDGNDLYYLAALEDRDKTFFKNKDLYENVGESVWQKMVYIQLQEPHRMLPKNLIAPFFVKESKKYQDMNNEKKCEWFNELESKGVKFFLNNDGHNWTKILKEELVRRIKRGIKDKKSIIWAGIDRKKNGAKKLIKQDIKPSDKFLENYLKGKHTKENLDRGYLQEYFGYLKESIKKYYKRDNLSFPDTAEFSDTSPFYTWVKENVYNIKFVDINEQVITDLVINHGNRKQVYLFQIYNKDFELDEEIGKAEYGDKFLTKKEWRKQKERKEEEKEQGRENLETTFFKSLFDSRNLDSDKGVVYKLSGGAKMFYRPASEQLGKKKIKGRDGREKEVVDRQRYKEDKFFLHVPIVMNFVNKNKGYKINDDVNKLIAQTSSGQDKFRVIALDRGEKHLAYLAVLNENGKVLEMQSLNRIQRFDKKNNPIPEKNQYHDKDGKPIGEPQVEPFKDYHNLLDQREIERLKARKSWKPIEKIADLKEGYLGFVVNKIADLVIQAIEKGKVPIVVLENLNAGMKQGRIMIEKQVYSKVEEKIAKKLNYLVDKKLGNFFEAWQLTPEIKTFGGDIEGKSQVGIILYVNPGYTSATCPACGFRRRKYIKTDSAKTEFANIDISFDGAKYKFKDPPNFKDSDVRPIGAAVYSNVRRAIWDRYANNGRGGVQEVADVTKEFSKLFREFGINYRTGNINKQIQNLSFPDKEERKFWTRLCKWFHCVLEIRNSVSKKRAVKEDSANGEVEEWGENRDFIVCPHCYFDSEDGRKWSELEEKIYIGSHPQDLNFNGDANGAYNIGRKGIIAIAKIRGHRENFDRFIKAWNIQCLPKKDEEIPFTKGGKKFTLTTLKDDKKQPYYCFLKTKKESFESIPVERNMRKYPDLFISDNEWDEMTAKWAKENGRK

SEQ ID NO: 2623 - protein, 228 aa, unidentified
  REGION 1..228: note = Table 20
MRQKESMKEWMTRLELVVEKFQNGNYANLAYFRILRRQPIENGTWSFMKDVPCNVLDEVMKKLQGSPQKDELIMIQNLYGPYQQQWTFIWIYEKEVTPRENQTGGITVCSLDPGVRKFYIGNQDAQRIIRLCLHLDDLISRTIKARANKRSWEISGETNFKGRRVGKGVKIVGEAYTSETCGFCEWINQNLGGRKVFKCGKCGLCIYRDINGARGIFLRALLDGTILL

SEQ ID NO: 2624 - protein, 268 aa, unidentified
  REGION 1..268: note = Table 20
MLLRGRLGSDHRQSIDHALVARKEVIKWNAQWQKFGSTHHLSFKSRKALYHTITISGQNFAKLPWNLTFTLHQYMHMHISTSFEKKRRNNKWPNPHKITCDGKLTYYRKTKEWKFAWLRETQADGSVHAVSTDPGIRIIYMILQKRLHTSKDLTRVDRKTVAFSARISRQETFKKILCWGHYRFCQLSDRQGRRIGSPSYHPKSYTSKTCSWCANIQRIGESEGYICLNCWLFIDRDNNGAQESSSGYCLVHAGNNRHYMGMLSIAYY

SEQ ID NO: 2625 - protein, 661 aa, unidentified
  REGION 1..661: note = Table 20
MVHLPPIKSIIHGDAKDTAFIRFTALSAKRITFSKFEQVVIRQRVQISISQSETISILLVYLYSQDNIQHALLIKGKKGVWTERCDRILDGRGKAIPLTPKRRSTFYHLYNIWEKEQNESVSIFARRYILEEEVSQISSTLKRITALQHLEKVKILEKENSSLLINKRIDFLYKNLVIIGIESQCNTPARYTLNDLELGIEEDIRIAEAPRQNIQSEQRQEFLASIIDPDLIPENGDDEQEEEVEILSEENQYSSAFIGIAPEAPSISQTTLLGIQTQADISRIHSEVVVRPALQRLEEIRSLEDLEVVEEETPIDPDLSTTSSMVAQLIDSLLQNRSRQQSIYSFFHQQAPDLIIPTSSGSDSISNYRPELTPLQLDATALVQSIYPQTQIPPTTQEDIVIPLPEEIGVFIEDAENQSFEEVQIRICAIDPGIRTFATIIDPIRCKGFRWGEQDFQRLVIIRKKISRIQSELSMPLKNSKKRAKQEVIFRLWQKHNNLVRDLHIRLSKWLNENYDVVFLPKLDVARMVRKKGRFNPPPPPRITTVPTQAEQIAEIQRRREERKKGRKINKQTAASMHALAHSKFYNRLQETMGFLPTITEEFTSQGCSSCGTRKTNLGSAKVYNCPNPLCQLRADRDLNGAKNILQKIIIEVEKLGTVPS

SEQ ID NO: 2626 - protein, 238 aa, unidentified
  REGION 1..238: note = Table 20
MSVRLQRLCEGEYYINVPRLRTFPESKSNRVCAIDPGVVNFATVYDPDEEVRGCGRHEIYPGSQGQCVQGETSGQSTNEGEEGQEEFEERGAPFSLLSSQTYALHVTEGFPLRERHAPTLSCWLSENYHTVLLPSFQTQEMEVASDATPETASVEDNAAIDKRKMRIQAVLKYKMKHTGGRVVDCEEEYTPKTCSGCGTIKKKLGRRPRIPMRKLSCSTGRDVSAAKNIFHKNMGLLA

SEQ ID NO: 2627 - protein, 1047 aa, unidentified
  REGION 1..1047: note = Table 20
MPQKADLVAVHKKRGKRHERRTPAFVRDRVPESQRVLKPLLTTSWFDVDNLAQATLEPEWRTTSMLAHRYSEIAEDLQALDIAEDETANSMIKIRLFPTREHKEKLDQIFAAQRAIYNKMVARSRKDRATRLTSRDEAKKMMMKAFGLKWRRMTEQQFDFIRVFEFGKNEGIIIHEELPALTMSVCLQRLREGEYYINVPRLRTFPELKSNRVCAIDPGVVNFATVYDPDGRTFSVKDARSVLKRTFYAVDAMKSILALKDNACKERHQDKLSCWLSENYHTVLLPSFQTQEMVRKHLMEVTTPETPSVEDNAAIDKRKMRSLTARALMAGAHFKFNQLLKYKMKRTGGRVVDCEEEYTSKACSGCGTIKTTTWVETASSDAQGVMQYWIINDAAITSASVTPVSPNAGVTGAVDVAFTTGTIIPVGGTIVVTFPSTFYVDSASTLSNPVGMDSTSTIAASPTTGVVTITIATTSAAAGAISFTLDSISNPAAGSTFYSWTMSNAATVTAASLFAGRTTSYTATLTTDVTLRIGSVIALKVPFLSDSVIVFSSATLAGLVGINAASTVLRVAHRIFFSQLLVKTSPQDKLCRSPTAISSMRQHNPHHHFPRHLFMLTRGIKWSHFPSQSCYEHTTFTSTTLPSATITPVSYWAGATTDYNVVFGNLAYVPSGSRVDVIFPSRFDISGATLTHITNLPTVNTVFSLSSATTARVTLGNTAVLPGTGRSFKLENIRRGGNVFEDLTTVAGTPIVKKPLTYGRVRPLLKTPNTLTVATVTLDTVTTIPLGGYIEAVLPADYSVGAGTITASSLVNIPSASTAVTSTPSSVMLQIAGANIPATTGISFTIDKITTPSNNAVGNFIVRTRDAGGSTIEESSTIGGEGCTYVNDCSGHGTCTLLSKVCICNSGWGAPTDVADYKSPDCSTREYPAAISGGRYSNSASIHAGVCPSNYAWNSIPTSTTTAHDIIVECSAMGVCHCPIGNDPDTTVDETNCQGKTVPGGTAVGVAGNKCLVECSNRGVCNYKRGICTCFQGYTGYACQTRDELAK

SEQ ID NO: 2628 - protein, 293 aa, unidentified
  REGION 1..293: note = Table 20
MSNPVPTPEHMARLLRVRGGKYYLAFSTLKEFKKSTGTREGGMDPGVRKFGTVMDTEGLTLSVTDDGYLKRRYDAIDANKSTLAKLDNAAKAATKARHPIKLHTKEKVAIAMQNKKEGVSVSKSSDHRRRARLRREINATNLKITNAVKDFHHKFSSWIASNFKTFLLPSFQTSLMVRKYEQQMAADGTPESLSQFKVHRGRKRRILSSTARGMLGLCHYSFSELLRYKMERVGGKMITCEEEYTSKSCSGCGKLKENLGGSVVYKCVSCGAHMDRDLNGAKNILIKNIEMLF

SEQ ID NO: 2629 - protein, 701 aa, unidentified
  VARIANT 640: note = misc_feature - Xaa can be any naturally occurring amino acid
  REGION 1..701: note = Table 20
  VARIANT 624: note = misc_feature - Xaa can be any naturally occurring amino acid
MSSKRRKKSDPPDEEKSKRRRSQRIAEPTRQKTASDDRTVDQPDKKKPKSRRSSRTAKSAEQKTTTNGRVLVHPSTWFDPAVAKDLWMPDADSLQAVEKNSHHPPLVDPLLTSWFDVTNFTDVFRATPWRTMRTPSFEDLQEDLRALGELSEESKSVNSVIKIRLYPTTLQRGKLEQMFAANRAVYNKLVARSKEDRAMRLVPRGNSDKNEKMTSDELADKYRPIAKEGTMSPYFRNKKMLRRYLEVNDEVRDSAFRDFKKAIKSSLALFFALKKKNKNTTFPELKFKSKFALSNTIEIHSRSIKSICKNDKKYVRFHRHFFGFSEHDMIELTEELPELIKAIRLQRLREGEYYVVIPRLVEFKQTKSNRVCAIDPGVRNFATIYDPDGRTISVKDTYTVLKRRFDAIDAMKSKLALMDNESKAKHETMIRQGKKTKEKKKTQLHQALAANHKQVLLPSFNTSEMARKYEKLVTADGTPPTSSDEVTETAVQPRKGKKREIRSSTARAMLAQLHFKFKMLLKYKMECVGGRMIECEEEYTSKTCSSCGEIKDDLGGSSIYRCLFCHVELDRDVNAAKNIFHKNMPAPLRLQRHGAHNATDFARQIISPCSTVSIADTPTTNSPXSGTYASAPTLLSSSLXIITALSYRIDLDTQEMTRSSPISRHPVFYVVSSHSRTLPVRLQGIYVDWMGMLARRGCHVH

SEQ ID NO: 2630 - protein, 353 aa, unidentified
  REGION 1..353: note = Table 20
MKAVKSSLALYFALRKKEKKTSFPGLTFKSKFAPSNTIEIRSRGVTVVHGEKDYVRFHPTFFGFGKSDGIELRAKLPEPAHSIRLQRLREGGYYIAVPRIVEFQPTQSSRVCAIDPGVRNFATVYDPDSRTFSVKDAYTVLKRRFEVIDAMKSKLASMDNESKAKHTRKVRQRKKPKGGDKTKLHRHRYRLRRCIRFTHHHVTRMVGDMHHKLKLDGGQLNQVLLPSFQTSEMVRKYEKLVATDGAPPTSSDAVKQTPTQRQKRKIRSSTARAMLAQSHFKFKMLLKCKMGCAAGCVIECGEEYTSKTCSSCGEIKANLGGNSVYKCSSCHGVLDRDVNAAKIIFHKNMQMLG

SEQ ID NO: 2631 - protein, 184 aa, unidentified
  REGION 1..184: note = Table 20
GATGAVGHDLVAELALPQVSDTLARREIPETQWGNTFPSMDLPVARSKLEIIPVNFEELHRDWKKLPVDVDVAFSCLRTTRQNAGSASPETSAAVQKRKIRGPTARAMLAQGSLPRQDAPKVQVGARVRMAGREEYTSKTCSGCGVISNNLGGSEAFRCSSCRAVFDRDVNAARNIFHKIMGLL

SEQ ID NO: 2632 - protein, 233 aa, unidentified
  REGION 1..233: note = Table 20
MSQPQMFTSDTPSKPAQVPYAVQADVPVMPASKDLEIDDEFTRGQWAVGFWDCFTDLMPNCFMVTCCSCISMAQISARLGVTTFSTALIACLAVVIAEFVVYGLVSSAGSSSSATVETSYAANEQTTYNYSTNDGGAAAIVYRGISVIIRVVFALFVCHLPWARMAWSHFKFKMLVKYKMDRVGKRVVKWEEEYRSKTCFNCGGIKSDLGGSNMYKCSFCHAVHNRDVNTTKV

SEQ ID NO: 2633 - protein, 911 aa, unidentified
  REGION 1..911: note = Table 20
MADSNDLAARVDKLEVAQKQQTERVDKLQAQVEAAKNPQETFYLTTAIHYANGLPHMGHAYENVASDVICRYHRIFGRDVYFLTGTDEHGQKIAQTAEAAGVTPQQLVDKYAAIFQQLTYDLNMSNDSFIRTTSDTHKKFAQWLFQRALDNDDVYLGQYEGWYNVREETFVTETEAQLTDYKDPVTGAPFKKMQESSYFFKMSKYHDRLIKHYEENPDFVQPEVRRQELLRRLKEPLQDLSASRNTFTHGVPLLNDPEHVQYVWFDALANYVSALGYPDGPNAHYWPASVHIIGKDITWFHCVIWPCILMSTGIPLPKRVFAHGFVNAKDGSKMSKSIGNVIDPYEMINKYGLESFRYFIVRSAKFGQDMPFSEDDLVNIHNSELADNLGNLVHRTVNICKKYANGVVPDVKADKPFDIYELLQYSEASYKEFALQNACVAIVNALKETNKYLTEKAPWHMKEEESRLVVVRTCLEAIYVLAHYLSPMIPNTTEIIFKKLGTAPTILTALSPEYDNLKAGTPVVIGDILFNKILTEEEKKKQLESAAAKAKPAKVKAEKPATPLFASLDIRVGVISKVWKHPESEKLYCEEIDIGEEEPKQIASGLQAFYSLEEMQNRKVLVLLNLKPAKLGGFKSHGMVLCACDEAHENVQFVEPPADAVVGERVSVASESGEPLSAAQIKKQKVLEKASPDLLTDANCVATYKGEPITTSAGPCTPSICMFLWKMFLAAFASRSYTAWQNEHLYVLLLPRSCLIPPLEYVLEVYSSSHSTTRPPTRPILYLSNILNLKCNCANMARAVEDRIVRVLPRRGFSLVISSMVSSDEDNGYPSAVTTCSYFRIKMLLKYKMGRVGGRVVECEEEYTSKTYSSGGIKHDLGRSSTYKCSFCHAVYDRDANAAKNIFHKNMQMLG

SEQ ID NO: 2634 - protein, 316 aa, unidentified
  REGION 1..316: note = Table 20
MSKTEVAQFDKRAVSFSALQKQTEANVSLMPKYLEQMKIVDSKKFIRQLVQMKKPGCEVKIQYHYRTGEYFLLVPVEHHHTPTETPKHQVVSIDPGVRTFATCYSPTGGIGKLPTGGEIGLKKRYLRIDRIQSALTKIKSMKMEERRTNGYKTKNINRMNKKIHRLWMEIENSKHHMHYNTIKFLLSNFEKVIVPDFNPHEMSVKQTSILNKGTKRAMFCWGHGEFRQRLKTKASLMGRDGDIIITTEEYTSKTCGCCGQIRWDLGSDKKFECSGCGSKLDRDVNGARNILLKYITEKEGVDVETPQEEMINVERH

SEQ ID NO: 2635 - protein, 654 aa, unidentified
  REGION 1..654: note = Table 20
MDPPASARPSTVPAQLKRPPWFDPQRTADLARRLCDQPDFALPPENVLPVGWVRMTMSRPPSSTAVPVGFEIVERPSLSREEIVASAKKRRKGKRASASCNTKVDPTKTDRRVFALRIRPTTAQKRLFQRAFSIACLAKKLTYKFIGDQRDGITKKRLYEIVQSVCSENIQTRERANPDDPNDKRMRVVGRTENTTLPPATRRILFEQHLPKGDRIRSAVRTNAVIKFCQAINATKALIEKKALAWDRVAQAHERYLMGAEDTFVPARGSMVPVTRSRPAAAKRKRAHQEETDEGVRTDRYGVARMRTCRYAPRGDRPEMRPRQVKPPDRNRPRHSFSIDASPRGGNRDSSYTVRWDSKECQEDSRVLFMRQRVALWGCPSKRKRQLDRLTARMSGGEQASRTQTTLRYAEGRYHLMIQCLSDKVPLRDRRPVRAVALDPGVRTFMASYDTDGRFGAVGDWQIGRITRVAERADRIKSHIDTRLVNQGFTNGNNNKGRRKRARKRVRQLNAKCRDLKADAHWKTARALCQRYDHVLLPKFNSRGASQVLGKTTTRLMLHWSHYEFRQRLQHKAETMGVKVHLVSEHYSSMTCGRCLYIEESFRKNGSKRFRCRNCGYAIDRDANGARNILLMNAERYIGRLEAFPLDSDAASID

SEQ ID NO: 2636 - protein, 731 aa, unidentified
  REGION 1..731: note = Table 20
MPANRSICPHQIDYLRRTSGQLDHLQSYSPQLTTQAPNPTSSKPPRRPWWYDPARTPHLAHHLPIRSPDADSMVTLHPSASVGWLKCRIADQATSALRVTEFPATMTKDQYIAIGRKQRSAKRPKLSHRCSKTKGVPRRVFSLRLAPTKEQKLYFQRAFGIACLAKRLAYKHLGDQSVPMTTERMQELRTRICTEHLTTRVHREAVLEGEKRPTKGFKNVTRLNEFLPLKSRERLFETVLHRHDEKAREFYGRRLRRDKHRFRAKWTTPIHRRLIPYDVRFEAVTQFCQAVQATQSKIAEQQRVWDDKMAAHQRWLRQEQAVADEEALVELTGERIAKRRARKRALDAIAEREKKQPVSKHPPRGERPEMRVRQVKPTDRNSPVQTIRINTTTSSRTIIHAASWFENDDVVRLRSGLTIALWGSPSRRRRELRRLSARMHEGERATRQQITIKYDHGRYYLQVQCLLSPDLPLRTMSTTEPVRAVALDPGVRTFFGTYDSSGRFGDIGDGQIERIIRVAKKADRIQSHIATDLQGPKNKAKRRKARRRLRQRNAKCRDLKNDAHWKAARALCESYDHVMIPKFHCAAMKRFLAKSSTRQLVHWSHYQFRQRLKHKAEELGVRVSECREPLTTMTCTACLWVEESFRKNPAKVFECKKCGFKIDRDYNASRNCFFLNGERCVGRLEPMPTPPTTPKAPVGNVPISSQSDDDDNDEFSGWMWSRRKKNNTATG

SEQ ID NO: 2637 - protein, 664 aa, unidentified
  REGION 1..664: note = Table 20
MASRPSRPGADRQEPRRPFWFDAARTPYLARHLPYEPDTGSPKVSLHGHCNSGWIRAEASARSTAAPAVKFRVTHPPEPTLAEARAAAKANRASKRAKTAKAVKTKDVPRRIFSLRLDPTPAQKRFFQRAIGIACLAKRLAYKHVGDQRQPMTAKRINDLKKRICTEHFQTRVMTGETSAKGNARFQKQNAEQPNAFLPEGTRRRLYEQDLRERAKAHRGAVEAAWCARRGWKKSRKTWTPPLDHRPIPAVVRCNAVIRFCQSVSSTQALMQEQAAKWDARMAASQPRSSPSSSSSTARRTDVSSARGKRKQTEMSSASPAPRAPTNPRPCMGPRQVKATDRNRPHQTFSIDATPGNANPHAARWDFKGDDRVHLMGIAVRLWGRPAKRRRELDRLSSRMPDGERFTDQRVIVRYESGRYHLLVQCLFSEPPKRADIAGRPVSAVALDPGARTFHGTYDLDGRFGEIGAGQIRRIIRIAKKADRIKSHIDRNLKDRRPGDHNKAKRKRARRKVRAIMLKTRDLKSDAHWKVAKALCERYDHVLIPRLPVSVMVRALARSTTRQMMHWSHYEFRQRLHHKAAQLGVHVHEVSEAYTSMTCGRCLWIEESFRRNSSKQFACRRCGHTADRDLNAARNIMLKTIEASVGTLEASILQPPSTSPTSRG

SEQ ID NO: 2638 - protein, 363 aa, unidentified
  REGION 1..363: note = Table 20
YNKVLASINNGEKINSFELRNKYVTSKTRDGKNNPLIKEWEKKIPKDIRNGAIRDLIKNYKVCFSNKKNKNINFKMKFCSVKDTPSIEIPNTSISIKENKIFIFKKYLKSGIKTGKKQLFNLDIKYFCRLQIVNNEWFLIVPYKKEIPQNTVDLRHDFCALDPGTRTFQTIYSPELCLQIKVNKEKIKSYTNKSDKFDSLRKKKKITRKRHKRRKRKIYSKISNLIDDMHFKTINYLTKTFKHIIIPVFQTKNIAMKSNNKYLNRDLMLMKHYSFRTRLQANGSLNKCHIDVCTEEYTSKTCGACGLLNNVGKSEIYNCFKCKTIIDRDINGARNIAIKRLSEYKSYKKNKVTGKKNINIITL

SEQ ID NO: 2639 - protein, 409 aa, unidentified
  REGION 1..409: note = Table 20
MKRRSNPKKPNSQTIYYPLSTSSVVNNWEKNVIKNLKVRIYPTPTQRKIFKEWFGTTRYVYNRVIDAVENKGEKNNAYELRNKYVTSKNNSNVNEWEKRTPMNVRTNTVLKLSSNYKSAFSNLKNGNIVRFKMRFKSKKDRSQALLLPKSSVEMKNGSMTIGKHSISKFWSSDRKGDKYAFSKFKLKGKTKKRDINIDSQCTLTYDGLYYHVLIPKKTRPKKVQKRCENTIVALDPGLRKFQTGFSQSEIFTVERTAMLKKYNKRISYLHGKFQRNNTRKILKTYRRSANIVSDIHWKLITYLTDNYEHVLIPKFESQELQKITMSKHSNRLYDTYKHYLFKQRLIEKSKEKINTRVYVVNEAYTSVTCTNYGTINAKTRSEMSTCKTCKLLSDRDIRGSRNIFIKYVQ

SEQ ID NO: 2640 - protein, 503 aa, unidentified
  REGION 1..503: note = Table 20
MKKCYQLEKKVLKPFWNTQCLEISKLLWYPENTDLQDLQDLQDLEHISSSKLSSVSSNQMMENSSFWITKMKNQKMKNWQTTYSLSSTSLTVDKWEKEDIELKSKMIRIYPTKKQTKILDDWRHTNRYVYNKTIAYTRNNPSEKINFQSFRNSLVTNTIKDVDDKRSQNPNVKLWEMKTPKEIRAYAVKDVVTAYKTAWSNLKNRNISHFKIGFRKKKSPTSSMTIQKQSIDFKNNYFYIYNTFFSGSGISIGKRTLKKIKNDFKDGFKVEHDSKIVYKHGKYYLLIPIDISKKDTNKKIKKNGVIALDPGTRTFMTGYSTSEVIECSRKADIFKKLKNKISILQENRKYKTIQKYYIRIGNLVDDLHWRTIKYLTDNYDEILLPSFESQELVKKNKNKKVREQLLNLKHYQFKRRLICKSNMLGNVKVYIVGEEYTSKTCGRCGALNNNLGSKEIFKCVKDDCNFKTGRDVNGARNILLKHLDVCPRSTQVGSTQDKFASKS

SEQ ID NO: 2641 - protein, 576 aa, unidentified
  REGION 1..576: note = Table 20
MLSCQQLLKSLLCKKRVNISVSVLTRYEDGLTKVVSLLSDLLVEYECSTLVILKRFLTSIELQVINKKSFTLVFPPINKEMILNDKLIFSSTNIPITLLFRILVQVLTLNAKDCKPFWTDACKEKSMKLWLPTKTDCVDSDLTSSNTSLSHLVEESLFWMKTTTNPQNRNLPRTYYPSSMYSTVDKWENVDTIRNLKIRIYPTVTQKQMIKKWFGTHRYVYNDFLSFTKSNTNTKEWMNFYGMRNKYVIYNNGKNEYFKDKEWMIDTPKDIRADAIKSCISAHKSCFTNLRNKNVKHFNVNYKSKKQNTYAITIPKSAIKYEDDGFFIYKRYINSKISVGKRTMKKLKNQNINHDTKLITDGVHYYLLLPMDTQIRKPINDNKSVIALDPGVRTFQTGYSDTKVVEFSSRTNTITKIQNKLQLLQSLRDKKIIKVKKKKILKLYLRIKNIVNDIHWKTITYIKNNYTDVLLPSFESQDMVTNTFLHSTTKRRLLGLQHYKFKEKLLNKKEINVHVVNEAFTSKTCGCCGEINYKLGSSKLFKCSNCDLTIDRDFNGARNIYLKYMGERTNTLNESK

SEQ ID NO: 2642 - protein, 434 aa, unidentified
  REGION 1..434: note = Table 20
MTSFPLSKFIAASGTDAEDTVLRTKKIKLRLTSNQKQMLQKWNSHARYTYNLAVWRLNVDIDTQTKLNLRNQITPANCNNGKEWILQTPKEIRARAVFEAHTRFCTGVKQIKNKTIKFFRLRYKDKKYQHANGWSIDIPKQAILQIDTKTLFIYKRITKEEKFKLGERLDVPIEHDCKIHFDGDAYYLIVPFNKKKKTREQDGIVSLDPGVRTFLTGVDGDKTIELGKDSGTILFRKLRHLDHLISKKDKTRDKTVKKILKKRIKKVRIYIRNLQDELHKKTSTWLCKKYSNVVIPQFGSKDMVKKQDRKLKTKTVRAMSILAHSRFLERLKNKAREWRTDVVIVDEKYTSKTCSVCGHVKTKRFRNVYNCESCLMTMDRDRNGAINILKKLFLPKGENRADRANETDTLVRLGIDRGLFEPKPSSHLVVSVCQ

SEQ ID NO: 2643 - protein, 631 aa, unidentified
  REGION 1..631: note = Table 20
MGYVSLSGARHHFGVSGKTLYRWEASGKVTVKRSPGGRRLFLIDDPLAQAEPRRESVVYVRVSSGKQQDDMRRQEAYLLDQHPGSKVVRDIGSGLNFKRAGLLSLLERNTVSSSWFATRQISHRRRSWQRTCSPPFEFSVVDGTASEDMPTDAPVIRTRKIRLLPNKAQKKLLDRWRHAARYSYNKAVFLMNETASYNKLYLRNLITPAEVNRDKPWLLETPKDIRAGAVFEAAKNVKAAITILTRNNIEHFSMGYKGRKKEDGHGWTIDVPKSALRVRGFRRLQVFGDYCPWVFETLSRIGPLAMDCKIQYDGVKYFLIVPYERHVVPPRREGVVALDPGVRTFQTAYTPKGNCYELGKGCCRKLEALCVHLDRLISRESSVPNRLRRTKWALRTQMKKLRRRLRDLRNELHYKTAEYLTRTANIILPPTFDTRNMTRRTTRRIRSRTVRNLSLLSHYKFKQRLKAKAAVRGVRVMEVSEHYTSKTCGRCGHMHEMLGGRRVFECPRMDHLNDAMQTLGLSWPSIPLAQDDAAEYVRNGRTGEGALLGKLLRHAALNEFLAGKIHGDAHTLDACRSYVQHGGELAELIEVVRIHEFFRVHVGCSKIEDRERALYGWMCKNSVIRDLRIDA

SEQ ID NO: 2644 - protein, 343 aa, unidentified
  REGION 1..343: note = Table 20
MSFKAKKEEDANGWTIEIPKTAIKVRGERRLQIYGSYGAWDFETLGRMGPIEKDCKIQFNGARYYLLVPYTRKTTYAAGSLASEIRESVASLDPGVRTFQAVYTPNAVYELGNGSATRLHSLALQLDKLLSFRARIPKEYRRAKRAFALRILKTRRKLQNLRDEMHYKGVEFLTRTAKVILIPEFKTREMSRRFQRKIGSKTVRGLSLLSHYKFRQRLIAKAAERGVKVMVVSEHYTSMTCGRCGAMRRDLGTAKIYKCRACDLVIGRDHNGARNILLRALRDIVPWGALQDGAMYLVPHQGLIELLTRHLRDQASTFIGAVMNGDKVLKVLEHGRYHNGLKC

SEQ ID NO: 2645 - protein, 645 aa, unidentified
  REGION 1..645: note = Table 20
MKCPRKMSKKPQNSLLPEELEKSSESVMPPSDDGRKRRKSKASSHLLEEDSIMSKIFSASFVLQLMTRLFLEDRSRFCMLVSLLRSREMTFKDKSISSKKNIQTLKLSQTSQVVSTGNVKASGSSWISRVPEVSNELSWRSVIDSADLHSSSSNMSSVSMAPSSKLSDLRNLLQNKNSKKTSSALSKCSAVEEMEKDDTKGRKKTKIPKNHVIATRIIKIRPTKSQKQQIDKIAGVVRFCYNASINEINKMRCHEISWPSGKLDQHLRNKFSIGKHNDIEQYISIHGNNIEPEQIIETTKMNTETRKKEPSRRYINPFFLGKLWLSECPKDFRARATFKAADAYKTSLTLWRKGLIRSFEMKFSTKRRELDRGYCFGIEKKVKFEDTGLKKRDGKLIITGIDGDIRFFEKPPINKEPVAGCELSKDSCGDYYLHVPIFRKKKERKGDNFVAIDPGGVVPWAFYASKGESGCLGTEMNERMSNVSKKISTIDKKLSGQPKGDKNSNDVIERRKLFRKKKRIRDHEHYRVINFLTDRYDGIILPKLKTKNISKALKSKANHDMFDISHYTFLRRVGERCIESDTILEHPGEQWTSKTCGRCGKSNLPGRERRGTFREYKCLYCGLHAHRDVHAARNIFMKWYIELKK

SEQ ID NO: 2646 - protein, 439 aa, unidentified
  REGION 1..439: note = Table 20
MSKLKPWWSEKCQQITKIIPLNPENISFQQTKTNMFQNDVGVKKVFRTRKVKLNPTKQQKMMLMKFANDARYSYNAALSAVNDKTHKANKIELQNAFLSLKRRDGTFNQFFQKRRWLLSTPQPIRQQAIFEVAKNFKVAFSNLKNKNIDHFKMKYKSKKNQRQYGFSLGIGTHLKHKDGVLTIFPRSLGQMRYFGSLPFEGVPDAECRIQRDPYGDHWLLVPVYKTTKTQTIKPIVAIDPGVRTPFACFKSNGESKTLGEDMNVKLTDIRTRVSLIDRRISKCQDVTLKRKMSEHRRRLFRKHQRVRDAFHWDIINDITNECSGVLLPPFETQRVSRMLKNKTNCSMFGVSHYTFRMRIKGKCEEKGLLYVEPTEEYTSKTCGVCGRINYLLGSKKTFECFCGNVCDRDVHAARNILLKWLSTEAGARVVETFLASRSR

SEQ ID NO: 2647 - protein, 432 aa, unidentified
  REGION 1..432: note = Table 20
MTSFQSSQYSLQGYTDLEATPSKNKSGTRSKKNVNLKTLKGRFLPTQEQKLQLQLMMEQSRWYYNFLVGAFKSKVHNIKALKSVSFYSIRDLLTEYDYIEESDDIRYFQRREQESTDQICPPWWKKPYSRLPRGVAKKFSQNINSLLTNYHNKNINDFEIHFQSKKKSKTEYVLFEDKNFPVFIRDMKSQYWYTDVNGRKQRSSFKDLFTQTNPRGLEIIYDKIKDHYYFCYPVDYNFYPEKDRRNESQVHFRSCSKGERVISLDPGIRKFMVGYDPNKCLVYIGEGANRELISMLHEIDKTKDMLLWRRIKNRINELHWKTISYLIRNYDKIIIPDFKISGMVKQKKLTRMTKRLLYMFGFHSFIEKLRFKCKNTDTRLYIVGEEYTSKTCTQCGKINNVGSLETYRCIECDMVVDRDVNGSRNIMIKNMK

SEQ ID NO: 2648 - protein, 406 aa, unidentified
  REGION 1..406: note = Table 20
MREELGNLIKGIPNSRVLYPFCGEGTVDLNCRIKSEPDWLGDTIIRCKKVVLHLEDHQRNIIEGWFEVYRQVYNFTLKCIKGKEKVSFYDLRKEVKGKFPKGLVNLVKKSKIPANTVDGAINDVVKARKIAISNILVGNIKHFRLRPKKISKKVNTIVLESNAFSDKCDSFCTRALGKKIRSTDIIQGIDKTCRLTWKKGYINPFILHVPEDRPKLIVKNKREMCSLDPGIRTFQTLYDTERYVEIGKRAAKKLEHHLDRIHKNKEHQKEKWYKKLSNRLYDKIKHTIDDLHYKTANFLCRSYKKIFIGDMSTKGIVRTGGNLNGSTKDLTHILSHYTFRMRLIEKAEQYNSEVIVVDEAYTSKTCGGCGKINENLGGAKRFNCSCGINCDRDLNGARNIMIKGLY

SEQ ID NO: 2649 - protein, 514 aa, unidentified
  REGION 1..514: note = Table 20
MKKKYNKFIFDRQLADQFWLPIDDNFYATLNIPTDSWFDLSKTNTNSPTVIQFNKNKQKDIFVTRTQKIKVFPTPYQKNILLDWITAYRYMYNATITYTRKHEINDDKERVKLYNFNKLRKIVNDIVKNNKQMYDWIKIIKIPQHTLDNAINDVCKAFKSALTNKQKGNIKDFKLRYKKESTVKQTILLEASCFQNNKFKVDALFYIRHLYGEPYKAYRENKNTFSASVMGDYIQTSESIKDVNTTSRLTYNKNTNEFMLFVPYEKSTENIENREKMISLDSGKRTFQTGYGMNEVLDIGHTCIKKLDEMVSEIKTIKETIKKISDDPTYKLKIKKTKKKKFKKTKKKKAEEKSPKKKRKVPIIKKYKKQLYQKQRKLTNRVDDLHFKTCNYLCNNYDIIVIGRMNVQSIVSKKNKTISQETKESLLALRQYEFRTRLESKCEERGVKYYDTDEADTTRTCGCCGGINNKVGGAEIYECRKCKMKIGRDYNGARNILLKIYETIKKDHKIEIIQ

SEQ ID NO: 2650 - protein, 644 aa, unidentified
  REGION 1..644: note = Table 20
MSNKRNKKISNYDLFIDNRRKCPVKDPIYVSNSEYNLTDWMPPINKETINLYTDSWFDIKYYRNPTPSITNFNPYSLLCQDIDLLLEQNKLPYSTPQKIVKYPIIPEESRAQQKKSIKWKKLKKEPVFLSTRKILLNPSMELKKLYHSWFDAFTKMYNVVINHVRKIIFVNGKLDLKLAYETIKFKDLRDKLLNQKNQIKSETSPQIYTHILDEAISLAVSNYQSCLTNLRNKNIRKFRVRELQSTRRRKIFKIESAFFSNKKFCELVFPMLEKQLLESIKHTCILQYDSFTGKYLLLVPYGEKEKSKETEKNDLDCGIDLGIRTFATVYSKYDTMSIANNISEFPNIKKNMRKIDKIQELLKYNREKNKKNKIEKNKKKNKKKEIEKNEKKEIEKNKKKEIKKIKKKEINKNNTNEIKNDKEIKNDKNKENDKGDIDIDMLVKEKKTSSLKKALRKYQRRIIDIIRDMHFKAAYALVQRYGKIFVGKMSTSTMVRGNSVLSKLNKRMVSILSPYLFTQRLCYMCHKYGTEFAKVNEYLTTKTCSNCGFVNEVGIRKIYICGGCGKVIERDENAAKNHLKIGYKNERNKGKSISKTIIKKNPQKKTNTKTIKKKNDLNKKEIEEHVYKGKVQKTKINGKEIYII

SEQ ID NO: 2651 - protein, 501 aa, unidentified
  REGION 1..501: note = Table 20
MVYNKNRKPIYFPNKNFGLSDWVPFISNYYESLNTNSWFDMNICENPNKCPTKHHLVDAPIIPNESFKQQMKSIKRCKSNKEPVFIYTRKIRIYPTDDQKCILEEWFWAATRMYNITVKYIRDIIFKDHKLTCPSAARDILINFPFRTVLKEERDKIMKSMEYPIVGHVLDEIIAQVVSNYKSAITSLLKGHIKKFKISTWKYVRERYILKIEKNLFSNGTFCGKTFKSIKSSEPLTNIQHTCTLQFNRDTGKYILLVPTHKEPETYLANDLDCGIDLGVRTFATVYSSNNVVTIGNKFKKIDSCHKKIDKINELLDSDNNKCKPCKLKKSKRKYYRRIKNIITDMHYKSAYYLTTNYDNIHIGKLSTKGILSKNNKKISRHTKRMVGVLSPYLFRQRLNHMAQKYGATVFEVDEYLTTKTCSNCGKINELGALKVHKCKCGMKTDRDVNAAKNILKVGYHDNSHLHQVNNIDILGETDNHFVTFDKMTQQYEIFKTKKNK

SEQ ID NO: 2652 - protein, 529 aa, unidentified
  REGION 1..529: note = Table 20
MIHNHKIIMKEAVKTVKSKVPAKKRILTGSKTKKKIFVKKKPPVKKPPDKKPVKKTVKTDKPKSIYVPNKDLKMSKWIPTPKKEFTEIETNSWYEHRKFENPNKSPVQTYNKIVPVVPPESIKQQNLANKRKKSNKPIVFISSEKIRIYPTKYQQKILQTWFRLFASMYNCTIDYINSKKVVLESGRINVAATRKICNKINVRKALKTTRDNLIKSTNPSIMTHIMDEAIALACSNYKTCLTNYIEGHIKKFDIKPWSMSKRRKIIVIEPGYFKGNSFCPTVFPQMKSSKPLTMIDKTVTLQYDSDTKKYILFVPRVTPKYSVNKEKNSCGIDPGLRDFLTVYSENETQSICPIETVVNTTKNEYKKIDKINEIIKTKPNLNSKRKKKLNRGLRKYHRRVTNKAKDMHYKVSHELVHTFDKIYMGKLNVKSILSKANTVLKSALKRKLATLSFYRFTQRLTHMGYKYGTEVVNVNEYLTTKTCSNCGKIKDLGANKIYECEFCEMHADRDENAAKNILKVGLKPWYKQK

SEQ ID NO: 2653 - protein, 489 aa, unidentified
  REGION 1..489: note = Table 20
MAKKKPPIKSPIFIPNKKLGISEWIPGINKNTIEIETNSWFDIQHFDNPNITNSKKYNKIIPVIPPESLKQQLKTIKLKKKNTEPEFLCCEKIRLYPSVEQVKILHEWFNVFAKMFNVTINYLRSKIYVNGKLNLKIAKKECSFYKVRKELIEEKTFIQLSMAENLIPIHILDEAINQAVSNHKTCIANYSTKLIKKFRVREWSMKKRRKILKIESSFFKDGIFCKKIFPKISSSKSLNGINRTVTLQYDRDTRKYILFVPKIIPKKIVKNTRLSCGIDPGVRTFATVYSRNQTQAICNSKCYNKYIKKHHRKIDKINQLTNSAKNDYNIVNTTIIKNGKLKTIVKIKDNKPSHLNRALKKYHKKIMNKMRDMHYKVAHELVHTYDNIYLGKFNTKSILSKNNTKISSPIKRIIASQSPYLFRQRLTYMAHKYGSNIHLVNEYLTTKTCSNCGQKNELGPSKIHKCSCGMIADRDENAAKNILKIGKQK

SEQ ID NO: 2654 - protein, 482 aa, unidentified
  REGION 1..482: note = Table 20
MVHNQDLSISNKTCGISDWLPSVRNKKTSDIKSNSWFDIRRCLNPNIKTKFVPVNNKQIVLKEPNCIYLKYDLITLNPSSDHIRILREWFSLYAKIYNYAINLIRKMFYVNNKLIKSRLQCEIYDEIIIRKLSNDKTKLIESLKLSDRPPEFLLDYAISHACTYCNSQVKKYLKDSKNPYNKKTLRFRLWSLHKSRRVMHILPPKLCDKNVCNGLFLKLNPSKNIHDIYMFCVMSWDRLTGKFFVYKPVLKRLINIPKKQFTRCGIDPGVRTFLTLYSSERTYDVCDSTFYNNKIKRMWRKIDRINFLLHNRKKRKKRKNDRRLRKSLAKYYRKIRQRIKDLHTKTAKYLVSRYKEIYIGIYDTSKNLSDPRISFYEKRRIATLNHELFLTKLQQVADRFGSSVFAINEHMTTKTCSKCGRINEIGSSKVHKCACGMYAGRDENAAKNILKKGIKEHYLSAQSDKNVTEYNNKKSNNTNKET

SEQ ID NO: 2655 - protein, 572 aa, unidentified
  REGION 1..572: note = Table 20
MLKVPLFPDKKQKLLLQLWFDDFTIIWNTTNSLLSKSLINKHPDDNNFNPSLYFDFDPADPNSFLSIKNNIIDQINKRKIRVKFKKNLLKLFQTKWTNIRLANKNKKYTKKNFSDMKIEKEQIINTYHEKFKDDMIHLNDENTEKYLNFISLRDNHLKKIKKEICLKNKIPDHVLAEAIDHNRSKYQSAISNFTEGNIDHFRIRPWKLNRRRRILIFEKDFFKGIIKEKTTYNDDENDSQTMKGIKDIIQELFKKYKPYKQKIVNKKDHNKLIMNIFDTIKEEYTNKEIEDTIRNKKLKKKSFAKTLKTFINREIKRIRKEQMNYYVRLCPKTLGNIRCSPMINEIESVDKTSTIIYDKIKKSYMLLIPVKKKIKEFLIKEEMLERTSKKCGADGGVTTFVTVYGEDQVSQLGKNPGNILKKYYRKIDYLNEKRCKMKGKKYDRKMIKAQDSIKNKIADMHWKIAREMCQEYDTIVLGKLSTINIVSKENDLPKIVKRILISLSHGNFRKILTLQGKKYGSEIRIVSEWKTTITCHRCKEENEVGKSRIYICEGCNLEIGRDINASINFYVK

SEQ ID NO: 2656 - protein, 417 aa, unidentified
  REGION 1..417: note = Table 20
MKKPPDKFWFPSLLQSAINVKSNSWFNISCKYNPNKVTTKKETFKSSYIKTMKFPIYPDDKQKIILDKYFMAVIKMYNITNKYISNFYDKNNYIESFIIIRKKLYNDAQTIINDSKINKHILDYSVKHCVDMYKSVISNLKNKNIKTFTIKDLSIDRNRYNLVLEPANFSSKINGFCVKELGEIKSQRSLIKLFTSNSILQYNRNSKRYYIISPFSYDFQYTSNRNQYCGIDMGIRTFATVYSNNKTEEIGTNLISKIDKYNKKMDKIKSDKDNNILTEIKYKKILNKYGNRMRNRIDDLHKKVSVYLCENYENIYLGKISTQNIILNNKSNLSDTNKRRMQVLSFYKFRERINIISKKYMSNVKLINEYMTSKMCHNCENIHKNLESKKIYNCEKCKIKIDRDINASINIYKKGFL

SEQ ID NO: 2657 - protein, 416 aa, unidentified
  REGION 1..416: note = Table 20
MNIKNYHWFKNKKRKNINTDGWFNLKSINNKGFNDYDNIEKPINKFLCCKTIEIYPNLEQKNIILKWMDLFINMYNHTNYFINNNIYDFTNRKIKSNVKEILNFRKLRDNYIKNKKNETCKDEINKHMLDEAINHCVSKHKSCITNYFSKNIKFFRIRNMKKNRRKKILIIEKGLFSKKKNGFCLTKLQEIKSSESIGVNKTSILQYDKHLNKFTLFIPIEKNTTNIENRTKCGIDPGIRTFLTCYSKKEILEIGENCYEKYKNNYKKIDKTRELFDKKEINKKQFTKSINHNFDKIRNLTKDLHFKVSSYLCKKFNIITIGKISTSSIVLNTNNLNKISKRCMLSLSHFKFREILEYQCNKYNTQLNIVDESYTTKTCSNCKELNNIGSSKKYQCKSCNFKCDRDINASINIYLK

SEQ ID NO: 2658 - protein, 420 aa, unidentified
  REGION 1..420: note = Table 20
MKKKKKEKWIPKLSDHYNEIETESWFDIREYQKNPNYHSSMVCFSDRIFIRAEKIILYPNKKQVNILQKWFNLSRKMYNKTTDFLNKKIFINKKISQINVKKYVNFRKLRSNYLKEAKESLCLNNINKHILDQSIARCVAMYKSSLTKIKKKQIKDFRVRKIKKDKRYKTLLIEGCLFSKVKNGFCISVLGEIPSNESLENISETCILSYDKYNSKYTLSVPKYIEPKEYETRNLICGIDPGVRTFLTVYSKEDVYQIGNDIDFNKYFYKIDRLNQICDSKESKQTRKYKRAIGKVYDKINNKVKDMHFKVAKFLCTRYKILKIGNLSTSKIVSNETSVLKESTKRLLYSLSHYKFREKLINQAEKYGVNIKIVSEYLTTKKCSKCEKKNEVGKNKIYKCGKCNLKVDRDINAAKNIRYV

SEQ ID NO: 2659 - protein, 430 aa, unidentified
  REGION 1..430: note = Table 20
MYKRQETINKIKILIKKYNNKVPLNDIPINNFIQTNSWFDIKESNQFDHINQFKFNKLVDNNKIIKCKKVILIPTIKQKKLLLGWLNSVRIMYNDTIRYIKYRYWNNMKTTTSFISLRKELRSKKLNLIKIYDTPTHILDSGIKLASISYKSAFTNCRNGNIKHFNIRYLKEKKDTHIMGIEQQYFSKNTICVRKLGKKLLNKSNISYDEINKDCKLHYCKLNNKFTLLVPVEQPKYERVENNDYISIDPGVRTFLTGLSNNNHFEICNNMYVESKKILKKIDKSEKYIKDNKKCKNRCRLLRNKLKNKITDLHWKSINYLINQNKNTIIIGKWSTKSCISRKGSLNKMLKRVCSSLRYYDFLQKLDYKSKCHNINLKIQDEAYTSKLCSVCGKINNKLGSSKVFKCTNCNLLYDRDMNSCRNILMRSFE

SEQ ID NO: 2660 - protein, 452 aa, unidentified
  REGION 1..452: note = Table 20
MKKKKKSKLLIDLQNIIKSNKQNINLPLLDDKLICNKTKIDNLNCNIYKWDNLITKNNNIQFEKLKDSSDTMIKTLKYKLLPSEEQKKVLINYCDAYIEMYNNVIKFIKDKRKEQTIQTNKHNLRYCDLTYNFNITELKKYFKNKKEQISNKYKANKHLLDYAINDCLIMLKSIKSNQKLGNIYHSKMRYLKKSKKIKIFKVEKQLCSLTSFCSSILGKELKVLPSLNYKEECQTVYTIQYNTTSNKFILLRRIKIEKENLEKQNNIIAIDPGVRDIINGISNNHIIEIGNNVDVNIKKEYKKIKKIEHLNKIKKINNSKKNKQIKKIKEKIKNYVTDIQWKIADYLTKKYDHIVIGNFSTSRLKKLNKSNELLNVMKDLNMYKLREKIKYKCLIKNKKYLKVNEAFTTQCCINCSTINNIGSSKVYKCSNCNKCYSRDIKSAGCIYLKSLK

SEQ ID NO: 2661 - protein, 458 aa, unidentified
  REGION 1..458: note = Table 20
MTKKKKKFKKKNIFYKKYHNNNYVSRLLKDNQYSDLSSYIFFHGDLFWKHNYNLPFKSQLSYSWFDFHKSIQINPANPIMPSDARFVDKTKFNAKKTETFIIHPNPLQKKILLTWIDAFTDMMNETIKFQKNRLFHKKQLILDSRKLRDHNLKTIKNKIIARTGVNSHVMDQAIKLICEMYDSSIANIRNHKRPFRIRYIKKNKNKRILKIEKNSISKDGKTFCSSVFGKFLDNRLSNVTSDFTIQYDKSKDRFMLFYTKNANKIKTNKKDQIGLDPGIRTFLTGYSNNHAIKIADNAYDRISDIHNKIDEIRGSNLSKRRKIKALEKRESKIENLVKDLHWKTAKYLTDNYGEIIIGNFSTKKMGEQEGMNKMVKRVGNSLSLYKFKQKLQYKCLLKNVKYKEVDENHTSKLCSNCGVEYKWNLQGKKIYDCNYCGLHMDRDINGAKNIMIKSIIRK

SEQ ID NO: 2662 - protein, 268 aa, unidentified
  REGION 1..268: note = Table 20
MRVIEIENCYFTNNSLCPKIFGTIEGYYKSSNKKINFEFNNIKQSCKLHYDKTIKQYSLYIPEKIITIKNNDIKDKNNIIGIDLGLRTFMTCLSNNEAINIGNTSKSVLKNLIKKQTYIKTNLKEKKIKMTNKIRKKLLKINKRIKGFIDEMHWKSIKFLTDNYKNILIGDLSTKGIVCNDKSILKGYNKNLAYALSFHKYRERLKYKCSIKNCNYIKVNEYYTSKTCSMCTNVHEKLGSSKIFKCSKCNLEIDRDINGCRNIILKCL

SEQ ID NO: 2663 - protein, 314 aa, unidentified
  REGION 1..314: note = Table 20
MTITDKNGKIKNVKVDRHLLDYAINDALNRYRSCQTNLKNGNIKHFRLRYLKLTKPNKIIKIEKLAFRENTFYQSVLGDTVKCLSKNFNYSENIKGVAILTKRKNDYYLLSKHNKGLKLNKYKDETIGIDLGTNPMATGYTDLGVVVIGKNMSKQIGKKIKTIDKINNLKGFLSEKKLRITNKKYKRIRDMVNDMQWKVANYLTKNYKNIFIGNLSTKKMGEGKIDKRVKRIGNLLSICRLKQKIKYKGEQRGCKYKEIDEAYTTQVCGKCSYQKKTIGSNKTYKCDSCKITMNRDLNSARIITMLGTQKTNKK

SEQ ID NO: 2664 - protein, 503 aa, unidentified
  REGION 1..503: note = Table 20
LDSIKKHSKNVPLYNIFFDNPNKLKTNSIFDMYSYSVSSSIINNYEFKNDLIFDDKKIIACKKIILEPSEIQRKKLLNMFEGYRIIYNKTIQFFKTRKFNHKQENKNTVLEKEKIIKKKKAKVSNTNIETDVIATMSKMLKDICKDEDKEKRLERVSELKQDNRIITDEKIIRTYFLKEEIKRISNEYKTPIHCLDYAVKLACSSYKSALTNLKNRNIKHFTLRYIKKTKSSFIIDIEKTAIKQNTIYPSFLGDVLKNRENIKYKNVFDSKIHYNVDTKQFTLLVPIEKEKDVLNNNDWICIDPGIRTFLNCKTNKGYIEIGKNLSYKLKSKIKLLDKQEKINKETLSNKLKEKIKNIKNYIKEKQCCIRKKIKNWIDDTHWKIIDYLTSSYKNIVIGKWSTKTIIRKDDSVLTSLTKRVAQNLSFYKFLQRLQYKCKIRENSLRIQDEWYTSKTCSVCGCKNENLGGSKIFNCNNCKINMDRDYNGARNILLKSLLSIKIVS

SEQ ID NO: 2665 - protein, 301 aa, unidentified
  REGION 1..301: note = Table 20
IIKTHIIDTAIKLACSNYKSALTNLKNGNIKHFRIRYWKYKRTNKTIEIESCYFKNGTICKLVFGMIKATYNNEIYNMKQIEEYNVSCKLQFNNGKYFLFIPIKIDQTENKNTKEFISIDPGIRTFMTGISENEIIKIGNNVMDKLKSYHNRIDETNKIEDEKHKHKKQKLYRRKIKNLVDELHWKTINILIKKYKNVLIGDMSVKGIVSNESSNLGKMIKRISYSLKFYEFRQRLENKCKINKIGYKCINEKFTSKLCSNCGWENKNLGSNKIFICKCCLKMIDRDVNGGRNIYIKSKLK

SEQ ID NO: 2666 - protein, 461 aa, unidentified
  REGION 1..461: note = Table 20
MQKDYKKRRKKFIDSFCSFLQKHTNKLPHTLNNKKHITHDSFSWFDINEFTTNKATDKNINFPSKFSNTYTKCKKIKMKLDRKQRIIINKWFDVHTDMYNSALKYIRDTSDLFKNHVIKSKLFNVDNNLINSFKLRDGLIKTRKELILKSQINTIDDDTKIHSHTLDYAVRQLVSNIKSAVTNLKKGNIKRFRLKFWKHSRPSKTMDIEKAYISGNKICHKILGDISYEYNNEEYIPENFTCGVKINYNSMTDEYLLLVPERGPVKETKKTKNIIVLDPGLRTFMTGLSESALYKIGTNITSTVKKSITRLNKIKENVHISKKIKKKNERIINRKITNKIDDMQWKTINFLTQNFKNILLGDMSAKSIVSKNKSVLDNETKVACLRMRFYDFRKRLEYKCNKTKTNYRLINECYTSKICSLCGNYNEKLEGEKIYKCSKCKKEMDRDMNGCRNIMIRSQMR

SEQ ID NO: 2667 - protein, 440 aa, unidentified
  REGION 1..440: note = Table 20
MQVLQDIIKKQSVKTFGKIRKTLPPQNVESQKTWFNILETNFATRQKNRINVSSQFEAKKDELIRCKQVNLTLNDEQREIMLQWMYAYVQMYNATIDFIKSAKPKTISWTHIRTNRLKTIKEEIRLKSQHPRFVKNTKIIAHSLDGAIKLACANYKSGLSNIRAKNISHFRIRKWRVSKKHLLIDIEQSYFRNNTLCPKIFGKIQLTYNNLPFETSRITSECKVLFNRVYNNFTLLVPESITAEKTKADCSIIALDPGLRTFMTGVSEKGSVAICGKKLAYDKIGKQLKRIDNAKKVCKSKKKQQKIGSACHRKIEGMITELHWKTAKYLTENYETILIGDLSAKGISSNGIQGGISDKSKRIAYALSFFKFRERLAFKCQQYGRNFTVVDEHFTSKLCSHCGDCKSNLGGDEVYNCAICHSSIGRDVNGARNILLRCMA

SEQ ID NO: 2668 - protein, 840 aa, unidentified
  REGION 1..840: note = Table 20
MIFLLYHVIFIYNYTLMNFRKTLQKCKEKLQNNIINQNDSIWMPLDVRVCDNYHFKTDSFNLIVKYDSEHLEHNNTFHFNNYEHLQAKIVNVFFDKVQKSIIKTWMKLYKYTYDTVIQIFSHVYNLCNIYYKINFYDARKILTNFISYNCKNNYKFNYFYKLNKHTIRKFYFYRNNKLCNKEIKILKKQFTKIKFNNIYNSDNYINLFKILKEYRSEYVKYVKFYSANPIHFLNKLHFTDFYNKLQDEYKQLFINLKCPIEEIILQEKNINIPIFKYDDYNPYMKKYTDFIKNRDNINNYEEHNKIYRLYVNYENKLINKQKRLLEIRSKLIYTKLSVIVKLIDNVINTFYKHIYKIIEEKLPQQVNNFVDQVKLYKTNEQFRNKKNAILQKYGYKTTINYKNTINEMRKSSVGKKIIINEKKLLYKDIIKTNHVSIFEPKYTNSLRNNTNVSRHTIDLAVEKACANYKTCLTNLKNRNIDNFNLREIKLRKMIIDIEPNEFSKEGIRKNILGTTTGFYNGILFDFTTINKATILKYNEKLNKYTLHVPYINKNLSEDEKKEKIKILEKKLKMTKKQKKRNKRRRKEKIKKRNNKNKKKETIKNIKKEIKRIKKNNMEKTGEGTISLDPGVRKYLTGYSSEKKKNIEIRENIKIKKNCYKIYETTKKYGLSSGKKKKVKKKEKKEKKEKKVKREIKVISEKEKEKVKRKLENRSKKVYRQMTDFHNKVIKYLTENYASILIGDMSLKGILNKKTSKLKKKTKYLCTRLRIGMLRTKLKKKCEEKNLKYKLVNEAYTSKTCTKCGTINENLKSKETFNCNECKIIIDRDLNGARNIHLASL

SEQ ID NO: 2669 - protein, 505 aa, unidentified
  REGION 1..505: note = Table 20
MVHLKFNKKKKKKKPFNPYHHPEYKKLSTSHALFSPSLWNPHDLPLSSVANDTDSWFDFVEYTDNFSVPIQDFSLFKNNSHDLYKHFFRNKFKNIHTRNKNYKTIIIPLSLTFFQQKIMLHWMYCCILMYNATVECIRKIKFNTGEYMYAFRTLRDKHLKHIKKYITSISRVEVDGIIYYIHAHTLNMTIKEVCNAYKGCMETYKYYILDKNGKYIKKIKPFRIKYRNFNNPLKYIAFEARTIAPDKMSFFASVFGPIIERRDGLDFRDIKREFLIQYNTKTNEFTMLSPQIIPPQKKENNEPMKYISLDAGLNVFLTGITNDKVVELGSNLIKVIMELLKKIDKIEKDNKPNKKRRKRRLEKKIKNLIEDMHWKIINYLVKNYKIIFLGELKIKNIISNTKELPEILKRITTTMSFYKFRERLKYKCKVNNVELHMVNEMYTSKTCGKCCKINEVEGRKYECKHIEGIKIKKYVVGRDINGAYCILLKGIYDTQISCIMGEKIK

SEQ ID NO: 2670 - protein, 657 aa, unidentified
  REGION 1..657: note = Table 20
MMRRFIPRTSDNEFIVLADNISTYSTHYVDISTIPAYSTNIKTNSWFTNLCSNYSLPYYEPSFNFSKCENVIPNRKTIKINMNLNNKQKLILDKWFYSSNLMYNQTIIFLRKHISYCSIQNYKSLHNLMPKYYENCKNMKNTKHILYKKQMLYSSVLVKLEKLYITDNKTKKEYSQIITLKKKISEINIQITKLNIELDTYSKKNIDLSKQYHNYVQLEKHINTFLSYEHIRTKYLKKIRDNIALKYSCYNDDRKYKIHTHSLDGAIKQACANYKTCITNLLDGNIKRFRVRCRNSDNQKKLVEIDSESFNGSENNYCICKKILGNIDYTYNNNKYTLSTKQTSTIYFDGSKYTFLIPIHIEKPFATVRKPYTALDGGVRDFLTGFDNNSLKNYGHNVANVLYKYFNKIDKLKSVSYMGDYTNLLNYKNKLMSKKNYLEDVYICDKLEEIEEQLKYKSTSIEKIIENCKRIIKNNEKLINVSNDKNKIIKLYASINFNKYRIEKLSKMNEKEREKYTKYINYKKANKVQFLNKKIKWKIDELHWKIARELCENYEMIILGKLDTQSILKNKDLNKGTKRVLQSLSHYKFRERLVYKALSLGCKIIVQNEKYTTKTCTLCGHYNEWVTTEHTIDCKGCKKTYNRDNNGARNIFLKSLA

SEQ ID NO: 2671 - protein, 573 aa, unidentified
  REGION 1..573: note = Table 20
MYYSMNKIRKKKKKKFYNNDDFEKEKLSLHDQVLLHHDKLLLPSYFVRLKSIKTDSCFDLLSYTQTDNNLICNDVQFNITPPEFKPLIRTIKIDMLLNQSQQLIFHTWFDATMLMYNKTIEYIKKNFNIESLHEIKRINKLCYALNDKLTHLYKDVSNLIKNKKKLLTKLKNKYNKKKKTSIDLITINILMKDIIDHKNKITCLNILIHNLNSDYNKYNLRRNKLDKHIDHIFDHTHTRTYVLKSTTEDILLNSQTKLFNYDTKIKTHMLNAAVKQASAAFKSAKENFLNGHNKKFRVRYWRPNRINKIIEIGAEYILEIEKDSEEYNLCPHIFGPIKYRYDGEEYKLEKKTVKIHYEGSTGRFRLLVPEDLEAKKRCKNGKYIGIDAGIRTPFTGISNNELIKIGKKLVEMIRMRLIMMDNIMNNPDIPERSKYNKIEKYTRIIKDRVVEMHWKVINYLTENYDIIIIGKLEMSKILRSKKIDKMTKRIGSALNHYKFLERLIYKAKTKGVEVEVVNESFTTKTCSNCGHYKEELEGEEVYNCDEYGCLKKIDRDVNGSRNIMIKRIKKEEI

SEQ ID NO: 2672 - protein, 560 aa, unidentified
  REGION 1..560: note = Table 20
MKNQIFIKYKKKFINHLKLVLDFQFKINKYLGVIPNNLIIIKNINQKYFKIVNKLLTNNLVINDIILPSLVNIYLKDLTIKPFWTDKIKKISDKLFLPEYGNLCPIFGEKNIPKQLNKNNWFETEVLTGNYNYFKIKKKKTDQNVNPIIKCRKIKLFFSKQQREYFSQIIGTYRYFYNRTVAYFNNYDKKLKISWFYLDKPNIESKIIINIDDKNPFNFISMRSLLKKDLPDWILPNYPSHLIDQAINECFDRFNTCLNNYKKTKKKFSLKFKSKKQTVQTINLEKIMINKKTNSIFNNWKLGDRYIFRNLKTSENFNKYEIKGSSISLHKILKKYTLNLNYETESTINKSRKICSIDPGIRNFLTVYSQTKVLEIGRNTTEKIYKICKEIDIIQSRMNRKYIYKKNALTDEKKYVWMDSKKRKSLRKALHRKIEYLKNLKDDLHNKSVKYFCSNYHKIIYPPFESQKMVSNLKGKIARMMYNLSFYKFKQKLISKGKETNTQIIIKPEFFTSKTCGKCGKINFDLKKSDEIFNCSFCKLKIGRDINGARNILLRNFDCV

SEQ ID NO: 2673 - protein, 612 aa, unidentified
  REGION 1..612: note = Table 20
MVKKKKKSIEIIKKEIILLENNTNKNIEEKQSYLNLIKQILEYQIHNKLNIQKLLKILKPNNQTIIYWIYKYSKNNNVYKKIVKNYHNYFTKSDINDIKYEIFIYYIKNQTAKLYWNDNIKKISDTIFLPIKKNFKESKIPKILNDTWFNCNVIKSTQQNTKKIECIKERIHKPMIKKSIKIKLFLNKDQQKCIKDFFNCFRYFYNRAISYIINYNKKNQNTFIFTEPFNETTKINIDLQNEKNKFSYITMRKYIKNNKPKWMFSNMPSHMIDLAFKEASDNYLKCIKMYNTKNKKFKLHFKNNKKIQTMFIEKTAFSIKNNNISIYKNYKNPYKIYTKNKKHKNFVFRDLKISEKIHKYDICDSTISYNKYTNEYYLNLTYNYNINKEKNKIKKEEKTKKILKTKKVVSNDPGDRTFATLYSDNKVIEIGNETKNIIYKLCKEIDILTSIISKKYYTKKMKDKTIKKYTLTNKRKKRLKRALHLKYKKLKNKKVELHNKTVNYLITNYSRIIHPPFETSKMVSNLHSKVARSMNTLSFYEFKIKLRRKCEEYNIELIEEDEHYTSKTCCNCGKLNNKLGNKKIFECLNCKMIMKRDIVGSRGIMLKNNIWN

SEQ ID NO: 2674 - protein, 543 aa, unidentified
  REGION 1..543: note = Table 20
MKKKKKKLSDFEDKPQLPLNQDLQYIYNYNNFIKKFTYISFNYRYKNDIEYLSAKKFISFFIDKNCIPFWNDNVAKMSAEIFLPHDENIEENKFLNFKFNKNKWFQSQFYNSKSETNKNISYKSNIYENNKNITKTRKIQFYPNKIQKSILKELFGIYRYYYNRTIQFMNNYNSKNKTSSYLVYINDNKSKKEFIDLPQNIYNMYKLRNYIKINEPKWINKIKLPSHEIDKAIKEAVDNIKTNFKKREKTGKNFIMKFKTKKDIYHTINIEKQTISKSNTIFSGIKIDNNYIFKKGIRLKEDVSKYNYGDSNISRDVKSNKYFLNLSYNEENIGRDINKYETCGIDPGIKNFITIYDESSVANIGIRCENKINKICKEIDIIRSHINKKKFINKNKELKMNANRRRNLRKAIRRKELYLKNVIDELHKQIIKYLTERYSRIIISPFESQKLDKILSRKQTRILKCLSHYKFKERLIIKAKEKNVKIDIREEYYTSITCTKCGNINYDLGNNDIYKCTDVRCKISLGRDYNGARNILLRNINNI

SEQ ID NO: 2675 - protein, 359 aa, unidentified
  REGION 1..359: note = Table 20
MNYKSLKLEVFKQLYGTNKKPCPYDMLTDEVRIFCSNLKSCQSNLANGHIKHYTMKRRNTNYSQSILIPKNSITKTGIFPSFLGDIKGFKLDSEYANCDSRLLIDKIHKKYTLCIPQYQKKFFEKQTEKIINNIECKQIYDKEINEIGAIDLGERIPFTIYSENHYVKIGEDIRKNILDYQMRIRQMQRALSKNINKKNKRLTNKKKLKVKIRLTYRHIKNLVKELHNQTANYLVKNYKKILIPEFKTQEMIKNINLTDNKQKARVNKLDKRVKFVLLMLSHYRFRQHLTNKCVEYGCQIDVVTEEHTSMCCTKCGSLSKKYNGREKHCDNCGYKINRDVNGARNILLKNAKQHIKLRL

SEQ ID NO: 2676 - protein, 324 aa, unidentified
  REGION 1..324: note = Table 20
TNLERGHIKKFKMNFKSCRNSQSIFIPKKAVKKNSFYQTHMKKIRGLNLNLDKITCDCRLFYDRTTKKYIFSTPIYEKVYRPKDREKVVALDPGEKIFMSYYGLNDFGQIGINMRDKFLKYEGSIKRYQRILGSKKKKDDKTPQKIPKNKEGKPLRNRNKIRRMIRKRYARIRNMTKDLHNKTALFLCTNYERILIPEFKTQNMLNTKVEKEKVKEAFSKGNKVGKKALKNYSKINRLAKRVKFVLNSLSHYKFRQHLLNKAQEYGCEVTIVTEEYTSKTCTKCGKISDTYKEREKNCKCGYKIDRDINGSRNILLKNLNQVIN

SEQ ID NO: 2677 - protein, 518 aa, unidentified
  REGION 1..518: note = Table 20
MNDKLNHVLKFDKAQECKWYNNKTIDNSIHLWYPNNIKFTKNNKYSNKNYNIENCININQSKIKFNIKNVASSYEDSLNEINKKYNLKLSKLEQNYINDKDKLNIQIKTLNTKKEKEIHSINKVLHTKPYVLQLNNNQTNTIFNWFFECDRVYNRVIYMFNNKDPNFVMDYRKLKLVIFNDLYPDKKPVPYDILTDEVRIALSNIKSCMTNLKNKNINNFNINYRSFNLSNRRSILIPYKSITNKGIYSTILNKISNFDKLLKYIEDIKNIKSDCRLVYDKITKKFILYMPIYKNKRNIKNRNEIVALDPGEKIFQTYYSSNECGKIGENIRLIILKYQHKIKKYQRILKKNTNKNKKKLKNKITIKKKIRKYYQKIKNIVKDLHHKTAKYLCEKYDNIIIPKFETSKMIKNKNTNINKDEMKRISKMNKLNKKVKFVLSNLSHFKFRQYLSYKCVEYDCQLLEVTEEYTSKCCSRCGFLSDNYEKREKICPYCNLKIDRDINGSRNILLKTLNEIGR

SEQ ID NO: 2678 - protein, 725 aa, unidentified
  REGION 1..725: note = Table 20
MKKKKKKKNDFLDSQINNDNKIEYNLKTKKVIKNITNKNKLLNKLKNVKQKNVINESNIIINESDIIINESDIINESDIINNNTKKIRKKRSTNKKFDNSDISEKKLTKKEIIELEKIEQEKNNINNHIPPWESDDIKIYRNILHFPNSNIPEIINPINCNLFDSYVNKQSNNDFNNFLINNNYNFKELNNKDIEIQKINVERNEHINNIFNKYTKINENLTDAKNQDIKDIQEKYKKYKQNKKIIEGKNKINEIENDYVKKHSDNENIKNKTIKNANKLYDDKIKCVRGSIKSYKYRIIFSEEQKKIVLNWINICDNFYNFCVLRHKEQKVKGYINKNDPKSYNLDKDPHSIKTKVFEDYFNVYLKNNYKKFNHIKFKPLNVKNISDYHKDYQIDDILENKPLPYDMITDVLSEFSRNLKSNYTKVKQDPNFRFNMGPKDHYRTYKTIFVPKKSIGLNGLFFNYLGKIKKYNKNLIKVINENKINHDCKLSYDSLLDKFYLHVPQYVEHKKRTENKEKYVAIDPGEKVFSSFYAENSYGHLGINMREKILSLKNKIERIERILSKNKNKKNKKIRCKKKLRKKKHKLEEKIKNMVKEVHNKISLYLCKNYENIILPSFETSKMLRGKLNKKVKTVLQRQSHYKFKEHIKAKSEEYGSQIYIVTEEYTSQSCGICGKLSKNYKNRIKKCSFCKTKIDRDINGSRNILIKNMFNILCGAPRPQASY

SEQ ID NO: 2679 - protein, 540 aa, unidentified
  REGION 1..540: note = Table 20
MTQYFYNKDIADSLWLPKLNQYKETNFDDFKCENIYISHTIIKDPTVNISKFDFIKYAIKDTTIDCKKLYDKTHKEELKLHNRYEDKINKIQHDMMINKTDRIDEMKKIINKYYKDRAKRRDKYNYKLYNIRLMKVMVTRKFKLNVTQEQKELILYWMDKSIDVYNYLIKFSQDKHNDIDWNFITFRNKIMGTMPKNIYGNTPIRIVADTIHEFINNRNTNCKNVMNKKITHFDLKMKNKYKLKHFTITIQNQRMTQTGLYPSLNNLSNKNTHINFNNIKHDCKLTYDKVKKSFYLYVPQYNEYKYTPYKNNVISLDPGEKTFMTGYGLNHVIKIGNDIRFKILKIEKIIEKMKREIKKYDGANKKDRRRRNHFRRVINKNYIKMRNFTDELHWKTANYLCRNYENIIIPNTSIQSIVKNNKIKIKNDQPIDQIKNQLKQWTRTNKLNKRVKFVLLNLRHYLFRQRLLAKGKEHGCRIIEVDESYTSMTCGFCGVQKKQSGRIHKCPECKMEIDRDANGARNILMKNIKMVINIKDVSPV

SEQ ID NO: 2680 - protein, 545 aa, unidentified
  REGION 1..545: note = Table 20
MAKTTNGKFWNDECEKVSDLLWKPNLIVNHKPQERINFKCDNKYITFNYYSNNVPINDQLKFKDIPQSNNTDKKNKLMDKLLKIEDSRYKKDIESNKTRKIKLTKEQLTAKHNTQLLKIQNKISQLDGFIRSRRIQLLPNDFQKNIFNIWFNETTVIYNRLLTEFTQYYIKFKEIASDNKELVKLLRTNEEFPLSLQKLRNLKIHDIINIYLEDQLIHKLETPFCVIANTIKEFVANVKGNLTKLAENKIDKFTFKHKNFNGKIRTISIDSKYASENSFYPDKLGKLLQTYEDLKGFSWKNVKHDFKIVYDKYNNKYYAHIPKYVYRNLNILNKKPITVMDPGERTFQTLYGLDHVISIGDNLRETISKRLLRIDNLKSKLDTPGSKKHNLKLNRKTRVRKCRYKKAIDRHHKKIEHLQRELHYKTAIYLCENYQRIMVTDFSSKKVSSKDGDLDAMSKRILGKISHYRFRQRLQQKCEEFNCQYLEVNEAWTSKTCCNCGYIHAKLGTSKIYDCPKCKQKRDRDVNGAINILLKNRKLVLMEDQ

SEQ ID NO: 2681 - protein, 508 aa, unidentified
  REGION 1..508: note = Table 20
MLEADLTTREQDFAPYWSDCSKEISGGLWLPTRTGLPVSDLTSFNGSSPNLGLYWKAWSSPTQTQERTWSPTSWRFSQSLQPVTTGKESIVTGRRYRIYPDSVQKALFRKCFGAHRYFYNRAVAEINRRYKNRKAEFHKMEHCVLCNNDRLEGSFCCEKHKGTKLPWKLDVTLASLRSAVMVSDKDAKGTTMAWQMEVPYDTRQLAIKDAIAAYKACTTNLTRGNIDGFQLNYKRKSSRQICWVNDTAIVRKNGDVKIFQQRLKQNASLKFKSKDRKKVPKKFDSDAKILYDRGAYYLVTTESAKKEEHKNRKPIVALDPGVRTFQTGYSPTGEVFKAGEGRIQRMKLLHSKIDLLRSVRTRIQKPTTRHRINKRLEKIERALYGLVDDLHNHTASALVKSYDTILLPTFGTSEMLVTDDIASGVKRRMAGLSHYRFQQKLKHQCEKHGATLYLVGEEYTTQACGCCGRLKKVAGSKIYTCDNCGYTMDRDVHGARNILIKTCSTFGR

SEQ ID NO: 2682 - protein, 435 aa, unidentified
  REGION 1..435: note = Table 20
MDEEDIIVTRKIRIYPSKKQKLFFNKCFGTTRFIYNKVVEFINQKYYEKKEEINKLKNNGCIKFIKNNQCCKSLSDNHSYFCNNHKKSKINYDFKLNLPYLRKQVLVNDKDLPTDMLWLKEIPYDTRQLVIKDFIGAYKAAITNLKKGNHEYFSMKYKSRKNPSQIFHINKRAIKPNLFLFKKRKIGRLRTRKRMKKWIEKNINGIIHDCKIIRYKPNQYYLLLSKNQKNISMKASCKSVSLDPGIRTFQTFYSPDGVAGKLGKNIFKKHLYKYAKKIDILDTIKSKCKKRKTKMNISKRQFLLRTKIKNVVNDYHWKIAHFLCTNFETIIIPDFKVKKMTLKRKRNITNNITRKMLTLSHYGFKKKLEHKCKIYKRRLIVTSEAYTSKTCGVCGNVDKNLGSKKILKCHKCNIEIDRDYNGARNILLRVCSHIK

SEQ ID NO: 2683 - protein, 634 aa, unidentified
  REGION 1..634: note = Table 20
MSVRKKRKPSSKSLTKLLEDGLTITKSKLKSLPVDIDDSLSHLTIKKKSSIVASHLPNKKMILKNKSNSCKKNIQTTKSSPILEVESTSKGKTFSPFYNKSSKEMFQKLWLPPMIDSSDLTMNSLTGFSNNLGVNSFLSTSKQKNLLNKNYLKTLSRLSQSSQQNTMEKQNIILTRKIRIFPCVEHINFFNKCFGATRYIYNKTLDAIKKMYKKNSKILRTKAKKGCIHQISKNKSGSKTTKNKNQCGGKLYNKYFCKKHKHIKPKLDLPLGFQFWRNKMIKKNNNLSESEKWLSEIPYDTRQLVIKNILANHKSAITNLKNGNIKTFDIKYKSRKNKNQFLFVDYRALKPDGKLWNRTVKTPLGMRKGEKRWFDNYMKEYELKKFGDDKGDKERKDMIITREYPGMYYLHIPYTKTIEKKPIQESIISIDPGIRTFHTFYDPEGKCGKIGDNLTNHIIKLYEKIDKIQSKITKTNTKNNDLGYKKNKLCRQNMRKKCAWLRTKIKNTIRDYHWKTASFYCKSYGHVIIPKLDTDSLKKKIKKDYGLSKGSPMIRRIMALSHNEFINKLIHKSKEYNTNVLIVDEAYTSVTCGNCGIKHGKLGSNKIYKCVHCKKKIDRDINGARNILIKTLSK

SEQ ID NO: 2684 - protein, 464 aa, unidentified
  REGION 1..464: note = Table 20
MKFNIHKYYQSILNGDIESIFTKRNNEVKDPVCDYKFNNYTKLLSLTTHDEISGIKRNETVEDSVVYETKPLTSPTISVFGKLELDATGFTADDVQCARKIRIYPTETEKSKINKLFSISNAFYNLAIEGIENKTININNKTDIRRKCRVNDDVCNTVHVDAKMAYFDTRSLAAMMAVSNHKAMLTNHQNGNIKHFKLSNKHSTQIVYFSPKDAKLRDDHLCIRDMKLRIRNRDLPWLVEQGINQQISIKRYNRKYYVVVPFKRRSLDNHAKGICAIDPGNRTFATYYSPDEIGKLGVNLIEKVRKINVKIDHLNYIKDTVKLVSRTRHGLKQRIAKLSDKITRLVDYAGWKFAAYLTRRFRVIFVPRLANVVKGGRNSTVNRETRNLRHSEFINKLTHLGKINGCKVVETKEYYTTKTCCRCGIRNDDVGSSKVFSCVNAACKFTIDRDVNGAKNIWLRSLTN

SEQ ID NO: 2685 - protein, 634 aa, unidentified
  REGION 1..634: note = Table 20
MSNKPTPFWNDTCTRVTALLWAPDGRSANPEGLPVVRAVAGKARGNERAERKEARKKRRKKREKAKADRAARLEMGRAIFEPDPECLEKFEEGFAAEVRTAKKLDSRKRGKEKLGRRCQKLRIFPTPEQEAVLTDWFEAVRTIKNVVIQHVNETHAYGMRQLRGAAGLVKGKSFMQHLPRRLHGIPRATVDQAVRDCEKDCKSRLAQRRAAIGREVWRDCFRAVRKRKAEELDKAERTAACRLISERSAADAKTWKFAFNGKRDLRETLVLSNRPLNQASSAFTTLLGNPSNRTVMRTAEDIDGRTSALPDVFLSDCRLIHEKTIGEYYLCIPTARPIRTVQEHEMPIVVSIDPGVKTFATVYDPVAGTITEHGKSGPGQAFGLAGRTTENAKKASRRTWGVGASVTFLKRKADRIAAMAAEDLRNADAAREAAESEMKGTEEHRAAVQERRRCARRAQRKRRAAARVRKRSRDLVAAMHWRTAIELCQKADVILLPDFRPSRKVPRNDPTGKLRRIGKVTVTRMLGQAHATFRDRLVSKAEEYGVRVEKVREDFTSVTCGSCGKINRKLGADRVFKCPHCGWEVGRDANGARNVFLRYIADNGLCVSPNKKNQQHPRKGQLAPVPCPATTGKK

SEQ ID NO: 2686 - protein, 478 aa, unidentified
  REGION 1..478: note = Table 20
MNYISMRLFNEQGNLKVDLQRLRKVSEAEKFTRSETGFWNQNCSVIKDKYIDNLTLTNHDNPENVIVSRKILIKPNYLQRKLLMECFHAYRYVYNQAIELIFRILDLSEKTGCKIMPSTIKTAVYKYVKITDDIVPDFVLPLPADSRKEALREAVKNYSTCITHMRRGICKKFLLKHKRRDAMTFRIKTNAIKLEKNKLVIFRDRIIERIRDVAVEREGKCTAKSIKKYNHLRYADIDKGNRSRLSPYLDENGNPTSYPIITYSHGKYYLIVSGTREAEITKDKKEICAIDPGVVNFHTIYDRETTYIEGHKLYETKLQSINQRIDKLVRAKQYVTGAKLKRMRLRELKLRAKVSNIVYDFRHKLASTLCNKYKVILLPKLGIKQVAKHLRRTVNRKLYALSHYKFNELIKQIAQRTGTTVIHCLESYTSKTCGNCGNLQSVDDDRIFRCALCQYVCGRDENACKNILIRTLNNYLLS

SEQ ID NO: 2687 - protein, 305 aa, unidentified
  REGION 1..305: note = Table 20
MAIVEAVAAYKACQTKKKNKLLRSYTLKHRTKKNLSQHIRLDKRTIQLHKNKLCIMPDKCGDKITLSKDQLKQVKSAFNKNNPNHDIIITKQANKWYICVLIKNNKIETVKKDSLVALDPGGRTFQTYFSQNELGKFGDGFYENNIKPINERIDKLNAILPKLRGLRKRKLRNRVQQLRTKIVNKVSDLHNKVINYLTTNFTTILLPKFSAKQIATRSGRSINRMLHSLGHYKFSDKLEERCKLRNCEVIRCLESYTSQVCSSCGSMYKPFASHVYKCVGCQDNKDRDINAAKNIYLRSLTMLTK

SEQ ID NO: 2688 - protein, 835 aa, unidentified
  REGION 1..835: note = Table 20
MSLLRSATVLETTLLDLLPDLQACMPQTLEEDVNISDLLAVLSTILAHILRGDVSEHRPLVDRLAPGRLLMLERLLGTVYTDELSRGGALQDGEGFRSWFTVRKRTPEQPINHERHLRAQETTELTALQRNLTKERAERQEHSAWSTDAEKDYEREMEEIKLRNKALLDVKKLLLQRTRKYRLFPTRSRQKTLRQFMGTCRWTYNQAVAHYRKTNDFNAINLTAHYVTKNTRETLAYPEGMGRPPEWAHDTPASIRGNVMLKVDALKEISSEIDILYSNGVWYVAIPETVEPDPYKYRKSYIALDPGMKAFMTGVDLEGNVLEFRRGNKTRLEAVRDHLDAAQSAMATFKNQKGKSKRWQYRTYVRAKRTFLSCTVKMKNLVKDLHYKTCTYLIEHYDVILLAIFKTKDMVKKSSARTHGFNMSILSLNHFKFRQLLQAKCEVRCKSTVVCSEMYTRRTCGQCYRLYVNLDSNDVFASPHCDYRAGRDANAALNIMRYVIDAIPESDPFAIEMVLSPLSSWQEALLHLQAASAEAWQPTPLPYAASSALAVALQFLLVIVALTWLASVATLNYSHTDRLWSVTPFLFAWHFAYHAYLADSGVWDARLVLMAALTTLWGARLSFNFWRKGGYKLSEEDYRWAVLRQHMHWTLFQLFNAVFIAGYQHLLLLLLVLPSYAAYLHRDEELNAMDGAATALFLVLLALETAADQQQWTFYQEKYALLATKQPLSGDFKAGFNRSGLFRYSRHPNFFAEFSLWWAFYLFSVAASNAAFNPSSVGAILLTLLFQGSTAFTEYITVSKYPLYKQYQRRVSALIPWFPSSAALAESDDSKSHQE

SEQ ID NO: 2689 - protein, 458 aa, unidentified
  REGION 1..458: note = Table 20
MRATQVKETTALTIRRWKMAKERTEHREQGVWSSDNEQDYKQEMKEFEQRNSALLKKKLLLRRTRKYRLFPTRSQQKTLRKFMGTCRWTYNQAVAHFRATNESNALSLTTLYVTKTSKMTRTYPDGMGSPPEWAFETPSSMRSNIMRALQTNVKSAFSNLKSGNIKQFNIQFSSKKKSPNFTFSENGRSAKIEQKQSAFCLSVSKLKDIRVKMDRPVDITSESDIMYSNGFWYVAIPELVEPDPYEYRGTCIALDPGTKAFMTGVDLEGNVLEFGRDNKTRLNAIRKRQDAAQSLMAKFKNQKTKSKRWQYRSYVRAKRTFMSCTAKLKNCVKELHYKTCAYLTKNYDAILLPIFKTKEMVKKSSTRNHGFNKSMLSLNHYQFRQLLLAKCEVKGKAVVVCSEMYTSQTCGRCYRLHAKLGSSDVFTCPHCSYSVGRDVNAALNILCYVCAGSLQVYH

SEQ ID NO: 2690 - protein, 1006 aa, unidentified
  REGION 1..1006: note = Table 20
MFIAHVQEIVELIFSFLEESDRKRSEQVSLTFHEACNAVEEREMVWRLQFEEKALHNSIHKGLCHDDSKHSYAHHVELIMKQLDDFEKKQLNFKIPFHVRMYMKHSKIYPSNDAIPYIPKLNNAILHPFMCIFKISQWQVRDRDCVVIGEYQTRKIDKYLVLLKNSGGKGVLEVERHFELEYHHLDSENFVSQLILQVSRMETFVVGSLTRWLSNFGYLKDQNKCSVVTQLKTSYPNALIYDEDILSDNPKFCLEYFVANFKQGYVYMYFYNLLKERQYRALLKHKIITLEDLPAHIRNDEKVISFSVATNGINLKHLTRAHHNDRDLVLEAVKENGLALAFASKTLKNLDPFIFSQANQNNQLVQYFSDRVGEETKLGVKPTTLGIAENDDFIDQFKENLQRGIYGWGIEHLTQFQRDIIQSICDQKNRNILIEGPCASGKTIASIIGVLNKGLDDSSTAPPDQVQCLIICPTKEMVYQIQLFFTSLCEYMSDISIGNSTCGWTTFYSAEFAKSYRVLIGTPGRIAHKSKYYLELSHVKTVIFEGSDQLLAGEFGNELNLIFKKLSNNCQSILISSLFSPKLIMRIAKIFTNENFKVLRVPLLPSNQPHKYQFLELTNEEEKWTLIKEIIQDHSNMLTMVFCNSRRKAEMLCEELNNVGFCCNVLHGDIDCQQRELILNDFRKGAFRPVFDVPPNIHHSITENVAFDNSKKPPQLKKAKKNQKTPQKLQADKSMKIHLYPNEQERTTLNQWMGTARWIYNKRLEFTHNFKDVKKNKKNFRTFVVNNDNYQTENQGENQAPQHSGQVVALDPGVRTFQTTFDLNGYSTKWGSGGAERIGRLCCAYDKLQSKWSQPEVRHCKRYKYKRAGRRIQQKIRNIVDDLHKKLCLWLCRNYQVILLPSFETQKMVKKLHRRINSKTARKMLTWSHYRFKQRLLHKAREYPWTHIYIVNEAYTSKTCSCCGHIHTVGSSEVFRCPSCGSIFDRDINAARNILLRFLTTHRISF

SEQ ID NO: 2691 - protein, 495 aa, unidentified; identical to SEQ ID NO: 642
  REGION 1..495: note = Table 20

SEQ ID NO: 2692 - protein, 447 aa, unidentified
  REGION 1..447: note = Table 20
MAMSMKLWLPIKTDCVDSDLSSSNGSSRKQTQNSWFSTDHLNAQTAPLNLLKTSCLLQTCLLQETTECDQRKTEKIGGTRKIKLYPTQQQKRKLRMAFGAARWTYNKCLERIKKAECKVNVKELRKLCVNNDNLNDKWLLDTPYDIRDEALRDLYKSYQVNFKSGKPFKKQFRSKKDGFQTIVIHKKHWVHKRGWYGDLTANLKSSEPLPKTLYTDSRLQMTSLNEFFLVIQTPPQYDNQVREDIVALDPGVRTFQTCYSPSGQLTEWGNGDMKNVMRLLMTHDKLQSLCTKVNHRKRYKLHKAMKRIQKAVKCRVDDIHRKCIKWLLENHGLILIPVFGVKKIASSKWLRKGTRRALYAWSHFLFRQRLLDKAKSYKKCRVLVVDESYTSRTCTQCGCVNVKYSSKTLLCARCGLFIDRDINGARNVFLKFLTEQGLTASALWPTT

SEQ ID NO: 2693 - protein, 457 aa, unidentified
  REGION 1..457: note = Table 20
MPIFAAKKRQATLKKKLVLQQGDELKKESLNIPSWAPFKLIDHGQAANDQVLIPQKPEVPGDALKDHWTPKTVRIYPTSKQKEILHLWLTATRHMYNLAVAERIRLGKEAKENGTKVKMKLKHLREVMPLKKNFDYERDPKLTYLKNVPFLIKDNGLRDFDKDYRTNLAKSKNTLRPFKIHFKKIKDKQSMTVEKKVWGLSRGIYHDVFRKGAFRSTEPLPEQLPHDSRLIREHGKWFLVIPYETSGLMPKKEAINAVAVDPGVRTFLTTYDSSQRVLEIGEDGYLKLQHLDRRLRSLQSEIHKLRSKGIVLSKEDRKRKIRNRRTVISRLYQRKKNLANDVHRKASHLLASKYNYILIPVLNFHNFKKTNRRVKANLANMKHCLFVQRLKNKASHFENTTVIEVDEEFTTKTCSLCGVRSNIGASKVFKCDNCDATFDRDHNAAKNILLKYLGEID

SEQ ID NO: 2694 - protein, 327 aa, unidentified
  REGION 1..327: note = Table 20
MRDKVINNKNFIIENTWMNEYDYDLRDEALRDLLHNIKTNMEKGDKFEIKYKTKKMEKVKNESLSVLAKKWGKKNTFYSSIFNSHVLKSSEIIPKELNYTSRLVKTPTNKYFLTIPKPLEIVSENQARNKMLFIDPGVKTFITGYDPSGKIVTIGEKDIGRIARLLHYKRKLQRKLKLEKNHSNKYNKRKAFLKMNEKITNLVEDMHKKTSAWLCKNYEHIFISRLNFHNCKKLNKRSKEKMASLRHCSFVDRLKYKSRETKSYVYEINEAYTSKTCSNCGNIKEDLKNKDTYECKKCNIMIGRDINASKNIMLRYFTKRAILVHPK

SEQ ID NO: 2695 - protein, 294 aa, unidentified
  REGION 1..294: note = Table 20
MAKYKSTGVPFKLKFKTRKARTQNLSVLKRFWNNKRSFYCDVFSSSKMRSAERLPEQLIMDSRLQRTRHNKNYPIVPIVGEEITRKEGREKFIFIDPGVRTFLTGYDSGQNVVEIGKNAVVRIEKLKHRRRKLQSKLAKLKRQKKRQNHRKALHRLDEKISRIVKDMHKKSALFLCNSYDNVFIPKLNFHHCTKLNRKSRSSMATLAHCSFNERVAMKAEQFRSTSAVVVEEDYTSKTCSKCGNVKQDLGSSKIYSCVQCFSVFDRDFNAAKNIMLTYCSEHLMASGASSILLL

SEQ ID NO: 2696 - protein, 446 aa, unidentified
  REGION 1..446: note = Table 20
YCATGNSSPQDPTTAALSLTPLLKQLQSSTTAFMYLCVDEATTEKRTLANILYKGEDGEGFEGEYADEFCVYVLEVENGDLSAARKWLIDNAPKNDDIKNYQCIKDNCLKNDYIKSYSELNWLLDTPYEIRSYAIRQYKSSYKTCKERYGNKFRMKFRSKKDTLQTLLVSARDINRLNGVCSFLKNIVVSESLPAIEKTLAVTLDKLGRFHFHVSIPLEVRENQTPVSGRIVALDPGVMTCYDPAGRVIEWGRGDFNRIVRLCKRHDKLQSDLYIKTGKEYKITRYLLRRKMCRIRFKIRNLIDELHYKLVKWLCDRYQTILIPTFETSNMVKRTRRKIGSKTARNMLTWSHYRFRMFLKHKACEYFDRNIIECDEVYTSQTCGNCGWVNKNLRGRKRLICVSCEINTDRDFNGAQSDVCLSLFTNVGFNFKGPSDIEELTANEVE

SEQ ID NO: 2697 - protein, 324 aa, unidentified
  REGION 1..324: note = Table 20
MIEFEFLKKNRETTRNLTRSLWLPTDENFFMSQKNDHCKCEFTETSGGSWFTVNAHLSDCGSLRKYFRIRMYPTPDEAKVLSLWLNGARWTYNRVVEMHQHDGFRSFKTIKNFSLKNDYIKQYPEIYWLLKVPYELESGEKRKDFKMHFRSRKRDHVQSMMVLGRDFNREKGAYAFLKNIVYAEKLPKVNNSVVITLDKAGRFHIHVSVPLEDRENQARISGTIVALDPGMRTFMTCHDPRGRVVEWGNRDFARIVRLNKKLDKMQGELKKNLNVSEPGIDCARRWRDSGTRFATLSMSCIVSSRDGCANVTRPSSFPSLRRAR

SEQ ID NO: 2698 - protein, 153 aa, unidentified
  REGION 1..153: note = Table 20
MLSGNTNQRIKLARKDTEGEIQEQEGYFTFTDENTLVITLDKLGRFHFHVSIPLEDCENQTPVNGRVVALDPGVRTFMTCYGPSGRFVEWGSNDFNIVSLRKRTNYKVICISKAGRIQKNKISVAKKEAQDPQTIFIPTFETSNMGSRPRETC

SEQ ID NO: 2699 - protein, 629 aa, unidentified
  REGION 1..629: note = Table 20
PVEGKYAFQSKLWDLAIEENIFLKKIYRQSDEYFIRGLDRMRFGKMDKDFLSFIKKLDRELNDIPGEMLKYVSGCYLRRMFFEINMKKRKRTRLKPFWTDDTSEISKKLWSHNDVIVRKTKDSWFNVCEMVSLKEENPPNIMFTKQEKKEIKKTNVILNNKKEVEELKTRKIRLYPTIDEKKTLKEWMRVSAWTYDKALDLIKDDPNITLKQLRRSCVNKDVVDKNISKVPYDIRSDSIIALLRNIKVNKDKCDRFVMKKRKETRIMSFVVQKKSWDLMKGVYSFLKNIKTKEKKPDINHAVTVKMDRMSRYWLCVPVLLENRERIVHNTLSIDPGVRTFVTGYSPNGNVIEIGNNDIQNIRKIQDRCFKYQSIIDTSLDYPIQDMTEKKTKKRRISKETTKRMIRWSPRKFLYFLRHKSREYTTDIIECTEEYTSKTCSVCGCINDKLGSSKKPGSYTLKIADLLVMFLLTMLRFNVGVDWSVMKDNIDDENKKKIKDKGGLSHPKLVNWLDKSTLAEEILYLKIGAEVFYIWNSDDRRLVNGTQGKVVAFRNTKSDMVYEKDLPKGISLNEVVPLVKFDGIEEVIEVGKERFMKKNNEGILMVTRTQLPLKLKYAMSIHKSQGLTIE

SEQ ID NO: 2700 - protein, 540 aa, unidentified
  REGION 1..540: note = Table 20
MNLYKLLISLLVLQIIFVVLFSNICLADSDEKNDGNKKENKNLSPNFDITKAKEISERLWLPEKHDLKISNFISHSWFNIKRSEQVSIKNVEIPIIPRYQEHIDSENDELKTKKIRIYPTKEEKQKLKSWIGTARWTYNQCLDSLDEIRNLKTKKEKIQYMRQKHIVASNYKNTELSWVIDTPSSVRDAAMMDLFKNIKSNHARKIARFTLKKQKKKDKNQSITIEHLWFNKSKIFSFLRNIKTKEKIPEIKHAVNIIMNRLKYFYICIPIPTNINKHESINEDVLTLDPGVRTFMTGYDTKGNISEFGNKDIDKIQIRCLRYDKLQSCLNQESDKGLSLQDSEISMSELSDCVTARNMLTWSHYKFKMFLRHKIREYLDMNLIECTEEYTSKTCTRCGMINKLGGSKNFTCGSCGLKIDRDHNEKRDSETIRKIIEDHVEKGSIVHTDRWKGYLGIENLGVTHKSVNYSKNFTDPITGVHTNMIEGLWNGIKLQIALRNRNKNLIKDHLLEFIWRRINKDKLWDAFIYALQSTAYYENK

SEQ ID NO: 2701 - protein, 1578 aa, unidentified
  REGION 1..1578: note = Table 20
MKTREFFTGDIYPNDNVYSMQIVEDHEDYYTKEYYMKIKCVATNSLDAYIFLSGFPVYCEFKINNGFDDGIDEKIVKEILNYISLTNYKDYRSVKREDILGNEFYFLRVFFKNHNIRKKIIKKVRDCIKNKEDNYQIFDLYEDDISTPYSMFIAPRIKIKINGFEQGFPLSKTFKLNRTLSRKIYENKFHYSNLRFIDDIDTYISMFFDFETVDIENMKKGILGRVSIGCEIDQAFMGVFLFFKGRDIIPFHTVAVLLQNEEFPVEYERIDEKLDLIYVKNQKEFFLTKALLYYNFRPEKTGGWNNLGYDWKFTIRKLYELGIFEEFIQIATGKTKSIENIIKFDYRNEYNTVNANEKACHYFLKILGTEEYDQSTMFRQHYQTLSKWSLNTILGKLGLKLKLEFSIKEMYEILYNVYKGNFDEKTKKEKCTLILDYCIRDCIAPKEAIEFINKITEYRIISNLTYIPMYEYSYGNKTKMINNLIVYFANREGFDISIKYDKKNVKEEYEGGLVKDPLKEFSVVSDGCLDFNSLYPSVMMQHNICFLTKLKKNEKEEGCHEISYKNSKGITKIIRFSKKRKGLIPTILELLVKRRKEAKKDRDRHEKSNPMYNYYNILQDTLKKIANSIYGQFGNQYSIICDYEVSASVTGAYARKYIKMASEYMQTKEISETNKEKKFIWKYTDTDSIFFRLSPILINEIIKRYENHLLDKNINEKDFIDVIYNIQKEMVFVTYNESMKLQDEINEWMANENQAPRIIMEMEKIVSPNLYISKKKYNGLIFENSNYFFDDEWKDLEKHIKEEYKIDNVTKEIVNDFVKKNDEYKLLANGKKFSNLLAKGTDLVRRNSTLICRVILKKLLYTLFDYREYGRYLYNMKFTKIEEYQDFINGVNKNDFAKETSKRVVEDFIKYLYSKETELNLELFEQNARNNEEEEDMMTFTETKDPLSITKYTMTSKYKPAEKIKKTYGVSTSTLRRWGDKGDVSCITMPGGKRMYSTEDIDNMFGRESKEKKKICYARVSSEKQKEDLERQCNHLRSEYPEHEIITDIGSGLNWKRKGFTSLLERIYQGDIEEVVVTRKDRLCRFAYELVEWIFKKHEVKLMVLGTDVGSNEPETGELAEDLLSIVTVFTARHNGLRSAANKRKRKEIENSKDTDILRQKCIKIENFQNENKWVLETPYGIRDEALIDLLDAHKSNFKLKRQKFNIRYKKKKDKQHSITIQARDWKRKRGEYAFLKNIRMSEELPNIEHAFNIILDKLGKFYICIPISIEEYYREDNEIISLDPGIRTFMTGYDPIDDCHMKLAKFLCDNYNTILLPKFETQEMVKRIKRKIRNKTARMMITWSHYRFRRFLEHKISEYPGRLLILCNEHYTSKTCGNCGYIKRNFGGSKIYKCDECGFVIDRDYNENQTDWERSEKKDKEYTETILKQENDETTSMVKKFVRDMKMINVEVPKPRFNYYVIYKHGVKEVYKRMVLVDRFDPKKQRIDKYHYLKGIKSFLSVCIEETEKETDEWIKSIIDKNTNKSIDEYSLKEDEQKGGKKRKKKEYDILIPKKQMKISSFFKKQNNDNDDNDFFI

SEQ ID NO: 2702 - protein, 521 aa, unidentified
  REGION 1..521: note = Table 20
MTSKYKPAEKIKKIYGVSTSTLRRWNDKGDVAYITMPGGKRLYSTDDIDNIFGRESTQKKKICYARVSSEKQKDDLGRQRAYLVSEFPDHEIITDIGSGLNWKRRGFTSLLERVYARDIEEVVVTRKDRLCRFAYELVEWIFSKHDVKLVVLGSDVGSNDPDTGELAEDLLSIVTEREKLKKWMGTAKWTYNRALDLIKNGESRTKKNLRQKCIKVENFRHENTWVLETPYGVRDEVLIELLEAGEYAFLKNIRTSEKLPDINHAVNIIRDSFKRFYVCVPVPIKEQYRENDDFISIDPGVRTFMTGYDPKGKIFEYGKGDISRVYRLCKRHDEYQSQRSVLKGGSNKRERYKLKRKMLKIHDKIKNLIRDCHHKIVKELCENYNTILLPRFETKNMVRKKDKELDNQESKSIKNHKKKFKRKIKSKTARMMLTWSHHRFQQHLVHKIREYPGRLLILCDEHYTSKTCGNCGYIKHNLGGAKIYRCNRCGFEIDRDHNGARNILLKHLSQRDLTLGPTPFE

SEQ ID NO: 2703 - protein, 181 aa, unidentified
  REGION 1..181: note = Table 20
MRNKKEGRIISLDPSIKLFLTGYDPGGNIVKFCKNNFSRLSRLCIRHDKYQSQLTKVNSRKHYMIKRKMRRIYYKIHNLVNDCHKKIAKYLCDNYQTIILPIFETQEMMSEYPSRKLIICTKKYTSKTCERCGYIKNKLDGYKKFKCNKYGFFIDRDINGARNILLKVLSQVIPDAMAYHS

SEQ ID NO: 2704 - protein, 602 aa, unidentified
  REGION 1..602: note = Table 20
MYHLHIPIPLSMRNKKEGRIISLDPGVRSFLTGYDPGGNVVEFCKNDFSRLSRLCIRHDKYQSQSTEVNSRKCYVIKRKMRRIYHKIHNLVNDCHKKIAKYLCDNYQTIVLPIFETQEMVRRAKRKIRTKTARNMLTWSHFRFRQFLLHKMSEYPVKVQDTFEIAKKFWEDIPVYFDGDDVYDRLYFLHEDDDDYDKSAKTAADKEVDECITTLPESLPSNPQTESVETEDKKDCKSQNVTTKPVKKPGFSLIIKINTSALKNNVKTAFRDNKPYFVSTPTNDIESEIVGQENDLKKQHTFSTNYPQLSHNEDNTILDYNNISLELSNFTSPDNPTGFSNTDSILSQDEIPSTPSSTSSTVSIINTPVTPITPLSFNFDEDDNNENEYFDDFIATSPRLSFQTKPIKIFHTFAKCKIQKKRSISSKFSSFPNNNTPDYYHNQNNNNNIYISLMGNVNSYVKNEKINDFKNNIGKETYSHFSGDLEHEKNDEDVNDCSSKSNDDNYPISCAHNISTNTTIDITKESSSRQQLTVSEETSTPLSPTPSPETSIEDSSSSEQSLDDDSPSLSSSSEQSSETSNNGPTKNPTNYIDITNQEHAQEE

SEQ ID NO: 2705 - protein, 298 aa, unidentified
  REGION 1..298: note = Table 20
MFTARYNDLRATSYKRQREKKVNKDRKTTKKRKFKDTQHSVVSQQGTASNLEEMDGHIQMDLQSEFEDLQRWVLETPSSIRDNAFLEFKKNLKTELKKETKIYYDHEKGQFSFLKEIKKSEVIDMKNKNEIIISRDKLNMYYLHIPIPLSMRNKKEGRIISLDPGVRSFVIGYDHGGNVVEFCKNDFSRLSRLCIHHDEYQSQSTEKIARYLCDNYQTIVLPIFETQEMVRRDKRKINENTNTPPRHVCGYVKNNLGENKKFKCDECGLIIDRDVNGARNILLKLLSQVTPDAVAYHP

SEQ ID NO: 2706 - protein, 373 aa, unidentified
  REGION 1..373: note = Table 20
MQENTDGFNRPLGILGKNIANKTQEKMGPFWNKWAELFSNRLWLPMINFASKKKLSRPHTKENKWFSFSGIRTNSLQQKNHPIDETLMKRIASYVSKSEDTCKQTKTTQRVISRQKNTNKITVGKYNPELKWVLETPYDICNQAMEDLLKAYNSTFATGVKGFTMKYRSKKDRQQPIPITLGYDSRLVMNRLGEFYLCIPKPLELRIENQGPFIMVILHYGAMVTLEEYIACVISMINCKKKIWNLVDDGHRKFAKWLCSNHKIVLLPEFQTQCMIRRGFCSIQSKVAKAMCTWSHFRFHQYLLHKAREYPYCKVIIVSEEYTSKTCGSCGTINDKLGGSKIFMYGNCLFTLDRNINGARNILLRFLTVHDLL

SEQ ID NO: 2707 - protein, 855 aa, unidentified
  REGION 1..855: note = Table 20
MKFRSKKDPHQSIVIHSKHWGKSRGEYSFLPKMKSAEPLPNKLEYDSRLVVNQLGEFYLCIPRPLEIQAENQGPMFQKEESGVISLDPGVRTFMTGYDPSGMAVEWGKNDIGRIYRLCHAYDKLQSKRDQIHGKRNKRKRYRLHHVMLRIHKKICCLVNDCHYNNGAARNYFQIPKCFGMPLNKTNKRTRQIEPEQNFKSKVGRPQDSVWEHFIKTPLSTAGHFAAECLYCEKKWTRGRPQELQVHLAKDCLNVDEETRREYIQKILQLYNDDDTEDNKRFRIEQLNITDFWDVDQNSVEPLSKQKQEAIDQCLLKAFVCCGTPFAVVENPFFVDLIRKLQPGYKLPSREKLAGIMLSHAVVRIEDQVNSILGKATNLTLGLDGWTNPSGHSIYNFIIMTHDRREFLYRLRDLSIIKHTAQNLASEIEDVLQKIGPDKFAAVVTDNAANCALARSIISEKYPFIVNTRCIAHCVNLITKDVLEHNFPKKVLKSCNEIVKFFNKSHQGKALLVKYAKNFNIEGGGLKTWVETRWTTMFDAADSVLRLKLALEKVADDHKDVVKENIVKIITSRGFFHDVNVVLKVLEPLKKTILSVEASNTTFADCFIALIRLASTIKKIPVERGLVNFQNHVINSINKRWESFNVMPYILAYFLHPGYRGNGLKNMWTKISEYAQKLWENMGYNIDDQEILITQMLNFKAKQGTYSTAFVKNRVTPCTWWMSCEDQPPFLRDLALKVFAVTPHSASCERMFSVLGWLYGKKRTTLDTNTIESIAKVRHFYQNNNMHLAESNSRQNNDDIQKLIDESAFFEIENDNDDHEGEGGYEEYFEEVEIPKHNVYVLIEEYVDLAILENDE

SEQ ID NO: 2708 - protein, 497 aa, unidentified
  REGION 1..497: note = Table 20
MSESVQNINETTLNNKLQIFNNITQNTKSLVISDQDLTGNAGDVSAESNEAGELAKDLLSIVMIFVVRYNEIQKLQDFSKQDISLSYARGEVETQTLDGNSMMDLQSVSRSSQKRGYRCLNVANFNNTELQWILETPYDICDETINDLLKLYSSNFAAKRKKFKMKFFSRKSPSRAPLRCTTCDESVWRILSLYSTTRDMGQKSRFYTIRCSDPGVQTFITGYDPSGQAVEWGKNDISRIYQLSHIYDKIQSTHDSIHGKVHKRKRYKLRRVMLRIHKKICCLINDCHHKLAKWLCQSYRIILLPKFQTQGMVRRGKRRILSRKSPSRAPLRCTTCDESVWRILSLYSTTRDMGQKSRFYTIRCSDPGVQTFITGYDPSGQAVEWGKNDISRIYQLSHIYDKIQSTHDSIHGKVHKRKRYKLRRVMLLCESPWCRVIICTEEYTNKTSELDRDINGARNILLRYLTVTSKEPVYAGAGTYPWNLHDPCRTRIFPYWA

SEQ ID NO: 2709 - protein, 590 aa, unidentified
  REGION 1..590: note = Table 20
MTTTKYHGAQEIRKTYEVSSETLRRWNNQGKISSIRTSGGKRLYSVTDVEKIFQEKLRTGNDEERLKTREIRMYPTPEEREKLKRWMGTVRWTYNKVLGMMQDDGISDMNIIRKHYLNDECFTNEELSWVKETPRENEIQNKKRSFANYLDTSKRLESKERCIRIPEDCDGVRKTTRNKSHRERNHEQIGSFLRVRVRTFMTGYDPDGRIVEWGNGDLNKIFRLSKKYDKLQKDKDLAIGRKNKRKRYKLKIKMYRIIVRIRNLINECHHQLARWLCENYKIILIPKFETSNMVLKNKRKIREFTSCKVIECTEEYTSKTCGNCGSINKKLGGSKIFRCESCSLEIDRDMNGARNILLKRITEVFSITFTYSSPYDKIENDALANITVKNDTFEEQDIKFFCRNGASLNCCPHLANRIAYENYSRCASIIIINNSGYNMTLDVVNLEDGRWVTSDDYGDDSIDINLQGYISYIIEDDRSSQFIISWEVSTLGPPMYYFGFLDGSYMQDYNVKFDYSLGETIYQVKIDKKTPFPMSWLIPISLFVFFITIPLCCQFMSNEQKVVGTVGQNSYNVSNANANDQPPPYHQIYP

SEQ ID NO: 2710 - protein, 368 aa, unidentified
  REGION 1..368: note = Table 20
LGTCCFVYNQGVEARQDSTERANIAALRARTKSDEMLAQHPWLADSPEDVRDGALQDLTKAQSVHFAKLRKLRDVDPAARLACKFKFQSKRDSQQSIEIRARDWGRSRGMYSKLFGQGVLKWAEELPKELKATCRLVRDRLGRYYICLVRQVAIRSENQAPKSTHGVVYLDPGVRTFQTCFDADGLIAEWGEADMTKLFQHCYAADRLQKRISNTKGNSTKKHRRRMAWHRLLQKIRNKVNEVHKKLSTWLCENYRVVLLPKFETQQMVRRRHRKPGSKTARGMCTWAHYRFRQTLLSKAELYPWCKVVVCDEHYTSKTCGACGWINPTLCSSKAFKCASCNYTADRDISAARNILLRYLTCEKIGSS

SEQ ID NO: 2711 - protein, 436 aa, unidentified
  REGION 1..436: note = Table 20
MTLFNGSAINLIANSWFSTNIQTKTQNSTSHKMYYPLLTSSQQKIMECDLLCTEKKEILRSKKIKIYPTTSQKKLLNIWFGSCRWVYNQCVNYINATKKNKAISEKILRDKFINGDKKAAFSQNVPFDVRDEAMRDAIKNMKSNYAKQKKSNKKYYFQLKFKKKKNNVQSITIRQKHFNRKTGMYSWISQLKMSEKIKTMETDFRILKDLVGDYFICLVNKKNSQSESQACKFSKTSMNGVISLDPGVRTFLTGYDPVRKNILNLGTNVQTISEKHQKTIDILSKKIQTTKDSKKKSRYNKALRKIRRKVKNQVKDMHHKISKFLCTNYKTIIIPEFRVKDMVSTENRKLQKKTVRGMLSMSHFMFKQILLAKSEQYKYCKVVLVTEEYTSQTCGNCGTLHKTLGGSKNFNCSECKYPTTDRDVNGARNIMIKTIQ

SEQ ID NO: 2712 - protein, 803 aa, unidentified
  REGION 1..803: note = Table 20
MDAFVSRIPKNADRVVSPSCPLPTLTPRPRRQTAVVSDDDDDDDLVVEHARVYPDAKLQPAAEESRKRKRQDSDLLPLAEDVGQEPPPFKPTPFWCRKTDEWARVLWHPRRDGTVHDRSPLYPLQCGKTWFDIASINSDDPGDHPAEVQVDVVDAVRAAAAAKAAEDQAALDLARVRRPQAKRARARPRKPGKAPAGKTLRIRIYPDARQKVVLREWMSTARWTYNKCVAFLRTQSAKPNKKDRLSVTENRLRDLYVVQKGLGLSSVPEGDPSLPKKKGRPKGSTNRAGKNPSSATFGPPARTATGSKRQTNRAARRSQDVETLAPLAAGQAAIHKKEKAVRRQIAKAARRLKRVDGETADAGTRAQDGDGDLSWVASTPYSIRKAAVAEFVIGHRTNVVKGVESAGKHRFVMSFRARKDPTECITVRPEDWARKSGAFASILGPKVMRVARGQSLPETIDYEFKITRDTRYDHYYLCLPMPIDVTTESPPPSGSPSVADGDHTRLPSRPAAGVIALDPGVRTFLAGYTDGGTAVEIGRGSDKRLKRLMVHHDDLRSRIDKGTDGKTIRHRKRHRMEKALSRMRLRARNLIEEVHKKAARWLCENHRYILIPKFETARMTTRRPVAPADQTSTGEAAADNRQADSTTDDTGTPSDMSTPAAITKPRRRGHRRIGRKTARSMYAWAHYRFRERLIHKASQYDWCSVVTVREDYTSKTCGACGRLTNVGSSDVFRCAHSDCGFVGGRDRNAARNILLRFLTEHGPSTSSSSTSTPTTHGILPGEDALETGSPEQGHGGRSFTPAK

SEQ ID NO: 2713 - protein, 734 aa, unidentified
  REGION 1..734: note = Table 20
MQGPLADLPTNSTSRPWLVGPRNTTKLNHRTRQILESGEDAFVPSNEVTKYYNVTAACLRQWANKGEVRVLRIGELGKRLYNAKDLKSKLVGRDGGAQQQRQQQRKRFAYAQVSSEHQRGDLERQVGELRRLCPNHKIVTNVASGLNWKRKGVRAILDQCLEGMVEEVAVLHRDRLARFGVELMEYLFAKNDVRLVVVGEGATADAETHAVLEAVVDPAQELADDLIAQPWRKQQAANLKTAQKKANRKKASAAKTKVMEASGDGDTNQPGGKRKRKGKERAPISEEGEEEEEPAPYDGKCRKIRVFPNRWQKDLLKSWMGTVRWTFNACNAAVRAGLSGHSEAELRSRFVDNEAFGKPHLPGPSTLWVLDTPRDIRDQAAKELSAAYKNGTKAHGKGKFEVKFKSPKKMAQQCITSNARDWGRGRTSVFHGLFDSGRALRASEPLPREMKHEFKIVRTRLGRYYLCVPMDLETRGESQAPSSSDDVGAECVFIDPGVRTFVTTFDLSGRIHEFGTGSIGRIEKLCRRLDDLISRTYAKKPDDRQRFLRGKKKRWRMRRAALRMRRRIRDLIDEAHRKIALWLCENHRVILWPLSGVSNMVVAKEDLKQRKRRIGAKSVRAMLTWSWYRFQEWLKHKVREFPWCRLVLTSEAHTTKTCTHCGTPNHDVGRSEVFRCADAACPNRSAHRDHHGARNNGLRFLTEWANLPTTTTTTTMTQRLPTRVIDLTTSGLND

SEQ ID NO: 2714 - protein, 273 aa, unidentified
  REGION 1..273: note = Table 20
MDHEFRVTRTKLGRYYISIPVPLDVKHPIQQQQPNAVGGGDNQAPTVAPHAAAAIDPGVRTPFTVYSPDEARIYELGANDFGRIRRLCHHLDDLVSRTTDRDVRKKRRRRMRRAAARMRRRIRDLVDDLHRRAAKWLCETFETIIYPHYETSNMVVGKSKRRGLHSKTVRAMLTWSHFRFKQHLLHKIREYPSGCRVVLVDESYTSKTCGGCGRINHGLGKSKLFWCEQCGFRTDRDWNGARNIWLKFLTEWCNGSSRGNDDDDKEQQQQQQQ

SEQ ID NO: 2715 - protein, 627 aa, unidentified
  REGION 1..627: note = Table 20
MDSPKTNTDARSCTLAYPARSNDPTPSDCAQDTRSSPKWLAASIGKGEGCWPYWTPASTEWSKRSPSCTATGSRALPSNCWSTSLRATTQGSWWSVKATRLPTKRSAPPTRVGNSPTASSPSLPFSWRARTDYALRRIDAHAGFEQPWRKEQAKKEKKRQAREKRMETAEAKRLAREEELRRGAPPPLPSKRKRKSKARESVDDEEGAFAPETFEGKSRKVRIFPTTEQKALLKRWIGTARWTYNRCNAAVKNGECKATLNDLRERFVNKDAILKRRRTNDGQASDLSWVLDTPYNIRDCAVGELAQAYKNGRKKHGEGNFEVKFRSIKVLRQETLTIRRRDWNRVDGEYARTFRNDRLRASEPLPFKMPHDFKVIRTRLGHYYLSIPVDLEVRGESQAPRPKWVGGEGGEVIAIDPGVRTPFVAFDPQGYVYEIGGGDFGRIRRLCKHLDDLQSRWSQADVRKKQRYRMKRAGARIRRRIRNLVDQLHCKTAAWLCESYRVILYPHYETSGMVSKKAKRISQRLSSKTARAMLTWAHFRFKQHLLHKIREYPWCRLVLVNESYTSKTCTECGHVKTAKFRRHDTFECDTCPYVADRDWNGARGIWLRFLTEWAGDPNMPTRDLDED

SEQ ID NO: 2716 - protein, 1262 aa, unidentified
  REGION 1..1262: note = Table 20
MNNQSREENNSNNPRFTSSHHPFLQPIFPPNPNLFTQQNPSSQPIFPPNPAIFSPNLSFHPEFPPPWIPLNPFSPQLYPIIPPFPPRISEQTSTKDQESPKLEHVDKPSVTNINPIKSPNPTREIEKTFQNSKRVLAIKGQPQMICKHPYQKRSMMERIDKWRKLKGVGGFGGFSIPPYIPMAQIKFSPCEHTLSDHYKCEEERAKKKKKIASHWQRLEVLKDVSTVDKFGDLLRTAYLERGINIEPLSLDQGKAYATQEHYMLLFLKQFNMEWSKIGTFFFDRSINSLKKKYKKLKRKINRARLEGAYDASDATNFIIQWSVDDLTFSEFTDISTLTSTVSITFPETWTNSDLFHKMIMKIGQLSPSKPLPLRQAQPSSNKSNVPTTPGEPYSQSEEDLIVTSLRKGMNLEQIYRDYFTHRTFQSLKNKVRRLRKRQLYHKQQPTKKRLNKRRMVPNSTVSTDSKELRKPFWHDDTVDRLNKTCPVSCFAKNGTKILTQSWFTLSVRQRCPSTKPPPSKKELVEKVWCKSETWKKTPCKCGNSKFKRTVCSFNGRKFGSEKKKLVQEFKQVSALEESLTMLQENEVSSSTTAENEVSSSVTAVNEVNSSTTAENEVNSSTIAENGVSSSTTTENGVNSSTTAENGVSSSTTAENGVNSSTTAESKEKTDDTIEKLLKQIYTSFSISNEDNYFVRTKKVRLKLTSEQKKVFERFFFNSNHAYNEACLLHFMLEQNKGKTLLTTTEDDYFKILKNPQTNLRFKQTRWLWDQELKHCPADIKLNAVKDFVKAEKITRYKNKQAAEKESKEAARKAKNQFFKDVQKGKKEMITDEELNERFNPKHFTRQPCEFEMKGRSNQHPYQSFKVTNISLSQEGVLLKPTFFKGNENACPSKKSMDHLLKFYYPARARKWLKEEIDNKKFSHETTFIRERGRYFVCLPVRYHKALTRQEFQRFDKSFYESNSNSGTEYDTKFLKDCPQPSQNELRKEYIALDPGVRCFMYGYDSNGDALEFAAQGENTILFSLSLKQDQLRSEIAKNKFLKYNSRQERKFYKGLRKALKKKIRRLESKIRNKVNDMHNKIIDYLTFHYSEIIIPEFNVKAMIARKQKQRKRQGKEDTTCQGQEGYTNGQTENMDVRTEPLVASSSPFEGWESRDTTTSETTTNTSEWVGRKITRKTVRQMLRFRHYDFRMKLLQKAEMRGCKVHVVTEQYTSKTCGNCSVIKEDLYGSKWFHCNHCHFHIPRDGNGARNILIKNYHHLLHW

SEQ ID NO: 2717 - protein, 532 aa, unidentified
  REGION 1..532: note = Table 20
MLEQNKGKTLLTTTEDDYFKILKNPQTNLRFQQTRWLWDQELKHCPADIKLNAVKDFVKAEKITRYKNKQAAEKESKEAARKAKNQFLKKVQKGKKEMITDEELNERFNPKHFTRQPREFEMKGRSNQHPYQSFKVTNISLSQEGVLLKPTFFKGNESACPSKKSTDHLLKFYYPARARKWLKEEIDNKKFSHETTFVRERGRYFVCLPVRYHKALTRQEFQRFDKSFYESNSNSGIEYDKIFLKDCPQPSQNELRKEYIALDPGVRCFMYGYDSNGDALEFAAQGENTILFSLSLKQDQLRSEIAKNKFLKYNSRQERKFYKGLRKALKKKIRRLESKIRNKVNDMHNKIIDYLTFHYSEIIIPEFNVKAMIARKQKQRKRQGKEDTTCQGQEGYTNGQTENMDVRTEPLVASSSPFEGWESRDTTTSETTTNTSEWVGRKITRKTVRQMLRFRHYDFRMKLLQKAEMRGCKVHVVTEQYTSKTCGNCSVIKEDLYGSKWFHCNHCHFHIPRDGNGARNILIKNYHHLLHW

SEQ ID NO: 2718 - protein, 420 aa, unidentified
  REGION 1..420: note = Table 20
MAQRALLRAAFGASRFIYNKGVELASTEKLAGRRPTGKKIQKAVRGMYTNNAAWREVVAGQHATDWAGIPYEVRDSAVRDLAKAIKSMDARCESEAVSRGVTATAAGWSFKFRAEKDSSESLTLRSRNLDGATLQWFRALFGTPDTRRVMHSKQPLPATFGSDVRLLHGKVRRRYYLIIPVPPPSPAAGGSDIKAPRPPPVGEGTSAAASPAAAPPATASVQRQLALDPGVRTFMTGYDPAGLAVEWGGGSTNSVLWRLANTANGIRARMVQPHVGHRKRQHMHRAAARVEARIRHMVDELHHKFATWACANYDLILLPEFRVSGMVKKGKRRISKKTVSRMYTLAHHRFRQFLKHKAKQRDVTLLIVDEAYTSKTCGRCGRIHEVGTRKLFVCPYCGLVVDRDIAAARNIALKFVNDNP

SEQ ID NO: 2719 - protein, 205 aa, unidentified
  REGION 1..205: note = Table 20
MNRLEHFYICVPVPLNIIGNQENIKRKVISLNSGISIITYYDLEEQIVKWCNRDFNRIFKLSKSTIICKVTKIKLLVDQTRGKDTNHTVTKIWIFKHDLEEQEKDQVKDNTDDAHMVTLEEYTSKTCGNCGFIKKNLDGSKMFRCDSCDLITRTNSTSTSSTSFTISKSTTNFIYSYWIQFQGCTKQPREIVDLLKNNVSDMMCF

SEQ ID NO: 2720 - protein, 662 aa, unidentified
  REGION 1..662: note = Table 20
MARSGKRRKKKEKQGSGSTSSTRRSHSGESHAQGASKSGQESPTTERPLLPFWNQGLQLLYALCLLPTADDPASAGEGSSSSGKPRKKPRKKGKKKNKKKGKKKKNKRGKKAGKQPGGLADDSVKKTWFSSIKRELEEVKCPKTGWRSCLNLPEDSVVSVETLQPPAKRKRGQKLKTSKLLSERTVIRTRKLRMRLNPEQARTLCNWMGAARGRAFRIQVGKDRDYVSGAFVNQKHPWLKETPCAIRQAAVRSLIKAWDSNTAKQEAMKERGEKKGHRFVLKYRQRQQPSSWTIEIDARELKNVETIERPNTRHKDDTKHKKRRKWTKLEVFKKKMAGGPLYLTEEIPGGKIEGAVKITRNRLGQFHMHIPIATPWDRLPPLKPENKRKVVALDPGVRTFQTSYSPQEGVGEYAKGERGFARLFNLCWRIDEIISERKDPKVKLPYLDRRDLKRQQYACMEKLRGLTNELHKKVANDLCRRFDTILLPEFKSQDMVKKNNNGRRRVIRKKTARTLLTLRHYAFRTFLASKVLLHGSELAIVTEEYTSKTCGRCGHIKKNLGGEEVYKCQKCGFKCGRDVNGARNVLLKHLRQPKITGADAVEYYYHLYDSDLMHLAAFQGSKQVLQWLRSQDPPCPWIPNRCRIVAKHRNHQRVIEWINANS

SEQ ID NO: 2721 - protein, 329 aa, unidentified
  REGION 1..329: note = Table 20
MKERGEEKGHRFVLKYRQRQQPSSWTIEIDARELKNVETIERPNTRHKDDTKHNKRRKWTKLEVFKKKMAGGPLYLTEEIPGGKIEGAVKITRNRLGQFHMHIPIATPWDRLPPLKPENKRKVVALDPGVRTFQTSYSPQEGVGEYAKGERGFARLFNLCWRIDEIISERKDPKVKLPYLDRRDLKRQQYACMEKIRGLTNELHKKVANDLCRRFDTILLPEFKSQDMVKKNNNGRRRVIRKKTARTLLTLRHYAFRTFLASKVLLHGSELAIVTEEYTSKTCGRCGHIKDNLGGAEVYKCQKCGFKCGRDVNGARNVLLKHLRQPKSV

SEQ ID NO: 2722 - protein, 331 aa, unidentified
  REGION 1..331: note = Table 20
MDKVPYEVLDHAISDAIQARDEIITRNKENQCQHHVLHFRSKKNDHQTITIRAQYCREPLRFYIRLLYNKKLLAVDPNHPRHKMKLPFYHEHRRRNHGWPNEIGKVKMDSKLIYERKLGYWTFVWVHGKSIRENQVKEIHIAAIDPGVRTFLTWYSPTVGHGNIGDNDINCVFRLCFALDAFISRTTRALAKKRNSFKCTQARMRRHIQNLVDEVHKKTALWLTKTFDIIVLPKFNSVQMPHKQKRKINSKTVRKMMSWAHARFRNRLLSKAEEFGKIVITSVSEAYTSKTCSRCGYIKRNLGGNKVFRCDGYGLQINRDLNGALDGALVM

SEQ ID NO: 2723 - protein, 530 aa, unidentified
  REGION 1..530: note = Table 20
MEPDNSSRSVDQSQRPTPYWTPETHSFLKKLSHSIWCPTPTSTSETVRVGRAPSWFSMEKMTPPAASNPPSFSVTTPDQQMTATTSTVATQFVVYPHKELETTWLRWLELCRIAYNVCVNYHHRRTFIHSDMSHDQLNNNVIGSSWYQKGDEMDQEIYNVLSNHHYEYSKDLRDLYTKYNSSRGLTVLALLQRVAKIVLLAQGHSFEGHAEMVSRSVEEGKRTIDKMYDGGKNMKYRLSKDPSQTLDVRGDYWLKEEIKNRAFIVRDRYERAIEWPFFPPRMRTKLTYRPGTRPRWTVTVPTTKENQPVQPILHVASIDPGVRAPHTWYSPSKGAAKMAHGSIARLYKYCEEKDNAISKRAKLKGVQEKSFTRYSKQINKIQKRIVDLQRDYMETSTKFLVEEFDIIIIPRYPVSRMTQKVQGVRKRKISAETARKMLTWKSSSFLLRLQQKATAQGKSVIIHSEAYTSKTCSSCGALNDVGASETFSCTGCGVVMDRDINGARGIFLRACAEGALNVHYPDLEPMDIDT

SEQ ID NO: 2724 - protein, 680 aa, unidentified
  REGION 1..680: note = Table 20
MIPPPKRIIYAQEYPVKNSISNDKKKSYSTLNAKDCKPYWNDRAKVLSERLWLPTMIDYAGLPMNSSSTCSYSTLKNSWFSSTIRQPTNVNCPNIYLPSTLPSSADCKEEERPSIEGKGKKRKKILIVRKNKRRKKDENIIRTLNVKLYPNLAQKRLLKRWMGLMRLTYNTIIDYLQSRRFLIVRVDENKNKYKEMINFPKIQFLRTVAYLKLRSKKVYNDIPNNIIDTTVDEAIKNFNSKDNKTRLKFKTKKDLKNTITIHAQNFPKKNWNQFYISYLFCNSMRTPRKKPYNLIEGSRDLRALHFETKRKNNSWPLEKINNDCKLTYYRKTNDWIFQLKGTHERFVAIDPGVRTLFVMYSPTKGIIEVGKNDAQRLFRLCLHADKLSSTRDKLKSSISKRKKKQAKRIDKAISRIFRRIKNLRNELHKKTINHLVKNYDVVIIPEFNVSNMRFVAIDPGVRTLFVMYSPTKGIIEVGKNDAQRLFRLCLHADKLSSTRDKLKSSISKRKKKQAKRIDKAISRIFRRIKNLRNELHKKTINHLVKNYDVVIIPEFNVSNMVRRETRKINSKTVRRMLTWSHYSFRQRLKHKAEEIGMKMIQNEAYTSKPCSACGNIQNIGGRKVYKCKGCNVVMDRDVNRARGIFLHACHMHAYVGIDSMVINDVLQSIRTIVRFIFGLY

SEQ ID NO: 2725 - protein, 347 aa, unidentified
  REGION 1..347: note = Table 20
KFGISFDTLRHWLRQRKISVKTSSSETRLYDIFSFLPELITQNDTSTTSVTEKKGFLYARVSSNKQKEVLEKQKQILKSRFPNYELVKLRVKGLHDKVFANIIDESIDEALIARKNIIQKNLKETKKSLLSFKFKKDLRQTMTDRKRDLCLFHFEKRRKHNKWPSQKIDCDCKLMYICKTNKWVFYWVYEAQKQIRKIQADVHVVSIDPGVRTLFTWYSSTKDRLASSISKRKKKKALHVDKAIFHMQQKIRQLQYEIHQKTIKFLTDEFNIIIIPPFKVSDMKRIHVIIQNEAYTLKTCSWCRNIQNIGRSETYKCKNCNIKIDRDVNGTQGIFLRALLDEAMILS

SEQ ID NO: 2726 - protein, 264 aa, unidentified
  REGION 1..264: note = Table 20
MTFPNSPTIAHSTFTISLTPGVNNIDIWVSVPIMTTEYGGGVNGIFMVNGAVSPAEDTQAERYYIFIKNKLIYFRKTNEWKFTWVYEIEKQVHETQVDRFIHAVSIDPGIHTPFTWYSPTKGIGKIGQQDIGRIIRICICMDNLISKKNKLIQSTSKRKKKKAKRLDKAIACMQRKIKHLQNEIHRSSFHSKAEELGIHVIIQNEAYTSKTCSWSGNIQNIGGSAIYKCRNCKTVTDRDENGAWGIFLRALILSGDHAGNSSNA

SEQ ID NO: 2727 - protein, 555 aa, unidentified
  REGION 1..555: note = Table 20
MTNEQRYLGTHAAKQVLGVCGATLRQWADSGLITSFKTPGGKYRYLIDNVISGGSADTRAEELQRPATEKQKVCYCRVSSLGQKADLDRQAQYMQSRYPEHTIIRDIGSGINFKRKGLQTILELAFRGRLEEVVVAYRDRLCRFAYELVAWIFHQHGVRLVVLNEEEGRTILKRWFGCARKTYNMALEALKKRTAHKRTEAWLKNRFTRASNVSKANSFLLDTPTHVRDGAIADLMKGLRNEVAKKRKNGSHAFEMRYRSKKEVQSLYLEKTAIKKLIHADSHSDFLSMYPTHVTNAIFLISKKASLLNCRGKVSFDARLVMDKLGHFHIHATVEKDEIPSENQGRGIVALDPGVRTFMTAYSPSDNVAFQIAPGCIQRMVRLEHHIDRLRSEISLLPPQCKGRARRMRKAALRLHKRVSNLTSEVHWKVAQFLTDRFQTIVLPPFATQEMCSRTGDRQRRIGKSTSRKMHLWGHYTFRTRLAMKCKERGCDLKVLDEVYTTKTCTGCGWVHDTIGGSKVFLCQGCGLETDRDINGARNIFLKHHKRLMGGSLPS

SEQ ID NO: 2728 - protein, 331 aa, unidentified
  REGION 1..331: note = Table 20
MGKRFVASRNIEEPWLKQCPQVIRSCAIRDLKAAFDSNFAKRKINPNHTFDVKFKAKKDDVTAVRIERVNGAFKVLDDGKHVSFFPKSLKPMGVDPRALQGIELKHDITLTKDRLGRFTLHVPYRRENQAAQEPDTWCAIDPGVRTFATVFSPTDACKIGDGAATRLAKLCAHLDKLTSDTTKASGLQRRRRMKKAQVRVRNRIVHLVDELHWQAASFLCKHYTDILLPVFETKKMACRLSRKIGSKTARSMLTLSHYKFRMRLIHKAAEHGCRVHLCTEEYTSKTCTRCGALKHNLGGAKVYRCPVCMLRIDRDIAGGRNIFLKNAVALD

SEQ ID NO: 2729 - protein, 382 aa, unidentified
  REGION 1..382: note = Table 20
MFPTREQETMLNEWFGACRSTYNDCVALLNRVGCIPTKQGWFQWLRNRFVTNKNIQGRKVWLRNTPKHTREGAIKDFVTALKAAHTNKKNKNIKKFRMGFRKKSDSEQSILIQKGVSVSGLRVDAQGVHAYTTYLHGPLETRQSLDDVSVNHDCRLLKSNGKFYLAIPIDVAPEEQVTTLENYCSIDPGVRTFASVWSPDGVSEVGDGLATELYPRLLALDELRSDIDTEKRRRNRKRKQAAFERLSARFQSILKDFHYKAAHYLCSTYDNIVIPKFGSKGMSKRGGRRLRTKTVRHMLCLGHAKFRTILIQTAERMGKNVFVVSEEYTSKTCCNCGALHQKLGGSKRFRCAEWGFQADRDIHGAFNIFLKFLKETSASICW

SEQ ID NO: 2730 - protein, 260 aa, unidentified
  REGION 1..260: note = Table 20
MIPTYIKNRIKFHTRKNRGIQEPNYDCKLQMDSLGRFYLHIPCHVEACENQASSNRHEWCSLDPGVRTLFTLYCPTKGVSYKLADGDISRVFRLCVYLDKLISKTTKINGNYNQKRKRRKKHYRSIIKLRNRIKNLVTEVHCKVVLLLVKHFKNIVLPTFDVSQMVLKNGKMRKIGSKTARQMMSWRFYDLKMRLLNKAKLYGCNVILETEEWTSKTCTHCQFVKHNLGGSKIYNCDDCKLKADRDVCGARNIFMKSIKV

SEQ ID NO: 2731 - protein, 319 aa, unidentified
  REGION 1..319: note = Table 20
DGAIQDLVQGYKTNFDKKKLHPDHKFSMKFRSKKENQSIVIPFDSIKQWRLEKDKGELSMYPTFLKNKILFYTRNLSSNLPSEVKFDCRLTLSKLGQFHLCIPTVKACENQTSKDNWCAIDPGVRTGWTVYSPTPGVCYKFGDKDISRIYRLCAHLDMLISNTANTTKRLGKGKSRRKRYRMRLAQERLRQRIKFLVDDVHWKTIDFLTNQFSNIIIPPFEVSNMVNKATRKINKKTVRQMLSWKHFTFRQRLLYKAKLKGVNVFVRGESWTSKTCTNCFKVHHTLGGNKTFKCPYCNVQIERDASGARNIFLRNALGS

SEQ ID NO: 2732 - protein, 633 aa, unidentified
  REGION 1..633: note = Table 20
MFLGFKAAKAHFGVSSCTLRRWANEAKVVSKRTAGNHRVFLAATSQAEEGRERLAYCRVSSSKQRDDLQRQKDFLAHQYPGHRIVTDVGSGINFKRPGLLSLLERVLQGRVSQVVVTSKDRLCRFAFELLQWICLRQGTQILVLDSGDKSPNEEKIRAFPTAQQRNILRRLVGGCRKLYNEAVSMIRDRRLPFASEAEFREAERERGLRLAERKRKARSGQEEESGRGEGAGAYKGTKHPWLDKVYVKNFLVPEKSAFVRANPYLKDVPKETRQQAVEDAIEACKAALSNVRAGNIEHFSLGFRKKKDPRWSLAVAFNAVSGSRFWPRKIKEFGQLRVAEPGHLRPHYDRELKVSKDELGRYWMLVLSAKGPARGTNEAAARVEALAESTRENQAGDRPVAAIDPGVRTRHSIYMTDGRVVDVGGGDIARVVRLCRHVDRCISALKKGEFCVSRKHVRREPGASTMRLFDHYRPAKKEQGAHVVPLDGRSREHIRAKMHRLRAKVQALKDEVDNQTVAYLVRECKAVLLPPFDTHRMATRLNHKTARAMMQWRHGAFKAKLLERAARMGVQVMVVPEAYTSKTCGACGWLHPSLGGAKTFQCRSCGVELDRDHNGARNIFLRAIRSWGVDSPE

SEQ ID NO: 2733 - protein, 842 aa, unidentified
  REGION 1..842: note = Table 20
MTHYRPKADLSQRFVHAGKRKRDTSPGPAPRRQRTLIVPGEGRDRPRSPVMPEEPMPLADFRSVAKPTGAAPTTSTRPTSSASQASSISRTDPGAPEIRQPSPALASLPPRPQSSISAARRAGPIDGDTLAKRPPAPLPSSLPSKPQTRCHMHAQTAPGGAAAVAAGQLAFGTSAQSSLPQPDARRIPRDGGSTAAQTSEAAKASSVSTLPAKPQLRPGGPQASTRADISRTPLQPVSPNSTPLPRPQAGVPEARRSTSTVTKSLIVPRSCRANSGVTAQQAASPSSTLLPRPQAGVSEARPTTSTVRTPIASASASAGEARDVVGGAPTSAQQDPPIASPPNTSEPSSAKTKATEGSNEEPKRDPWWTKFVGRLDAFLPSVHGTAHLPYKPETAPPRPRRRHLSNVDPKSGKKRTWYQATQMRLAAPKKAFSLPDVVIKAIEAAAAQPLKRSNYKGHRRRIFPTPYQEYKLRLAIIAINRTYNLAVTFLQERFSEDWYKKRPGALFAEFNPMLQGRFVNAATVSDECRGLLKDAPACTRKFAVHQAIKAFENGIKTCKPFKVALRELVRGYGTIHVQKERVNSEKGTFYTTYFDGEIKGLRGLKLPHDTTIIERNEKFYINVISDRHPLELPRLNKDDKICSIDPGVRTFATVYDPHGQRVVEVGAGDFARVWRLSRHIDRMVRRLKHLDKKRWIRMVKAIHRARDRVKNLVSEVHRKLASWLVSNFNIVQLPPFNSTRMSARAKRRISRSTVRSLLTWGHGRFRQHLLEQARASGIRVVIADESYTTQACSQCGELKKIGGSKFRRCPCGLNADRDANGARNIMLKFLIEVLFQNERPKD

SEQ ID NO: 2734 - protein, 549 aa, unidentified
  REGION 1..549: note = Table 20
TLYKLYAYVVGFRSAVGSSGGEAVRSGEQAPGGQHPAALQPPPPPHPSRAREWVASVATESSRWPSTQGTNSSMRRKPLHIGHSWFTRMETALDAMETTTVSRQLLDATEPLRQFAKRNPAAKPTRHIRAWAKSLREDEVWRARKVRIFPDTRQKDILRQAVGTYRWTYNRAVHILKTYTGPQPSLTQLRQECVNDEAFDGDADMAWVFRSAYAIREQAVMEAMDAFLATKRRGSGELKFRKKRALFGTLRLPARQWKGGFQKTYEYWEGGIEVSTEMWSGGEILGLKDEGGQPFGFVAAEEPVSATWEGGGSLSWENGVWYLMVPFVSGKPSDVAEGHRICAIDPGIRTFATVYDPLRQKAFQWGTGRDVKFLLDVALKIDNLLGKMHAPDIRHRARYRMKRAVSRYRMRLRHLVMEIHKKFALWLSKNYDTVLLPSLSAHGISARGRRKIRKSTVREMFSWAHGKFRDRLSSKISFVEIKEHYTSRTCSQCGADNPRLGGKSVFRCPSPACGLEADRDVNAAKNIFLKWLHDFHQDASFACKLRRRQ

SEQ ID NO: 2735 - protein, 524 aa, unidentified
  REGION 1..524: note = Table 20
TLYKLYAYVVGFRSAVGSSGGEAVRSGEQALGGQSPGAEEQHAPQQHPPAEWINSVTTQPACWPHIGGSNIMKWDDMDTNAWFSMRTLSLSAPVSVGVDLCEELNRVASLVREEGNRRQPSRPRNRTLPYARAEGPFVTRRERLYPTTEQKEALRKVAGVYRWTFNRAIAYLRQHPHSNLTQVRQATVKSTSIDEQDKEWVFKIPYAIRAQAAEEAHTANRNSQRAQAEGRIDHFTLHFRKRRSGFGGFKLEKRQWKDGTLHIPELLDGPIRVRTPIRSIEHDGATVRQQNGKWEVLWSVTAGEEDLPAPAGLGPRVCAIDPGVRTFATLFDPLVGIAIKVGEGANARIFRLGLHLDNLLSRMAASNAKQRYRMRKAANRLRKRIKDLTTDLHKKLASFLRANYDTVFIPTFNAHEMSRRGKRRIGRRTIRQMMSLAHGRFRSWLGWKMKTVEIKEDWTSKTCSTCGRVNYRLGGSDTHRCPSCGTHSDRDVNAAKNIFIHSLFDLRRSLTTTGNGLNTAVVHL

SEQ ID NO: 2736 - protein, 482 aa, unidentified
  REGION 1..482: note = Table 20
MAAAPPAPWIGSVAGESVSWPRVDGSHVANWTAIRQNADHPEYRWWFNAKSTSLEIPERGDNTLELLRNLSDQLRDHLDANPAPVHHIHHHAPWSGQGNKNLKTRRLRLRPSTEQKEALRKAAGIIRWTYNRAVAYLREHPHATFHQVRQHSVNEEHLPEECRPWVTQVLYSIRQAAAKDAHIAQENGLQAVASGQIPDFHLEFRRKRAMFSSFKIRARDWRNGCLQISGLGLGTGPGKSRIGYGNRVVEVKHDDAIIKQENGRWFLLWTEDVDEEELAIPAALGPRMCAIDPGVRTFATIYDPLLGIVSQFGDGDKCRLFRLGLCLDNLISKCAQPDVRAKARYRMRRAANRLRARIRNLVDEVHRQLTSFLSHNYDTILLPTFNAHQMSRRGQRRIGRRTVRAMMTWAHGRFRSRLKKTMEVVEVVEDWTSKVCSKCGTVNYRLGGSKIHRCPGCHTISDRDINAAKNIFLHWKYDFSNP

SEQ ID NO: 2737 - protein, 494 aa, unidentified
  REGION 1..494: note = Table 20
MINKKSKIKQFELPFDDKYLKLIESLKKNKHCDLDKFVNNINTNPICSPFWNNKCQKLSVDLPLPNKTNLIDVVFKPSNIHIRETNNQSWFTKTINCLHNKKGKNVFNKFSTFSVQNHIESTKSDTLKCRKIRFYPNAKQKNILKKWFGTARFVYNKVVNECQKNESNDCNFYRLRKETLDSLPLWAKDIPNEVKAEAVNDYCKAVKNAIKKYKRNNIVSKIGFRSKKDYQSIFIPKRSVKNNGFYPRLLCTKKICENRSINPSESFTEAKHSCRVTFDKYGRYHICIPIEISFKRIDNQERLGVVALDPGVRTFQSYYNKYICGEWGKNDWKKIMRLCFIIDKLCSEIVKAKSRRRKRLRKARLRIQLKVKNLVNELHNKLINFLCLNFDVILIPEFKTKYMVKKLFSKIARSMLTLSHYTFKEKLKNKAKEHGCIVIEVNESYTSKTCGNCGYVNKKSKSKTFDCSNCKVKIDRDLNGARNIMIRALRDASF

SEQ ID NO: 2738 - protein, 380 aa, unidentified
  REGION 1..380: note = Table 20
MGDESIKVIRSKKIRFYPTTAQKNLFRRWFGVSRRIYNKTVEHLATPGTIADWKAIKQWLIPAQPEYTFEVPRAIRDGAVMDACRAVKAAKVKTKQTGNPHKVRFRSKREPTQTLFIRNDMIRKGTVYPTKLGVLSFSESLPEHPRDSRITWENGRWFMCVPHEITLSPGARTKPYYAVGVDPGVRTFLSFYTDGAVGDLGEGDFGRIARLCAYLDDLMSRLDPKRKENRVNAAKRQRMRKAANRLRWKIKDLIREVHWKCARFLCENFEVVFIPDFETQQMASRTKRKLRKKSVRAMLTWSHYQFRQRLEWMAKKLGTTVISVNESYTSKTVNWTGEVNHKLGGARIVKGSDGNSMKRDHNGALGIYLKGFVGYGLTKC

SEQ ID NO: 2739 - protein, 332 aa, unidentified
  REGION 1..332: note = Table 20
MARNYLGLSRWWYNRTINYLNQPDTKASLYEVRRIVQKGDDIPEWAFKCPQRIREHAMSDACEAVKNAKVKCQKTGQFQKVSFRAKRDPIQGFGFDKVSLNQDFVFGSRKFKMEFDASESFNTDLEGTRIVREDRRYFLIIPQRQPVYVPENQRIKVVALDPGVRTFVSFYSDGLHGKVGEGDFKRIYRLCLNLDKLCSKISKASCVQKRNLRKASERIRWKIYNLIDELHKKTANFLVKTFDKVFIPTFETSQMVTKLNSSVARNMLTFAHYRFKQFLKAKGAEYSCEIIECNEAYTSKTCSYCGKIHKIGSKKRMECDCGANVDRDLNGA

SEQ ID NO: 2740 - protein, 539 aa, unidentified
  REGION 1..539: note = Table 20
SCISLVERLVLNWEFMLTHLGDGQIMEKSNTSVQPQDSGCTIAQALKKAAVQERTTVIAGSPQQNRKMISKDKSVLCDLDIQTIPFSKMLDLDSISKENNSSIFSKNVKMEELMKSLLPIETDFADLDLNCLSGSSIDTLSRSWFSIKENCLLNKSLFQISSQLSQYFHVGFTDSESIVQRSRKIRVYPTQEQKTILNNWFGTARYCFNKTVEFLKIPGNKAQWKSIKTSLLHDLPDWSESVPYQIKSVAIRDCCQAVSNAKKKSMKTHKYNEVKFRSKKQGDNNLFIPQSAVSEKGVYYTLLGNLKSAEPLWKPNHDCRLVLKNGRYFVIIPIDVTVKIPDKQRFSVCSLDCGVRTFQTVFSKELILKVGSHDFQRIFRYCLAMDKLLSRQAKEKSTRFKRSIKRIRWKIRDLIDEIHNKLALTLCKLFDIIYIPSFETNKMVLKLKHRASRAMFGWSHYRFKMKLKSKAEEYSCKVIDCTEEYTSMTCGNCGSINSIGSKEFWKCKHCNAEHDRDINGARNILLKQIFLALRDPSLT

SEQ ID NO: 2741 - protein, 419 aa, unidentified
  REGION 1..419: note = Table 20
MKKFNRGYWDETCAHLSRSLWLPRDEILDSLNNESSNYIYSNINNSWFESECHYLPFNAAYKTTQKIRLYPDSRQQDILNQWLGTARYMFNRTIEFLSSGNNSDWLEIKRSLMQDLPEWAQNVPSQIKSFAVHDAYMTSRHNGGANFRARRDAKQTLEIPKSSVNNRGIYTHFLGNMTHSGEIPKPDGNCKLIYESGQWFICVPVKISIASDKQGRAVSLDPGIRNFMTFYSLDSCGKIGRNAFSKIYSLCVYLDDLYFRMSQANHRQRVKMKRAAERLYWRIINLTDELTRKTALFIVKNFDVIALPEFRPDITGKFYSRTVREVINRAHRGFHDFIRTKAEQYGRKIIAQNEDWTSQTCSWNGEIKSPGKKFIRDGNIKLDRDYNGARGIFLRALRESAIPHNRGATPELFNQCQAE

SEQ ID NO: 2742 - protein, 411 aa, unidentified
  REGION 1..411: note = Table 20
MTSTYWDKRCEAISPFLWLPSVKVLDGIKESEANFEDVTPLKGTWFESQMYSLPYSQHCRKSERKECSQARRTRKIRIYPDAKQREILMHWMRAARYVYNEATEYVAKSGKTEWLTVKAVILKNLPDWMEEVPYQIKAIAVRDACITFHNAGGPKFRARRSSKQSLFVPKASASRRGVYTRYLGKMDYAEELPEVIGDCRVILDGGRWFVSVPVSVIEYEEMTGKVAAVDPGFRSFVTFYGLDSCGKAGRGAFSRIHSLCGYLDDLNARMSGVSHRQRYKMRKAADRLRWRIRNLLEELQHKTALFLVKNFDVIALPEFRAEDFGSGSLREIAGNAHTVFQEFLRAKAREYGVKVIVQDESGTSGTCSWNGEMRTAGRYIRDGVVTLDRDYNGARGIFLRALRESAIPAPV

SEQ ID NO: 2743 - protein, 433 aa, unidentified
  REGION 1..433: note = Table 20
MERVEGKFRDNVLCNAWFHNELHVPKSRSVPPYGNRFIVREKLKFSGVRTRKKRIYPDTEDKRILVRWMGASRYAYNQAVETLKKGASPYDWRKLRNVLMPEMPEWSKEIPYQVMSEAIHDACKAEKLRRQEHPEGKLHFRSRKNPKQTIFIPKNAVRHNRIFTRYIGNLHPAEDFGRERIHRTEKSSWTEGEFDVRLTKSHGRWFILDVEVVAPAFAENQGRVVAIDPGIRAFATFFSPDSCGKIGNGDFSRIMRLCLNMDRLKSEFDNTKKNKSLKAKKRYDRRKRLLKAMDRLRWKISDLVDELHFKTIRFLLDNFDVIVIPKLGVPDMVEKTKRKISSKTVRTMLSFSHFRFRQRLLFKAWEVGKSIVFVDEAYTSKTQTWNGIVREIGGAKTIRDAVDKSIVVDRDYNGARNIFLRAWRDSSSVLASA

SEQ ID NO: 2744 - protein, 524 aa, unidentified
  REGION 1..524: note = Table 20
MKAKLNVKNSNQETEELMSQSSCTSKNEDQQPSVTVEFRLQSKKMICKDKLNTCKEDIQQPKLSKISDQALITKEKVLMPYWNEQCKEKSSNLWLPTKTVLQDLEQISSDRFLSSMVENSWFSTKFYCLPNNNSQKTYVQSSTSFPVDYMDCENIKIVSRRIRVYPNQEQRAVLRNWFGTSRYTYNQVVSYLKQPNTISSWAKLKTSVIHELPEWSENAPYQVRSIAIKDACKAVSKAKLDYKKTGKFCEVKFRSKKDLEQSIYIPKSAVSEKGVYYTLLGNLFSSEKISTINDSRLVYDHGRWYLCVTKNVTIRQVDSQDRIVAIDPGIRTFATFYADDCCGKIGFRDFGRIQRLCEHLDKLISKISIAKNSKINNAKIRNMKKATNRMRLKVSDLIAELHYKTALFFVLNFDIIVIPKFETQGMAKIGGRKLKSKSVRSMLTFSHSKFHKFLEYKAAQYDKVVEYQCEAYTSKTLSWNGKIIENLGSRKYVKDGSIVMDRDLNGARGIYLRALCEIPPSKVA

SEQ ID NO: 2745 - protein, 564 aa, unidentified
  REGION 1..564: note = Table 20
MKAKSKASKTQQGKDFTTLNPTPVAIQLELPLFATVESVPQSSATTLIDKSCICNPSTQQQKLSETLGQVSTLSAKVCNPYWNALCVEISSHLSLPVVTDSRGLDSSFFNSWSSKTVDKSWFSTKLYTVLECPQKKGEPSSPLFKRGVVQDISNQVPPFSTCKTPDPNQNLHRIYSQSFTSSVAECMDLENTPKKSRKIYLKLTPEQKILIRQWFGVSRFVFNQTLELLRDGVIKANWKAIKGSILNSLPDWCKDTPYQIKSIAIKDACKAVSNAKLKYKQSGVFYNFKFKSRKDPKQSCYIPKSAVSEKGIYHTILGEVKFTETLPKNFGDCRLVCVYSDYYLTIPTNSLQLETENQGRVVALDPGIRKFFTFFSESSFGWLGKNANMKIQKLCFKLDELCSAISKSTGQLKRRLKKAANRIRAKIKNLVDELHKKTAKFLVDNFDVILLPTFETSQMSKKGKRRIRSKSVRQMLTLSHYQFKQFIKHKAFEHNKVVLDVNEAYTSKTVSWTGEIVKIGGSKIIKSPSTGKTMDRDLNGARGIFLRALVDTPWLRENLSLSIC

SEQ ID NO: 2746 - protein, 253 aa, unidentified
  REGION 1..253: note = Table 20
KSAVSDKGIYHTILGEVTFKEALPQSFGDCRLVKAYGDYYLTVPEEVSRQQSENQGRVVALDPGIRTFITFFSESSFGEIGISANIQIQKLCFRLDKVISKIAKAKCKSKRRLKLAATRLRGKIKNLVDELHKKTARFLVDNFDIILLPTFETSRMSKKAKRRIRSRSVRQMLTLSHYRFKQFLKHKAFETSKVVIDVNEAYTSKTVSWTGEIIHNLGGAKFIKSPTDGRVMPRDLNGARGIFLRALVDTPSL

SEQ ID NO: 2747 - protein, 380 aa, unidentified
  REGION 1..380: note = Table 20
MGLGDTVNKSKKIRIYPNKEQRQIFKNWLGTSRYVYNQTIEYLSKTKEKEHWMKVAKNILDNLPDFCDAVPYQIKKIAIKDAFQSFFLNVKKIKKNGGKFNLGFRSKRNSKQSCYIPKSAVKITGIYPRISGKGLKYAENIPTLIKDSRLVYHSGRWYITIPTEEPPKLSENQRHRVVAIDPGIRTFATFFSDDCFGQIGKHDFGKIVRLCQHLDGLISRMSKSTGQQKRAMKKAAHRLRWRIKDLISELHHKTAKFFTDNFAVIFLPYFETSKMTCKAGRKLNRKSVRSMLSYSFFKFAEHLKHKCFETGTTLIRVNESYTSKMNSFTLKIIPKLGSKEFFEHDGFRINRDINGARNILCFSLVDTPSVRNNIAKVNEN

SEQ ID NO: 2748 - protein, 447 aa, unidentified
  REGION 1..447: note = Table 20
MKQLNEGDYELFWDDSCERIGSHLLSHIQIDSAALETISSHAVENSWFITERKFHQNNNPNLQSYTSSLVECEDLEDTQIKSRKIRIYPTQQQKILFKQWFGVARKFYNETLTIYKNGSDKVWHKVYQDIAEQNKEHDYIKAVPCQIKNRAVYDYRKALSINKMKAKRSGKPFEMKFKSKKNPKQSCYIPKAAIKSSGIYHTIAGKLKMTERSWFENEDIKACRLTLEFGKWFIVIPKEIKITPIENQEGVVAIDPGVRTFATYFSTEGYFGKLGQGAFDRILKLNLKIDKLISKLSKETNKNKKSNLKRSIFNIRFKIKNLIDELHWKIIKFFTSRFKVIIFPPFNVSEMVKKSKRKLPKKVVRSMNCFRFYEFKERLKLKCKENGVTFVESSEAFTSKTNSFTGELIENLGSKEKFMFNNISIDRDINGARNILIRAMRDASAYC

SEQ ID NO: 2749 - protein, 493 aa, unidentified
  REGION 1..493: note = Table 20
MELITTGKELKPFWNSYCEVIGSRLWLPTETASLGSEQNCSNSYLRVTEENSWFSVMKRNLQNKNLQKIYSQFSTYSHAECMEVVSTKKIRIKPNKKQQQFLKEWIGSARNAYNYVVAKSYDHKNLNEDTLLSLQASGLTYDQSKEVIKTSTFPSWMELKRKDNLDYWNTREEWLKPIPSKCFTEAFKHACEARKAGFKKGSKFSLKFRSRKDKVQSCFIPKGAVKSDGIFKLNMKRFSGLGEIRFTEKLPKDHLDSELVLDHGQWFLCVPYKKRLIPVESQDKVVALDVGIRKFLTFYSEDSCGFIGKNATDRLFRLSKILDTLVSKIATSSGKLKRVLKLKADRLRVKIKNLVKELHYKVCNFLIKNFDLVLLPHYEIKDFVISCSRKLNNKSVRKMLSLSFYKFSQILIRKFNEKKGLLSIDGKFYSRVVRVNEAYTSKTQTGDGKIANVGSRETLKISKNVTIDRDINGARNIFLRALVDSPILRGLTS

SEQ ID NO: 2750 - protein, 401 aa, unidentified
  REGION 1..401: note = Table 20
MAGEAIKTVKVIRAKKIRVFPNSQQKMILSSWFGASRQIYNMTVDYLNLPKELKTKGNWMYFAKELFHSLQTDPKFSYLSDIPYQIKKLAVEEAFKAFSTNIKKIKQTGKLFNLKFRSRKDPVQSFAAVSSAIKDKGLYVRMLGDMKLAEPLPNKPKDSRLVKENNQYFLKVPYEKEVTFSESQGKCIALDQGLRTFLTGFSETEVFKIGNQCLSKIARLCISMDKLISKMKKEKLHLKKQRMKKALMKIKAKRMNLIDELHFKSINYIVSNYDIILLPNFNVSDMVSKTKRKLNSKTVRNMLNLNFYQFSQRLIAKAEVLGKQVIRMSEAYTSKTVSWTGGVNDKLGSSKVVKSGTVRMDRDINGARGIFLKALVDSPSFLNERALSSNLAADLADLDQV

SEQ ID NO: 2751 - protein, 418 aa, unidentified
  REGION 1..418: note = Table 20
MSHTSFPSFKFSIQNELAPLNTRKIRIYPTATQRAILRRMMGTARYVYNQTVEYLNQDGTKANWMGIKGGILNSLPEWAKEIPYQVKSVAIRDACKAVKNAKKKYKQTGKFNEVSFRSRKAPKQSLFVNMTTINDHSIFPKLLGDMKFTEQVPKEIKHDCRLVLEDNYRWYVVIPMENMELEPTRTKDGSISIDPGVRTFLTGYCEKGIIEIGKGAQTRVIALCFQLDRMQRKMTKVNAKRRQNIKRAWRRLKFRLECLKSELLWKSATFLAKSFDTIVIPPFCATDMAKKAKRRITSKTIRAMMSLAHSRFRDILGWQCRKYGSHMLLVSEEYTSKTCPSCGRLHETLGGRKVFRCPSCGYQAPRDANGAFNIMLKAMTDSSALQKQSATVSYVNRNESAMVDSPALHKQGATINFC

SEQ ID NO: 2752 - protein, 640 aa, unidentified
  REGION 1..640: note = Table 20
MDDSHPCLIDMLNQQQSNNIMESTAEPLINGQEMEQLNTCDQHQTDNGYMGSSMETQVMDMFPSSMDESLPESNSITSDDSSMSSNRSTQDALPSPIVLPDLTTTAPVLNRFYDSRLKDVYNMFIYPTETDSVGSATISSSTYSTTMEQQLKLTNKMNSLPQTNRPSLQTTSFLSSQFSVLGCTEREVEAAVDAQVGEKRKKIPFQRQTELQGNLRTYKIKMFPTPEQKDELKRTFGMARYAYNWAIAQMKEGKKPNNIQLRNEFRKLPLPQWASEKKKQVATRITAGAIKQAVDAVLTNLKKKKKDPSHHFEMTFRSKFANSEVVNIEKAANGGSLAKMQAYTSEHLPYRAGRKNALLYFGNNLKQAGPILIEDNPNVIDMFVAEGKPKEDGKILYDRRRNTYYYIYLYEQPALRDPDPGFSDKDIVCTDPGEVVFQTFYSPSGSHGELLLDFRQVLLERCKKLDILHSRVTKKEKMRRQGLLQGRKNYLIIRRLKQAWARERARLSAFVERAHYFAANYILKNYDIIIQPQMAVSKMVSDLNSKVARSMLTMSHYMYNRRLEWASTRYAGRYIVHANEPGTSKTCTNCGYWHADLGTSRTFKCPSCGIAVSRDLAGARNNCLHAVGTVIRNRQLSEKR

SEQ ID NO: 2753 - protein, 229 aa, unidentified
  REGION 1..229: note = Table 20
MEKLKSFGQKKWKKKKKKKKKKKKKKKKKKKKKTNNQATKEERLKPKRKDLSRSDIPPQVEYHEDLKVIALDPGVRTFNTGVDTKGNATEFAPGDAGRIYPLCHHMDLLQSKAFDKSVGSKKRYRLRKAWHRAIKRVTHLVTDVRNKTVKHLCKNYDVVFLPKFNTKDVVNRAKRNIGNGGHISASAEVQVRIARASRRRKQANKIDLGPVNANDMGMECRRIVERVFV

SEQ ID NO: 2754 - protein, 245 aa, unidentified
  REGION 1..245: note = Table 20
GTQLVFTKGRWLAIFPEPVAVTPTEANGVIALDPGVRTFMTGFDGSRFLELGSGDIGRITRLCQHLDDLMSRIAKEPCRSRRRRMRQAAQRMRTKIRNLVDEAHKQIAHYLTHNYSIIFLPTFETSNMVAKAKRKIKSKTARAMLTWAHYRFKLTLRHQGEITGTTVVDVTEEYTSKTCTHCGHVHSQLGGSKVFRCPECGFTLPRDWNGAFGIFLKALRDTASVTLTGNSAIVALSGNSRINVA

SEQ ID NO: 2755 - protein, 533 aa, unidentified
  REGION 1..533: note = Table 20
MTSTATSERQRKSNESFCTPESAVGGRSQIWSDRLQGWLASILEPKWSERLAAVSTSKDQSSLPYWNEFVREMSERLWSLTGIDSAGLDLSSLSGTAVNTGAKSWFSMTITFLPNRNWLRISSPSCTASAVGSTDSENTGLQSRKIRIYPEPALAKVWKRWQAACRYCYNQAIAYQRQHGAPKTARKLRDIILRSDLPEWVKDAPCHIKQNAVVEAWLAFRRSKEARFRSVRDRSHTLQFNAGNFRNGTWYPKLTRGLAFRASEEMPREWARGTELMRVKDRWYAIFPEPVNEQCSLAKGVVALDPGVRSFLTGFDGAGFVDIAKGDFGRIVRLCYHLDDLQSRLSKAPRPKRRRMRQAAFRLRERIRNLVDECHRKVAVFLTDNYRLIFLPTFESAKMVAKAGRKFGSKTARAMLTWAHYRFKQLLKFQAKKKNVVVVEVSEAYTSKTCTKCGHIHTKLGGAKVFRCPKCNHRLPRDWQGALGVMLRALRDTAFLFGLRPSSAVASASRSDNGNGQNAIASPLSSNAQQCSA

SEQ ID NO: 2756 - protein, 602 aa, unidentified
  REGION 1..602: note = Table 20
MAIALLLLLPDWEFQQKPSNAGKTGEKSKRIAPKATIEDSKHQQLTLCLELNPQTTEKQFFTQELVAEVKKTTSIHRLTISYLNILAAKSSETLEVGSTSEEKVYSPYWNEFCQAMSSWLSFPTKTDFAVLGSTITHGSRANSRVKFWFSTTITCLQNARWLKIFLPLFMSSVAGFMDSGNTKKLSKKTLTYRVYPLRETKKVWMLRIHANRKVYNNAIAYLNKHQGFKYVNTKGEVKTSGKKEFRSFCKTLGKEIIPQWCKDLSIAHALDNALFEAYTAWKKTDRQPKFIGGKEKKPNPNRGLKIAKFRSIRDKNQTIQFDPNDYKNGHWMASKGLEKAEFWGQDFCLINYNDATELTYNKGRWYANFPIDMEVVEPRNGGKVIALDPGLRCFLTGFDGNNFTEFASGDFALIAKLCYHLDKLKSKHDLAKGTYFKRYRYKLRKAMERIRTRIKNLRSECHKQVASYLARNYDVIYLPTFETSQMVVKKARKLRNKSARAMMTWAFYEFSKTLEHLCNRYGSRLVRVTEEYTSKTCTSCGHVHTKLGGNKMFKCPHCGTIIKRDFNGALGIFLKALWDTTLVSTVSAEEVVLSLACPECLG

SEQ ID NO: 2757 - protein, 512 aa, unidentified
  REGION 1..512: note = Table 20
MVLNQEQRHLLKKWVRLNRKAYNLAIEYLNQHQGFDRTGIGGTGKQAFKTFFKAQIRPDWLKKELPAAILDRAVMGAYSAWSKTKKNPKYVGKGKQKQPHPQAGLKIARFRSIRDKSQTLQFKVASDLKQGKLLPQYWGNLGAFECSDNGTRFCVIHPDYTPEVTYKNGNFYLSLPQDTEVKDNEKESFIAFDPGVRTFLTGFDGNRFIEFGESDINRIVRLCRSLDKMQSQRNLLKGHKNRPAGVDKEVLNTPDERVKLVNSWEMPKANPTRRVYLPKSNGKKRPLGIPTVRDRVAQAMVKNILEPEWEAVFEPNSYGFRCGRSCHDAIAQCFLRVQGGRDSWVLDADIKGFFDNIAHESILTAIESIPHGDLMEGWLKAGYLDRGILNPTDMGTPQGGVISPLLANIGLHGLEDFIKSINPKLGVIRYADDFVVTSKDKESLEHILDQIKQWMSERGLEISAEKTRIISMEEGFDFLGFNLRHYGGQLLIKPQKKKVLAFCKKRRKQFTA

SEQ ID NO: 2758 - protein, 553 aa, unidentified
  REGION 1..553: note = Table 20
MTLIPSYQLKEQTKQSSSRAGFLATLNSLTWKDKYSFLSLVTPVVKSSKKSEADSTSEEKSYLPYWNEFSQAMSEWLWSAIKTDYADLDLNSSNGCAKNAIVNSWFSTKLSYLQSEKWLRIFWQSSMSSVADCTDSENTNRKSVKVCTQYRMILTLEQEQLLMKWVRLNRKTYNMAIAYLNQKQGFDRTGIGGTGKQAFKTFFKAHIRPDWLKNELPAAILDQAVMEAYSAWSTTQRHPKTISKGKDKKPHPQAGLKIAKFRSIRDSSQTLQFKIASDLNKGRLLPQYWGELPAFECVDNGVRFCPISNPYTPEVTYKHSRFYISLPEDVEVVDNNKDAFIAFDPGVRTFLTGFDGQKMIEFGNGDIHRIVRLCQWLDKLRSFRDLSKGFKNRHLRYRLSQKMKRVTRRIRNLVDEMHRQVASWVAKNYRVIALPTYETSQMVCRAVRKIKSKTARSMLSFAPYRFSQVLEHQCARNGSVLIRHTEEFTSKTCSRCGHIHYSLGGQKIFKCSNCGNHLPRDWNGALGNFLKALWDTTLLNSASFDCVQMTVFV

SEQ ID NO: 2759 - protein, 420 aa, unidentified
  REGION 1..420: note = Table 20
MYGKNQYKKSQNQPPNSLAKIPIYPCEDLHKIWKQWLAAYRWVYNQCVEFLNSGLKLPKGLSLDQHIQNLQRFPYLEWTQCLGKTRQEAVCEAEQAFRQALRAMNRKPKKERTSVRLKFRSCRDNSEAIKFKNDAYKSGTWFPTKVKGLLYCTAWGYEIPIECKYGTQLLYQHGQWFACFPEVKKVPATGSNKVIAFDPGNRTFLTGYDGENILEIGKGDIGRITRLCLHLDRLISQKVKARGKAYKKYRYKLSRSIAKLRVRIQNIVNDVHLKAASLIVNSYKLVFLPTYETSQMVLKTARKINRKSVRNMLTWAFGRFDSHLEQAAKRRNVLIIRTNESYTSKTCPHCGEIHHNLGGNKVFKCPSCGFKYPRDWVGAVNNLLAALQATAFSVQGNQLSIGSTELADVRVTQFHEECET

SEQ ID NO: 2760 - protein, 408 aa, unidentified
  REGION 1..408: note = Table 20
MKIKLYPSKELHRIWKRWLAAYRFYYNQSIAILIKDYDVVTKTIIDKKTGKPKEVKITSDDLDKILLHLENIPEWVKTLPGHQRQEACSEAYDAFKQARSQGGEPKFKSCKATSQTIQFKVGNFKRGTWYCSTTKGLKFSSFQSVPQDCEYGTELVYKRGEWFGCFPQCVEEIPTGSERVIALDPGNRTFLTGYDGENILEIGKGDIGLIQRLCLHLDQLIGKGDKAKSRQKYRIKKAIKRARTRIQNLIKDLHNKAVSLLVNSYKVIFLPTFDSSQMVCKINGKGKKRKINSKSARQMLTLSHYKFEQHLKQAAQRKGVIVVLCNESYTSKSCGSCGHIYEVGSSKTHSCPNCGTKTSRDVNGARNIMLRSLVSLKFSVSDNSIILSDAPQGIVGNDQERHVENVLL

SEQ ID NO: 2761 - protein, 573 aa, unidentified
  REGION 1..573: note = Table 20
MPRRGKLLKSSKSLQKHCETGTETARTEQLELLRVIDGTISIPSSIQRAIQESESSMPELAHTNKSQRWCDKPTTCNPCSQTESLSKKSAQDSTTSAKDFFPFWDKFCQEMSEKLWSRSKTDLSGSVLTLSNGSVNKKIASSWFSTEVTCLMSEKWLKISLPSSMSSVADCTVSESTSLLSKKIRVYPETTLAKAWFQWISAARWCFNQAIAILKTQKIGKYDLRKMVMDMAPSWVSQTPYNPRQLAVFQAFEAHKAARKSGGDAQFRSVREPVKSIRFQKDNWKKGAFYPTQTKGLSFKASEPIIDKMHHEPALVLDRGRWFICYAIDAPKPEPLDSQLAIALDPGVRTFLTGFDGSEVWEVGKYDIGRIYRLASHLDRLMSRIGLSKGRQFKHLRYRLRKAAQKIRIKIRNLVDELHKKAANYLCTKYKIIFLPTFEVKNMIKRGKRRLSTKTARKLVTWSHYRFKISLKHQAAKYGCVVVDVTEEYTSKTCSKCGHVHTKLGGNKRFVCPSCGHTIGRDINGAFNILLKALRDTSTSGVIASFQIVPYSETSGAIPDFSGLNVSDNTCKG

SEQ ID NO: 2762 - protein, 235 aa, unidentified
  REGION 1..235: note = Table 20
MEDFKKGTWLPLVTKGLKFQASEVIPTTNIEYQQKQKDGTYKSFVREQSWDAETKLVYDKKRWFAVFPKDFKPEDSKSQSIIALDPGVSLRDMKRSFLTGFDGEKFVDIGKGDITRIFRLAQHIDGLISHKTVLKGRQNKYKRQGLNKKINSLFIRIRNLIDEVHKKVAKWLTTEYRVIFIPTFESSQMVAKSGKKKRKLNSRVSSANVKLGTLPFQTNSEVSGFKTRGNRNRCN

SEQ ID NO: 2763 - protein, 332 aa, unidentified
  REGION 1..332: note = Table 20
QQMYKGKLPNNAKIRAMRAKGLSIEETRKDKHRHIASNALRDQHPLIPFPKYWDLRPLRTYEPIETPDHTVRITLYNNQFHICIPSKPSAPLISECKEIRACAIDPGVRKFATVYDMNEGHCTEFGAEGRSRLAKLCYNMDRLLGRMAKCKRKRRLKSLEKARCRLSQRIQNIRNEFHCQISNYLTNTYDLILLPIFKTKEMSAKTRRKITKKTTRQMLTWAHYKFQQRILNQAAARGKCVILVCERYTTKQGQCCGWMHEKIGSDETFKCRQCHSQYDRDHGSSRGVALKWISDGCPIDIKTASTTCGATPLGLHPSSERAERGSETLSFV

SEQ ID NO: 2764 - protein, 504 aa, unidentified
  REGION 1..504: note = Table 20
MNKNSVFVLDKNKKQCNPVHPAAARKLLTEGKAAVFRQYPFTIILKDESTDEIKQLRIKIDPGAKTTGLAIVSDTNIVWCAELGHRGFQVRDNLSDRRIKRRSRRSRKTRYRKPRFLNRKRPQAWLPPSSMSRVFNIQSWVKKLCRLAPTTSISMELVRFDMQKMVNPEINGVEYQRGELFGYEVREYLLEKFNRTCVYCNSKDGPFNLDHFHPKSKGGSDQVSNLVLSCVKCNQAKDNQLPADFLSDRPKLLAMIDKQRKQPLADAAAVNATRWKLKEILKTTGLPVEIGSGGLTKFNRKHLGISKSHWTDAACVGKSTPETLNIRGYQPLLIKAMGYSFRQMVKSDKYGFPRGAPKLRQKSFFGFQTGDMVKAVVPKGKYAGTHTGRIAVRKKVSQMTIKSSRKLRSKSVRQMLNWAHYRFELFLKHKAAEYNKIVLDVSEAYTSKTVSWTGEILNNLGGKKVVTGNDGFRLDRDLNGARGILIKSVVEKFSTTLGDTPSVS

SEQ ID NO: 2765 - protein, 548 aa, unidentified
  REGION 1..548: note = Table 20
MGCSQPLETPRNIISATIRPSGSGPMRESSGPSTPQEASVATNSRNVRNPKRPITVTAGSVPQSNTMTSNDRSSPCGPSSQDTESSPTSVPESTGNVRALKPFWNPRCTELADVLWLPTETVSPVLASNSSSGSFEPTEPTSWFNTKTWTPHRQQSSQKTSSQSPLFSPANITGSVAMPKKAMISRKVEIFPNVKDAMVLKRWCGLYRRMYNLAIEKMLDTGRWHWKGHKVLTTYDNIPKNEKVRLLPTNIRKEAYREASTAMAKAPHKNTVKFKTLKRNGRSLRVFGAVSIVDTPDGKRIKLTDSQKHKQLSKELIGFDQKNLADIRIGSSSQIVYDGKWWLLSPFEVERSNVPKKHAVALDPGVRTFQTTYSPDGTSKKLGDQASCRIFRLMKYIDKLAVFKDKRTRGKRLRLERRVGNLVDEMHWKIARELATDYDTIIIPPFETQKMAKKWKNGRYRKINKTAVRMMLRLAHYRFRERLIHVANKLGTRVVICTEEYTSKTCGNCGVVNADLGSAKKFKCPRCHIHVDRDGNGARNILIKSVCC

SEQ ID NO: 2766 - protein, 320 aa, unidentified
  REGION 1..320: note = Table 20
MRKYAVKDATQAFVTNFAKKRKNSGHSFRVGFKTKKHSTKVLKLEAAKMGVKIVDGRPRLVVGDARQRQLGREGISFDRRGEALVRDTKDPVLQIDDLGRFWLITVCTRQPETQGQRTQGVVALDPGVRTFQTTYSPDGTSYKLGDTASNRVYRLLLVRDKYIGLAHMRGPSRRVRRSYGKKAAKIMARIQHIVDELHWKTARFLAQGWSEILIPVFGTAAMSKKYQASRAKRRCIGRKTTRQMLHLRHYTFRQRLHHVAKLTGTVVREVTEEYTSKTCGNCGEIKANLGGAKTYRCQECGVCLDRDGNGARNIFIKSVL

SEQ ID NO: 2767 - protein, 487 aa, unidentified
  REGION 1..487: note = Table 20
MPVKLLPSIGKYRFFGNDIQTRELPVTLPLDSISVDEASSPYWNALCAETQSEWWLPHRTVSPDPDSRSSDTSSNYLEVESSFWKSKIKPILSTCANSLRLSLPSATPSMESAHIKGTEKIRVYPRDEAFVIGLCRQHRRAYNQAIGCFVEADEGYIDRNDPDLRKVNLRRIIRDFVRAEAHERGETFGSAACDEAVVEAFKTRDAVIKKRMRGEKCDYSFKSLKEVRQGFIIQKLTPYFVTRNFHVSEALPEEAFGAQTRIISERGQWFICAQKHITTVGQDEIQAQSVVAIDPGVRTFATAYSVDQCTTYGEDFYITRIWPLLEKLDELIGKRAKSRNSQWTRHFQKKIDRAMVRVRNLVDDLHKRVAHDLVKSFDVILLPTFETSQMVEKQERKINTKTVRSMLGLGHYRFRQRLEWMCRKYGKRLVMVNEAYTSKTRSWDGVIHDNLGGAKKISDGTIVVDRDVNGARGIMLRALYGDQEPCT

SEQ ID NO: 2768 - protein, 551 aa, unidentified
  REGION 1..551: note = Table 20
MRKSKIPKVGITESELMSQLPPFSMLKEEVPSKKASLTNQKMKKKWLANSKDLSLTLDQDLTKIDVDIEPFWNSLSTAIHYTLWQPHQIELPEPVSPSLNGLSQPKVSEANYQVGESNFWKTQIIPSNLIQQRLSLSLPASSTPTTDQCAQDVITSKKIRIYPENEPLWFVSLNLSRRAYNLSIEFMRKGRKPSSEFRTQICDWCQIECEENETAYNSNLVLAAYRKACDTRTAVIKKRIKGEKAEMSFMSRNAPRQYFVVPKFSSKKQIFPRILGGCAWTEDVPNEAVGKTVIVTYTNGQWFASVKSNQSVKPTKNEALSIVALDPGVRTFQTAFSEIEAVSYGDGFVNNRLVPLMLELDRLLSARDKLHREDKSKQWVKDRLKNLNRRIYKVRARQQNLVDDLHRRVAYDLVSNHDVILLPTFETQQMVKKSTETRKRFLRRKTVRGMLGLAHYKFKQTLKWMAKKYGKTVRDANESYTSKTLWDGSILKCLGGKASILFQGKRVNRDIHGARNILIRFLTKVIDGLSPQGTCSLNITKAGFCGFGVLK

SEQ ID NO: 2769 - protein, 478 aa, unidentified
  REGION 1..478: note = Table 20
MVSVLDLTLKDQALEPFWNGTSDGLSKLLWLPHKTALQGSTSLPNYRVVQSKHLIKRVFPLNAASMRVSVSSQAMLTHIMANAVRKEGRTVAATKKIRIFPKNELRFIQALHTYRLAYNLTVEAINAKEKLGSELRRSITDKIKATYTNDESPEHYVYNVDLIHEAYRKCEGAYRAQLKKFKTKGTPFTMRFMSWKYSPRYFMVKRLAKSGFPYPKQLGEIFLTEPLPEESFNKSAVVKYENGQWYISVQQHITVASLVKGETSRICALDPGVRTFQTLYSENQVVKYGEGFSKAILLPVAQSISKWISKRDSFIAKFKDRQETQYYNDMMKCFERKLNKLKARRNNLINDLHKQVAYDIVMNNDVILLPSFNTSNMVSKGKGGKRKLGKITVRSMLNLSHYKFKVYLNYLAMKYGKTVIEVNEAYTSSTFEGKIFSIGSKEEFKTTLGKIIDRDITGARNILIRFLTKSCRVNILHT

SEQ ID NO: 2770 - protein, 305 aa, unidentified
  REGION 1..305: note = Table 20
SNVSYSTLGFKSRKSKKQTFSHPRLGVKGVCHRSLGRVYITEEIPKGALDRNVEVTLDHERWFMCVQKKIIINVPDESQISNNNELKEVKCIALDPGSRTFMTGFTPEYAVKYGEDFSVNDLLPLAKKMRKLYSLQKKLKSLPCYDEKEENRPDWLNHQLRSIEKKLNHLECIRQNRVDELHKTVAFHLVSHFDVIYLPSFDTKDMVNKETRNIGRKAVHNMLSLKHYEFKQFLIWTARKYNKKLFIINESYTSKTHSWSGFLDEKLKDKKWVSDDVIKVDRDINGARNIYIKHICQCINKITAC

SEQ ID NO: 2771 - protein, 471 aa, unidentified
  REGION 1..471: note = Table 20
MKIKPDIKIEKAKDEGSYWSPRAAALSSGLWLPATESKKENHWISRHGWMTALKPLSSPTAFDVTLPAAALDIKNNQPVTIKATKKIRFYPESEMKYIQALMLYRRAYNLAISRYLEGSYKDDDGKMYDLRPWVKLACKLEQKEKGHVYNSLICDNAVREAKTTFLAMAKKNKGKRYDQPGFARLHYKSRKGEIHSFRMCRMPAGLSPAVRALDKIHLTETVPKEAIDQAVTVTFDKGRWFINVQQHITTKAETQGAVRCVAIDPGVRTFATCYSPSEVIVAGDRLAQEKLFPLMKRVDNLLSQRQRIYNQFAKDIKFDDLPQWARDRLRYIQKKSQRLKAKKEDIIRDLHQRLAHYLTENYDVIFLPHFETKSMVRRKAGRVIRRNTCRQMLDLGHYRFKLMLKWLAKKKGKRVVDANESYTSKTLSHSGEVLSNIGGREFINDGELRIHRDVNGARGIFIKTILQVTCT

SEQ ID NO: 2772 - protein, 513 aa, unidentified
  REGION 1..513: note = Table 20
MRELAQANKSLVLTRKSVSCSKGILTQNLSVTLPVLSTLNEKDCKPFWNQQCSDIQSTLWLPQKTDSQDLVSSLSNGLLNYQVDESRSWMTRITPLNHSTPQNLSVLLPRSAIATTESDLLKGAKVIASKKIRFYPENESAYFDALALYRRSYNLAVERFRNDDYKDENGKFINMRPAIKAQVEQEQKESGRAYNSLVSDNGTLAAATTFKSVCSKNKKLKGAKSGFSEISFKSRKGSKHSFSIDRLPKGLNPCVKALGKIHLTESVPSEAIGKSCIITCDKGRWFIQVQQHIELQTEIQGEVKCVGVDQGVRTFATCFSKDDALVVGDNFSKEKLFPLMKRVDKLIGQKQKVLNTQKGVKFTDMPQWARDRIIYFDREINRLKCKKDDLILDLHNRLAHELVSNYDVIFLPSFETRRMVTRKDKKIRTIRRNTCRQMLDLNHYGFKLRLKWYAKKYGKQVVDCNESHTSKTRSWDGIIDKKLGSSKIIKGDGFTVDRDINGARNILLKHLTR

SEQ ID NO: 2773 - protein, 226 aa, unidentified
  REGION 1..226: note = Table 20
MQVQQHIDIQTEIQGDVKCVGVDQGVRTFATCFSKDDALIVGDNFAKEKLFPLMKRVDKLISQKQRVLNTQQGIKFKEMSQWARDRIVYFNKEINRLKCKKDDVILDLHNRLANELVTHYDVIFLPTFETKQMVRRKGKVRTIRRNTCRQMLDLNHYGFKLRLKWYARKHGKIVVDCNEAYTSKTRSWDGSIDEKLGSSKIIKGDGFTVDRDINGARGILLKNLTR

SEQ ID NO: 2774 - protein, 662 aa, unidentified
  REGION 1..662: note = Table 20
ITEQLTISAKSFMFMKAVDVDLTFAERGILSEASAGFKTDTDISAAQSGFKERSLEKWQPDASDNSSSNAAAFDLNVTGELEQQREWRLKYCPNCKVWWHRDINASLNIRKLYLYENLHNGARPQAFSRSIRKNDPEETAQKNSDFMGGFAPMSSGAPKYSNTPNQRFSNRRTSANSNTSGGPNSSSGHGNTQPSHYRKSQPAKSKTKIKIDDKAAEVYYESTLYLLSSLIGLTVRVYVVQGDIYEGIFHSAETKNQLEITLRMARKVYEGKNERLGTQKITEQLTISAKSFMFMKAVDVDLTFAERGILSEASAGFKTDTDISAAQSGFKERSLEKWQPDASDNSSSNAAAFDLNVTGKWDQFEVNEKLFGVKTDYKEELYTTKLDKNSEEYRKKEQEAERLAKEIERQQSNNIHLAEERGQKLYGVNEEDLYGAVIRDDKHEAKTSDTNSQKKKSFAEMAKNDGRASPSKKQEKKTEAVTSTGSPADKKKSGFNPNASEFKFSASSSSFVPQTQAFVPQQVMPFVPPQAAVQMYGQQPFVHPGMNQQVQNVTQQMKNTTIKEKNSNNFFKKLVASDMKSILDVFTSRFQYRQNNTYEDWKWKGQPFQHQDMFQMQDVPYMYYPMQYPQYYPDYSQGPPQPMMMPYFEGESKLQSQQLTFL

SEQ ID NO: 2775 - protein, 1309 aa, unidentified
  REGION 1..1309: note = Table 20
  VARIANT 1309: note = misc_feature - Xaa can be any naturally occurring amino acid
MAFVNTKTAIERLGVSNVTLRKWDKLEAIPTIRTPGGQRVYDIETFQKTQALRSEEARLCARRMAKDKKNASRIDIGYARVSFSKQKEDLGRQEQFIRDSCPGISILSDIGSGLNFKRKGFKKLLRCIMQGQIDRVLVAYKDRLCRFAFEIIQFICDENNTELVVLNQNENGSAEAELMEDLMAVVHVFSSRLYGKRSTGKRKRYTEGGAEDGALVETIREKLSDIEPHSTRAKKVRMYPTRKQKKILTKYMSDGRRVYNECVRKLIDGVSTSKIRDKAIRAPCMDKTMEKTLRTPEHVRQKAVDQFVAAQKGVETRETGSLHFRSKFNQKQRIGLQKKDSRIHGSSVHLTFKEFDENILLGEELVSDDGILTEIVRDRGVYYATVTKTRPVTPKSDGLRVVSLDMGSRKFGSFYSSDGSIGFIGEEAGEKLSRLIKKREYLKKLKESKSKLTKGWRKVSKRIANLVNEMHNKVALYLVRNYDIIMVGRLSNGVMKTKSHRNQKLLHASLKHYQFRQRLINNGNDHGKKVAIVPEQLTTKLCDRCGFINWKMKAEEVFTCPKCKHSCDRDIHSVDPGARPVAAIGGRNDVGGGGATGERSGGAVDAPVSGKGVAKATQRKNKTKPKQVSPDESDGVRAVVAALRKAFAQAKLRNNDAKAAGKQEDDVHKYNGSFRACNLLRSRRSSTIGAGPNSGEICDAKVHSRPPRENVQVQRVLQGLQPPEVKKVFYDRCWAAINIRISGKNTRNDFSDLLDEIIDQSGFDTSLFPPKVPCRLQETVTREKEVSAKNSIVVHLEAKIKGFLRFRLMNDSQLAFQHLPAKDRSRIIVSLSNDCLEREMRGDLDPGYVPHVLQVRDPLAQVYATEPDVPVLKILKKKTHLFVELISMISNVAEEASDNNRALREETKTRSDEEKVRKAFYMSERIKRGLVDRPKTCTVLPVWKLAPCFPHYSSSVVGSIFHKEGHDFSSVSRFISEHFDLRRVNRKGYKPSGFRSDGYQVQVTFMALVSKKPHVPGTTDLAKSGYQIAKKVVSLETQERGLFVLSQARKDSRKIVADRVHANNLTVVDPGCASVVSVRSCPLEFCRCCRERSRESTDWEMKGTEYSVKSGRTMLEGREKKRRSNDEYGRCFPRFSAVKKKTARKSSFLAYCRVAAETFKVMFAEKMKRARKRSRFHSSRLVQKTVDKLASNIAACPSDRKNIVLFGNGSFRAMKGHASAPRKKLVRAICSRVNVGMLDEFRTSKMCPGGCGGEMTDVQGGQRVRQCTTVCVGVENPCPLFENGVAFRCDRDASATLNFCLAGYCGLVX

SEQ ID NO: 2776 - protein, 546 aa, unidentified
  REGION 1..546: note = Table 20
MLLQTLRSCTKTSNKVNASQYCHIVKGVIMTLMRGGKNATSLPVMQSKRGMAKSELCIADDWNKAEEDYWPDDPSMHSAIDSAFQDMEQLLSRDLSSEGSAGEYNMWTHKWKAPANKRAKTGPASSGPSSRSTVCLGMNLEDIASQLRPFIDRIKDAPALMKRQQTYPLQDPLNVIFKPVTVLAEQLLPEHDVDDGGFESLPVRQTLPDDLGYTNTHEEDFEDLPPEAAQSSGSGSSGSSSIASLVDDTFEDMDAGGADEKEDNSHLKALASSSSTRISNAKRVKQKIEGVMSKMLIEAVDIPEEGAHKELVKRLRKLAYQVNTSLADQQLGRAERFMQMQSRFKTARNMRRRWQKLQNKLTNKVTDLHWKTCTFLTTSFQKIFIPTFGVKGMVGQHRVIGCRTARQMLELSHGRFLERLRHSARTKQREVYIVPEAYTTKTRGRCGVVNENEDSKMCDEFVIDVKRKTTDIGETWTARWGSSTLTAPSGLALREVVHDKLLKDSAEARGVPEAVLASKLNRTWRVRVIEKSTEEDDDVPMFSLFD

SEQ ID NO: 2777 - protein, 366 aa, unidentified
  REGION 1..366: note = Table 20
MLLNPHQKKLIKFWMKENKILYNQALFELNKHQGFSHLGKAKGTKEQQFQTLWGQVYGWRKNVPVKIQHRTIYRAYKAWVNSKIDSKTKQKIAQYFEGRYFTIETAPKGYKKGKLYPKFWGNLPEIILLYNHRKVSLIGENCLTISCRYGRLYLSQPNTEKVLIKKTGKVIAIDPGIRSFATMFDGENGFLLTNEKDLTRLAKIQAYHAKLHKKVKQLDNWFDKKKVYYKMSRLKRKMSNLVKDLHRKLAGFLAKNYDLIYIPSYRVKKIYAKNKSNKTNRKNQLNWSWYKFVQELEYRCAKHGSVAIVVSESYTSKTCSKCGKIHPNLRGAKIFNCPHCNHKLNRDLNGAINIFFNSLFLQGCLG

SEQ ID NO: 2778 - protein, 846 aa, unidentified
  REGION 1..846: note = Table 20
MLNADHDDGDARHPSPAPPPRPPWLDPDLPPRLGPADYGHYQSNPAPPSPPPPTPQDLAPPPLPWLDPTLAERDRPPPPPGLELQPLQPPQPPTSSWESIARLPAKDKQDALIQALRSSQKDDWKAKVNNLLDFATSSLVEEVRVAILLAAAPIFAPWFTDESSRLSRRLWGITGESWTQESARLSDAFSAGKDREWATTVHQPRANREHSIISASSLRFSRQQLISRNDMGQNVSDAREGASFWECRTWATQRLWDAFVARGLNTSSLTKPKGSKRDTGKRKMEDGEGSSDSKKVRKLSYDADSKAAFERRAAKDKKRAPPKRKEPECLRALRLRLYPSAELGAKLREWESLAASLRQMVRARLQKAKDVGEKTDAFVLADQTCLSQTKWNKMTAEERASVDQNRQRLIELPHNFQRELVLKVAANARAAQTNLERGSTKSYRLDSADEDDKSVLFFTSEAIDKRGALFPRILKHIDSNLYVRDRMLAGPGERRRKRSDWVKLLTGASRSFSIHRTGRKWYLLLSHDAWTGPYTEEGKRQGLDKRWNSRNKAVFEPTKRAGNCIALDPGARDLLTGYDAQRQQFYTYLTGFNEHIERAHASIASAQSKLDKLKNETGPTVDTDTGRRRRRARRRVNKQRGGKKKKGRSSSAEQRAARKAAKKSHPHFVRPNERSILRAHERLRVHITQAQNCTVNALVSNYDLVVLPDFMTARMIKRRRRRQGMPYSNVPQREAAVQGDEANEEPAAKFVLAKRSRATLARFGHRQFRERLVAKAQADPNHQKDVLVTSEEYTTKQHPFQRGLHSKIGGSKTWHYCHLRGKRDNVGAFNILLRALTKDEVRLSSQ

SEQ ID NO: 2779 - protein, 420 aa, unidentified
  REGION 1..420: note = Table 20
MEKEDIVVKTKKIRIYPNSEQTKIFVKWMGTARFMYNKSLNFVQTNKIYPNYYNIRNKLVPSNTIQQNEQWLLDIPKDIRAEAVHEMCIAYSTNIKKSSKTHKKFDMKFKSKKYSQSSMTITKENFKNGKIYPKILGENNCILNSAEPIKFNKVTKVYNIKQKIKDRKTKKTTEIIVKKTVEKELINGDCMIVRNKVGKWYICIPEKVKCNTENQGMRIGVHDPGCRTFQTIYSPNGVCFKIGTNAVKQIRNFCLGIDKMISLRSTLTGKKKYRLKIAIDRKRLKIKNRIIDMHNKTIKLLMDNFDIIIIPQFDSGKMTNKIYRNINSKTARNLLSLNHGEFRQRLVNKINEYKYKYIIICSEEYTSQTCGKCGKRNLKLGGNKTFKCPFCEFKMDRDINGARNILLKTEVELASDSSLH

SEQ ID NO: 2780 - protein, 1107 aa, unidentified
  REGION 1..1107: note = Table 20
MPVITRSQKKPKHHPYQTRQRPPRATAAPKAPVTTTQAKQAQQLKHAPWWTDQSKVMSQRLAVQSSGTRSAQSALTKFKVTKKKISWCTANYYEPLAKLNNKIEIHENPPAPYHLNRQSPESKKRKKTKPLQSGMSSYDKKICSRMKSGPDENETMRSVKIRVYPEATQKAALKQIFGIVRVVWNQGLDEMFLRGHPKNWQSLRNKIVTASNVSEEEQASRPWLYDGSICSASIKGEAIHKLVSSIKATEELLRAQNRAFNYQMTRKKKKDSRQSLSFYPGGAYALRCIESTSTRNGTKKNNFGLKLPFDALAQPLKVTSESEFQGAKSIMENEMDKKESNEYKRLVEVVWEKPDQYYVCFPYTKANQEKTIDDHPIAAALDPGVRDIRRVERLCVNLDRLISKAAGVKTGRKNRYKRRRMNAAIQRARQRIKNLISDFHGKLAHDLTSRYNAILIPTFYVSKMVIKNNRKINSKTARNMLNWSHYKFKQKLLQKAEENPNCEVHVVTEEYASKACGICGRLNHKLGGNKTFNYLNKRAKLNLDTGNYKPMDLMPQPQPNRKKATELELKEEPLKGPATDQPELPLNTIVKRFHHTTSSFVARCYLFPLVGDGIERDHALLMVDVLRSVKQVLLWFATHEKSPSFEWTLIRAKSLDLVKKWKRSVILKAHEMTKNRAVDFREESRKMMDQFIEEFEEFVTFLNAQLGYYNKTKSLMSVDDYTLMRNKVHASSRAQSREKNPKIDIQEQGSRIARSRSTPHIYPDDQPNNSSTEKTHIQTVLVPSPDDSDTATIIPEVTSPVESIKTLHRHSNIRPRARTVEFEHESEPLSPTKLSKPQWDIKKLFDNLQELKQKYEEDINEKKEKQKMLINTIRRYSKDDPNTNYVKLASALDAVLPSAILPSAATDLSKFDTGNSVNVPISAIDPHTSGTKSLSAEQNAALKRSHTINVPSKAVAPSLTLVIPDYVPPPIPKLESAKLRPSNSMDVIVKDKKTKAFSPSISAPNLVNKAQNEVMAAPGDGNHRFRKVALLEDIRHSFRTLFSRTDKKKLVKGVDFKSTKKYEGHEKCQVCEDRFSFGGGKVKCVQCDLIVHQKCRENADLGYFDCL

SEQ ID NO: 2781 - protein, 447 aa, unidentified
  REGION 1..447: note = Table 20
MEDENDKKESNEYKRQVEVVWEKPDQYYVCFPYNKTNQEKTKENHLTAAALDPGVRTFQTVYDSFGDFFEAGKGDIRRVERLCLKLDRLISKATGVKTGRKNRKLAHDLTSRYNAILIPTFDVSKMVIKNNRKINSKPARNMLNWSHYKFKQKLLQKAEENPNCEVHVVTEEYTSTACGICGRLNHKLGGNKKFNFVWEKPDQYFFCFPHTKANQEKTINDHPKAAALDPGVRTFQTVYDSSGNFFEAGKGDIRRVERLCLKLDRLISKATGVKTCRKNRYKRRRMNAAIQRARQRVKNLISDFHGKLAHDLTGRYNVILIPTFDVSKMVIKNNRKINSKTARNMLNWSHYKFKQKLLQKAEENPNCEVHVVTEEYTSTACGICGRLNHKLGGNKKFNCTHCGFKFDRDMNAARNIMIKNLESSGYKLVSLSACRLLPVARPQNRYS

SEQ ID NO: 2782 - protein, 1534 aa, unidentified
  REGION 1..1534: note = Table 20
MQNPACNQLSQACCARITGRIVRHVQTLTKMFRRVIIVDETPTAYKLRDSGTPSCLVRQLRAAIEQKTSAEFTTAPGEADHQLAAMLRRKEIHVALFPSSDSDMLLHDAGDGIIVFRHTLQRKAGRVRLRGVCIRKRHKLCMADGIVAILAGCDVFKRAATADTTAAATADTTADTTATATADTTDADTADTTTTAATAAATANRLGFWPAVAAVDRHIRADGDFIASAVAFFCGPVHLDGREQMLAPMPDNFTTLRPPLNQDNDPHQHCIPGRVRVMKNTSRRTGKRVFRRISKQIHTSMQLAQESPRVPQRVQEREAGKQVQTRAQTKEQKKQRAETHVTGRKKKKEDTKKKKKNTKKKDTASVDGGDDARSFFWHADTAAVIPEPASPATPQAKAETPVQLQHQWGLVSVVPHGHDTTAPCLSDKIIAAHKKRQEKKAKEKAEKRAKQQAAKQKQQEQQQEQQQEQQQEQQQEQQQEQQQEQQQQQQQQQQQQQQQQQQQQQQQQQQQQQQQHQQPAASAHPQSHAAPQSPPPKKPSTHQRSRKVRIYPSRVQRQWLNTYFAAATEAYNAAVDDHNAGAAYDGAYARRDGVRVLMRLNQLAALTDEDLKQAYTQQDEAAQRQQQLKEEFERLLQPPPPPPKKPSTHQPAASAHRQAHAAPKQPPPPPPPKKPSTHQPVASAHRQAHAVPKQPPPPPPPKKPSTHQPVASAHRQAHAVPKQPPPPPKKQSKRPGSSPVSPAVLLLLRLQSQGDDKACSGDCGQDTSPTGSTTACTQHQQQPSKKAKMLPPLQLPQVDGAGDLGDDELDGDHQDDDAPSDDAPGPATKKAKSKPRRCTVCRQSGHDKRSCRQTSQSKPQPQHQKQQQKQTQKQKAPQSGQTQSSPPLPPLPPLPPLPDLAKARASLLQLRKLNDELQAAVRERDEVQEVVDDLLDPVEHDRAARSLKDKQVVADTKHRHFLHALQALKTMLLNELQEFQACRRAAKSRKEALAEEHAAKQEALAEEHAAKQEALAEEHAAKQEALAEEHAAKQEALAEEHAAKQEALAEEHAAKQEALAEEHAAKQEALEKHQQREVADLEQRQVQEIRDCTLTDAYARKIADVHRSTWLMTKKGMAVSSWTGSILEFHTALKTQQQRQEENDTFKFHMNFRGQARFTLDASGRYHICVASNFTRGAPDDVGTLGQSLLQVERPVLAGCDDGLQEVEEEEEARAKCEEHGGGDMAMQALEEKARVRERKMGEVARRLQAEAREARRRWVRLRRAKAIDKQTQEAEAEFQAARERHAAHLDWRRRLRKRRRLLRMKERNALLRERRGGVVSIDPGVRVPFTLWTASGTVSIAHDAIEELRMLLRNADDIRADADLLEVAVQEGEARGEGDVAAARRRHRQQLRVVRNRVDHLHRVVANYLVMSFRVVLLPRFGTSRMIRRSGRPFGRDTARSMGVWAHHRFRQLLLDRAEREPGCTVVICDEAWTSKTCGRCGRLHHSLGADDVFACPHDSCRYVAGRDANAARNILLLWLYRNDIQLAPVPAP

SEQ ID NO: 2783 - protein, 707 aa, unidentified
  REGION 1..707: note = Table 20
MTSAAVARHLAKARASLLQLRKLNDELQAAVRERDEVQKVVDDLLDPVEHDRAVRSLKDKQVVADTKHRHFLHALQALKTMLLNELQEFQACRRAAKSRKEALAEEHAAKQEALAEEHAAKQEALAEEHAAKQEALAEEHAAKQEALAEEHAAKQEALAEEHAAKQEALAEEHAAKQEALAEEHAAKQEALAEEHAAKQEALEKHQQREVADLEQRQVQEIRDCTLTDAYARKIADVHRSTWLMTKKGMAVSSWTGSILEFHTALKTQQQRQEENDTFKFHMSRQAARNTIPVDAVNLKQTRGMFAVMCVDKLRVAEPLPAAKDFRGQARFTLDASGRYHICVASNFTRGAPDDVGTLGQSLLQVERPVLAGCDDGLQEVEEEEEARAKCEEHGGGDMAMQALEEKARVRERKMGEVARRLQAEAREARRRWVRLRRAKAIDKQTQEAEAEFQAARERHAAHLDWRRRLRKRRRLLRMKERNALLRERRGGVVSIDPGVRVPFTLWTASGTVSIAHDAIEELRMLLRNANDIRADADLLEVAVQEGEARGEGDVAAARRRHRQQLRVVRDRVDHLHRVVANYLVMSFRVVLLPRFGTSRMIRRSGRPFGRDTARSMGVWAHYRFRQLLLDRAEREPGCTVVICDEAWTSKTCGRCGRLHHSLGADDVFACPHDSCRYVAGRDANAARNILLLWLYRNDIQLAPVPAP

SEQ ID NO: 2784 - protein, 156 aa, unidentified
  REGION 1..156: note = Table 20
SSYRKKYRSAYGCHLKKIDATNITSMCPFRWKSMPFCGRIVSIDLGVRTPFTCYDTRGLVIEWDDQQNEKKNLIQGDEINAHLAKLRAQAIFCCINLTNIFDKNVIICEESYTSQTCGWCEWRNKNLKKKKIFSCKECKLTLDRDFNGGASPEDRP

SEQ ID NO: 2785 - protein, 182 aa, unidentified
  REGION 1..182: note = Table 20
MFLKYIITSQPITEVKNTIIITRNRCEEYYMLVSVPFEKFENQTPISGRIISIDPGARTFITCYNPQVTPQARVVVGEKLPDHPASEIRNLTNGDSKLGPKVSRTMLSWRHYTFKQFLLHKANEYYDRNVVICEEAYTSKTCGACGWQNQLLRKNCRIKMDRDFNGARNILLKYLSESVLLI

SEQ ID NO: 2786 - protein, 403 aa, unidentified
  REGION 1..403: note = Table 20
MRTKFKRRMTSQLKHCNDGLTPEELLLSRHLVKNNSIQLLTYEKSLEITNRHKLCKRPRSVIPDINVSAESNKTGELVKDLLSIVMIFVTRYNGTHFTTNCRKKRKVFKTQKEQKLQNSIEKKSIKQTKKALQAQYLNVANFNNTKLQWILETPYDIHDKIKSAENLSAKLHYNTRLVINQLEEFYLYPDVRTFITGYDSSEQAVKWGKNDISRIYQLSYIYNKIQSIHNSIYGKVHKQKHYKFRKFKIQGMVKRGKWQIHSKIAWMMLIWFYFQFYQYLLHKVYEYPWYQIIIYIEEYTSKTCGYCDHIHQKLDKSKVFHCPSYTAELDWDINDAYNYTFYEYPWYQIIIYIEEYTSKTCGYCDHIHQKLDKSKVFHCPSYTAELDWDINDAYNYTCCPNPK

SEQ ID NO: 2787 - protein, 395 aa, unidentified
  REGION 1..395: note = Table 20
MAASGRIAIVRTPGRKRLYSIIDIHRIFGDNQQTQFTQKAKICYARVSPEHQRDDLERPIENLRQHYPEYEIVNYIDSGLNWKRRGFVALLERIHAERIEKVVVTQKDRLCRFGSELVEWIFEKNGTRLMILGTDVSAENNEVGDLLSIVTVFVARHNGIRSAANRRRRREAAQAQEDQEFQEPSRQDTTYPSLSYTRRAVEIQIMDRDSTLDVQSMPYRSQKEGKSRGEYAFLHKIKSAEPLPNQLEYDSHLVVNRLGVIALDPGVRTFMTGYDPSGIAIEWRKNDISRIYQLSQIYDKIQSKHDSIHGKVREHPWCQVMVCIEEYTSKACGCCGHIHQKLDGSKVFHCPSYTTELDRDINGARNILLRYLTLLHPNQNQESVYAGAGTYPLGS

SEQ ID NO: 2788 - protein, 262 aa, unidentified
  REGION 1..262: note = Table 20
MELGSWYLIWISVLKIVKLENLLSIVTVFVVRHNGMCSVTNPLVEWKKIGRDRRRRQEVAKAQEEQELQDSSRQDTTYLSFFYTREKVETQMLDRNSAMDLQLSKSKGVYTFLCKIKSVKNLLAKFHYDAQLVINQLGEFYLLIVLDSSVRIFIIEYDPSEQAIEWSKNDIIHKYSWCWIIICTEEYTNKICGYCSHIHRKLNGFKMFRCPSCTAKLDWDINGACNILLHYLTIISKKLVYTDAGIYPWDLYDPCRIHIFFY

SEQ ID NO: 2789 - protein, 457 aa, unidentified; identical to SEQ ID NO: 614
  REGION 1..457: note = Table 20

SEQ ID NO: 2790 - protein, 481 aa, unidentified
  REGION 1..481: note = Table 20
MKRTYSATKSSLTLWTAASVKTTSAPKVVTTFSGWMKKILPTRAETSLTLINPADIADPSPPKKKAKKTTPATPKPTLRIYKIGLRPSPAQRKTLNACIVAANFAYNQCVHLVQHKVCKPHLYDLQKIVAKMKTPEDINHRYAPDRDGWFWKSSTIVRLLATKDFCAAYKAIVSNKKKDVAVIKYKTYDDPEAINPLSGLFGCQKQYATVTQAGLRLLPRLFGKDPIPLVKKKLKVATIDHDFKIEKTSKGKFVLCLTVECSLLRRVKPPAPLFEDGYIHACGIDPGVRSFVTVYDPTRQDCYQFGTSAQKAERLDPITNAIDNWNSFVDQHRDKAPPTAIESWSRKTKKLWYKLKNQVRSLHDQVIAHLLGAYNFISLGKLDVSCFRRGTTAKSTNRWLRIYRHFEFRTKLLARVEGTDNCRVEITDERWTSKTCGMCRSIHRELGAKELFECPNCHYTCHRDVHGARNILLRSFGQFPV

SEQ ID NO: 2791 - protein, 446 aa, unidentified
  REGION 1..446: note = Table 20
MSTQTAPELSTFQVRLKPTPAQKLVLNLMIKVTNHAYNWCIHLVETKGFKPKQYDLEKVVGKTNSKDVDPDLRMPDDDWFFDNKLSRIKTRAVRQYASDYQIGLKKVKKREYASKMRVEEGKSALEITPGKNLPTEFKTELENEVNGYIAFQKECVNPMSELQIKRYKPKKPEMCLMIFNTSMKGPVLLSRPVSRLPPLDHDMKIIKRPDKKFILCIPCKQSYTRKDFSATEKTFAAIDPGIRTFATVYEPENNNFIEFGNESWFKSSKIQKIQKQIDETNALLTKVRQRGRGAAIIENYERRLKKLHFKIKKKVDGLHGKINGHIRKNYSQVAWGDMAPKQILMKDGLTHGTKRKMQMLSHGRQHEKLARIEGVTMQNEKYTSMTCSRCGYVNKKLGSASRYVCPNCEQDIGRDENASINIWRKYTGTFFRTIGGEHVYEDDVKK

SEQ ID NO: 2792 - protein, 519 aa, unidentified
  REGION 1..519: note = Table 20
MNRKRSLSPLTLWKAAHVFKHQNLECWFQFAKDGESHNKVFASDFERTRKRAKLEDEKTFMTTFSVGIRPTRNQKRVLNEMLRVSNHAYNWCNYLVCEKNLKPKEYDLQKYVSKTNSSDVPTDFRMNNNDDWYFNNKMTKIRDAACKDFCTMYKSALTNQRKKKKYIKTVSLKDKDDMNPSHGAFEIQKALIRKLKETDSDDYDILNNCLSVMADNFTMRRKDVRNRFLRLSKPVSKLPPLEHAVKIVKTAKGKFVLHIPCEPTYTRSKRYDEPFDSLCGIDPGGRTFLTIYDPSKPRAFQIASRCKAPSKPVRKRTKKKGEKWHRKKKSQRRVGSTIDKIDSLHAKKDYVNSKMQAAIRRKQPQAKKDRQRQLQKVYYQLGNVIRWVHLRCTYNLMQYSYVAIGKIGIPSIIRRQCNGKRRRINKKSVRHLTVWNHCKFRERLVYRAKGTKTNVIVQDESYTSKTCSECGTINSKLGGSETFKCTNPSCDYITNRDVNGAKNILRKSLGIGSIKTYRA

SEQ ID NO: 2793 - protein, 483 aa, unidentified
  REGION 1..483: note = Table 20
MKRKREHFTLWDAANVHKHKSMWYWWAYIRRKDMVNHEKTDCDVIQLLQSASVKKQKTQSDKFLTSFSVGLRPTKHQKQVLNEMLRVSNYTYNWCLWLVNEKGLKPHLFELQKVVCKTNASDVDPYYRMENDDWFFNNKMSTIKLTSCKNFCTSYKSAKSLKSKLKRPMSVSNIIQGSFCVQKLFIRRLSDKDVSIDNTQMQNRYICMMPDNFEKRSNPKERFLKLAKPITKIPPIDHDVKIVKRADGMFIMNIPCDPKYTRRNASNDTIEKRVCGIDPGGRTFATVYDPIDCCVFQVGIKEDKQYVISKLHNKIDHAHMHLTKAQNKKQQQAARERIVSLKKTHLKLKTFVDDIHLKLSSHLVKEYEYVALGKINVAQLVKTDRPKPLSPRAKRDLLYWQHYRFRQRLTHRTTNTECILDVQNEAYTSKTCGVCGTINKNLEKSETFYCDNCKYNTHRDVNGARNILLKSLRMFPFEKQQQY

SEQ ID NO: 2794 - protein, 699 aa, unidentified
  REGION 1..699: note = Table 20
MTSIVLSNVARSAQELPRRGPDRGHHVYPFYDGHLAHKYRSLVRPEQANQLSHESINTFDPTEMALSRCWTYAMVTDFAATAGQQKRWPFTHTTVLDCSSDYFPTDQGRLPVEDLGDEVVQAILQAADVGPAFPSAGSGAADPLAPVAGQVPSSAANALALAPLARQAPSSVVTAEPTPMDLDDPPAPPGPTPSAAAAAPPPRPPPTPTQPTPPSSQTLVNKPEMTNTRTAVYRIYAPTELKDRIRTFRRRTRLVKNEAVRLVNMATSPSHEHLNERRLYTLLANNGSAFSRKHPELLRCPVHARRQVILEAIAQRKSIITRYDNLPGGRRRPLPSICPPTKQTDKRFGFSVAFPNTTGKIEALYDVTGTEVTGLKLVMPAVTIGGTRYSEVRARICLRGERQRLRLLELCRWSRANAFKLPREWRVRCGADGRWYLHVSYELVDPKRFNADQQAEKKRRGITVLNGAIKVKSIDPGARTPFTVYTSEGETIEIGGQDDRARLRELRLAADRIQSRINEMKRLNRRPSSRVSREMRKRRFARPARERSELHKRWRRIMADSKNLVKEVHCRTAHFLALSSNIVVMPRMEVLGMVRRRRSRLKISTKRELLTWSHSAFVNRLAIKCHDIAYDARFPHKAGHPTLLLVQPEAYTSKTCPACGRLNDSLGSRTDFHCPHQNCTYTAGRDHNGAFNMIIKAIR

SEQ ID NO: 2795 - protein, 720 aa, unidentified
  REGION 1..720: note = Table 20
MLPPVKLTNFPRSDLPRRNADRGVHIYPFHDPKLKGKYGQLPLPTVANASPGEILHPALKPKKTWFDVKVTNFNSGSGRGTMQRWPFGKTTVEQTKGRMPSGQGTVYMDDLGGVQEVLEEANVPIKTDVANANKDDAPPKKANTKKPDVAKKPDPFPTVLAPEITGTRTRTYKLEPSAKLKKVLSDWHECVVITKNEAIRRVNLVQDYKALSDFQLKRDLVNNTSDFVREQDRDLKHSMTNCPVQPRRQAIVEAVAARKSLLTRAGKTDKLFDIKPVETSTGFELAFAKTCGSIAFVTNGNKRPKVSKNGSKRRKDGKDSSRGGVVDPDRFANPWLVMTPMKLKEVKVSPYVEMRVRGNKNRQELYDLLKGDKGQDNGDGGDKKDDEDSDDKDEDKAVDSASPANELEERLQLPREWRIVRNSQGYWLTIAFKVDKTQPKVKTVFQSEMAVTGIDPGARTMLTAFESVGRTVEIGSKEDAARLAAMRVKADKLKGRRMEKVGDRPDNKKDDDQDKSISDKDDSQDAKDMSVDKKGKGKARDDEDKPVDTVASTPGEDDSEGDKRPFVLPAKQRRRLLKVEKRILAHHRNLVTDLHRRAANYFATTANVVVMPRMETRGMIRGRRLNKKVKRTLMAYRHCEFADRLYIKAHDVQHDKRYNKHQSMLLAQPEAYTSKTCAKCGHLNDKLGAKEVFECSQPDCDYVAGRDHNGAVNMILRAIR

SEQ ID NO: 2796 - protein, 879 aa, unidentified
  REGION 1..879: note = Table 20
MASIILTNVARDDLPRPAHHKSPDVYPFYDDRLANKYNQLTRPSTQRISAIAPLRGVYPTALSHCWATVTLTDFAGPNQWPFAHTTAIERNPSAYPTDRGLLDAEDLGDEVVSLLRDTRAPPTVASASTAAATIVNTASQQVQPHVSTTFVPRHLGPPGPPPLAIAHAEWSAAAAPLPPFFAHPPSQAPLGPPPPASAADYFFLARPPLHIPLGSPPLGPPRPTSAADYFFPAQLPLRIPLGSPPLSFQHSDVPMDVDQPTVAPSNIEAPVPMDVDAAPATDTSPTANASTTASVQKPAITNTRTKKVRLYLPTNLNRLLRFWRSCTRKIKNEAIRLVNEASKLNHPHLNTYALYRRLANDDCDFSKKHRFLKKCPSYARRRVILAAITARKTLITRHLNVPFSQRRPIPDISPCSQEEDSRRGFAIFFDNTAGKIIVSRDAPDGPILKMTLEVMPTLVNHLCRDKKENSSSKAEIRHRGKSGRESLLGICQQKSPYLYQLPKEFSVCVDSVGHWYLVASHPLTDEAQFNAKAEERKAGRTDLDGPIKVLSGDPGARTFLALYSSDGQTIGIVSEQDRQRLDRLQQKAQEVQSLEAQRKEPSRRGGSRRKKHRRRRRRRNKIPPPTPPDSSRRSHRPTKQPREPRQKPQGPRQLNSTQRRYLRKHFRRINSKMRNLVREIYCRTAYFLALSSDVIIVPRMEVHNMVRSRRPSRRTKQELLRWSHGAFLDRLTIKCHDVQFDARYPHKTAAATLLVQPEGYTSKTCSNCGQLHQSLGSSKRFLCPTCCYSADRDHNGAFNMIIKAIRWHSPRRSGTATLDSNAHRQLHAIFQPRLVHLFSTLFRLCFNFVPTLFQLCIDTVPTFSFLCRYLVTTSFFYAI

SEQ ID NO: 2797 - protein, 938 aa, unidentified
  REGION 1..938: note = Table 20
MQRMRPRLDAWSSPNVLRFVAPRQSLRSGTPSRPTRLAPASRWPTAGRPRPLRPSTPSSRRDPPIRIRDGAGRSTPPRSSSGTPTRSQRTSVCSTPKTSATRWSLRLLPPVTMRPNTTTMRSNTTTSVPPTPRRLFSAERTTSAPRAPRTTSTSPVSPAGPASASSSARRGNADPPSDVIDLTLSSPPPSQHGRAEATTESDRQRAMATPRRHVDHISSSVAPSSSPSSSSGSTDFIVGSPTSSFDAASYSPSSTSCPSSVRMADSGSSWCSSPSSRNLSTSPGLASPTSLDAASASSTSSVRFVDIASSPLPLVAASSPPGQDVVLEASRGRSASSSATGSVYSSRPRSESSTSDMSVDSAPPSPPSPAHSVPSVIVISDDESDTDRPRVDAAAPDTARPAAPAPRPASSVKKPTVRNFRTRKYRIVVPPELREVLRDWRASARIVKNEAIRLANMAEQHSHPNLKPFRVMREIVNNGSDFVRERPHLAKCPTYIRRQVVIEAISARKSILTQHYNKPRSQRGPIPTISPSTARRDKRQGFSLALDPQSGSIDFEVAEARAPRRAANDTAPASTPGRHERRITSLTLKIAPRHVRRRGASLDVKICLRGQRQRQFLVDSCNVRGMGRGDKYQMPHEWLIQCDRYSRWYLVVYHKVASDADFEANKLARQDRGGETTLQGTYHVCRSSCRCLSPLLKTVPPLLFSSGSVRVKSCDPGVRTPYSIYTSEGETIDIGDDADKDRLHRLRLEMDELKSRRHKTRPLDRRPSRNISRKKRAKRKRFMLNSKERQDVLGKQLRVSEKIRNLVTDLHCRTANFLAVSSDVVVMPRMEVGRMISRKGGLAVSTKRQLKGWSHAKFIDRLATKCHDVQFDPKHQRPRETVLLVQPEAYTSKTCGRCGVLNERLGSNRVFECPNPGCGYVADRDHNGAFNMIVKAIR

SEQ ID NO: 2798 - protein, 188 aa, unidentified
  REGION 1..188: note = Table 20
MQSCKVGTLVAHAISSRQGLLTRHYNTAPHARPADPPLLSPASDDKDRKRGFTLTFVDKAGTIKFDEKESGIHGLQLQLCPINARDAMAPTQLSGPIVVTTDDPGVCNPHAIYQSNGTNQRYKSKRQTVLLVQPEPYTSKTCGQCGNLNDRLGSSRTFACSDPECQYVADRDHNGAYNMAIRAIRPAN

SEQ ID NO: 2799 - protein, 496 aa, unidentified
  REGION 1..496: note = Table 20
MASATLSNYARTERAINRGPDVYPFWDADLNTQLRDNRSPFVNRRPHLLKCPVSVRQAAIDEALAARKAILTTYWNKNPPRGPIPTLSHRSKAKDRQNGFSIFLSPSSSTIVFDEGAAVKAPRTVSSVDVHTFSRSAHEDGSLGAPKLKITPKTVKRCSGGQDNTLGCEEDTWVKICLRSQRGRHFLKDHCKAVSQSRTTKLKAGHEWGIQLDRYGDWCFLLSYNVPTSVVPQEQSLKQAIVVKSVDPGVRTPFAVYSSDGCMLDVGSQDNGIRLEQLRRCNDKIQSCRHRRRQPHHQQPLPPPQTTSDPQSSQQAQSQPQETRQRRPALPFALSSVQRRKLQKRSKKVHKKLQQLINDLHFRMANYLATSSDIVIMPRMEVRKMIQRKNGNLHRNTRRRLLGWGHCNFINRLLVKCHDVAHDPRYLHKRGRPTVLLIQPEAYTSKTCSQCGNLNQRLGASKQFRCPTCLYSADRDHNGAFNMLIKAIRRTPLSSM

SEQ ID NO: 2800 - protein, 457 aa, unidentified
  REGION 1..457: note = Table 20
MSLVTLTNIPRDDLGIGRGPDIYPFHDANLAQHYQYLIPPSEEVLAMVDPNRPANTALERCWVHTTTSTFSYPGLTNETYIPVFWPFASTTVIERDTAMFSSDRGLLEPADLGDQVEAALANLTEPSPATATAAAATTATNTITTAASVAKPPITNLRTRKYRLKLPTKLKEIMLNSIKYEIRHEWGIQLDRYGQWHLLFPFDIPAPTLQAREHFFEGPITVKSADPGVTTPLSVWDSSNGTAIDIGCVEDGARPEKLRGQDDKLKSRRSQRQPLPPSPLPPHTPVPDRMPGTSTTTATATTATTMPTTPTTVCKRIHNLVSDLHCRAANFLASSSDVIIMPRMEVRQMIRHRRGQSLARSTRQKLLGWGHIAFLNRLAVKCFDVSVNERYNKARPTVLLVQPEAYTSKTCGTCGELNHSLGSSCRFNCANCCYIADHDYNGAYSMLLKAIKRGSTG

SEQ ID NO: 2801 - protein, 678 aa, unidentified
  REGION 1..678: note = Table 20
MRSVTLTNVPRADLTVGRGPDIYPFYDANLEEQYRYLIAPSDELLARVDENRPTGNALERCWLHSKTSTFSYPGLTQTLYLPIRWPFDSTTVIDQDHAAFRTDRGLLDPADLGDQVETALGAATDTAANNNNNTITNTTTTSMLNTDNLGAHVLKPEIGNIRTRKFSLKPSTKLKEILRDWRRCANVCFNETLRYINHARSLRELPSNYKYDLYALICNEQSAFVKKHPFLKNCPSQTRRHAVDEALAARRSIITRYWNTPAHVRPDPDQMPQVGPATKKKDMHRGFGVFFPKTCGSVRFQQEDAKIIDLFLYVAPNTVKYKHVGGREADCLVPIQLRGQEQRRFLVDRCQPIPMKTQIKYEFKHEWGIQLDRYGRWNLLFTYEVPLPTSMAAENEFEGPITVMTGDPGVVTPLSVYDSSNGTVIDIGSAQDGARLEKLRRENDKLQSRRSSPSDQAGPQRRPPRDRGAQQARRKPRQPRQPRSPRHPRLSRQPRPPRQPRPPRLPRQRRPPRQHQHLPALSSAERRKLVKRSKRIGRRINNLVTDLHCRAANFLATSADVIIMPRMEVRQMIARRRSGPRLTRSTKRRLIGWGHCAFIRRLAIKCVDVAADTRYNIPHPTILLVQPEAYTSKTCGRCGELNHSLGASRHFTCRHCSYSADRDHNGAYNMLIKAIRRS

SEQ ID NO: 2802 - protein, 242 aa, unidentified
  REGION 1..242: note = Table 20
MTALTLNLDAIVQLTDDAFFALCRANPEVKLERTAKGELIVMPPTGGETGNRNIKPSARLESWTEEDGSGLAFDSSTMFQLPNGAYRSPDAAWILLERWEVLSPKEREGFPPICPDFVVELRSPSDSLKTLQDKMHEYIDNDVRLGWLLNPQDRQVEIYRQGLVQIVTEEYTSKTCTKCGHVHQELGGAKKFSCPKCGYKLPRDWNGAFGIFLKALQDTASVTFNGNGAIVKLPGLVRCNVA

SEQ ID NO: 2803 - protein, 306 aa, unidentified
  REGION 1..306: note = Table 20
MSKFHAINDYFDPDPKNNNKLVCIKCSRSYDKNTRITTLKNHYRFHHKEIWNDIKVYNVGKGKEKKKRNESKKIIQEQTFQEDYEEIFDEAQYGTNQILSSVIKDSQYMNEIERSEEVTLSVNDCVEIIPENNNGEIPFYLKDHIKSIDFYDYGNNKLEFDGPNSIKFNGPSNKHNTFSREIIQILNDSIGQKSYVEVYPLHNYIDNIDYGVVIFGNRADMIKIYFIRTIILHKSREYMTDIVECTEEYTSKTCGVCRIINDKLGSSKVFKCKDCGYVYDRDFNGARNILLKYLTETGFLHPNDDC

SEQ ID NO: 2804 - protein, 171 aa, unidentified
  REGION 1..171: note = Table 20
MSAPLNATACIKRLLGLNIDVIHPAILNTYEVDQISREGFEEFYNDSTDSYKRAMGELNIVTAGATDAQRLKIVTTRAPVHWSTAAMRSPRASWGDPCVAWVARVVPCAQGRETALLVQPEAYTSKTCSSCGNLNQALGSSKHFTCPTPSCFYRADRNNNGAFNMVIKAIG

SEQ ID NO: 2805 - protein, 351 aa, unidentified
  REGION 1..351: note = Table 20
MAVEQCNIWLGMPKDSSERRSITPISLNFWLTPTRNNDTDINSVPVVLEREMLRRLAGAFSSYFELKKKGDAKARPPRPKDPEHSFITLTWTQGSFSVDGDTLSASIGGQQKIIFTLGEYIREKLRMLPAKACVAQVTVSKRDGEFWANFVCNIPKAETQTPKHLLAIDMGSGDIVMSCSNGREYSLPTRRPDKKWRKEIRAVETRLELCKKYSRSYKRRMKARRVMHNKSLHQHTDHQRKVANWIMKQGLTVVVGKMHTRLGLAQSSGTADQHWGVQNTGYAFRLLIFIKEKAAEYGLTVLELPDPRRKGDSTDPTSKFNASRELLRQGCTKLNFSFPDSFTKEKPLLVQ

SEQ ID NO: 2806 - protein, 493 aa, unidentified
  REGION 1..493: note = Table 20
MIRKTFKFRCYLNKGTQRRFYAAMKNAVTPIWNACVAEREQAREEYKAKLDEAFCEWVIEHKCDIPKKVEKQITKRIATKVTWPGKFSQYKHCSHTVHPEYKRWAAKMGECTVAQVDGSEKSYRELKRNGDERARPPQPKHLHRALMFRSSGWTPKNAEQLNEMESPALVLSGGRGQPPLGRVRVRLHRPVQGKIKTVNITEKNRRWYVSLSCEVPKNSGACGSVSAEKHGRKAGRGQKYTSTGGSDPEKGVVIDFLFWSGQFMRDSQGLEIPFPEFYWRDVEKLKGLSRKLSTKKWKCRECSHVHDERPYPQKGRVKVTKPIFCVHCRKELWYIDTANRAKARHTLRRWHEHIANQRIDWLWHVARYYVLNYERIVIPKWPFKGEIQYAVDNQDARKLCDASYAKFINCLKHKANEFGRTVIEVKDERYEAEVARLAKVRRYEKTRTILRETDKAVRWDRHWQFAYLTKEIKTLHNDPEKGDPEYEQGQQHA

SEQ ID NO: 2807 - protein, 456 aa, unidentified
  REGION 1..456: note = Table 20
MKRKIVKAERCFLKVSSQKAWGILRSWSLGCTKAYNFALTETLRVLEANRNGEKLGYPSYYMLNRFLTGFKADNPEMYGVPSHALQHAVKDLATAVSNYFIAKSEGDPDAKMPTHKPEHANHCVFLPACRFKIECDEGRWNLVLRHEGRPFRVRFFPNDDFNPDDVTSVRLTRPKVKVGKPVRCDAPLRAKKKWFVSLTHTYEKELDQEALPDLTVGIDRNAGLGNTIVVSNEDGEVQKRYVLPDSIDRLQDQIEKLQKKKDAIVEANGKNYKTRRVRALNMRIAKKHSKIANIRDDFINHVSKELSLMGRRLVLEDLDIKGMTKSAKGTEDKPGKNVKSKSELNRKILASGWGKLGDQVISKGWQEGADVYECPPEFTSQLCATPSCAKKGVMGIRCGKKFYCPECDVVRDADLNGSMNIARIGVDPRYRIKGQTRPTRRDKKKMEEAALQKEDS

SEQ ID NO: 2808 - protein, 415 aa, unidentified
  REGION 1..415: note = Table 20
MKQGFKLQPNTLIRNIRLRLYPTERYINKLNECFLARTIVYNHLVSYNNKVYQKLNTYDYYFNLRKELMRLRETNEYPILNAVDSHMLRECVEDLDRGYKNYLNRHKTRPPQIQHEIIKHCRFLEGVKISYKKHKLYLPKMEDSKIKLSTKLKDPTRGIRYHGMPTKKYKILKIVQCSITQDLIGRWFATLTAHVVVRNKPDISKSTERVGIDVGIGRLVTDSDGRMFKLVKNQKVESKYRKYIYKYLHYLNTGDNDKYLYYKDRFRRYHYKRMAISNDYVQKLSRWYINNFSEIAIEDINMFKMVKSFNKDTLASRIKFGTFTRRKFFNRAIIESRMGAFLRCIKYKAAEVGNSIFIVNKIYTSICCSKCLTIDKANRKNEKFKCVNYGYRNHADINAAINIKNFSFKKEKCIE

SEQ ID NO: 2809 - protein, 410 aa, unidentified
  REGION 1..410: note = Table 20
MITTTYKFRLYPTKDQQEQLWKWSRALNDLYNHFLSLQKQQVTKRLPILRRFDTHNLIPKLKHEIEHLNEVYSDARQACSDRVATCMILWQRGHIKFPKFRSGYQFFNITYPDFNKSCKLTGSYFTGGKLTPIKVNIHREIQGTIKTATIHCDERGKWWVLLTAVQPIIQLQKFNMDRTVGIDLGCNHLLATSDGYTIQSPKFLKKISDAISDIQTRIDTYHKPIGSKKDGTYHMSRKCRHLKRTIRKLYGKRNRMMKNFLHTRSRRIVDHYDVVVVENLRVKEMKEQSKQKGSPSAKPVNRVLSQNAVGMFKDMLHYKSKKYIEVNPAYTSKTCATCGQVCDTLTLADRTYRCTSCGSEMDRDINAAVNIRNLGILQILHLVGDTRVTITDVRDQLQMCNSLYPCQTIV

SEQ ID NO: 2810 - protein, 376 aa, unidentified
  REGION 1..376: note = Table 20
MLTIKYRIYPTRKQQDLLWKHSNLLTRLYNQFLEQKIRMYKDRGINIRRFELQAQLPKIKEENPEYAQIHSQVLQQVPKRLNDTYNSFFNRSFGFPKFRSSRFFFGLIYPQNTGCRIVGKKLVLGKERIKMVQHRSIPENIKTRTVTRTTGNKWFLCLSYENQLVPQANNNKILGIDLGLKNIVYCSDGHSIKNKNHTKYFDKQIAKIQSSQSKCIKGSKLYRKHQKVINRLYGQKTRKTKDFLHKVSHTLVHKDFDAFGLEKLEPKRMTEQTNWHGLNKSMRNSQLALLTGFIRYKAENEGKKVVFVNPKHTSKNCSACGKKNEMELWNREINCECGNRMDRDYNASLNIMNLARNELCRQAYSEEIRETHTRGG

SEQ ID NO: 2811 - protein, 409 aa, unidentified
  REGION 1..409: note = Table 20
MKTYQIRLFPSKEQIDNLNELSSIRSEIWNELLNIQQKSYEENKSIYNKFDLNNMLPKLKEKYPKWKKLNSKAIQTIATELFGSYRSFFNLIKKDKNARPPKNIENNDYHTITWNQSGWIIKENNEIIINKIPFRYKSNFNIKELNIKEIRVKYIRNKWLCDLVVNDKIDYETDLNIKTNVLAFDLGLKKLATGIDNKGNQIVVENKSKKINKYFQKQIGKVQEKRSKTEKGSKRNKKLRKDLNKLYHKKNEQIKQTLHIQSKKLLNMNYNTIIVGDLSVKKLMEKEGVNKKKKGIRKSFHNTNINMFLQFLSYKCQSKNINLTKIDEKWTSQLNCLTGKIFDKKLKLSDREVQLSDKIIIDRDLNSAINILKRWFENHFASMNEPLDLTNVLKKYNLFKETHKSLVCV

SEQ ID NO: 2812 - protein, 414 aa, unidentified
  REGION 1..414: note = Table 20
MLSRKIRIDSFISDKEKEEIYQYSKSLSTVYNECLDLLKENLNFKDLSKITKGRSKATGLHSKHIQNTSREVINAVKSYLAKKKNDKSARFPKLHREYSPIIMDINLSSKTEEIVNSRTGEVILEKKYYPGGGFKLEGKKINFTSIGFELDLSKCPYYDIELINYETLKQIVVKIDENKRIDCIFVFSEKIQEKALNQNFLSIDLGVSSIASCYSNKIDCLKIQTKRFKGLERTINELKSKRDKKKKDSRAYKKLNKTIRRKQAKLTNKRKDYLHKTSKTIVDLCILNGIDNIICGDIKTKKLKKDYKTSLNKSTQNEGLLSRFKGFLKYKAENKGLNFLLVNEAYTSQTNCLTGKRELDSNLGIREVELSPGFKVDRDINSAVNIAKICGDLWLSHIFEKNRLLKIQKMNITL

SEQ ID NO: 2813 - protein, 400 aa, unidentified
  REGION 1..400: note = Table 20
MKSLKIKIKLNYNQQIIVETLSNEHRLMYNYLLAYLKNNSLDFKKLNDLYKNIRNQQKLTINSKSAQNTCISLINSIKSYLSLKKTDKTAKFPYKFKSYKYFTSFMYDYNNGNGGFKLLDNNLIINLLSSSKSAKKLIINLPEVCKIISDKNIRTIIIKKEKPDYYICFTYSTPMDIIENNDNFLSIDPGLKNIVTGFSNNGEYIKIKNKTFKSKEKQIEKCQSIMDKKDKGSKNYIKLKKRYNKLTKRLSDNNKDFQHKVSKSVVDYCIKCNISNIIYGDIQTKELTKSIKANNRLNKSTQNRGTLSRYKTFLGYKAKNAGIGFYLQNESYTTITNCITQELMKHITLDIREIQLLEDLFIDRDLNGAINIGIKAKVAWFSQINLEEYLRKLNRIYLNY

SEQ ID NO: 2814 - protein, 428 aa, unidentified
  REGION 1..428: note = Table 20
MLLTFKIKLNLSDEQQTSIDYMSNEGRMLYNHFLGKLKEQYEKDKTFISYYNQQKELKDYKCEYLTFDVKKEILRTLHNNYSSFFKLVKQNKDLNPKSPKFRGKDYFFTLSFTQDFIIKENILKISYSNYRKLDIKLDYIEPIKNLICLRNKTSESEIKQLKIYKQDKNYFASITYEKKEDILKNIDKNKVLSIDLGKKNLLSVYDVENNKGIVYSSKYLSKNQKFLDKRIDELKSLKDTKKKNSRKSKQINKKLKKVYSKKKTQTNLTLQKVTKDLSNQNKTILIGELTNLKKNIKSNFRSLNRQMQNNWNLQTFTHLLEYKCKLKGNQVVKVNEAWTSKTCCKCGSINHDLDLSDRQYICDCGNDINRDINGAINIYKQFMGDYNPSFETLIVSERFDWCHINQMNRNYKFYNYLIFVLYGHKKWW

SEQ ID NO: 2815 - protein, 363 aa, unidentified
  REGION 1..363: note = Table 20
ETCRLAYNFNLNLWVKYYKHFGKSISVFKLKKYFNNYTKSKYPRYQKTYNKWITAMFFRLNNAIKYFFEKRNKYPKFKRKGDIPSLETPGEYIKVIDKHRFVIPTARGEKNIIARTKEEIPDKFSTIILKYQKGEWYACFIIDVNENNKEQYNPDTIAIDLGVKTLATGVSTQSYEVIIPKFSHYTKHLDWIRSKRDKKKKYSRRWKKWNKLLQKRFEKYTNRIKDYLHKASKWLMTQPEDTIVLGKLNLEGMKTEKSWFNRIIQNEWRVGMFCRMLDYKSQIYGKRIVYIDERNTTKTCSKCGYKQDMQLSDRIYNCPVCGNSTNRDLNSAWNILKKYCTASALECLSVTDSLKGTRCFHLV

SEQ ID NO: 2816 - protein, 329 aa, unidentified
  REGION 1..329: note = Table 20
AEVYFRIDKAMKVFFRRCKKGEKKKGFPRFKPRHQFFTLLYPAMYIKIEGNKIILPTGGKGKNKKFCNVVATLTEKPPENFGEVAVSRDARGCYYCSFVYEIKKIEPVQKSGILAVDLGIKTLACCVNEKKRFYHVGGFKGYSWFNKQLDKIRSKRDKCHKKSRRYLYLSQVYQRVSQKKRNKRNDSLHKASHLIAHKLAESAVVIGDLSQRQMVEKSDNKYKNRTVLVYTCLYRCFLTSFLLLVNNCLKFQREILVKNAINVIINNLCLCINGLTNAHIVVWLWTAMKTVHSIFLSGSLPGLGHLRVMYLGNQENKISTSLISFDYIF

SEQ ID NO: 2817 - protein, 277 aa, unidentified
  REGION 1..277: note = Table 20
MAISRDAQGHYYGSFVYEEAEQHGPPGGVVAFDLGIKTLATGYSDTGRFYHIDGFKGYRWYNRQLDKIRSKRDKCKKKSRRYLRLSKVYKRVAQRKRRKQQDSLHKASHLIADQLAERAVVISDLSQRQMVLKKQEEETPKERRKRQIRNRLVYNDWGLYGFVQMLTYKCLRAGKALHTISERGTSKTCQRCGNQQAMPLYKRTYRCVNCGLVMDRDDNSAINMYQRFVAGLPPHSLWGVRCAGGGRKQWRSHGGFLVCPSTAIRIVDKRCTRLITF

SEQ ID NO: 2818 - protein, 397 aa, unidentified
  REGION 1..397: note = Table 20
MGFKKKNENSIVLCKKIQIHPTKEQIADIERDSFLCKLLYNTYLAQRKEYYTCYNKNMKMTEQRSQIKLLREQNTDYAKVYAKYLHAVCMDLAVDYDNCVKKRSRGEKTRLPRYKDKDYFYPLKTPKQYVKIKEDRIKLGFYEIKVDVNEIPTNYGEVWIIKVRNKYLISVSYEVNKKENNKSNILAIDLGISKFATGINQNGEVIEIINPRYDKYWNKKIDEVRSMRDTKKKGSGRYKKLTKALKRLYEKRKKQQEHFIHTITKYLVLNNKELILGDLSQEQMIKKSNLTKLNRSIKENWGLGKFKTFLTYKAKLHDVKVVYINEAYTSKTCSNCGNRKSMELSKRVYKCTCGMTLDRDINSSINIFNKHNKNKTLNYKNINQVTTLHFHFGKLVA

SEQ ID NO: 2819 - protein, 623 aa, unidentified
  REGION 1..623: note = Table 20
MEKEDENSVFLGQKIRIFPDPDQKEVLWDLAEKTRKIYNMGLDERRKNYEEIKDLPKKEKRKRKLTVNKQIKKLPQFKEENPEYKWVYSQVYQQALKRLNQDYNSFFNKRKNGDETARPPGFRSGRYKNNFFTMRYPQVNSGVYFRNNQIQLTHKHPKKDVKLHFDMRSAHREKKIGGYNYILDPFINDPQIIEVKKDKKDWFFICLTYKFETPPFEDNGKVNAFDLGVSNLVAGVNTNLETMIIKNRRADLYWKRRTEGKPPKKPNPKYAKKPDNNPTEKADDKSKKKQKRKRKKFGIMFMRDHCFGANRGKKNKNKKENQKKKEKTNKEVKKNNQRKRKENLESDYINISYLFNPQLDPKRKSRKYKKYDKKRARMQHKMSCQMKDYQHQIAYFLTHYCQESILVIGDLSVKEMAKHKPGTGKSLLNAKNETKNHSSHNSGSLGRFSRLLADKSKQVGKRIVKVDEYNTTKKCCICGKLKKRDTDERTIICNTCKSNMDRDLNGGVNILFEYLDHRIFYANIREGDLRRSEQEKLKLKERKQGNKKSTSNKKEQDRSKLLYPFIRKQPSMDEVSCKEKWGRLRQTALSSCKSGDRGFAVIPKRFKNGKTNQLESKKLIQEV

SEQ ID NO: 2820 - protein, 438 aa, unidentified
  REGION 1..438: note = Table 20
MQLAERIEIKPTNVQEQVLYEISEKCRLIYNYALAERLKALNEGRQLTYIDQQNSLPKIKKTYSAYKIVHSKTLQYAMKELDSNFRSFRRRAKKDKNASLPKYKSKYKFTTFTYNQSGFKLQNGKIILSQFLNDTELAFEVPKDIWQKRIRQVAISKKKRKYYMSIIYDIDEKEYKDNGIYAAIDLGIDNIVASIDTNANIFMRKNKRPDKYWEKKIEKVQKAQAHCRRGSRRYNMFAKKIAFMKAKMSNQIKDFQHFESKKFVEHTNANTIIIGRLSSKEMSSNKSNIKSERSLHRALQNTGTINRFASFLTYKAKLIGKKVVEIDESNTTKMCHVCLKVHDMKLSDRLMECECGNRIERDINSAINIMERYLSLNAPVTGLLAFASNLRKTGLQVNPNLLNEEGCRKFAEMHSNSQKGLLRAGIPPTSSAERTRTQ

SEQ ID NO: 2821 - protein, 426 aa, unidentified
  REGION 1..426: note = Table 20
MQLTQKIKIEPTEEQEEVLTSLSEICRLLYNFSLKERIENWKENKNKPKEERNYITYTDQQNKLPKLKEEYPKYNWVYLKVLQMILKKLDANYKSFFSLWKKGDNKAKPPRFKGSKYFTNLCYNQSGFKIKKEEIKFSHNHPDKTELSFDIPTKFHLEDKNIKQIEIFRDEIKEEYYISISYEVDTPKYKDNGKYQAFDLGVNKHIGVNMSGKFVEFKNPRPDKYWQSKIEEVQSKKDRCKKGSNRWKWYNKKLQQMKRKLANQMKDWQHKLSKKIVENTKANTIVVGDLDTKDMAQNNKNVEGLNRSLQNTGTIGRFVRFLIYKAELVGKKVIEINEANTTKKCCVCGKKQDMPLHKRTYKCDCGNEIDRDKNSAINIMNRFLSQERSVNEQSSFMEDFLRQTGLEYANQQMSKHSQETPSSRTT

SEQ ID NO: 2822 - protein, 459 aa, unidentified
  REGION 1..459: note = Table 20
MLKYLSLIIRYRFFHMLLTLPIKIDTTPEQKSVLWDLSEKCRLIYNFGLRERQDAYKNKTRIGYVNLQNKLPELKKKFPDYRWVYSKVLQGTLKCLDNNYKSFFNLRNNKDKKAKPPGFKGRKYFTTMLYNQSGFEISDSNGYVIVSKSMDTRIHKPEVEYSEQDKVYIGFSHNHPSGVSLKFELPATLIEDKIFSKATDIVQVNIYQKDKDFYISITYEVLDVKHNNNDSYLAIDIGVSKQSMVDSYGKFTELKNRRPDKYWEPKIQQIQSRRDHCQKNSRKWKRLHNNLGKIKRKSSNQLKDNQHKITRNIIDNTDANTIIIGKLDVKQMASSEPKDSRYEKSIHRSTHNSGHIGRFTQFLTYKAESLGKRVIRIDESYTSKKCCICGTIKNMSLNDRTYECGYCGNILDRDYNSSVNILLRYFKHNALWTSYQNTIDNLRQTGLLIGVIPTRMIPK

SEQ ID NO: 2823 - protein, 419 aa, unidentified
  REGION 1..419: note = Table 20
MQLTRKIRIYPTAEQEAVLWELSEINRKLYNRALNERREAYAAGVTGVNYIKQQNDLPGLKQEWPELRFVNAKVLQMTLKTLDANYKSFFELRKNGDEDANPPGFKGRHYFTTMKHNQSGFKVTNDAIRLSHNLPDQGELSFPIPEREFGVVKQVEVFRDCNGKWYLAVVEEVIPLTPVENGQYQAWDLGVIKQTAVNSQGKFIEVQNSRPDRYWNPKIEAVQSQRDHCRKKSKDQKPSRRWRRYNAVKRKMERKRSNQLNDFQHKQSKKLVENTKAGTIIIGDLSVKKMPKSKSATRQMNRSTQGTGYLARFAGFLTYKAILAGKQVIEIGEEYTSKTCYCCGKIHAEMTVRDRVMHCDCGTVLDRDRNAAINIMLRYLSQNALWTGYREFTGNLRQTGLRVPAIPRHSQEAPCASGG

SEQ ID NO: 2824 - protein, 420 aa, unidentified
  REGION 1..420: note = Table 20
MSRVATLLYNIALEQRKGHWLRYHGTKPGINYEHQNGQLVELKKEFPFFLCLYSLVAQEALRLLQKDFNSFFGRLKNQKKNGEDVTARPPRFKSSKYFFTLCYIQSGFALEDGKLVLSGGMEPHTDKKGRVKHRRRRETISIAGYRKLPDKVHSLTITHDRKTGNFYASLVYEAEPLKYEAVRPLKVAAFDPGVKTFLTGADNSGRIIVFDSLVKRTTRYFDGQIDKVKSMRDRCKKGSRRHNMLNDVLDSLYRRRSAQVDDELHAIAKLLAEGEWDVVGVGNPDKLGMVSDAPDKGKGNQAINRAVQNNWPLKKENKFLDYKLEYRGKLFLPLDEKYSSQECNSCGHRMKLDPSVRVYRCPKCGMVMDRDENSSVNLLNRVIAGTAQRRVNYKDFRVRITFHRTLCGKWTHREELLRPA

SEQ ID NO: 2825 - protein, 414 aa, unidentified
  REGION 1..414: note = Table 20
MPREKHYLTAKIKLHPNIEQTEALWIISDSARRLYNLALEQRKSVYSHRKHNVSMFEQKRELTYLREEYFPELHSQTAQEIIRDLDEAYKSYFKHYKTDKSARPPRFRGYKYFYTLTYPQASFHLEDNAIILHNPKDWLRIEFAEGYRNIERVKKIKQAEICQYEGEYYACISCEVIPERQKTTGKEIAFDPGSITLLTGYDGEQIVEVESKALKKTAKYYDKAMDKIRSKIDLSKPGSKRHRRLMQAKRRTLKKRARRMKQINHCISKELINMGYDAYYVGDWSKKETLADTGIPVFDKKINRVVQNELPVGILVDYLRYKANLKSKQVEKVNEARSTNTCSCCGHVGKKLPITIRTFRCEKCGLKLNRDENAAINLYRWYAAPLTGPAPIRSRMSIKFVFGRYNKCLVQTSA

SEQ ID NO: 2826 - protein, 385 aa, unidentified
  REGION 1..385: note = Table 20
QFPEFKIPSSQVLQEVVRQVDREYKSFFQLRKNGDKDVRPPRFRASKYFYTHEYPQNKTSFTTEGGVLKLAYGKGRKDWISIPLDVTVPGVPKTVKIMFDRKKRSWWACISYMTSVIPEFQKSYAIYFDPGCKTTLTGIKTDGTFIEYDIESLRATNMSTYKFLDKLASRRDKKTRHSNSWKRLNKRIQKGFSKLETRTKTHLHALANKILADHWDTTHFLIGDWKKKETLADTGNKYVNKIINRAVQNNNPIGRLVEYLKYKAKRFGKTVDKFNERGTTRTCVMCGHVHKKGIPPSVRVFECKACDFKYDRDRHSCLNFVKLYEPALWKRLRNTDLIRSRVRTGFSAFSFKPWVATESKPSNGIPFSPASHYILTTGCTGSLTP

SEQ ID NO: 2827 - protein, 431 aa, unidentified
  REGION 1..431: note = Table 20
MSAFYLSDKIRITPNKTAIDKLWAVSYACKDVWNRLNGERYDRDKKTNYYQQKKQLPLLKQQHPALKVPSSQVLQEVVKSLNANWQMYFTKHKKGDPGVKPPRFKSYKYFFTQKYPQQGVSFEIHCGILRLAYGKNKSSWIEIKLPQREYDFQAVKNVVVSYDQRDKKWYVSLNRHVQLPEKRVNAHTIYFDPGCKMTLTGIKTDYSVVEYDINPLRELNLKHYLLIDHLKSLRDTKQKHSGRWRRLNKKISGLYSKIRTQTKHYLHKLANQILQDHPDTNFKIGNWNKGQTLAATGIVIVDKRINRQVQNNNPVKKLIGYLRYKAIMNAQQVEEFDERGTTRTCSGCGSQQQMPPNKRVYLCPKCGFKVERDINTVLNFLKNDNYAMWHGLGEVLSIVSYRFNPVTGANQRIESRSVILNYQDARGLLTP

SEQ ID NO: 2828 - protein, 427 aa, unidentified
  REGION 1..427: note = Table 20
MILTEKQYVDIDPSVASTLWFASRCSVRVWNRLVEHREAAKKQKEPSGYATQKKLLPGWKKDDIRLKQPSSQQLQEVVKEFHGAWKSFFKKRNNGDTDCRPPSFRSTRCFFSMHYPQRYNSFEIEGSMLTLAFGKNRKEWLTIPLRDHDYSNVKTVRLCFDDLLKQFFVCLHREEVEVRPKTEGLRLYFDPGCKTTLTGIGSNGQIYEYDINPLRQLNMSSYKFIDELTSRRDKKRKNSWQWRRLNKRVAKLWRKVKYRTKAYLHTLANRIFASHPNLSEIHIGDWKKQETLADTGISFVNKRINRAVQNNNPLKMLVNILSYKGQLRHGVSMKEFDEQGSTRTCSQCSYIHKGGVSPAVRLFTCPECGFTYPRDWQSGLNFLRQFESAVWIGLEGNYPSRSVRKRLAPFSLKAQRTISTASFALAS

SEQ ID NO: 2829 - protein, 352 aa, unidentified
  REGION 1..352: note = Table 20
MSLVYPSGAGIKVIENNRIQITFGKNAEWPVEQYRVSSGKQLRIIVGLNEPLKSNSFGQVVITKDPNGNYYACFTLETQDPACDACETPSIEEHESISKVIAIDPNHKNSFVGFDGVNAIELARCYVQKNLDKAIDYIKSRRDKCLRKSKAVFREDGSIKYWKPSRKWKQFNTVLNKLYAKRREQMKLFAYTSAHWLERHYDKVLYGDYTPFAGLKNTHRSMLSQGYVGYLRRIVKWVFEKSGKVAEEVSENRSTKTCHCCGEEMDMPPGKRFFVCGNPPHRVGFNLSGIANEVLSPPGEGECNASLPRDVNSAINLYNWHGGSEKKIPDAKINLHLKWSPFYGLEETCPVN

SEQ ID NO: 2830 - protein, 604 aa, unidentified
  REGION 1..604: note = Table 20
MPFKKADPNIVQFARKVLLDVSGDDAGCLDGQSKICNWLQNQLKDQVEARLCELYLMNWLAVDDEATTKKLLSEVYSEIGLRNLVPALKDKYPFLRCVHSSPLKNIGLRVAKAIAAHRKSKSGARAGQRVGWIKYKSWAKEWCSVEYDEPGKGWDVSEFGWLKLTFGTDRDGKRLSLRVRMVRPPKHIAQARTCRIIREGKDRYYAVFTFKKQKKARRPFARAVYIDPNQKNFGYALDAEGKAFEIQNLQRLREMECTLDALKAKRDKCARKSLWVDVVHQDGTTSTHWRPSRKWTSLNQALVRLELKVREQRKHFQFSLANQLFRHYDVVGIGDYVPENADHGKGRKYNRAVRNRSMHGSFKDTLQWMATRSGKRAVVLDETGTTRTCHVCNHVVEGGIHPSIREWDCPDCGTHHLRDENASQNGLRRLLESLGADAGSPQMHCLGPVQIIGRCDWRFHPQGWQGIPQGCANVNLMRLPEYRQRCVGTSVPPGVIPARQVVLCVDLRRVWKAGGCPRPGFAALRGGRGRTQCSTWRRPYKCRTSRFLRRQYKHRTSQTARHQCKYRICHSWQTPEQPPGWQRVRRQRLGHGDWYSWLTLSSNW

SEQ ID NO: 2831 - protein, 471 aa, unidentified
  REGION 1..471: note = Table 20
MTSVRRIQLALTDEQKAILDGQSKICNWLYNHLLEKANSLRFEYRVTQSEDVARQLYTQRGLRNMIPDVKTYNKFLCTVHSSPLKNTALRLSDSIQDYQDGKHGRRKGKQTGWPHFRSWKKKWFSLLYDEPKKGFLVEGKNLKVSLGQTENGKRIRVALKLLESFPSEMVGRIRNLRITRDGSKRYFAVFTIAEKVNVSVSDINKKPKIIAFDPNHKNLVYGVGTNGNAVEIHNLAHLKRMDTRIDELKSRRDKCKRKSVKVTRDDGSYFWKSSRKWAFFNAKLDEAYRIRREQTKTFLYTLSNQICKEYDVICMGDYTPNGGGITTKMRRSMNNQSLIGRFKKTLEWVAFRSGKLYIEYNEKGTTRTCSECNFVVKNGISPDVREWTCPNCGYYHIRDENAAKNGLVNTIQDKNLLPCSGHIPAVSERWVWWVTSSGVQSALRGCDGLVIPNTAKKLNRRNANSSIQMCV

SEQ ID NO: 2832 - protein, 586 aa, unidentified
  REGION 1..586: note = Table 20
MKEVPTVIKLRLKPEKGIGEILDGQSRIANWLYNNLLERANKLREEYKENPSEEISKTLYTKRGLRNLLPGMKKEHPFLKVVYSSPLKNTCLRLSETIQTYQKSRKKKRKGKKTGWPKFRSWKAAWFSLFYDEPGKGYSIKEGMLHLSLGMGEDRKQRKIKIPIQESKVLERKNIRNLRIVKQAGVFFAVFTTIREIPEVKPTLAIGNSFFHPKSFPDYNDFVNRIIAEKEPISQYLKIYLSDLLSTYHKNSKQDKDFSTNLSEKLNKLLEEDNFHCQEDLFKEVKWRNTTGKLISQNPKGLKLIKLKRMLLEDAYPKEIMRSCNIVALDPNHKNFSYAVDSDGIAVEIEAPKWLKIYDKRIDEIKSKRDRCKKRSKQIEIIDKEGKSTGKKRWQPSRRWIKYNHILEKALAKRRDQTKTFLFTLANRLFRSYDIVIIGDYTPHGGGISTGMRRAMNNRSLIGRFKDVLSWTAMKSGKLSNIFNERGTTRTCCQCGHVVKDGIDPNIRVWTCQNCQAEHIRDENASRNGLAKYLRILEKKGEISLLVPGSGLVSVRERWAWCVSTRGVVSLFSGGETVVRPLAPSN

SEQ ID NO: 2833 - protein, 488 aa, unidentified
  REGION 1..488: note = Table 20
MSKENLVLKMQVTADPQTLSELDGQSRICNWLYNHLLEKSLELKREFIHSGNPEASKTIYTKRGLRNVLPTLKVEHPFLKVVHSSPLKNTALRLSEAIRVHQKSKKGKRKGKQMGWPKFRAWRRDWFSLLYDEPEKGFKIQETSLILSLGMGQDRKHRFLVLDLPEAHLLKGKTLRNLRIVSELGNYYAVFTIQKELPIRKPISKILSLDPNHKNLAYGVDTEGTAIEIAAPKWIKTYDRRLDELKSKRDRCNKKSKKSPVLDEKGTPTGKEFYLPSKQWKKYDDSFKCALRKRREQTKTFMYTSAHRLFRDYDCIGIGNYTPNGAGITKPMRRAMNNRSLIGRWKNTLSWVARKSGKIYLEFDEKGTTRTCSHCLHVEEHGIHVSLRQWQCPQCQTEHIRDENSAINGLRKILRDLLQKNEGEYPLIVSGSDLAFVKERWAWCVLPGGVLVTPRRQNSEIIRSTRKLNRGHDSPRSKVDHLVMYDHV

SEQ ID NO: 2834 - protein, 424 aa, unidentified
  REGION 1..424: note = Table 20
MIINQKIRLKFIDEESKNSIDRCSSLCNKMYNMLLEECKNDYENNNDSKNLLHGRSLRNYIVSIKKEHPYFYFVHSSPLKNVAFRLKEAYLHFFAGSGYPKFRSNRIKWFSLLYDEPNKGIKIENKNLRISLGYELKDGIKVRKYAYAHLYEKVRKGVIRNFRITKEKDEYYIVVCLEKEDKEVVKGDRVISLDLNHKNFFVGIDNKGKSVEFENLFQIKYFDEEIDKVKAKRDKCLRKSIKCINEYGNVYHKPSRRYSRLNKALEKLYYRRRAQIKDGLYLIAHRLCDNYDVIAIGDYSPSISNSSQKNMHRKMLNQSVIAMFRKILSNVCNKRRKQLIIVDEMDTTKECFCCGDKKHKDPSIREYTCPKCGKTYNRDINSAINIGKKAKVLSSSDYVSLDLTKPTYIARYNLFKQSISTIIK

SEQ ID NO: 2835 - protein, 437 aa, unidentified
  REGION 1..437: note = Table 20
MIIMSFRNKDKFKNTVTFTLKQEIYFSGEDENILDGQSKICNWLYNYLYDMVEYDYKYNGSRNKLINKYNLRNQVPRLKEEKPFLKTVYSSVLKNVAIRLAKSYENFFQIPEVGHPQHRSWKTKWFSLEYEEKIGWKIDGKTVIISLGKDKYSKQLKVVGTLNEKPKLDGGEPRAFRLVKQRGKFYAILTVVKDKTPKKDVEKWIALDPNHKNLLTAYDYKGNTIEFQNLDEIKYWDGVIDDLMSKRDNCKRKSQFIPISETRGYWEPSNNWKRYDKALEKALHTKREQTKLGMFTIANYLCRNYDKILIGDYTPSKEVSPHKKANRSILNQTLIAKLRGTIEWVCDKSGKTFKKVDEKNTTKKCCICEDVEKKDPEVRTFTCKKCGQTLSRDINSAVNIAKKEMHLSGTDYKANLKEPLYIAYWRYNNSKINMQTN

SEQ ID NO: 2836 - protein, 424 aa, unidentified
  REGION 1..424: note = Table 20
MKLLEGRNLRNYGVSLKGKHLFLNTVFSSVLKDPAERLLKAFTSFFKGNTGYPHFRSWKKKWYSLIYDEPNKGWELQRDGTKLSISLGDIPGLPKEKRKRNPSIIGTLGETVVLKEGEVFKTLRICKQQGNKFYAIFTVERCSQEELACKGVMSAYRKECNLAKKEKRKKSEKPKLEEKQMEIPKDISWIALDPNHKNFFVGVDHEGNSIEFTKLQMIKYWDTTIDKLKSLRDVCEKNYKKRKTKHGSSYTVHSTRWNRVNKALNIAYHKRREQIKTALYSIAHELYRRYDLVIIGDYTPTNGTTRFDNMKRSMLNQEKIGEFRKILEWVAAKLQKHYIMVNERNTTKECCICGHMKKKDPGVRNFTCEKCETILNRDTNSAVNIGKKAGYFLDINAYKHKLNHFSFTSYAVFGRKISWMSNHL

SEQ ID NO: 2837 - protein, 404 aa, unidentified
  REGION 1..404: note = Table 20
MSKAYEVQKIEIKLKEEDRLSLDRTSKTLCKLNNSLIDSLKNDFLKNGDIRTIKDYYTLLNKVDNFKLKNPEFDDVYYLLSRSVGFRVLDSVKKVPYGTRDININHKDWESDWYSLFYSKKNRGFSIENRVITFRISKTRSIKATLTEKIGHYDIINMRIDKQHYRYFAIFCHQVEIPKTILPKQVKRWIAIDQNHENFFTGIDNRGITYRFEKLKSETYFNLAIDEIVDKIKACTNSYRKARLYKALNRVTNKRAEQTFSALHSISKVIATNFDAVLIGNYVPSRDDLPYENLKKIMVDRTHIARFRSILEWDMKKRGKIFVLVDEKNTTSRCCICGNKEHKDPSIREFTCKKTGAKVIRDLNSCVNIARKGGAPIDNPIDIITKINQVYIYDYRISKVRRVT

SEQ ID NO: 2838 - protein, 447 aa, unidentified
  REGION 1..447: note = Table 20
MKAKNYLNNNALISIKGGENVLYNEKIEVFFSKEDSLILDGQSKICNWLYNQLLQATKDDYENGNSLKLLSGRNLRNYSTKMKDVNKFLYSVHSSPLKNTALRLKDAYERFFKGQNEYPKFRSWKKYWFSLYYDEPNKGFKVDGQSLKISLGKAVVFDKKGKEKGKQVSVTGELKESLVLPKGAKIKTFRLCKQQGDRFYAIFTIEAIEPNKKEEKSWIAIDQNHKNFFVAIDNTGRTFEFLKLYQTKYWDEKIDLLKSKRDLCLKKAKEHTTIHGNKYYTSSKRYHRINKALNKAYNTRREQIKSIMYQIAHFIAKNYDHVIIGNYVPSKNTAKYKTMHRSMLNQAHIGEFRKILEWVMLKSGKHFSLVDEKDTTKICSMCGHKEKKPPNIREFTCSNCDTFMLRDVNSAVNMANKVSLTPMSFDNIDKINKVGVFNFKRYSLMVV

SEQ ID NO: 2839 - protein, 441 aa, unidentified
  REGION 1..441: note = Table 20
MIYSQNIEIELSKENKLILDGQSKILNWLYNHLLDLSIKQYESVKQNLLDKTLINKKYGLRDYMVNEMKENEKYKFINSVYSKPLKESATRLENTFKKFFKEKTGYPKFRSWKKSWFSLLYDEANVGYKIEGNKIVISCGKDTEGKRIKIEATLKTKLKSDKLKTLRVCKKLNKYYLNLTFEKPNFIKTDVKTWISIDQNHKNFFCAVDSNANKIIFNKNNFIKYTEKQIDEVKSKLDKKKKFLVKTDKNYNKKYKQYTKKYNRLKCKLNSLYDKVREQKKNYCNAIANYLFKHYDFVIIGDYVPDINTAKYDSMHRSMLNQEMIGQFRKTLEHQANKSGKSFKINSEKHTTSDCCFCGDRVYKDPSIREFVCPKCGHKIQRDLNSSVNIGIEEIKMLSGTDFLKSLDLSDFNYSLSCSFYGVSKHELNKEHGSSLAKITH

SEQ ID NO: 2840 - protein, 397 aa, unidentified
  REGION 1..397: note = Table 20
MVVSSYKLRLYPTKNQENKLNDTIEICRILYNDFIFESHLAYKEGYKIKFDELQRMIPAMIPKDKVYSKVAQMVLWQFYNNLKTLSALIQRGKRTGNLRFKSKSRFHSINYNQSGFKFLPDNKIKFSKIGKIKCIIHRKIQGKIKEIHVKKELTGDWYAIVVCENELKSICSLFRKKIVGIDVGINNFVYDSDGHVIKHPQLLRKSKKKLKRSQRKLSKKIKNSNNRWKQKLNLARIHQKIKNQRNDFLHKTSRYYVDNYDTIFVEELKIQNMIKNHYLAKSISDSSWNSFFQKLEYKAARAGILFKKISPYNTSQKCSMCNNIVKKSLAQRTHNCPFCGFKIDRDHNAARNIKQKGLDSLPLEWREVTPLERRPLTITSIRYSQVISRNEEIHHFD

SEQ ID NO: 2841 - protein, 376 aa, unidentified
  REGION 1..376: note = Table 20
MTLNYKFRLYPTKEQELVLEQTLDGCRWVYNYFLDKNMSSEYDMNYALTELKEQHPWLRNYHSKMLQMIAKQVAAARKTAAKGILSYRKHNDFNAFTYNQSGFRLENNKLSLSKIGSIRIVLHRKLPVNVKQVTVCRSKTGKWYAVVACDVLRRLYSTIIYRKPVGIDVGIAKFCHDSDDHTEDNPQFLTKMLRPLRRAHRRVSRRQTGSSNYKKAKHMLARLYERINNKRRDFLHKTSTYYSNRYDLIFLERLRVMNMAKNHRLARKILDASWSTFKNMLQYKANRVVEVEPAYTSIDCSRCGHPVPKSLAVRTHACQKCGAVLDRDYNASINILQRGLESLMLLLLPVERREVTPVEIAMQSRKQEEAYEFIRR

SEQ ID NO: 2842 - protein, 381 aa, unidentified
  REGION 1..381: note = Table 20
MMAYKFKLYPSKQQEQALFKTFDLCRFTYNQLLEKLGKQEKINRKEIQHSLVEMKQNYPELQDVYSKTLQYECHRLFGNLRALAQLKKKGIKVGKLRFRGKDWFKTINYNQSGYELEQTGKRYGKLKLSKIGNINIRCHRIAHGAIKQITIKKTAGRWYAILITDEEYKKQKGEGQIGLDFGIINFVADNNGNRIKSPLFLKRSLKKIEKAHQDLSRKKKGSNNRKRAKQRLGKLYEKVENQRNDFLHKLSTQIVSENKLICIEDLDIKEMISKKKNRFWNRRNFLDCSWATFASMLKHKAESAGADVIEVNPKNTSKICSGCGTMQEMSLSQRTYSCDCGLEIDRDVNSAKNILAQGLGFVENETASSSMKQEAITSNNV

SEQ ID NO: 2843 - protein, 396 aa, unidentified
  REGION 1..396: note = Table 20
MQTTYKFRLYPTKEQEQKLLWTLNKCRYVYNFLLSELENQKIIDKAQLQEMITDLKRIEPELQKVHSKALQYENYRLFSNLRALSQLKKNGKKVGRLRFKGKQWFKTFTYNQSGFAIMQNQTRYDKLWLSKIGEIPFIMHRDVEGKIKHITIKHYPSGKWYASIIAETNNEIPKTENKGKVGIDLGTINYAYDSNGNHFDNPKHLDKSLKKLRKEQRRLSIKKKGSSNRQKQKIRVARIHEKIANQRNDFLHKLSHYYASNYGYMAVENLNIKGMVRNRYLAKSIMDASWSRFIQMLCYKAERAGCTVVKVEPRGTTQKCSNCGQEVHKELWNRIHKCSCGLEIDRDYNSAMNILKRALESLPLERRESTPVEIEPLLSVEQVWSEKQEAPCDSWE

SEQ ID NO: 2844 - protein, 512 aa, unidentified
  REGION 1..512: note = Table 20
MQVKLTYKFRLYPKPEHEERLLETLELCRQTYNYFLGQWNGKENIPGRLELQSQLPRLKREKPELARVYSKVLQMVLYQLYSNLRALSQLKKKGKKVGRLRFKGKGWYKTFIYNQSGFKLIKTEKRLGILHLSKIGDIPIRVHRPVEGSIKQVIVKRHNSGKWFACICVEKEVEVKREEPMRVVGIDVGIRYFLTDTDRRQIENPRFYEKTLERIRVLQHWLSRRRRGSNYEKTKIKLAKAYERLVSQRDDFLHKLSKFYVKNYDVICVEDLQIKNMVRNHNLSQKILDASWGKFIRLLHEKAERAACVRVVVDVPPKGTSEGLSYNNPYRDFISACRIKMRGWGSPDPPAEAEPLLVEIPASSIIEAGSPQPSGVGSSRPRRVWNIGYGSLSKERFLTLMKAHNINIIVDVRRWPTSKIDHFKKENLESLLQGAGIKYVWLGHKLGGFRKGGYRKFMDSPEFDEGIRNLISLSESGNLCILCLEPDPKRCHRRYIIERLSSLGFDISNIEY

SEQ ID NO: 2845 - protein, 396 aa, unidentified
  REGION 1..396: note = Table 20
MGLLVYKFLLLPNKDQEGKLLQTLEVCRKAYNRLLEEYYKGEHDRFVLQALLPVWKEEDADLKTVYAKVLQYEVHRLLYSQKGLEGRKKHGHKVGKLRWKPPQRFRSFTYNQLGFKLQVGRGKTGALHLSKIGDIPICLHREVIGKIKQVTVKHMPSGEWYALMAVDDGQGGNTVTFIERAVGIDVGLEHYLVDSEGLEIENPRHLKNGLEGVRKEHLKLNRKVKGSHNYEKQRIKVARAHERVDDQRNDFQHKLSRHYVDNYDLIVTEKLDIKEMIENGHMAGSINDAAWSSFNQKLAYKAERAGKLFVQVDPRGTSQECSCCGKLVPKTLKERWHDCPHCGLSMSRDHNASINILNRGIVKVGQELPELACGHWTATPLSKEVHAQWMKQEALS

SEQ ID NO: 2846 - protein, 461 aa, unidentified
  REGION 1..461: note = Table 20
MHNRLPELKDEWQELKQVHSKVLQRVVTQLYDNLKSLSEQKKNGYKVGKLRYKGKGWFKTIEYNQSGFQVKETDTRLDLLQLSKIGKIPIRLHREIRGEVKGIIVKKDSAGDWFAIFQTEHDEPNISVTDSDSEKSVVGIDLGITHFAVDSDGNRIEHPKNVEKAEERLQKEQRNLSRKEKGSNNYEKQRKELARVHKRVKNRRTDFLHKLSTAYVNKYDIIAVEDLNVSDMVQGQKNSKNTMDSAWRTFIQMLLYKAESAGTEVILVDPKDTTKECSKCAVKTDKKLWQRKHSCPSCGYETDRDFNAARNILRKGIEESEIVGKGQAEVTPADTGTAADTKNSESFCDVSASTVVETGSPLPPRSIAERWWRVVHSELDPGDAVTDSPPTYLRHYLDADRQEELIEEVLDDYSIPEDLYFDAKKAVFLSKGPSASLETVDRAREEADLEPVSEMLDEGGA

SEQ ID NO: 2847 - protein, 259 aa, unidentified
  REGION 1..259: note = Table 20
MKREPTGEWFASISIETGDDPPAKPDSPERCVGIDVGILKFAHDTDGFALGPLNLSNERNRLDRERRKLSRKEHGSNNWEKQRRKVARRHADLKRKRRDFLHRVSNYYAREYDLVAVEKLDAKGLMELDGNSRNRASAAWGTFRRMLAYKCEREGTHFAAVDPEGTTKECAKCGAETDKPLWVREHSCPACGFEADRDANAAGNILSRGLDQVGVVHPESTPSETATAVGTAVSAVSASRVIEQGSPALNERASASRAG

SEQ ID NO: 2848 - protein, 447 aa, unidentified
  REGION 1..447: note = Table 20
MDITLRCRAYPDEETASEAWRHIEIHRQIRNHAIRDYYSHDYGNRPTAYDQHRKLTDWKQRWPLFSDVSAHAAQQTVSEIHKNVETQKGRRENGHKAGRLKWQGSGERRSVAYQSEGFNVNHTTGQDGYATVRLSKIGHIPIRAHRELPATEQIKRVVLKKERTGDWFVSLVTEQADDDLPEKPSPDTLDPADCVGVDLGILSYIHTSDDTAVDMLDLSDEYDRYGREQRKLDRKEHGSNNWEKQRQRVATAKRQIKRKVLDYQHKLTTWLVQEYDLVAVEDLDVKPMLETSQNAKNKQDAAWSRFLDLLEYKGDLYGTHVVRVEPAGTTKECSECGVETSKPLWIREHSCPACGHTEDRDLNAAKNILSRGRKQIGAGRSESTSPETEDFWCENESQSDSLTPVQTALPTGTISVPAKRVVEAGSPEVVRKTESSVMTRDEASRTT

SEQ ID NO: 2849 - protein, 192 aa, unidentified
  REGION 1..192: note = Table 20
MEDPEDPPVESLSVDDCVGIDLGVLNYIHNPTGLVVDQLDLFEDRGRLEREQRALSRKEYESNNWDKHRQRIAKVHARMNQKKWDFKNKLAYYYTTHYKAVFLEDLNVKGMLESPQSARNKAEVGSGGETSFLLCNTTGRRTGVTWSRSNQRIQHWIARCVERVCTNRCGFENTRVRRAGAGLKRTEITTRL

SEQ ID NO: 2850 - protein, 269 aa, unidentified
  REGION 1..269: note = Table 20
MDQFQKALRLKGVVIKEYGCGDWKIVLELEVPKPDKKPITEDCDIIGIDLNVSNFLVDSEGREIRNLKNLLYNKYKRIKKEQKKLSKKEKGSNNWKKQKKRLAKAHKKLRDARRDFLHKLSRAYVDKYDVIAVEDLDSKNLSEGEGSVLNRHIANYAWNEFTSLVAYKASQAGEQVIEIRAKNTTKNCSNPGCSNKVDKELFDRVHECRECGLEIDRDLNAAINIVNRAISLVGQGLSEVKPLDTSTSAGTTLVPVSRVVEQGSPFQNP

SEQ ID NO: 2851 - protein, 420 aa, unidentified
  REGION 1..420: note = Table 20
MASTFIRRFSFHNSWVGGCGEVRTYKFRLYPSEEEERKLEETLELCRRLYNHFLEELNEREKVPHRYELQRELPRFKEGHPEYKRVHSKVLQMVLHRLYSNLRSLAKRKENGYKVGRLRYRGKGWYKTFTYNQSGFTIIKTGTRLDVLHLSKIGEIPVRMHREVEGVIKQIVIKRYASGKWYACVQTDDGGERRCGSGVVAIDVNTSNYLTDSDGRIIENPKYVEEKEERLKREQRNLARKERGSENWKQQKIKVARAFESLTNCRLDFIHKLTTAYVEHYDTIILEDLDVSRMNAGSRYAKANYDVAWGVFKQLLLYKAASAGAEVVFVAPKGTTQTCANCGSHVPKGIWERTHKCHECGFTLPRDYNAALTILQRGLEKLDRGQVEVTPVETGAPTLTHVSASSVMEAGSSSLVSVAN

SEQ ID NO: 2852 - protein, 402 aa, unidentified
  REGION 1..402: note = Table 20
MIQVTRFKLYPSKEVEGKLFSNLHICSFVYNWCLEHNIWNDSVLPQLKEVYPDIKEVHSIVLQNVVHQIRDNIKALSELKKKGKKVGRLRHKSRHSMIFEQTGFKIDRDMLKLSKIGTIPIVISRPIDGTIKQIIIKHNKTNKWAAIIVSEDKIKEWYTFRRSYQKPGNSLKVVGIDLNVSNFSTDSNGLVIDHPKNVKKAEKKLKRQQKKLSRRKKGSFNRKKQKWIVAKVHEKVENRRNDFLHKTSRYYVDTYDLIALEELSIDRMVQKGNSGLSKAILDASWGKFENYVLYKAENAGKYAVQVIAKGTTQDCSVCGKIVPKDLSQRIHSCPYCGSVMPRDYNAAQNIKLRGIEMVGWGTPEPGTLDIEKLNTLAEIRTSILDVNNPEQVFVSETRISRL

SEQ ID NO: 2853 - protein, 406 aa, unidentified
  REGION 1..406: note = Table 20
MKSKDSKLILSFKYRAYPTPEIERKLINMMEIEAKVYNKLLNYIAERRRQGMKVTQFDTQKLLKDMDEKHEVYSKALQMVNNVLWYNIKVLSELKRNGKKVGKLRHKKVFKIVWYNQSGFRVEGDRLHLSKIGEIKLLLHRPIQGEVKGVIVKRSKTNKWYAIFQVEREKQPLEMTGRVVGIDLGVEKFVTTSDGDVIENPKLLDRREERIKLLQRRLARKRKGSRNHEKARVKLAKAYERLENTLNDYIHKITTWLVNNYDIVVVEKLNTREMVQSSFGRLRKHILYSKFSTFLHHLSYKAERAGRRVVEVDPGYTSQTCSRCGYRVKLALSDRVLHCPNCGLVIDRDYNASLNILRDGVGTAPLPVEGEPLLFITSREVVYSKFPQRNRKSPSRGGDAPSVRAE

SEQ ID NO: 2854 - protein, 409 aa, unidentified
  REGION 1..409: note = Table 20
MKEKRDNSMRNYKFRLYPNKVVETELNRQLDLCRWIYNRLLEELNKARENSVKMKRYDTQKLLVKLKEEKLELKNVYSKTLQMVNQQLWNNIHTLAGRKRKGYKIGILRFKSYDLFKSIFYNQSGFIIGNKKIILSKVGKIRAEFHREIKGSVKGIIISKRGSRWFACIQIEDPKQEERQVKPLPNTEMKAVGIDMGLKKFAVDSSSKFIDNPRFLKKTANKIASLNRMLARKKKGSNRRNKVKLRLNTVYEHLQNQRKDFAHKLSAEYVKNYGIIAVEKLNTQGMVKNHKLSKSIYDAAWSQFMFFLSYKAESAGRILVRVNPKNTTQRCSVCGKLSKEHLDLSVRIFKCSYCKVELDRDYNAARNIIIKALSGREPASMLAESRPLLLRKQKQVRVLKREAPCGSSG

SEQ ID NO: 2855 - protein, 442 aa, unidentified
  REGION 1..442: note = Table 20
MQLFRTYKYRLYPTVKQRRIFEEWLEACRFVYNYFRAKRKEHWEKEKELPKEERTSISGYDQMNQLPQLKKERPFLKEVYSQVLQATVRRLDEAFQAFFRRVAEGQTPGYPRYKKPKRFKSFKYPQYKNGKTCYHFKLNKKKKRIRLGKIGWVKIVIDRPIPEEATIKNCVIKRDIDQWYACIVFEIEKEEAEGKIAIENIEERSVGIDVGLTKLGTLDNGEYIENKRFLREAEKKLAKAQRRLSRCTKGSKNYYKQKKKVAKIHREIKNKRKDYLHKVSRKIVDEYDFIFLEDLRVKNLVKNKYLAKSIHDASWGILKELLTYKAEEAGKKVFLVYAPGTSQECLCGAKVEKSLAVRVHKCPKCGIEMDRDEMASLIIKKRGIAKVIAMVKSNENSLNSLFNTDGSSESASGGLQEFGEGGNPPPAEGAAVVELVALAGNG

SEQ ID NO: 2856 - protein, 603 aa, unidentified
  REGION 1..603: note = Table 20
MLEKCHIVSNEVKSKPTQEGSSPSTTLLRLTKEESKDAMNKAYKFRLYPNKEQEKVFNETLETCRRLYNHFLWERKTTYEEEKAENLSKEERTKFNKYTQQYKLPEMKKENHYLKKAPAIVLQDVSHRVHTSFQNFFRRVKNGDEKPGYPKFKKYHEYNSFTYNGAQTFSFREGKLYLTKFGLVKIKIHRIIPENAELKICAIIREIDKWYASIIIEYENKLGKPELDSNKAVGIDLGINYLAVLSNGEFFENPKWLKQYEKRLAQLHRNHSRKKKGSENKRKSAKEIARLHKKISNKKKDHYHKVTADIVDRFDYIVFEDLKIKNMVKNKHLAKSISDVSWYMFRLMIENKAKEKGKIVVLIDPKYTSQNCSNCGVKVEKSLAVRTHKCPECGLVIDRDLNAAINILNKGLEKLRSSIDNTVGSTGSASGEVSEETLGKRNDTKRTGSPTTIVTRPLTYENDGTKSTKRSPTTKVSRPRSLVQEQNDSGSTPRALAITNYYDTNKREKTSFWMSFKDIMLQIVHHSLVFIRGRSWSKNFFHKFNNSLPIYFLFLLPRLFIFFPMHQGSQQGRVGMRILLETPPVNPSPSDYPPYYYRRNICE

SEQ ID NO: 2857 - protein, 457 aa, unidentified
  REGION 1..457: note = Table 20
MQLKRALKYRIYPNREQKSILETWLNTCRVLYNDCLTERTDAWDTSHKSINYYDQANQLKEIKTFDGDLKEVYSQVIQDVLKRIDKSFKNFFRRVKRKEKAGYPRYKGKDRYDSFTYPQKGFTLEDRKLILSKIGSVNIKKSSKIKDFWDTQIEDLRLHRDIPESAEIKTCTIERDLDRWYACFTVEIEIEEPNYEAITNPIGIDLGISHLLTLSNGDMVDNPKYLSKSERKLSRKQRKLSKVLATSSWDLENLRFSKTKKGSDNRTKRRFDVSKTHRKIKGQRTDLIHKVSRGLVNTYDLIVFEDLRIRNMLKNHHLAKSISDATKSLISCSRKSKICVCQKSKIFEHRKNGTFLHVSWSQLTNFVSYKAEEAGRRVEFVNPKNTSQECSNCGEIVKKPLSQRVHRCPFCGLVMDRDENAAINILKRGLKNVGQGLPEFKPEDFSKRRMIQEAPML

SEQ ID NO: 2858 - protein, 388 aa, unidentified
  REGION 1..388: note = Table 20
MSSVLRVFKYRLYPSKAQVKAFEETLETCRTLYNNALAERKNAWESERKSFSYLQQQNKLPALKRFAPELAGVHSQVLQNTLRRLDAAFKGFFRRVKNGEPSGYPRFKGVDRYDSFTFPQFGNGVRLEGKKLRLSKIGLVSVKLHRGLPKNGVIKACTIKRDVDRWYACLTIEKSSSQERREAKRAVGVDVGLKNLVALSNGELVKNPRWLEECEARLAVLQQRLSHKQKGSRNRSKQRLRVARLHRRVRNQRRDFLHKLSRRLVDDFDLIKFENLNIRSMLKNRFLAKSIGGAGWFELMFFVRYKAEEAGTVVEFVEPQGTSVKCSECGFLVPKTLSVRTHSCPNCGSVEDRDINAAKNILYTVGLTGSACRGTRSERAVEAGSPRH

SEQ ID NO: 2859 - protein, 408 aa, unidentified
  REGION 1..408: note = Table 20
MKRTGGFRLYPNNGQIQAIAGMLEECRWLYNWALDCRKLAWEHMKEHVNYYDQANLLPYLKEKVRPNLTGVQSQVLQDVLRRVDKAFKAFFRRAKSGEKPGYPRFRGKDRYDSITYPQNPAFRIEKTGLRCDKLVLSKIGAVRCRVHRDIPDDAVTKTCTISRSGDRWFASITYDVPDADVKEIISENVVGLDLGLNHLLAFSDGVFLDAPKWFRASEKKLGIEQRRLSRKKRRSKNRSRQRLRVSAVHRKIHAQRKDFMHKTSRSLVDSFDGVVMEDLRIKNMVRNHHLSKSIHDAGWNMFAGFVAYKAEEAGKHAVFVNPSGTSIECCVCGTPVSKTLSVRTHRCPSCGLVLDRDTNAAVNILGRGLDALGLLTAGTAGRACLNDLVTGAMIQEAPSSPVLAGREG

SEQ ID NO: 2860 - protein, 318 aa, unidentified
  REGION 1..318: note = Table 20
MVRLDKSFQRFFTGLTRFPKFRRQGKYNSFTYPQLGGFSISGDRLKLSMIGNVKIRLHRPVDGSMKTCTVIRDIDQWYACITSETEEDTAATTIPASSINSEKKPAVVGVDVGVSCLAALSDGTILSNPRSLNRSVDKIKWLQRELSRKKKGSSNREKARLRLEKAWRQVRRQRDDTAHKASRKLADNYGTIIFEDLMIKNMVKNHRLASAILDATWSKLRRLTAYKAERRGGRVILVEPRGTSQECSGCHKIVEKSLSVRTHVCPHCGLMLDRDVNAAKNILARGLEQTHAETEPIPIIRIGKFSQRSKKPKAFRQE

SEQ ID NO: 2861 - protein, 422 aa, unidentified
  REGION 1..422: note = Table 20
MAVQVPCLQAHRSELAFLWNHALAERCDAWTNEHRSIHYLDQQRLLTRWRAYDSDGLGRLSVRVAQDCLQRLDLAFRAFFRRVQQGERPGYPRRRREVDSFTFTPHRHPITRSRNGTWRLKVPKVGELPLRLHRQLPPGAKVKTVTVRYEAGAWFSTLSLEIPDPAPPPREPPHAAVGVDLGLTHLATLSTGESVEPPRYFHVGEARLRKEHRRLSRKRRGSHRYLRQRERLARAHARVRRQRQWFAHQLSHDLAERYDLVAFEDLNAAAMMEGNPLAKGLADAGWGRLREMTEYKETLRSGRCLRVPARGTTQECSRCGRCADPPLKLRDTAYRCPCGYQGDRDVNAARNVLARGMNLLSEELRRSSAEVKRVESRPTRVLGGRKVYQRRRAGSRKREHGIEVGAPFGLPTWTVRLAVPIP

SEQ ID NO: 2862 - protein, 342 aa, unidentified
  REGION 1..342: note = Table 20
LDRAFKAFFYGHAKYPRFKKFRVSGSFAYPQAYNGSVKPDTRRERLFLSKIGNVPIVFHRKLPKDSRMKTCTVVREADGKWFASLVFEEVVPLQNVPSAVVTTRAPVGIDLGLRSLITTSDGEKVEHPRLLRKAEKRLKHIQRVFSRKEKGSNNWFKARQRLASQHACVRRQRADFNHKLSTRLVREHSLVAFEDLKVRNMVRNHSLAKSIQDAGWGQLVRLTEYKASKAGRLVVRVEPAYSTHECFYCGSLNKVSLEMREFVCGGCGRTLDRDVNAARIVLKRAIAQVGQDMPEPKPVETGPLPLQTTGAASLVVEAGTTRATDVRALEAHGLIRGRLSQV

SEQ ID NO: 2863 - protein, 380 aa, unidentified
  REGION 1..380: note = Table 20
METCRRLWNRCLAERKGAWENERISVSWFEQKRQIAVDKRSSAFLQGVYSHVLQDVVLRLERAYQAFFKKNARYPKFKKLGSYDSITYPDAYNGSVRLGVARKNTKIYLSKIGYVPIRVHRDPSNGKNKRCTVKREGIEWYVVLEFEVPDVAPRGLPIKHPVGIDLGLKALITTSDGWHVKPPKPLKVHERRLKHLQRELSRKRKGSKNRVKAIERMAKQNRKVARTRRDFNHKLSRQIADRYDFVAMEKLQIRGMAQNHRLAKSIHDAGWGQLCGFVDYKVQRKGNRFVQPSAWRSTMECNVCKHVKDMPLCLRVYSCPACGNTIDRDENAARNILERGLSQVGEDIAELMPVESGVQPGRTNDLASPFCEAGTVSGGG

SEQ ID NO: 2864 - protein, 404 aa, unidentified
  REGION 1..404: note = Table 20
MIEIRKYRLYPTKEQINLLEETLESCRKTWNFLLARRKDRLDKTKFDQDHIIYLQKQKTPSLRLVYSHVLQNVSDRLDKSFRALFKGIARYPKFKSFGRYDSFTYPDAYNGSVKLGSSTRRTKLYLSKIGYVPVIVHRPSSLGKNKRCTIKREGDKWFAVLENQVSELPGSNVVAPKSSIGLDVGLLSVVATSDGETFKPIVPLKKNLKRFRRLQQSVSRKKKGSKSRRKAVQRVSRLHWKIRSIRSDFNHKLSTQLVRAHDFFALEDLNIKAMLKNHSLARSISDVGWNQLVHMLKYKAEREGKKVVFVSPNYTSTDCSRCGFRKEMPLSVRTFHCERCGFETDRDVNSAIGVLNRGLERVGLERPELKPVESGVQSLNRWEIQPHVESGIEGVESPDLEGGF

SEQ ID NO: 2865 - protein, 454 aa, unidentified
  REGION 1..454: note = Table 20
MVRKEGQNCRNLRFLIHPNPEQEVKMEETLETCRKLWNDLLSTRINLYDIYGLYPDSQMLEKQLKFFDYANNIHSQVRLNVFERVQQAYFKFLDDIKNGRLKGSKPRKGTFVKRKDVPAANPPYSLLGKKSSKPIKYDGLLRKGHPRFKGKEDYYSFTYKQHGNGWELRGNNLFLSKITDKNNLIKIDVNNDILNGQLKTCTIKKEGKKWFAFITIELPDYPEPIIPQTMVGIDLGLNNLIATSDGEFIEPPKLLRNAEKRLAVEQRKLSNMEYGSQNYLKQKRKVNRIHRNVKGTRNHISHCLSKLLVAKYDLIVFEDLKIKNMVKVRSYAKSIHDAAWGRLVLHVMYKAAEIGKITEKVNPKNTSQTCSACGKKKKVFLKKGERRFHCEHCDLKIDRDVNAAINILLRSKTYTNTVGLTGIYGCGVGTSTSSCKAGLQVPTMNQQLLNLMQG

SEQ ID NO: 2866 - protein, 466 aa, unidentified
  REGION 1..466: note = Table 20
MSRAKEESKFLLTYKFRAYPSALQEYKLENWLFALCWLYNHALEERKRVWKEERRTVKYSEQQNNLPKLKKKEPILKLVHSQVLQDTLRRVDKAFQKFFQDLERKKKGEKVKVGYPKKKPIAKYKSLTFSQVWMKQKGKLVPIIKLEKKNNRFAYLHLPKIGKLKIRLHREIDWTRAKTVTVKREPSGNWYVCISVEVDLDQILKEAEERVERKIKTVGIDLGVKHLAVTSKKDYIKHPKFIQKLEKRLKREQKKLSRKEKGSRNFEKQKKKVAKIHEKIKNARRDFLHKLSRKLVGRYHLISFEDLDIPGLVENNPLAKLILDAGWGTLITFTTYKAVMAGVKVVKVDAAYTTQECSYCGLKVPKTLADRMHKCPRCGIELDRDYNASIVIDKRGIEKEGLTHLTGGRVGATRTYACGEGTGGVSSKGEISYPSLKQESPCGSSGWSNSRQRVVFLPEAPSVRAE

SEQ ID NO: 2867 - protein, 422 aa, unidentified
  REGION 1..422: note = Table 20
MNDSQRLSEGDLYEVLRCRIYPTSEQSNSMEEWLETLRWLFNRSLAERKDAYKTDKQNITYRQQRDALPALKKKYPQLRNVPSQVTQDCLQRLQEAFKHFFRRVKEKKAGAHIKVGYPKFKKYGRYHSLTFTQVWLRQTKDPNKPEFRDVIRLELDEKKRASLQGENPRTVTGALHLPKLGALKIRVHRNFNWRRAKRVTLKKEADGHWYACICFQLEASEKKGAVTSSGVKKVGVDLGLKYLAVSSDGYYHEHPKWLEKSEQKLKKEQRKLSKKKQGSKNRERQRKKVAKIHQKIANQRKDFLHKLSHWLVSNYDEIIFEDLNIPAMVQDKRFAKSILDAGWGSLIKFVSNKSVKLDHRVVKVDARYTSQDCSSCGKRVPKTLRERIHRCSRCGLVMCRDQNAAVNIKNRAGVGHSEPSVE

SEQ ID NO: 2868 - protein, 158 aa, unidentified
  REGION 1..158: note = Table 20
MGIDLGLTDFLATGAGQTIPNPKYGKHSAKRLAQAQRRLAAQKAGTKVREKKKKVVAKTYKRVVYQRTDFFHKIANDLVGEYGFIFAEDLKPSEMLSYRAINRYPLRHRMGVVSFYSLEQSGRGWPRVPEGKTRLYVPNLFGVQAPPENAVICSDIFL

SEQ ID NO: 2869 - protein, 301 aa, unidentified
  REGION 1..301: note = Table 20
MYNPREHRNYKFRIYPTKTQAETLTNWLTLCRLCYNAALVDRKNHYLRNKASLTRTKQQTTLKLDKDKHPQLKEVHSQVLQEVLFRVEKAYQAFFRRVKAGENPGYPRYKGMGQYNSLTYTQFGDGRGAYFKEEKLALSKIGLLKIKLHREIPGKVKTCIIKRETTGKWYAVLSVEGYPVLYSPNWKKTGLDVGIEKLATLSDGEQIPNPKPIQKSEKKVKRAQRDLCRKKKGSKNREKARQRLAQIHERIRHQRQDYLHKIANYLVWKRYNNKGKRIETRDLGYQRGFPVTCKEMNKFMF

SEQ ID NO: 2870 - protein, 356 aa, unidentified
  REGION 1..356: note = Table 20
MIIVHRFHIEPTKEQEQKLFQTLELCRQLYNAALEQREICYRQRGKSPSCTAQKNELPAFKKEFPEYKQVNAQVLQDCLQRLDHAFQRFFAGLAGYPHYKDQNHYRSFTYPQADKQDHFKKIGHIYLPKIGYVKMKAHFEFNPAKVSRINVKYHGGKWYVNLTSEIQESEGVDIVNKVGIDVGLLTFAALSDGTKIDNPKYFRKSEKKLARLQRRLSRKKKGSNNRGKAKAKVTRLHDKIANQRKDFLHKISHGIVQKYDWIAVEDLSVKNMMKNHHFSKSIADAGWSKFISYIEYKAKKFGKVLVKVPPAGTSQTCVCGHPVPKDLSVRIHQCPHCGLTADRDVVSAMVILQRAN

SEQ ID NO: 2871 - protein, 196 aa, unidentified
  REGION 1..196: note = Table 20
MRKAYQFRIYPHKNQEVKFNSTLSTCRHLYNDALAERKRQAELNELSRRFDVCPWGKPEWMNYWDQTGIDVGLTSLLTMSNGEQIEPPEFLRTSEKRLARGQLVQFTTYKAGYAVGIVELVDPRGTSQICICGHPVPKTLSMRIHKCPNCGLVAGRHHVSANVIENRSIYTVGTTEIEACLSSLSTDTMTQEAPAR

SEQ ID NO: 2872 - protein, 227 aa, unidentified
  REGION 1..227: note = Table 20
MNKAYTFRIYPNRNQETKLNRTLSICRHLYNDALEERRRQAELNRIRREFQVFPWEKPEWISYEDQQNALPDSKTPLQKQVHSQVLQNALKRLDRSFQNFFKGFGYPRFTVDIDKKVEKVPIKTRTGIDVGLESLLTLSSGLIRFTNYKAEYAGKWIELVDPYWTSQTCLCGADVPKDLSIRIHICHECGLILNRDHVSAIIIENRGTRSVPMDCREFTPVETKPLL

SEQ ID NO: 2873 - protein, 385 aa, unidentified
  REGION 1..385: note = Table 20
MLSTLEFRLCPDDEQKIILKNQLMICTGLDNGTYHERLEHYWETGRGLTYAEQQNALLYTKKAYQGLTTIYSQVLQDVLRRPDTSFKNLFGGRTKYPHTKKYVSSMTYPQASQKWIFSKSIVLPKIGRIRMIKHRAVKGKVKTATVRKYNNEVWHAIIAVETKDIAMKAAQEIKNSVGIDSGLADFIYLSDNTRVDNPGFVKLHKLLLAKRWQDYDNMKDDWLWKLANVMVGRYDFIAYEDLFISNMMKEHSFARAIQDASWSGFWDKVEWKAKLEGTFAIPVDPKYSSQECPVRHIMCKITLSERTFLCHLCDYTAQRDFQAGVIILRRALVRTDMSEFTPAEVPTAGHQMDITHVLLKQETGSHAANEPKQGDNSMGSSRALA

SEQ ID NO: 2874 - protein, 389 aa, unidentified
  REGION 1..389: note = Table 20
MAVISYKFRIYPTREQEETLNRMLTLCRRLYNAALNQRIQAYHLGYPTWLRKQRAELPALKSELKEYSKTYCHVLQLTLLRLDRAYASFFRRIAERKKGKKIKAGFPRFKSERRFRSLQYSNQGYKVLSSGHLQLTKIGTIRMFKHREIKGQIKTLVIKKDGVGDWYAILTVQLPDVPQREIKTRMSADAGLIDLLTTNENEKIKPKKFYRESESQLKILNRRVSRKVKGSNNRKKAIRRLAKVHRKVERQRDDFLHKVSRTLANKADLIAFEKLNIQNMLKNHRLAKSISDASWGKLMRYTNYKAANAGGVVVYVDPRGTSQICSRCGALTRISLSERSHACTGCGFTLDRDWNAALNILQRVGTDSSEPIQTPVEISPLPLPSGGGK

SEQ ID NO: 2875 - protein, 421 aa, unidentified
  REGION 1..421: note = Table 20
MEYTTAYKFRIYPNKTQRKTIGDMLYLSRKLYNAMLEQRRMAYQLNKDYYENLRVSYNTQAIELSELKKEFPEYKNIFSQVLHNVADRLDKAYGNFFIRVRERKKGKKIKAGFPRFKSRDHYRSITYTQFGFKVLDNTHVFFSKIGKIRMLQHIKIDGKIKQATVKKDKANRYFATFIVEEVNNNINYSEFPYNPVGIDVGLLKLIATTDNTPVDPPKYLRKSENKLKRAQRSLSRKQKGSQNRREMRVRVARISSHIANQRNDFSQKLSRTLVNNHNFIAYEDLNIENMMKNHKLAKSIADASWGELIKNTMYKAERAGKYCVKVNPKNTSKQCSNCGNIMEEQTLDDRDYHCIKCGITIDRDDNAAVNVLNNGFKKIFNTFIIMKPRKIRHKKKRIPTDCGELMPVEGKTYTSNGKFFL

SEQ ID NO: 2876 - protein, 385 aa, unidentified
  REGION 1..385: note = Table 20
MRSAYKFRIYPTKQQAETLDDTLDFCRQLWNLALADRKTIYELEGKTRSYEDQAALLTQEKTKYPELKQVFSQVLQEVLRRLQTAFDNFFRRVRQHARKKGYPRFKSRYLSFTYPQLGFKLDGSKLILAKIGSIRIFRHRGIEGQIKTCTLKKSSSCKWFALFSVEKEDPHKVEPLKSLGVDLGLTHQVVTSEGQYFKYPNHYIKAQKALRKAQKALSRKAKGSNNRQKAKIKVAKVHERIKNLRDESLHQVSRKLVDQAELIVFENLNINEMVQGNLAKHILDHSWNKLIQFTQSKAERAGKTVVLVDPRNTTKKCSACGKLTPKTLKDRVHSCRCGLTICRDLNAALNILTLGQRGGACGDLTSILNSRSRQVGSMKQEAPIL

SEQ ID NO: 2877 - protein, 383 aa, unidentified
  REGION 1..383: note = Table 20
MFQKSKIKRKNKVYLSYKYRMYPTPRQKKILYETIETCRRVYNDALLDRRENWEKVKHQEKEVRQTISYVDQVKGIIDKRKTNWWLQRVEAQVLNDVLNRVRKAYEKFISSLINNVPHGLPNLKKKGDYKSFTYPSMKKGRFGKVSNNKVFLSRRIGEVKIRYHRELPDNCKVKTLTVVKKLNEWYLIYKVELLKPDERSDLKICVGLDFGLTSLVTLSNGQHISNPAFIIQAYHKLKKTITRYQRKEKDLKNRRKATLEFLKVKQKVQHQRDDYRHKVTRAIINACDVVFYEGLHFFNLGKNTHMNIHISDAGWGTIARMLEYKARLEGKMVFSVPPQNSSQLCSFCDTKIPKTVEVKIHKCYVCGLEMDRDENASRTTVTY

SEQ ID NO: 2878 - protein, 333 aa, unidentified
  REGION 1..333: note = Table 20
MLLNAWIMLITSSLIVSRAKIEWARKPGFPRHKSRDNYNSITYPQSGFKLIHKSKSTNKGILQLSKIGDIKTIISREITDGDIKTCTVKRNKIGQWYVDLTVEFPDAVKIPLEQIKEEEIIGVDVGINKLAVLSNGVEIENPKLIAKYEKGIKTLQTLLSKSKKHSYNRAKIRKKLAKKQLKLANTLKDSLHKASNQIVKSGNIIVFEDLNVQGMVQNHNLAKSISDGSWSKLMDMCDYKAENAGKYTQFVDPRDTSQLCSRCGAAVKKDLSIRIHSCNNCGLTIDRDLNAALNIRERYMRLAWNFVKMPVDAPTTAHSIEQAGAMKQEETSS

SEQ ID NO: 2879 - protein, 419 aa, unidentified
  REGION 1..419: note = Table 20
MEDSRRNFSRGEIVVTPTPYNETMKRTAKYRMYPNKTQERTLNNTLAVCCSIYNTCLEQRKMLLGDRKKRITRIEQQNQLTEAAREDTELRRVHSQVRQDPTFRVQRAFDAFFRRLADPRCNNPGYPRFKSRRRYDSFTYPQATGFSIKLTKKRHAKLRLGKIGSINIRYHRSIPEDATLKTCTVRRKNGRWYACITYEIPDVPVRDDLGEPVGIDVGLENLFALPNGHLEENPRHYRKAEARLRVEQRKTKRMRKGSSNRNKQQRKVAILQEGTANRRHDNLHKITRRLVDAYPYIKVERLQIDNMRRNHNLAKSISDASWGTLFFMLDYKAEGAGGLVEYVDPRGTSQTCPCGEPVPKELKDRVHRCTRCGLTTDRDVASAMVIGSRVGTTRLACGGDGDPTGFGVTSSEKREAPSS

SEQ ID NO: 2880 - protein, 323 aa, unidentified
  REGION 1..323: note = Table 20
MSASFNNFFEKRARFPKKRKYNNYRSFVYPQSGFNVKPTPEGGHKIYLSGIGYVRAFIHRPMLGKVNRLSIKCDAGEWYAIFLMEKEDKKMQDVKAIPNDKIRGGDVGLEKFIVLDDSSSNEYPQFLRLSEQKITQLQRHLSRKRKGSRRRKQLAFRLAQLHLHVKRQREDYQNKLVSTLFNKEMDVLVLEKLSIQNMLQNHNLARSLADASFGKFASKCINKGKMLGKHVIFVDPWGTTQFCNNCLEWVPKDLSEREHNCPSCNIKLPRDLNSAKLIKWLGIPRRSCPPSDGGSPSAELLPLPSLRGMASQSAEAGSLRIYS

SEQ ID NO: 2881 - protein, 533 aa, unidentified
  REGION 1..533: note = Table 20
MEFPTPPETPRKKRTRRPKHRLVARAFRFAMGPTEAQAQGLHAMLDALHGLRDTLTIELSDERRQNRARKAAGERVVYMDRAALYKRTSALAEKDKALAAVHSHLRQNVAVRVLEGTKRWLEALREGRPGVRPPHPIERKRYRSFTFPEYGNGCRINHGKLLISGVGWIKLHGHRRIVGTKKTVTVKFAQGRWWACVIAMVQVPDRWAPVPEGLPEAGGDPGLASLLTDSHGRVFDPPKALQEAQQDLKREQRILSRKFEARKRAHEQLVQAAAATGTKAPALRDLPYSSRLRAQIRVVGKRHAKVENTRNHHHKKIAAICADTLQRLACEDHSLQFMIRNRRLARAASDRAIGALKQTLASKLGPERFVLTPNQRPGIGGNSQTCLCGHSVPKSLKERVHRCEACGLEADRDHVAANIVQLIAFGTVSDTLEKHLPAGGQPVVRRGGREGEAGASRSPGGRRHQPRPAAETPVKRPPQSSSPAARVRKLPREARPAGIAPPVHTGRALPLEPQGRGSARKPARAGTTVAGPR

SEQ ID NO: 2882 - protein, 522 aa, unidentified
  REGION 1..522: note = Table 20
MQTKKPSRVKRQKRPKHSGVVRVYRFPLDTTKEESAKLFNTVHLCWEVRERLVADREADRVAQRGRRAAGEKPKYLTVADQYISVARLARDEPRFAVLQSQVLQNVAVRVDEATKRWLETFESGRRGVRPPHCIDKKEYTSFTYPQYGPSARLRQGVLHLSKLGHFRVRDYRRMRGTPKTVTVKFADGRWWAVISCHLQAVDVYRAANEVLALDDTGADTGLTSLLTTAHGEVFDPPKALKESLAKLRHEQRNMSRKFEVRKAQYHDDQARRAAQKAEPLPALREIAYSKRLKKQIKVVAKLHTKVKNIRQYHHRKIADRIEKTYRCVAVEEHPIKFMLKNRKLARSAADRGIYAQKQQMKSKLGNRYVPVPNKRPGIGGNSQSCLCGEAVPKSLKDRVHECPKCGLKDNRDVVSANIAMLIGFGRAQLMSRPAAGLAVVIRGETEEVGTSPHLERASASEVSVKRTPHANLRKRGKTGGAKATPAAKTPMHRPKKPLPGAAKLPIPPVEGAESRKHRPLGR

SEQ ID NO: 2883 - protein, 484 aa, unidentified
  REGION 1..484: note = Table 20
MVARAYRFRLDVSPGESKKLFDTLHSCWLLRNALAEDRIKNRLDCKEAKRQGEAKPHYLNRSDQYNAVKLYAKSNVAWGSLHSQVRQNVSVRIDEGYKRFFEAQKEGRKNVHPPKFIIEKRYRSFTYPQYGTAAFIRSGKLYLSGLGEFHVRDHRKIRGLKKTVTVKWAQGHWWVIVVAMIQEKDQVALPADNDSRPEGGGDTGLSATITESYGKKHNPPRAFLLYQSRLRTAQKKMSRQFEARKKAHFEVVRTAKASGIKPPAIEDMPYSNRLKKQITVVAKIHTRIENIRDYHHKKTASEIASKYLNFAVEEHDVKFMIRNRRQAKAASDRAIAKQKHLLQSKLGKRYHATPASRPGIGGNSQTCVCGASVPKTLKDRTHICPSCGLIADRDHVSANIVQLIAFGSISPTLYGHPGRMSLDVESSKHGVAKVTRASRVIPASESSMKRQSIHLVGRNTNGGKPTLEDKTREHFHRKQHGVAS

SEQ ID NO: 2884 - protein, 220 aa, unidentified
  REGION 1..220: note = Table 20
MQSIPLHPEDREGGGDRPRIECFAAVSNGERVENPKHYRAASELKRAQRTVARRKNKRSNRRRKAINILARKHLHIKRQRADFHHKTALDVIRRYDHITIEDLNVRDGQESPSRQSISDAGWNQFARILTSKAANAGREVILVNPAYTSQDCSQCGSRVRKSLALREHRCINCGFVAHRDHNAAINIQKRGQKRGARASGMGYEARVNREESPTIAGHPV

SEQ ID NO: 2885 - protein, 615 aa, unidentified
  REGION 1..615: note = Table 20
MPTVIAPAVGPVLGGLLVDLLSWRWVFFVNVPIGIAACIFSFFFLQEYRDRTAGHFDLAGFLLAGSGLALVMYALSEGPSYGWTSISILGSAVGGLLLLSVFAVVEVRVQEPMLDLHLFGNRLFRSANLVTLFSSAGFLGVLYAAPLYLQVGRGVSALTSGLTTFPEAIGVVVSTQIAAQLYPRIGPRRLMAGGLLGAGVVMALLSLMESDTSLWWMRLLIFLAGAGMGFSFLSAQTATFATISPRATSQASALANALRQIGSALGYILAPLTIHERDGTFPSKYELEAAFKGKGEHVPATTVQMLADRLSKSLKRFLVAKQHDIPGIGFPRFKKPNRWHSIPLRQYGKDCYLHEDKNHLIVPKKMGHFLKIKLHRPIEGTPKTVHLVLRADGHWYALIVCETEPQHEHLPSTCEHPDIGLDVGLKSFLTDSEGNTVENPRFYRTSQRTLRRKQRTMCRRKKGSHRRRKAAKNVAKTHLKINRQRRDHHFKTAKPYAERYHHLAIEDLQITNMVKNHHLSKSILDAGWGQFLDILEDRAARAGHQVIRVNPRFTSQKCHQCGEIVQKSLSVRTHVCPFCGCVADRDVNAAKNILQAARLGHSLQEPTYTDGCRVS

SEQ ID NO: 2886 - protein, 378 aa, unidentified
  REGION 1..378: note = Table 20
MNKIFEYKLRPNKKQVKLLDSLLWETKCLYNNALQELIDYYEKTGKYLNRFTQDKNYNKQIYPNIPAQFVDTTLDRLHRSFANFFRGLKQGKKIGFPRFQSYKRWSSFAFRDYTQGKIKDGKWYISKTNGIKVIQHRDFLGTPKLTRLVKRADGYYIQVICEIKSVKVKKTDKQIGLDLGLRYFIADSSGNKIEAPKFFRKAQYKLARNQRQLSKKQKEGKNRNKVRQIVVKNHLTIQRQRRGWLHKLSHKYANENDVVVVENLNVAGMVRNRYLSLSISDASWATFLSMLEYKLQILSRTFIKVNPVYTSQKCSQCGAIVQKSLSQRTHYCPECLYIGDRDVNAAKNILKLGQVLPFGEDTAIAGLTTQEANRSLGV

SEQ ID NO: 2887 - protein, 424 aa, unidentified
  REGION 1..424: note = Table 20
MKTFEYRMRPNKQQEQALMSVLIASRKMYNACLEELIMHYKETGKYLHLYEQDKHHGKEAHPDLPAVVVDTTLKRLHRSFTNFFRGLKDGRKVGFPRFKNVQAWNTIQFRDAVNCLDNGYFKAPQQMGGRIRVIVHRSLEGTFKFARIVLRPSGWYLQCVCETTPQPLPKKDNAVGLDMGIRYLVADSNGHLVENPKHAKKSAKRLAQAQRTLARCKKGSKRRKKAKHQVARIHEHIANQRQDTLHKASHYYVDRYQTIAIEDLKVANMVRNHCLAFSLADASWGIFRQLLEAKAESAERQVIAVAPHYTSQKCSQCGEYVQKSLSVRTHVCPFCGYIADRDKNAARNILQRGLQVLARTGPSSSRREGPEQSGESPSARRAKGRENTSTRNWGTLRLLDPKGTRECQRAGQRAEAAESPNTIL

SEQ ID NO: 2888 - protein, 359 aa, unidentified
  REGION 1..359: note = Table 20
MRLTYQAKLYLTKQQERKLLEMFYNARMLYNEMLETKINAYKKEKKNVSRFDLQKQFKTKYKELPASVNQMMAYRVNVAYDKFFNKLGKFPRFKSVNRFRSIELRQYEIDYRIVNNKLKVWKQIGNIKMRGFRKTGNFSMGRIVKRASGWYLQYGTEITVKKPIKRIKSAVGIDVGLKSFLIDSNGNEEKPPKFFRKSEYLIRKRQRKVSKAVKGSERKKKKIKILAKTHEYIANQRKDWLHKLSTKYVDKYDLIAVEKLNIKGMLKNHHLAKSIQDSAWDTFTNILAYKTQILGRHFVEVNPRYTSQKCSGCGEIVPKSLSVRTHICPYCNLIVGRDENAAKNILKIALEQGFGEGRT

SEQ ID NO: 2889 - protein, 195 aa, unidentified
  REGION 1..195: note = Table 20
KDIGIDVGIKAFCVDSDGNKVDNPRFLKKSLKLLKRRQRSLSRKKKGSARRHKARYLVARTHEKIANQRKDFLHKTANQYIKHYDKIFIEDLQIKNMVRNHHLAKSISDASWGMFFNLLAYKAEEAGRELVRVLPNNTSQICSGCGEKVPKSLSIRIHKCPFCGLVLDRDENAAINIIALGQRVQALTSALANVA

SEQ ID NO: 2890 - protein, 408 aa, unidentified
  REGION 1..408: note = Table 20
MKKTFEYRAYPTTKQRKLFTVWLALLRSIYNQALAWRIEAYQTAGLTVKWTTQANALPDLKAASKAFAGLHADVLQDAMRRLDKAYNAFFRRAQNGEAPGFPRFKGEGRYRSMTFSHLSKQLIRNVRHKFAKVVVPKIGHLKIRYHRPLPNGKIKTLTILKRASGWYVTICVEVPDPVEVPIHTTIGVDVGLNSFAVDSDGEPIPNPRHYRQSEKRLGKHQRVLSRRKKGSRRRVKQREIVARTHQRIANQRKDFQFKAAHRILERCDEVAVENLTITNMLKNHYLAKSISDAGWGSFRLKLQSKAASAGKQFTKVKPHHTSQKCSSCNEIVPKTLLDRVHDCPHCGLVIDRDHNAAINIKKAAVALRGGASVANDPEIPRQGTEARNSVRPVGRTIQTSTVPSGRGS

SEQ ID NO: 2891 - protein, 404 aa, unidentified
  REGION 1..404: note = Table 20
MKQTFKYRAYPTKTEERWLFSELRHQKQLQNYMLQMRSQMWEYGRKSVSMYDQIHHLKDLRAATSHYSDHSQDLQVSTIKRVNAAYEHFQRRCREGAEKKGYPRYKRSVRSLTWNLRKYKLKTGERVRQNPIRETGKRHNMLKVPQLGEVKIRQHRRLIGDPKEVTLKKTARGWYVFIVCEVPETLKCVPKSACGVDVGTDNFLTTSEGEKEENPRFYRQAEQKLIRLHRDLSRKRYRSKRWYKAKDALAKQADIVACQRLDFLAKTAYKLFHHKDFDAVVAEKLKPSNMVKNRHLAKSISDASWGLFFEWCSWVAKRDGKHFHQVPPHHTSQTCSQCCQKSPIKLKLSERVFHCQFCGLKLDRDHNAALNILHRAETCALRGEVWDTILCETRNPLLQQACWS

SEQ ID NO: 2892 - protein, 451 aa, unidentified
  REGION 1..451: note = Table 20
MTYQYRLKPTAAQSESMERWLQLLCKQYNYRLAQRFDWMEHHRCSLNACSIRSCSIATPADAPDYSSQKRDLRETKKRFPEYAQIYSQVLQDCIGRVKKTFDRFVKNDTSGNRSGRPRFKSQSRYRSFTYPQILAGWLEGNRIRLPKLGCLKIWMHRPLPPDFAVKTATITRKADHWYIAFVLENKDASTAEPVITPTVQNTTGFDLGLESFLVTDKADRVEIPHFHRRAEARLARLHKRQSRTRKGSSARRKANRKLSRAYQKVVNQRKDFHYKTAWQLIRTSEVIAHEDLTVQNMARTNLAKSIYDAGWSTFIAILTRKAANAGVRTIAVNPAGTTLRCSRCDRDVPKQLSDRWHECACGIRLHRDHNAAINIRNFAIARAVGHHDLVKNARRSPLRRETCAELSEASAKGRCHEPRALYCTGRFSKFVAGRCHETYALYSQKDVRTIE

SEQ ID NO: 2893 - protein, 424 aa, unidentified
  REGION 1..424: note = Table 20
MRKTYQYKLIPTANQRQEIDRWLDMLRHQYNYLLADRFRWWQMNRCNLVIPQGENCLRWCEIGSGELRNNPDWHSQSATLPQLKQERPWYKDIYSQVLQDCVKRVKLAFDRFISGDSKGNRSGRPRFKNKARYRTLTFPKVPDKNLVNSSIKLPKLGVLKFRQSRNIEPGFKLKTVSITKKADGYYVNLSVEDKSIPEIEIDTVATESNTNAIDIGLEKLYVDSKNNQALPQKHLRKSESKLAKLQRKLEDKTRSQKAKRLVRRAISKLHQKIARQRRDWHYKEAHKLASNCSVLAIEDLKIARMKRRNKPKKIDGVFVPNGQAASEGMNKSWSDNGVGNFLEILATVAQKYGTKIIKVNPRGTSQHCSRCLNKVSKTLSDRWHQCHVCNLSCDRDYNSAVLIKKLAVGSSQDKKLPSLKDLLG

SEQ ID NO: 2894 - protein, 245 aa, unidentified
  REGION 1..245: note = Table 20
SLGLDAVLHEDVYLATSEGELLPSFKPLRHNQSKLARISQKRNQRKRGSRCRRKLAKRFAKQHQRIARARKDFQYKTAHKLVKTGKKFFFHEDLNLKGLSKRNAPKQDENGKYLPNGQAAKSGLNKSWMDAAFNQFFQLLDNIAAKAGAVVIPQNPAYTSTILCYRNEAIFTDTSIRDYWDEQNSLMVNRDINAAINLKRLGLDIFPSIKRRSGKLSIVGTVDNSTMKEILNTLNLASRSPRYIR

SEQ ID NO: 2895 - protein, 461 aa, unidentified
  REGION 1..461: note = Table 20
MKRSKDTFKLNYQYRIVLDKQQSYQLNEWLYKLCRIHNLMLEERFNWWERNRSPVNACPIFVTYLPDLKDPPTYYSQKRATHWSRESNKHLYEGVYSQVIQEAIKRVEDTFNRFIKGDLNRKRSGKPRFKSVRRYRTVSIPQLKADCLSVTVNPHRTKNGGTRRDIAYINLPKVGQVKLIYHRPIPEGFTIKAALVSHKADGWYICLTLEDKSIPKFKPSEIEATEDNSIGLDVGLEKLWTASDGEIEPIQQHYRQSEAKLARLANRKDGKPHKSASRRKLAKKISKHHQKLQRKRKQFHYESATRLVSRDEKVFFVEDIKPGNLSRKNKPKQDKDGKYLPNGQSAKSGLNKSINDAGWGQFLSILNYKAAKAGKLVVKVKPHNTSQVCSCCNRVEQKDLSVRIHHCLCGFVLDRDWNAAINIKKVGLGIFPTIKRRKRRFSPERSRRAKTEPQRKPTPYP

SEQ ID NO: 2896 - protein, 414 aa, unidentified
  REGION 1..414: note = Table 20
MRIAYQYRLRLTTAQQTTVDAWLELCRRQYNYRLAERFNWWQQNRCDVNACPLICYLPELKDKPDFYSQKRDLVNSKVLFPEYKELPSHTLQDVIARAEKAFDRWLSGDSHGKRSGKPRFKGQGRFRSIGFPDLAKAEHSHGRFIQLPKIGKVKLILHRPLPDGFKVKTAAIVKKVDGYYLTLSLQDSSVPILTPDIPGIENTIGIDMGLITDTGEEVSIPQPYRQAEKRLKQVQRSLSRKQKGLKRRKKALKRVAQLHLKVANQRKDFHYKIAKSLLNKGKHIGHEALNIKGIARTRMAKATHDAGWGQFLKILSIKAERAGLMAIAVNPNGTTQDCSACGQKVPKTIQDRWPSCPHCGCELDRDHNAAINIRNRAVGHPVLKAQEMPDGMPGVTEKPAQPSDPRRLYAMPAF

SEQ ID NO: 2897 - protein, 374 aa, unidentified
  REGION 1..374: note = Table 20
MESWWEICRQVGNDGLRERQDGVKSRKSPVNACRLGGEYIIPADAPRPTYASQCQAFSCAQKDHPQLKIPQSQVWQQALKPLETVWVAMYRRGFGFPRFRKKGRFRSFVFPQVKEPCIEGNQIDLPKIGKLRFFKSRALPESFVVKQVRVLKRASGYYIILSLPADVEVPQPPMSEHAIGLDMGKMSYLAPSEGELIDNPQLFVKASGKLKSLRQKLKRKQKSSRRWHLIQHPIAKLYEHVTKSRKDFFLKWAHHLCHQADRIFAEALNLKALGRSQLGKFCLDAAWGEFLCFGVAQHKSILSWVGFKRSKYFAKKDSFLLPLRRSNPSRRSSSTSGLESRYRSRYRKYVPHRAEKSSLRVPVARDGLAHSESI

SEQ ID NO: 2898 - protein, 466 aa, unidentified
  REGION 1..466: note = Table 20
MITLTYQYKLKVNRQQEREIVHILDVGKSVYNYALSERKDWLNSRKCLADHCSLVSEYIIPADEPYPNYFVQAKNLTEAKKVYPILKTVNAQVLQQVLKTLDKAFDHIKSKGFGFPRFKKKMRSFVFPALSKSFLGDEYLNFPQLGKIRIRKSREYPSGFEPKQARIIRKASGFYVSVSFQSTELVPDMTVGKTSLGIDAGIESFVATSRGDLIKAPRFWLKVKSKLKLLQRRLKHQVKGSNNWLKLQEKIGRLHEKVSNTRRDWHFKLAHYLCDFADNIFVEDINFVSWSRGIVRKQSLDSGIGSFINEILPFVIWKRGKYYLKVDKNGTSQDCPNCGAITGKKALSERVHRCDSCGHIEPRDTASAKVIENRGKNAVGLTVLENARGGDLTGIDRLNQVDLVKSLRTENLPLHRAPRLAGESQSCLDVITSIGLSNLSSMVNPCLTIFVIVCSAKSGRISRSTT

SEQ ID NO: 2899 - protein, 394 aa, unidentified
  REGION 1..394: note = Table 20
MLNLTYNYKIIPTKEQTEKIELNLTVCQSVWNYALAQRKLWSNSRSCQVNACSIRSEYIVAPFEYPNYHTQSANLTQAKKTNDFLKSGNAQAMQQTLRKLDRAFNDMKSKGLGFPRFKRNMKSFNLVSSRIEVNGNKLKMPLLGEVKFVKSRDIPEGFKIKQVQVIKKASGYSVNVAIELDVNIPTPIPHGHALGIDVGIQSMLATSDGLTLPRPKFLDKALRKIKLLQRRLKNKDKGSNKWQKLQHRIALLHEAVANRRKDYHFKLAHQLCDGVGMVFVEDINFTAWSRGLFCKQSLDMGLGQFFTILQYVCSQTDTYFAKVNPDYTSQVCPECGTHTGQKELSQRVHSCSECGYTVDRDVAASMIVKQRGLTAVGAPVVKQPSHGVLSGTSV

SEQ ID NO: 2900 - protein, 502 aa, unidentified
  REGION 1..502: note = Table 20
MRNMNFCSDNVTEVCPEIMAALIAANEGCAMPYGADEYTQRLEAKFSKLFEAPVTIFPVATGSAANALALSAIAPPYGAIYCHAESHINVDECGAPEFYTGGAKLVTLSGTDAQINPSDLATALEKAGIGIVHHVQPAAVSITQATEAGTVYLPEDIAEIAKLTHDLNLYLHMDGARFANAVASLGCAPADITWRAGVDVLCFGATKNGAMAAEAVVFFNQELAKTFGYRRKRSGHLFSKMRYLSAQLEAYITDDVWLKNASNANQMATKLAQGLVNCPVARLCHPVEANEIFVEIPESVVTGLRADGFEFYVWQEGTLPIIRLVTTSTGKLIKSPKFLLSQLRELKLLQRRLKNKERGSNNWLKLQNKIARLHEKIANARRDWHFKLAHQLCDGTDNIFVEDINFKSWSRGIVRKQSLDSGIGQFINEILPYICWKKGKYFAKVDKNYTSQECPKCGHRQKKKLSDRKHICSSCGYQVNRDVAAAKVIRNRGLIAVGHAVQ

SEQ ID NO: 2901 - protein, 411 aa, unidentified
  REGION 1..411: note = Table 20
MINLNYEYRIYPEPSPEETLLRWLFACRQVYNYCLAERKDWIKSRKSPIDQCSLVNEYIIPAQTKYPDYYYQKRQLTEAKKTNPELKEVPSQVLQEVVGKVDKAFRSFHNRGYGFPRFRKRIRSMVFPQFKTNPIVGNQIKLPKIGDIEINLHRPIPEGFVVKQVQVVNKASGWYVICTIQSEGNIPDPIPDLSYSSLGIDLGFSSLIATSRNEIIDRPKFLIALQSKLTSLQRELKDKVKGSNNWKKACKKIVQLHEYIHRVRKDYHFKLAHYLCDQAKMIFIEAIDFKSWGRGMLRKHSLDFAFGAFVDILTLVAKKRDVYLLKVDKDYTSQTCPNCNTLTGKKELKERVHCCSECGFTIDRDVAAAMVIEQRGLTAVGQTVLQSVEDRGIGAVEKSTARTTRRSRKSK

SEQ ID NO: 2902 - protein, 447 aa, unidentified
  REGION 1..447: note = Table 20
MITLTYEYKLKPTQQQAEQINHHLEICRRVWNDALRERKDWMASRKCPVNACSLRSESIIPADAPYPSFKLQCQRLSEAKRLDKDLASVNAQVLQQVLRRLDQAFDRRKKLGTGFPRFKKPGQMRSFAFPQLGKTPLNNGAVKLPGLGWMAIRQSRPYPEGFMVKQARVVKRASGYYVLLTFQADIAIPEPPLVGPVVGVDGGLEYFLSTSDGLQLERPKFFVGLHRKLKLLQRRLKRKQIGSANWKKAQLKVARLHERIANTRKDFHFKAAHRLCHEADVIVVEDLNLINLSRPQSRHVGQAHAGCRPRTVSDRVAVRSTNSVLPWVGFKRGKAVVKEQAAGTSQECPKCGEAVRKTLSVRWHECPCGCSMPRDIASALVLRNRFMPTAPYREQKRGGAHRAENAPGEVLAGVSFGTSSQDSMNGESPAVRKALAGWASRICFGAA

SEQ ID NO: 2903 - protein, 253 aa, unidentified
  REGION 1..253: note = Table 20
DGWYISLTLEDKTVPVTVAEIQPTENNTVGIDLGITNYAYLSNGERVENPRFLRKSAEKIARLQAKLAGRIKGSKPWRIIKDKVSRLHQFVARARLDFQFKTAHELFSKCDVLVIEDLSVKNLTRRAKPKTDIENGNLVYLPNGQSAKSGLNKSMLDAAHGQFANVLKYVAWKLGKSVLFVDPKGTSQHCWNCLNKVPKELSERWHSCQCGESLDRDENSAKLIRKIGLSYKSGGELRHSKKPLKKRKKKPAV

SEQ ID NO: 2904 - protein, 350 aa, unidentified
  REGION 1..350: note = Table 20
MTQQSDLKQTKQLFPNYKNVWVQSQQVNLQRLNKAWKKWLFPDKSGKRGGRPKFKKSGQMRSFVFPRVNNPKAGAFLENGVLRLSKIGLMPVIMHRPLPVGFNLKQATIVKKADGWYVCLSLEDDTVPSPLPLDEVKSTVGVDVGLKEFLTTSLGETVPPSKPYRTAQNHLARQQKFLSRKHKGSNGYKKLQNKIARIHQRVGRVRENFHYNTAHKLVKRYDLIAVEDLNIRSLARTPLGKSILDVAWGSFINKLEAVAVRCGVHLVKVNPYGTTVDCSNCGAKVPKTLSIRTHECHKCNAVIDTDENAARNILQRALNAVGLMVSAGGSLGDAQPMKPEAWGWNGVQTT

SEQ ID NO: 2905 - protein, 569 aa, unidentified
  REGION 1..569: note = Table 20
MSRIFQSINKSEYFILDADISKCFDQINHDYLLSKIDCPSTMKAQIRQWLKAGVMDNGIFNATEAGTPQGGVISPLLANIALDGMIRLIDLNFPKKGKVQAKVIRYADDFVVISPQLEIIQQCQIVIEEWLKPIGLELKPAKTRLCHTLREIEVNGENIPPGFDFLGWNFRQYPVGKHHAGKSGGAGKSSKTLEFKTFIKPSKKAIKAHADKVKEVIKTHKTAPQYALIKRLNPVIRGWCNYHSKVVSNWSTRKGTSFDVPNKVAFLLKKQKGKCTFCGQYFTPEDIAEIDHIIPTSLGGKDEYKNLQLLHRHCHDIKTSTDGSYNSKEDGWYASIVIEDASVPSPLSLDTVKSAVGIDVGLKEFLVDSEGDAVPIQQYYRKAQSKLARAQRELSRKVKGSANYQKLAHKIACLHQFVARVRKEFHYQVAHKLCEKYDLIGLEDINIKGLAKTRLAKSILDAAWGQFSQILEAVAVKRGNWIVKVNPYGTSQRCSGCGKNVPKALSVRTHECPHCGTVLDRDHNAAINIKNLALNAVGLTVSACGSKRGYSACEAGIFICEEKKLTLYR

SEQ ID NO: 2906 - protein, 372 aa, unidentified
  REGION 1..372: note = Table 20
MLKTYQYRLYPNKTQEAQMNSYLALSCRVYNALLEFLQEEYEQHGKSYSKFDKVSLVDQWRRENKCLQVLSSAMNRDIAHRVHLAYDAFFRRVKAGEKPGFPKFKKARYYRSFGVRQWGNCKILKDGQNGKIRLWDLGEVRCWFHRPLEGKLKTWTVRKTPTNKWYISFCVEVAEQKTAETGKAVGIDMGISSFIATSDGELMGQVDVLRQNLAELKRLQRAVSRKKKGSSRRKEAVLQVARLHERVANQRSWIHHNVARSLLERYDLVVVEDLQIKNMMKNHHLALSISDAAWGNFINILSAKADEMGKIVYKVNPRNTSQECSQCGVVVAKTLSDRVHDCPECGLVIDRDVNAAVNILQRGLIGEEKLSA

SEQ ID NO: 2907 - protein, 245 aa, unidentified
  REGION 1..245: note = Table 20
MARSPSGKWYAAFSCEVEEKPIPDRLPSVGVDFGLNSLVALSDGTVIEAPKKYRKAEKRLGRLQRSHSRRRKDSSNREKTGIRVAKLSERVANQRRDFAYKTARMIVNRYERVYVEDLKIQNMQRNHSLSKSIGDAGWGLLRNALTYMTHMSEGVIAFVNPRGTSQTCSGCGAYVEKDLAVRVHVCPYCGLVLDRDVNAARNILRKGIGMEQPESKPEGEGTSTMLSEGWQAASMKQEASLLVGR

SEQ ID NO: 2908 - protein, 371 aa, unidentified
  REGION 1..371: note = Table 20
MIRTYTTRLKVARKQNTRFEYLLSQLCKIYNMALEQRKDAWMQFHTSLSQYDQHKELTELRVWFPEYEELPAAIERDPLHRLQLAFNGFYRRAKKEENPGYPRFKSATRYDSFSVDSQNFKFDFIKSQISLVGLGTFHYKTHFKIAGEPKQIHVKRCGKRWQAQVVCDIGPAPEKKPVHKSVGIDLGLTTLVTCSDGAEIENPRWAKQEADKLAEANRFLSRKKRNSNNRSKAKENLRRCHQRIKGKRNAYLHEVTQKLIDSYDLIAYETLKINNMVKSHLAKSILDAAWGELIYQLKYKAEETSISTVAVNPRNTSQLCSGCGRKVPKDLSQRIHACPFCGLVIGRDLNAALNILDRGMRSVVFSTRGSN

SEQ ID NO: 2909 - protein, 423 aa, unidentified
  REGION 1..423: note = Table 20
MGKATRNIIFRLYPTRRQEETLARWLDLHRELYNAALQERRDAYRKCGISLTYNEQQNELPAVKEGRPDLVPLGSHALQETVRRVDRAYKSFFRRVQAGKKPGFPRFKGKHRFGSFTWPDPAGWKIVEHERHKGRLSITNLGGIAMRGKPRAALGRGEPRTLTVRHHNGRWYAVISVRYPGTALRRNRAYADRLIGIDAGCTTLVATSDGDLIENPRHLKRARTRLKAAQRDLSRKIRKNGRQKYSRRREKARRKIARLHELVAARRRDHLHQLSAAIVFLYSFIAVEDLDLRNMTRSARGTVEKPGRNVKQKAGLNRSLLDASMGLLFSMLAYKAVEAGGRAGNVIPNGTSQDCFWCKTKVPKDLSVRVHRCPHCGFTADRDHNAALNILYRGLVKTGWEPSEAWSRVAAAVKRETPTTTVV

SEQ ID NO: 2910 - protein, 421 aa, unidentified
  REGION 1..421: note = Table 20
MSKAIRNCTLRLYPTAKQARQLESWLELHRLLYNQSLAERRDAWCEGKRSVSYNEQQNALPAMKEEKPWYLPLGSHALQETVRRVDRGFKAFFRRLKSGQKPGYPRFKAKDRFDSFTYPCVAGWKLTELSSGRGVLAVTNLGHIKLRGTCRVNLLGLDRKQMTCCTIRRNWGKWYTTITYHTTLSALARPVAEDPESMTGLDAGLKSLGVLADGTEILRKRHLNEDVAMIKAASRSISRKMKGSANRRKAVRELSRIHGRVANRRKDYLDKTAAKIVSTTSFLAVEDLAVKNMMAKGGMWKRGLNKSMADAALGRFLIILGYKAEEAGCQFVRVNPRGTTQDCSRCGETVLKTLSDRIHNCPHCGLVMDRDQNAAINILFRGLALAGREPSAVWRDVRLGPKAEQSRRSTKPHQCVMHSCG

SEQ ID NO: 2911 - protein, 506 aa, unidentified
  REGION 1..506: note = Table 20
MQRRKVTLKLYPNAAQAARLEAWTRLHCELYNAALEERIDAWRKAGKSISYYAQQNALPQIKADRPELNELGSHALQQTLRRLDLAFQSFFRRVKAGQTPGFPRFKAAKRFAGFAYPDPAGWKLMQHGGRGATLRIGSGDTALSIRACGLHRFGVEAKPNDITLTRKGGGWFVSVTLRVPDAACARERTADMRRGVDFGISDWATFDDGRTIDNPRWVREELPRLAALQRQRARKKNGSLRFKRLGRRIAQLHDRISNLRRDFVHKETTRMVRQCAVLATEQLAPKNMSRSTRGTVETPGRRVRQKAGLNREILSAGFGMAHPMLAYKAEEAGTRLHLSNTRQLKPSQRCAACWEIVPKTLSQRMHVCPCGHTAPRDQNSPMVVLIDAHNTQDTPGTGVAARPKPLPRQRGKSRPVTRETPATTPCVERRESSWKRPTKPGFANATPVHDPDRPGSGILRVSPSRPHPLVRICNARVQRRQPVDAWRIRHDGRGRDGNRQAIERRA

SEQ ID NO: 2912 - protein, 250 aa, unidentified
  REGION 1..250: note = Table 20
MTLRVPEEACARQRKADRCRGVDFGVTDWATFDDGQIIANPRWLREELPKLADLQRQRARKRRGSVRHGRLGQRVARLHDRIANLRRDFVHQETTRMVQQCAVLATEQLAPKNMSRSARSTEQEPGRRVRQKAGLNREILSAAFGMAHQMLAYKAEEAGTRLHLSDTRPLKPSQRCAACWEIVPKTLADRLHVCPHCGHVMPRDQNSALVVLIDANTPGTGVAARPKPLPRQRGKSKSVTRETLATTLCV

SEQ ID NO: 2913 - protein, 416 aa, unidentified
  REGION 1..416: note = Table 20
MELVKRRITYCLYLTSEQHQLMLEFLRLHCELYNAAVQERRDAWTLRGISSTKADQEKQLVAIKEARPELIPLGGHALQETLRRVDLAFQAFFRRVKAGETPGFPRFKSWKRFSGWTYKSTSSWRFFPGEKKHGVLELDGIGRLRMRGEPRQLGEIKTLTISHKRGRWYASIVIACMPEREHRTAGIGFDWGIERLLTFDDGTGVENPRFLKKSERKLKALGRAASRKKRGSKNRKKAVAKLGQQHERIASLREDFLHQQSAELVGRAALLATKKLAVANMTRSARGTVEAPGKNVRQKAGLNKSILDGAPAAFLGMVRYKAAEAGIALVEAPTRMIKPSQTCPACGRQQKKTLAERVHRCACGCVLPRDQASAQVCLHYALSLSEPGIGPGVEGASPPAKHETATEYAPAYLGER

SEQ ID NO: 2914 - protein, 423 aa, unidentified
  REGION 1..423: note = Table 20
MEEVKPVNRKITYRLYPTPKQEALMIECNRLHQALYNAALEERIKAWRMCGVSVGFADQCRSVTEIRAAQPEYEALNAQSLQVTLKRLNEAFGHFFRRVKAGEKSPGFPRFKSLERYPGWGYKTYGDGWKLAGQTTDQKSGMKHGWLKLSGIGHLKMRGKARTPGLPKTCEILHKQGRWYASVTVACQPHRPCGTQGMAFDWGVETFATLALADGTYGEIPNPRTGKPDADRKTELQRELACKQRRSRNRLKVRRKLARHCARTANRRKDFLHQESARLVKRSALLVTEKLTVKNMTRAPQPKPDPDRPGEFLPNGAASKAGLNREILDTAPATFLNLVKVKAEEAGIDYWEVPTRNVKPSQSCSGCGHQRTKALSERLHHCPRCQLNLTRDRNAARCMLNWVLFGTVHNPTGLERAEVSGTS

SEQ ID NO: 2915 - protein, 408 aa, unidentified
  REGION 1..408: note = Table 20
MHCQRKVEYRLYPRTVAGLELARMADTCRQVYNWALEQRIAHYQTTKKSLTFAAQCRALTQERKLRAAWAAVHTHALQLTLKRLDLAFGAFFRRIKKGETPGFPRFKSSRRFSGFGFKEHGNGWRLHSDGRSVRITGIGKLKLRGKARFAGGLPKTAEVVCRADRWYLSVTYRLEQLPARERAGVALSGLDWGVETFATIANADGSDECIENPRHLKKQLETLAQLQQSLARKTKGSKRWWLVKRAVVRLHDKVRRQRQNFLHQTTARLAATRRAIGVELLSPLAMTASGGQTKQGLNREILAAAAGAFHQMLRYKAEEAGCAIIEVDPRKHRPSQTCSGGGPARQKSLSERTHILPDGSVITRDLNSARNLLNIVLGCEAQWGGNLPQHSGPKTASDTGCETSSIAA

SEQ ID NO: 2916 - protein, 431 aa, unidentified
  REGION 1..431: note = Table 20
MKPPARSAWPLSYTLGVRYVPVKYSVHRRVTYKLYPSPVQAAALERVCDLHRALYNAALEERIEAYRKAGRSIGFADQCKSVTAIRLDDPAYRVLNAQSLQVTLKRLDRAFQSFFRRVKAGQAPGFPRFKGRDRFPGFGFKSHGDGFRFTPGQGWRNGTLHLSGIGEMTARGEARTPGELVCADVQRRAEGWFLSLVVSCEPHRERMGESIAGLEWGVETYATLCTGPMQFGEIENERFLAVEQEALKEEQRALSRALRGKRSKRAAKVRKLIARRSRHLANRRKDLTHQVTARLVRGHATIVTEDLSVRNMTASARGSVEEPGRRVKQKAGLNRAILDTAPGSFLSHLRIKAEEAGCVLVLVDPRRHRPSQTCPVSGEVRKKGLGERTHTLPDGRVISRDQASAWVLWNIGQKLAAGASPETALGAAIAA

SEQ ID NO: 2917 - protein, 280 aa, unidentified
  REGION 1..280: note = Table 20
MSRNGGTPKTMEVLKKGEDWIISVTYQCVAERNSGEHIHAFDWGVTTFLTITNEAQQISVVENPRFLRTASEKIEKVQQKLSRKKLRSNNRKKVKISLSRIHKKVANKCLDFMHKTSCKIVESSKRIITEKLAIKNITKVPKAKIDEFTGAYLPNGAARKAGLNKSILDTSPSQFLQMVRVKAEEAAYELEELETKKLKPSQRCASCSDIVKKNLSQRIHKCHCGFSISRDVNSALVMLKFELGSLKIDEKIETRCRGPALCTGTLSGVLNHETPSIITQ

SEQ ID NO: 2918 - protein, 404 aa, unidentified
  REGION 1..404: note = Table 20
MAMRKVTYRLYPNKRQLAELERHTELHRALYNAALQERIEAFRKNGVSISLGDQSASLTQIRNEDPEYNRLPRKALVHTLERLDRAFAKFFERNRAGLKGGFPRFKSKDCFNGFGFRVHRDGARFDPGEDGRHGRLYVRDIPGLIKARGRPRELGKIKDLCITRKADQWFVVVTMEVEANRTSGGDVFAFDWGVETYVTGLSSNDEVVVFDNDRIGKRHRAKLVRLSQQLARQKRGSKRRERTKLQLSREQRRLANARKDRAHKTSAHIVSRSCVVAFEKLTPSNMTRSVRGTADAPGKNVRQKTGLNREVLDTAPGALMTMIKYKAEEAGVWVLEAPTGKLKPSQRCPSCNAVKKKTLDQRVHSCPCGYEEPRDLASARVVLNWAMEGLGREPVMRDGLALAA

SEQ ID NO: 2919 - protein, 522 aa, unidentified
  REGION 1..522: note = Table 20
MMIASPAGLPVLGPVERKVTYRLYPSKTVWDELLRTRWVHCFLWNLALEERRRAWKEEKRSIGFAEQCRWLTELRSRSALLSSINAQSAQVTLKRLDLAFQAFFRRVRQGEKPGFPRFKQAGRFSGFGFKQHEGDWRLIARERSAHLKLRLSGIGEIPIRGKARTPGEPRTCEIFLSGGRWHASVTMRCRPAREHSCGAEAFDLGTERFLTSARLEPEKSEPDVSEVANPRNLRKALKKLRKLGRTISRKMEAAIRKHGKRKGFRISKRLRKQYELLARMHAKVANVRKDFLHKQSAAMVRRSGLLITEELEPKRMTASARGSRKKPGKRVRQKAGLNREMLDASFGAFGAMVGYKAEEAGIGYLEAQARTLKPSQRCHRCGGVVEKTLGDRWHECACGASCHRDENSALGLLDWGLAKWEKDHGFAFPGPKVVVYGKEWTGTDPCVEREALAGWNLAAGWKSASRAYSGETARREARNSIPEPSGLDGVVHSLEMGHSESKTEEKKKSDKKDKIFSRWISY

SEQ ID NO: 2920 - protein, 251 aa, unidentified
  REGION 1..251: note = Table 20
MNCEPVRECGEKMGGLDWGLETFATVATAQGAETIDNPRHLAGTLDAIRGVQREISRKEEAAKKASGRSRGFPISNRLRKAYDELRRLHRKVANQRHDFLHQVSARLIKEFSALGLEALSIRNMTAKGGQHKRGLNRGILDAAGGAFHQLLKLKAEEAGAWAVEAPTRQIKPSQTCHACGQQEKKPLGQRWHSCPCGASCSRDENAARVLLAWLERSLSGREPADAWREVRPGHPLDESALPSKRETHAIA

SEQ ID NO: 2921 - protein, 466 aa, unidentified
  REGION 1..466: note = Table 20
MPYRKVMYRLYPNATQTERLETMRGLHQRLYNTALEERIRVYQETGKGLSFADQCKVLTQWRRISAGLASLNARKGLSFADQCKVLTQWRRISAGLASLNAQSEQVTLKRLHLAFQAFFRRVKNGDTPGFPRFKSLRRYPGWGYKTHGDGWRLHAGENSVHGKLYLQGVGHIPMRGRARTTGTPVTCEILHKAGKWYASVTLEIETIQRERGTAIGAFDWGLTDFLTLATPMGIETVANPRRLKNQLAELKRLGQEVSRKIRMAQERTGRKKGFPVSVSLRHAISHLARLHAKVARQRQDFLHQTSAGLVKRFGAIGTESLTVQNMVRSGGVRKKGLNREIYAASPAAFLNMTRTKAEEAGSWYEEAPTREIKPTQRCHGPCGPQCGPCGPQCGCGQLRRRRRGRSNPRNAVMGHAAHNVGHAAHNVDAGSCRTRRKRSRTGSTSVRTAVPPVAEMKTRLWCCCVG

SEQ ID NO: 2922 - protein, 441 aa, unidentified
  REGION 1..441: note = Table 20
MPKRKATFRLYPNATEKAALEETLSLHCRVYNALLEEHRRRYEAGETTFSFQAMCKALTLWRECAKSLATLNAQGLQVTAKRAALAFEAFFRRVKKGETPGYPRFKSWKRFSGFGFKTHGDGWKLMQAHCALKRGGRCAGYEYGAVRLSGIGTVSMRGRAGFDGVPKTAEVMRRGDKWYLSVTFDVTENEIRRQGGRVSTAFDWGVTTLLTQVTGDALTGEIEKVENPRWLKKQLGKIVELQQGTSRLETAAKLASGKDRGFPVNARLERLYRRLRAVHGKIARQRHDFYHKLTAAMVARFGLIVTEELSVANMSRAPKPKKNEDGTYAPNGAAAKAGLNRSIQDAAPAGLIAKLRYKAADAGSKFNPIPTRKVKPSQRCCLCGATEKHELSVRRWTCKCGAEHDRDENAARTMLRYAYEGDWWNRKDGAGTVPAAAARAA

SEQ ID NO: 2923 - protein, 403 aa, unidentified
  REGION 1..403: note = Table 20
MNSLIRKVQYKMYPNQAQLESMESLRVHHHQLYCWALKDRISTYKEFGYGLSFSDQCKINTQYRQRRSAHGIFNANAQSEQVTLKRVQLAFDGFFRRLKENRKAGFPRFKQFERFKGWGYKSHGDGWKLSLNPKKHGAVYLADVGIVKIRGQARNERGVPKTAEVLKRQDGWYLSVSFEYPAIQREAGNRAAALDWGLEHYATVVDDTGNVDQIDNPRYLRKSQEKLSELQREFALCKKRSREWKFLKSCISRLHQKIGNQRKDFIHQKSAEIISTSAILAFEELNTKNMTRSAKGTVESPGKRVKQKSGLNKSILDASPAAFYASLRYKAEDAGVLLEVAPTRKLKPSQTCPKCGSVKKKTLSERTHSCECGYSAPRDVASAQVVLNWALGNSQARNEPVAA

SEQ ID NO: 2924 - protein, 412 aa, unidentified
  REGION 1..412: note = Table 20
MENVKRKITYRLYPSKKQGHEMSQILSLHQKLYNAALEQRINVYKSKKISLSYFDQARELTELRKFDEDYKKLNAQSSQVTLKRLDLAFKNFFRRVKNKSARAGFPRFKSYDRYAGWGYATHGDGWRLLAGKKSKNGYLRLSGVGHIKIRGQGKHVGLPKTCEIQHKAGKWYASITLECSVTRSIGENAIGIDWGLESFATVVNDKGTSSMIANPRFLKKELKQIKTRQRNLSRKKRGSNNRKKACKIVAKVHAKIANKRKEFLHQTTAKIIKDSALIAVEKLNVKNMSAQGGSHKKGLNREILSAAPGMFHQMLKYKAAEAGTEWIEIPTKQVKPSQTCHGCGKQEKKTLAERIHECVCGVRCTRDENAAQVILNWALFGNATGQELAGCGEVALVASMKHETPPTAALAA

SEQ ID NO: 2925 - protein, 437 aa, unidentified
  REGION 1..437: note = Table 20
MGTMARRRVTYKVYPNKQQEELLENTRRMHCDLYNAALEERITAYRRRGISVKKADQEKSLTQIRQQDPLGYGAINAQALQGTLKRLDEAFQHFFRRVKEGREAPGFPRFKAGRRFKGWTYKAHGDGWRVFPGADWKHGRLRLSGIGTMQIRGKARTQGAPKTCTITKKIDGWYASVVIECQPRRDHDQDAHDAMTMDWGQETYATLVWGIEDDEYEELANERFWQSEKDKIIEKNRELSQAILDEYNALPKEEKKQWKKPSKRHRRKRRELARAHRRLSNRRKDRSHKTSAYIAKRCKRFGTEKLTVQNMTRSAKGSVENPGKNVRQKAGNNREALDTAPADLLKMIRYKVEETGADYIEIPTRQVKPSQRCPVAWTCEKKELGDRKHRLPDGRVIGRDHASGATQLRWMLAKSGQSIPWVGCRPLDSPGNSHPEP

SEQ ID NO: 2926 - protein, 406 aa, unidentified
  REGION 1..406: note = Table 20
MDKRKINYKLYPSQSQSERLLESLRLHQQLYNAALQERIDCYRKTGKSISYNDQQASLTQIRADHPEYKAIPVYITRMTLRRLDKAFKAFFERVKKGQAPGFPRFRSLSRFSSFEMCGGSGWAFIPEANGKHGRLSINGIGRIKARGKARTLGKVKTSQVIHKHGQWFLSVTVECEPVRACKGQKACGFDWGVEYLGTVTHENGEHYAIENPRYYRDSKESLLPMQQAVSRKKRGSNRWKRACKVLTQARAKVARQRHHDHHQLSHDLAKEYTLFATEKLTIRNMTRTAKGTLEKPGKMVKQKSGLNREILDTAPAKLLAMIHYKVEETGGEFVEIPTRKAKPSQRCPACWEVVKKTLSERTHQCDCGCTMPRDAASGLVAIKWALGLGGNSPNAGHSAKPLLSVA

SEQ ID NO: 2927 - protein, 429 aa, unidentified
  REGION 1..429: note = Table 20
MQTRQAQIPYRDGLASVRQVRYKLYPTPAQLEVLERWNGLHCDLYNACLQQRRDAYKKGKSVGYYDQQNELPALKAAIPEYRSLGSHALQETVRRVDRAFQAFFRRVKRGEKPGYPRYKSRKSFVGFCYPDKAGWKFERGPNGKHGVLHLSNLGPIKARGKPRQWGEPLRVTLTRTSHGWYATVALRCQPARKTGNIAVGIDLGVEAVATLSDATRVENPRFLKQASNKLRGLQRQLARRKRFGSNWKRTKHKIARLHLKVANQRNDFQHKLTSLWVSRYGLIAIEELRVKNMTVGGGSRKAGLNRAILDVGMWGILQKLAYKAEEAGTRLVEVPTSRVKPSQTCPICLRQEKKPLAQRVHRCPCGCEMHRDQAAALVMLRWAIHPWVHSRQAVLQGIYPWEPGGGEGPKSGSVEPRNPDHAGIAVGRG

SEQ ID NO: 2928 - protein, 384 aa, unidentified
  REGION 1..384: note = Table 20
MYNAAVYNRKTQYQKLGKSVDYFEQQNSLPAFKEVWTEYKELGSQALQATLKRVDFAFQRFFKGLGGYPKFKSIRHYSGWTYPAKPGWKAPITGDNAYLELSNLGWIQMRGKPRTWGTPNTCTICYRNGKWYASITVQCQPERELGQGVIGADFGCKTAVALSDGTKIEAPKFLATAQKQIRKLSKQLRRKRKPEKRKIKASRRWKATQRKISKVKRKAANQRQDWVHQVATDITRCHSIVVTEKINLKGMTRKAKTGKRKRQKSGLNRSLLDVGIGMLKSAIEYKLVEGNGFYVEAPTRELKPTQRCAKCWKLTPKTLSDRMHVCSNPNCGHIEDRDVNSAQVCEIWVRSHELASLVADGSSSTSCGSMKQLAQAKRQKPRPS

SEQ ID NO: 2929 - protein, 468 aa, unidentified
  REGION 1..468: note = Table 20
MVTLRQTFRLYPTASQKNKLFYARSLHQLLYNACLAHRRYEWKVNRKSVGYLDQQNILPAYKDCWPEYKGLYSTSLQGTVKRVDLAYNSFLKGLRKFPRFKSIRDYSGWTYPSTSGWKVNSNGKHGTLVLNDLKIQIRMRGKAKHWGKPTTLTVVYKPRLNQWFASITVKVDVPEPKYGSESDLNYESVVAYDLGTQTAITTFDGSEFNEIKNQRFTRALEPLLKTAGKDKRRKRAPNRKQRVKPSSRWKKANKRESQIKRKIGNQRKDWQHVLMQSLMGETPKTALHRKVTSDLSSRYDIGVTEKLNTKGMTRKAKKGSKRKNQKVGLNKSILDVGFGSLNKMLSYKIELKGGIVLYLPTKQLKPSQRCPKCGKIHKHWANLSNRYHVCDQCGFRLSRDKTSAMVMYNAALGNQPGYGNDLDKRGFPSSTSKTSKHTGSMKQLGKMKRQKSRSSDGSAETPSLYRAG

SEQ ID NO: 2930 - protein, 429 aa, unidentified
  REGION 1..429: note = Table 20
MVSRRCLRAMARPSRLNGERRVGIHGPSPAPTTNERAFMASESKLVSRTVSRKAYLSKAGHRNLGELLAQLTWLWNIALHRRKQAWIERAESVSYYDQCKVLTKVRRDPLWSRFPVMAQRSALQRLDRAYKRFFDRVKAGGEKPGHPRFKPGDRGIRSFEVTTPVKTNGRWSWVNVKGMGRIRFRGRPPDGRIGLIRVCRTARRVKLQMVVEREVEVAPDRRPMVGIDMGIRARCALSTGETVPGVKLDRRELKRRQRRLSKAKRGSRNRRKRKAELAREWQRVREREHGALHELTAAIVRDYSANLAVEDLRIPNMVRNRRLSRSIHEQQWGAIVRMLGYKAESAGGSVTAVAPHHTSRECSGCARRRDMPLAVRVYRCTECGLVLDRDVNTARNVLQRGLAALNPGGDTPGCAEPTGRAGAVLPASA

SEQ ID NO: 2931 - protein, 434 aa, unidentified
  REGION 1..434: note = Table 20
MTRSTHRTFRFPARLSRTGHARLETVLGLLCDLYNAGLEHRVGAYHRQRQSVSYFDQCKQITALRREEPEVSAIDVRVLRSPLNRLNKAFGAFFRRVRNGEKPGFPRYRSKRRYRGFEIDDRPQSVIKRNGNRGRVRIKGLPPIGFKIRRELPELERLQTVRVVRTARRIEVQLVYRIDVPEPIGIEQVRHPVGIDWGVASRLTLSTGETVAARKIDRSATRRLQRKLSRAKRGSNSRRKRRMTLARIWQRARERNRGQLHELARTLVSRFDAIALEDLRILNMVRSARGTKDQPGSNVRAKAGLNRSIHEQSWATLSQLLVEKAERAGRRVDFVAPHHTSQDCSGCGRRVPKKLSVRTHRCDGCGLELDRDLNAARNVSRRAYGSPPGGTEPGAAGEALSIDAERRTNGCKTLEPGDPGSARPVGPQSCTEAA

SEQ ID NO: 2932 - protein, 382 aa, unidentified
  REGION 1..382: note = Table 20
MSETFRTYQQRGYLSRRGCQRLNQVLAECTDLYNAELQLWRQQYKETGKSDSLFERMKAFTVTRNSDPFWGSVSVDVGRGVLIRMEEARKAFYRRCQAGEEPGFPRFKPYHRYRTVQIEQPTPAMVRLDSLGYAVRIKGLPVVRLRTKRSLPPAANLKTIRVTFRGRRPSVCLTYAVELEPLPPSSDGIGLDMGILHRITTSEGEKIERRRPDREDIARKQRRLSACEKGSNRFRRRRRVLANAHDRARVRDRNRCHEITTDLVRRFGFIALEDLDKPKLTRSDGARKRGLNRAILEQTWGRITQQLIYKAESAGRELVFVDPRYTSQRCSSCGAMVKKGLKERRHVCGCGLDLDRDHNAALNILYKALAGGVFPAAAGEAA

SEQ ID NO: 2933 - protein, 392 aa, unidentified
  REGION 1..392: note = Table 20
MDLPHSTTIHRTYQVRGYTSASGHARVREVLRVCQQLYNRALGECRAIYRLTGKTVSKYTQMKWLTTWRRESQKLGDIDVRVARGALVRLDRAYQAFFRRVKAGEGFGLPRFKPIQRYRSIELSAVRPGMVKGNKIRIKGLPLIRIKPSRPLPDAELKGIHLVQNGKILSVNLVYAEAAQPPPASERAVGIDMGVNERMTFSTGETVARRTPDRARERRLRRAVARKQKGSKSRRKAVETLARHKRKEAVRNRNDCHAITSALAAQYGLICIERLRINNLTASGGTRKRGLNREMLGQTWGVIRQQLSYKAEWAGRQLVEVDPAYTSRTCSECREVQPKPRVYRLFRCSGCGHVEDRDVNAARNILERGRGFAAGGATVEVVDSCRAAGNIS

SEQ ID NO: 2934 - protein, 419 aa, unidentified
  REGION 1..419: note = Table 20
MGIIYENNTRKNMLLYKLVIQYTTYSVRCSLSPAGYRHLDNILVRLNWLYNQALEERKTAYAERKETLRLYDQHKWLTGLRARNEQGLGEIALGPARGMLKRLDEAFQSFFRRVKAGQAPGFPRFRPLSRCVTIDLTKISGGTVKPRGGHYELQVKGFPRIRLYGSRELPDAVAKSVRLTKRGRHWEASLVYAVERAALPASVKAVGIDLGVRKRMTLSNGKRYQRATRDRRRKRRLQRAVARCRKGSQRRRKRVRALARFQRREFVRERNACHRATTEIIRDYGLVAVEQLQVAKMTRSARGTEEQPGRNVAAKAGLNREILSQNWSLLRRQLEQKAEWAGREYVEVDPRYTSQDCSRCHARNKPRAAETYRCRACGLVEDRDVNAAINILAAGVIAAGASTWAVGPCVAPESYARAA

SEQ ID NO: 2935 - protein, 412 aa, unidentified
  REGION 1..412: note = Table 20
MGKHTTARTYQVKAQLTREGHRRLDAVLRMSARLYNAALQERRDAYRMAGVSISKYDQTKQFTLVRGDDPAWAALDVQVGRSALFRVDRAYQAFFRRIKAGDKPGFPRFRSSRRYRSIELTDAGSRSWLTVNGDRAQIRVKGLPTLRLRPHRPLPAGQPQAVRITRKARGVYVDLVYGHDDPPTSGALPANPIGIDMGVAKRVSLSDGQTVAGVEIDRRRLRRLQRRVSRAKRGSNGRGRKVAALAREWQRVADAERGKAHQLTAALVQQYDFFAVEDLQIPNMTRSAAGTPEEPGQNVAAKSGLNRSILAQSWGRVLSQLEYKAASAGVPLVRVNPAYTSQGCAACGVVDGESRDGQSFRCGHCGYAADADVNAAINILRRGLDAAFGPAGSMPARAAGCQQPRPLGPVRA

SEQ ID NO: 2936 - protein, 394 aa, unidentified
  REGION 1..394: note = Table 20
MIRTYKCRAKLSRSGHETLSRVFQMCADLYNACLEERIDCYKKTGKGRSYYDQCRALTEVRADDPEYESISVQVFRGVVGRIDKAFQSFFRRVKAKEKAGFPRWQSKYRWHTIEINDQCWRMLKSEGDKTVLKIKGLPRIVVKPSRELPPNGLLKAVRITRKPLRTEVALSYKLPDVETVKGTTRPVGIDVGISKRLALSDGEKVAKREIDRKKLVRLQRSMSRKVKGSNNRRKAASLLAKEWQRVTDKERNYLHRLTAELVKMYDFIAVEKLETKNMLRNKQLAKNISEQAWGRFITLLNEKAESAGVKMVRVNPKNTSQKCSSCGATVKKNLSVRTHKCSCGLEIDRDLNAAINILHRGISIAGGNLSRMVGRMETKQGSGLVRPRTVEVTV

SEQ ID NO: 2937 - protein, 416 aa, unidentified
  REGION 1..416: note = Table 20
MSAELYNACLESWRGTYRWWREHHPGPDERFPRDLQMSRYDLMKEFTGVRKDRLEWERLAVQVGRGVLCRFDRTVRSFYQRCEQGGNPGYPRFKPSRRWRTIEIPDAAPSMLSAPETPRNHRAKWWKLQVKGLPRLRFRDKGRRLATALEGGGKAVMLRIVRTPLRTELQVVIRHPDRDTGSESLEPSNPVGVDKGLSYRLTLSDGTVVAARVADMSRIKRAQGRLSRSKKRSRSRRKKALAVAKAHRREQERATQADFRLAHRLVSAYDGIAVEDLNVAGLLRTKRFSRKMSEQRWAALSRILEHKAEKAGVPFVRVNPKNTTTDCSQCGHRQTMPLSQRTFHCQACGLCLGRDHNAAINIGARAFGPGSGGTTPDAMRPTNLRCNTDTASGRRSANGHRRTVSPSVDKPVNPGI

SEQ ID NO: 2938 - protein, 403 aa, unidentified
  REGION 1..403: note = Table 20
MAIRVHSRAAKLSSSTHRKLNRFLFLSRQLYNAALDERINAHRKAGESIGFYDQCKSLTEIRRDMPEFANFNATAFRSVLNRLDHSFKRFFAHGGFPRFKGRNRGIRSFEVPAGQFRIRQSGKRHAIHIKGFGRFVVRDVPEGTIRLVRVVQTPIRVKLQFVTEYNHPSIQVDTPFTGIDLGVEKQATLSTGESLPKIVIDDTRRKRLQRRLSKAKKGSNGRAKKRLALAREAQRIAERQRNAIHRITTGLVRKYGANWVVENLNVKGMTASGGNRKRGLNRNILAQQWGTFVNQLVCKAERAGGEVRRINPAYTSKTCSECGTVNETLKLSDRTFDCLACGHSLDRDLNAAINIRNKVYVSLPGGDTPGARPDVVSIGEVSSRTAQNSMEGVCRSLAVKPSI

SEQ ID NO: 2939 - protein, 455 aa, unidentified
  REGION 1..455: note = Table 20
MALMLTHRVRAYPTKAQHARLADSLEHTRQIYNAALQERVDCYAKTGRTVGVYEQNRELTELRQDPAYARYARRMQCWALNLVDRAYKAMFTRHRKGKKLGRPRFRGRDYWNTLGLNSPIQVRMTARGLKAAGVFGGTLRLRPDRPLPPWSACKALTLSRDGERWYAHLTYEEEGPVSREGAPNRPLGLDFGLKCLAVTSDGARLDIPRFDRDAAPELRRVNRALSRAAKRSRGRRKIKAQRRRLLARIARRRAAALHRISARVVQHYDAVAIEDLNLKGLVRSGGGGAQGRGVRSSWRDRTPGKLADMLEWKCQREGRRFARVDPRGTTIDCAACGAAVPKTLKDRVHRCSNCGEVRDRDENAARNIRNRAGWGTGGVKLDDRAPATPASVRVCPGNTAAKPETPRASRRTRPDHGGAATPPSILPRAGATLDLFDGTPWARPEPRRRRADGPP

SEQ ID NO: 2940 - protein, 385 aa, unidentified
  REGION 1..385: note = Table 20
MHLSYKYRLLPTRPQHVALGRVLEDQRQLYNAALQERIECHRKTGKGCTYIDQCGGLTEWRREDADAAAMPLCVQRWTLRRLDDAYKAFLRRLKARTGKAGFPRFRGKGCWGSFGFNEFSGIRFDGKRFRFRGVPGGLRVHLHRELPKGKICSCVFTRDAKGWSVCLQVRVEAQEKRSVSTSVGIDLGIKVFAYQSDGVILPNPRVARKAERRMRIRQRALARCKRGSNRRRKVKAELSRLHRKITNTRSTWLHQQSARIANSYDLIAAEDLNVKGMAKHPTLARSIHDASWGKFISMLSYKAERAGSTFITVNPRNTSQRCSGCGEIVPKTLAVRTHSCPSCGLVIDRDHNASLNILQAVVGLGQPNVADYGKRAARNLNEATN

SEQ ID NO: 2941 - protein, 417 aa, unidentified
  REGION 1..417: note = Table 20
MFLAYEYKLKPTRRQREAFEIALEGQRQLYNAALQERRDAWRLAKNRITKFAQMRSLTEIRGDDPAYGALPATLSRWTLQKVDLAFAAFFQRAKAKKGRAGYPRFRGKASWRSFGLSEWSGIRLIDGRIVIKGLGAIRLHMHRPLPDGAIPRSCTITRDGRSWRIAIQIAVPDFIGPHSRAASAIGLDLNVLNRAIDSSGAAIANDRPLANALADLRVAQRAAARRKKGSAGRRKAIERARRLHAKITRSRRTAMHQASAKIARENGVIAVEKLALANMTRSARGTAKQPGRNVRAKAGLNRALLDVAPASFISMVRYKAERAGGQLIDVAPHGTSRDCSACGEPVPKTLKQRIHRCPHCGLTMDRDHNAARNILLRAQAVVGLRDANVDQSDGFPVAHRSCVVPGISFETATALSI

SEQ ID NO: 2942 - protein, 387 aa, unidentified
  REGION 1..387: note = Table 20
MILTWTYLIRPTRAQHRLLEAALERERQLYNAALEERIGAWRKAGKSITKFDQMKSLTAIRSDDPLGPGAGPVTMGRWTLAELDKAMQSFFARVKKGGTAGFPRFRSYARWRTFGLAEWRGIRITGDRLSLKGFDRPIRINMHRPLPLDAVPKRASLTRKGRRWFLNIAIETGAVIETHSGTGGAVGIDAGVESLATLSDGIKFLNAQPGRRNAAAMTRAQRALARCRRGSRRRLKARARLARLNERVANARATHLHKVTAVAARFYSTIVVENLALRNMVRSAKGSVEKPGANVKAKSGLNRSIHDTGMGKLIQLLTYKAERSGGRLIKVNARYTSQDCSGCGARVPKTLSVRTHSCTACGLVLDRDWNAARNVLARGLAKASEGV

SEQ ID NO: 2943 - protein, 412 aa, unidentified
  REGION 1..412: note = Table 20
MLVTYRYKLKPTRAQYARLAKLCEGQRQLYNAALQERIESYKVAKRNASLKGRDKPIASRMENGKLIPGDFTTLRGAPISYMDQCKSLTEIRHADIPDVGDVPPNMGRWTLKGVDAAFSGLFQRMKAGKAAGFPRYRAKSRWRSFGFAEFSGITLKADKLRFKGIDGALRINLHRPIPDGAKIKSAQFTRYDRAWYVTLVIDTPVTEWHPNTGSSIGIDVGVENLATLSNGEVFANARPRSQRERQLRIAQRALARCKRTSHRRQQVRRKLARIHQRIGNARTTHLHQVSANIVRRFEVIAVEDLQLKNLSRSAKGTLAEPGTNVAAKSGLNRSLLDAAPGRLVSMLRYKAERAGGELRMVDPCNTSQDCSFCGTKVPKKLTARQHNCSCGANLHRDHNAARNILARAVQGP

SEQ ID NO: 2944 - protein, 397 aa, unidentified
  REGION 1..397: note = Table 20
MFLQYKFPIEPSRAQHARLASILQLQRNLYNDALQNRRAAFQRGVHLTYEDDTKSLPAYRMANRQHTALPWGINNWTLRCVDTAMTRYRDRLTANPNAGFPRFRSEERWRSFGVHGVRGCVIADGYLTVDGIVGKLRMRMHRPLPADARLARLTFTRRARQWHVAILIDCKVGDQEHKKPGSACGLDLGIEQLASLSDSSLFDDTPRKTTQSSALRRAYRALARCQKDSRRSKKLRERQDRASQRVINLRSTRLHQISAAITNRFETIVVEDLALKQFPRPTRTRRPSDGVGAIAIRENGQVLAEPRPKRLLEMIRYKAEKAGGKVVVVDPRHITQTCNACGSPTSESNDADRHICACGADVPRGTNNAINILARGLSAHAAALGRRVGKVLPNASV

SEQ ID NO: 2945 - protein, 450 aa, unidentified
  REGION 1..450: note = Table 20
MKFIDSPAYLIKDFNHLEDSPSLFQTYKYKLKPTCRQYNALDRVLEQQRLLYNAALQERIQSYRYGQALAAKRGATRPDPKLDDWKQITKLDQFKSLTQIRADDPSGIGEVPTALSRHTIERADLAFQGFFRRLKLRSGKAGFPRFKPMSRWSSFGFQEFSGIRLKESALLFRGMPGKLEVHLHRPIPEDAEIKAATLTKAVDGWWVCFRLKLADTEPREDDQRPVVGIDVGTHHFAALSTGSVLENPRIGRRAARRQRVLSRALSRCRRGSKRRQKARERLARHQAKTANQRRTWLHQTSARLAREHQLIVVEDLTVRNMTRSAAGTVEEPGTMVRQKTGLNREILDVAMSTFVNMLVYKAERAGGRVVKVDPRYTSQDCSMCGYREKKSLSDRVHRCGECGYVDDRDVNAARNILVKGLREAGGVVIPVGLKSTVVHWPEKAQMEISN

SEQ ID NO: 2946 - protein, 408 aa, unidentified
  REGION 1..408: note = Table 20
MLLTYRFKLAPTKAQYAALSQLCEDQRQLYNAALQERVEAWKKQQISITKLDQFNSLSEIRSFDRTYSSVPSRLSRWTISRVDDAFKGFFSRVKRGTKAGFPRFKPRSRWKSFGFSEWSGIRLNDEKLLFSGLTGRLKVRLHRPIPDGASLKACTFTRTGRFWYVAIQMDVPVAEGHAKPETIVGIDVGIEHLAFLSDGTYIENPRIGKAHQRKVRVAQRALTRCKRGSKRRIKVKEKLALLKRKTANARATYLHQASAKITRNYAFIGVEKLNVKNMTGSAKGTVEEPGKNVRQKAGINRAMLDASVSRLISFVDYKAERAGGQMVKVNSKNTSQECFFCESIVEKSLDERQHQCPHCGVDLPRDYNSALVVLKRACKAHGRAMPPRDANLGHQPVRCPGKMVAEAA

SEQ ID NO: 2947 - protein, 432 aa, unidentified
  REGION 1..432: note = Table 20
MERISRLHVNGLLGDCGLSPGPASGHKIGALHAMAHPEDTTIKTFEFKLRINKSFVEACERELEHSRQIYNAALAERISCYRITGASLGYAEQSRHLTEARTLPEVKAHLRKIQQDALDRLDQAFNGFFRRIQNGEKPGFPRFKGKDRYHTFSQQYEKKRPCPIKGDKLRVPGVGTCRVRLSRPIEGQCKQLRITRRVDGWYALIVCEIPKPKPLPKTGQTVGVDVGITSFATLSTGEEIANPRHLKNALDNLKKQQRWLSRKKKGSKRRAKQRVKVARAHLKVARCRKDFHHKISTDLVKRFDAITVEDLNIRGMVKNRHLAQAINDVAWRSFFTMTQTKAESAGRVFERVDPKYTSQICSNCGHRQKMPLAIRIYECDKCGFVIGRDHNSAITIDRAGQARIHARGERRRSKKRERYGSRTQSASLRDKD

SEQ ID NO: 2948 - protein, 438 aa, unidentified
  REGION 1..438: note = Table 20
MKWTRRARRYRRLKSLLLLASMGGGAYIRSMHRTYQYRLLPNKEQREALGRALAQTRYIYNSALDDRIQSYNNKKSASYLGLTYKTLTKFDQMKALTQWRKESFNGVKNDWLGAWVQHGALDRLDKAYQAFYRRVKSGGEKAGFPRFKGKRFWKSLDVPHHIGYQVVGNRVNIKGLGKLKIKMHRPLPEGHKQCGLTLTQDGKGWLVSMRVEIEAAPDKKLVMPENVVGVDMGIKRFVTTSLGEEKEKAVLGAYYDYEREYRKEERQLRLKQRAVERSKKASSTLDGCEGKNLAKRRKAVQRLHEKIARRRKDFHHKLSTILVDKCDALAFEDLRVKNMVRNTRLSKSIHDAGWSAFVNMCDYKADGAGKHCVTVDAKGTSQVCSACGAIVRKDLSERTHKCDCGVILDRDHNAAINIKKRAVDVLARYNSSDGKSGS

SEQ ID NO: 2949 - protein, 351 aa, unidentified
  REGION 1..351: note = Table 20
MAEDTMLWRTYRYRIYPTVRLRLALEAQLGFACQLYNAALEQRRYEWRGRRRSVTLYQQFRELTAVRAAGLGPANMNCSAMRDPIRRLDRAFAAFFRLRDGRLALPGIGQIKVKWHRSLPTSAVVRLVTVRRVAGRWYACFSLRASISRRILAKKLPPVGLDLGIQYFATLSTGEPIFGPRAYRVAMRKLRLAQRRLSRRQKGSCGRRAARLLLARHFERIRNLRYDHAHKLTRRLVSDFGLIAVEDLNVGGLIRGPLAKDVADQGWAAFLTILEYKAAEAGTRLIRVPPGGTSQTCSGCGVLVPKRLSERIHRCPACGLVIDRDTNAARNILRLGLSRQALTWPTGACVA

SEQ ID NO: 2950 - protein, 411 aa, unidentified
  REGION 1..411: note = Table 20
MQRTYRYRLYPTRRQAGALAAQLRFACELYNAALEQRRWAYRRCGKSVGYHAQSAELTELRRQAPGLCPPEGMNCWSAQEVLRRLDRAFAAFFRRVKRGEKAGYPRFRSARRFDTLAWTMKGHAGGVAVTEEGRLRLQGVGCLKVKWHRSVPTEATLGEVRVTRRGSGPRARFYVSICAELPDPPSRPATGQAVGIDLGVRRLVSLSTGEQLEGPRAEREASSAVRRAARRVARRKRGSQRRRKAAALLARRREREANRRRDSAHKLSRTLVERFDLIAVESLRVANMMRSARGTVAEPATNVAQKRSLNRAIADQSWAQMLSFLAYKAEEAGRRVVKVDPANTSRTCSACGAVDARSRSAKRFRCIACGRADDADVNAANVILARALAQEGIERPGRGRQAQTAALAAVA

SEQ ID NO: 2951 - protein, 400 aa, unidentified
  REGION 1..400: note = Table 20
MKGTITVNYQYRLRPTRAQAETLDHQLGLAAHLYNAALEQRKLLWKQRRKALGYLEQAAELKALRREFPEYGALNHTALQNVLRRLDKAFRRFFKSLERGEKAGYPRFKRKDRFRTLDFTYGDGAKLIPDGRGGQVLRLHGVGWVRLVWHRDLPPGAKVKRVWVTKKADGWYATFALEVPSEAVRRPLPPTGKGVGVDVGLENLLALSDGALVDNPHWLKEAEERLKEKQRVLSGKSKGSKRWRRLKAQIARLHQRVARKRRDFYLKLAWDLVRGYDLIAVEDLNLKGLSQGTLAKPVHDAGWGVFLRETLPYIAWKAGREVVFVDPKGTSQTCALCGAIVPKPLSERLHACPSCGHTVHRDVNAAQVILSRARSGPTGVPVGGRSPAPCPYEAGGFSRQ

SEQ ID NO: 2952 - protein, 384 aa, unidentified
  REGION 1..384: note = Table 20
MSFVSSQEFRVYPKQRQADGLDALLADFCGLYNAALQQREEAWKRRRVSLSYEDQANELPALRAAMPDLARWSYTAQQQLLRRVNKAYQAFFRRVRRGEKPGFPRYKARSWFSSAEFRFGDGLTLRTDKKTGRTRLRIAGIDGGMRLFVHRPLRGKPVTAVLTRRVDGWFLIVQCRHDGDVGPQPLLPDLGVDLGFIDLVTTSDGLTVPRERCWAEEQPAVAAHQRAMARRRRPGKKHSQRYRKAARLAAKAQRRVARRRKDRLHKTSRLVVNLAGRLGHEALTVTGLCRGMLARSAHDVALGTLIAMVTDKAAWAGKVTIPVDPSGTSQTCPVCDGRVEKALSEREHRCLQCGYTAHRDVAAAQVVEYRAFGTRPGQGLQHAA

SEQ ID NO: 2953 - protein, 386 aa, unidentified
  REGION 1..386: note = Table 20
MSTVLRNYRYRIYPRAAEQAALWDVLRLHREVYNAALQERRDAWRKCGVSVSYNMQSAQIKEIRAIREDVGELNFTSLQQTLRRLNKSFVAFFRRVRARQTPGFPRFKGADRFRSVSFVYGDGCSLRVEDNGRSAVYFQGIGELKVKWHRPLPEGARIKQAQIMVDGRDRWFVTFALEAPAEAFARTGGTGEIGIDVGLEKFAALSDGTLIENPRYYRVAQDRLADAQRVVARRRRGSRRWRKGKGAVALIQAKTAAQRLDFQHQVSARLVGEFGLVAVEDLNIRGLARGMLAKSVHDAGWAQFISFLKYKAESAGTRVEEVDARGTSQTCPECGATAKKDLSERIHLCPCGCVEDRDVAAARVILSRGQTAWAGPPATVAAQAAA

SEQ ID NO: 2954 - protein, 374 aa, unidentified
  REGION 1..374: note = Table 20
MKRAYQYRIYPTTKQEQALAQLLDVGRRLYNAALEHRLLCWKRYFHSVSYTDQAADLKRMRREDVELGQLNFSACQQVLRRLDKNYRAFLQGIRKRPRFKATDRFRSLEFRFGDGSGLTATRRLRVQNVGVIRVRWHRVLPEQAEIKDVVITRQANGKWFATFRISVPDVTPPVHHGPMVGLDVGLNHIVALSDGAKIKAPRLYRQAEERLTEVQQRYSLHRSRKQRRILTRLHSKVARQRKDFLHKLSRRLVDTYSLIVIESLNIKGMTHETKPGMSKSIHDAGWATLAKMLDYKAANAGSEIRRVDAPHTSQLCSACWCYVPKTLHIREHHCPSCGLVLDRDVNAARVILVRALGWDAAFGPRAEKHPALVG

SEQ ID NO: 2955 - protein, 386 aa, unidentified
  REGION 1..386: note = Table 20
MRTLMRTYQYKLDVPAHVMRDDKEAPGWLASMIRTHCYLYNDALRYKKHCYEKHKDAKGKPLSISYFDLCSWLTSRRDTHPYLSNLPAHSLRLTLKRLDLAYQAFFRRVKQGTEKAGFPRFQSARDWDTIEYPSGWRLDGNWLVLNKIGTAPERRLKIRMHRPIPTGANIKVMQLTRKADGWHVSFQMKVPFEDAPDRTGAPSVGIDMGIKELAHTSDGVTFGKLEPLAKAQAALRRAQRSMARKKKGSANRREAVAKVARLHQAVANQRKDVTRKVSRTLCTDYGMVAHEALNVKGLAKSKLALQVHDAAWGALKERLRVVGEETGTTIVAVDAKNTTQMCSGCGAMPAVPLKLSDRRRECPECGLSMDRDHNAARNVLARALSR

SEQ ID NO: 2956 - protein, 375 aa, unidentified
  REGION 1..375: note = Table 20
MRKAFKYKLYPTRQQEAAMLTMLETHRRLYNRALAERKDAWEQERRSVSYVDQSAQLKIERTTNPYLALTNFSSCQATLRRLDKAFQAFFRRVKAGETAGYPRFKGRNRFATVDFPGYRNGCKLDGDRMYFQHVGRVRIKLHRPIEGTIKTVSFTRQADGWHVVFSCDLGDVHAAPHPGPLAGLDLGLKAFLVTSDGESIKPPKFYRKAEKALRRAQRRVSRRQKGSKRRAKAVQILAKAHLHITNQRRDFHHKTARKLVTQYGAIAHEELNIKGIARTRLAKSTYDVGWGQFLNILHSKAEEAGCVVIPVPAKNTTQACSACEALPETPKTLKDRVHRCTNCGYEADRDLNAALNIKRLGSSRQALTSSVDAVV

SEQ ID NO: 2957 - protein, 380 aa, unidentified
  REGION 1..380: note = Table 20
MLKTYKYRLYPTKKQVNFLTFQLDGHRFLYNAALAQRKEVYEKENKSVNYSGQAVNLLPKLKKENGNMALCNYSSLQQTLRRLDKSFKAFFRRVKAGEKPGYPRFKAADRFNTINYAKLGDGCQIKDDKLYIQNAGYVKVKWHRAITGSVKTLSVIRRNYKWYVMFSVEFESVPLPKTGKRIGIDMGLINLIASSDKKHKDKPDKFLRKSEKRLIKAAQRVSRRKKSSNRRKKARVLLAKTHEKIANQRLDSYHKKSNKLVKEYDSFAVEKLNIKNMVKNHRLAKSISDAAWGLFLSILKSKAENAGREFKKVNPRNTSKTCSVCGSVYKDMNLSVRKWTCPVCNTAHDKDDNASVIILARAEPSVLAAKSAAPPRSRLL

SEQ ID NO: 2958 - protein, 373 aa, unidentified
  REGION 1..373: note = Table 20
MQRTYQYRLYPNQEQEDALDVILRQSCLLYNEALEHRRDVYKHTGQSVSYPAQWERFCEDRKARLEDFGLLNATSVQQLLRRLDKSFAAFFRRLKDDETPGFPRFKPAQRYRSVEYRHGDGCKLTGDTLYVQHVGEVKVKRHRAVPEGCLKHVVLTRKAGKWFVSFQGDDGTEPAPQRTEGKAIGVDMGLHSLLAFSDGTLIDNPRWLRRSLAKLRRAQRALARKTRFSSRWWQCKRRVEALHSKIANQRKDYLHRLTYRMTKSFARIAVEDVSPRFMIANRHLALSASDAAWTLFNSMLDYKAERAGCVVVEVDAKHTSQACSGCGHIEKKRLSQRWHSCRCGTELDRDVNAAVNILNKARCEPTELNVACS

SEQ ID NO: 2959 - protein, 398 aa, unidentified
  REGION 1..398: note = Table 20
MREPAVEVSMMLTYKYLLRPNNHQSDRLAFLLEQHRIVYNHALQQRINIYKETGECIGYDTQCKHFRDIRRENPDTLRLVNASSLQRTLRRLDRTYTSFFRRLQSGEKVGFPRFKARSRFNTMEYTYGDGCKLRTSKRKYVFLYVQNVGEIRICYHRAIPEDTRINHARITRRNGRWYVSLSITLSATPVQRTPTGKPVGVDVGLRRIAALSTGELIENPRWLRNNLARLRRLQRHASRQVKGSRRQHTTYQRIARLYEKIENQRRDYLHKISQGIVKKYALIAVEDLKLTFMNRSRHLARASYDAGFGIFRRMLEYKAESAGIPLIAVSPVNTSQACSGCGRIVPKDVSVRVHQCLHCGLTLDRDVNAARNILMLALQNPPGRGGQPITWADMPSVG

SEQ ID NO: 2960 - protein, 365 aa, unidentified
  REGION 1..365: note = Table 20
KMLDEIFHGHRCLYNKALEQRINAWKVYGLSLKAFGQCKSLNQVRKVKYPKVNCASFQQTMRKPGIAFQAFFRRVKAGEKPGFPRFKPASRFNSIVFRPNDGAGIKNGKLILAKTPPVRIKWHRELPEDAAIKQVRILRKNHKWFICLAAGAGFTAGRQSAGSVAGIDLGINHLAAASDGKFYDSPKFCINAQKELRALQRSVSRKKKGSNSRRKAAGALAKFHERIKNQRADFLHKLAFNLVNKHDAIVLEDLALAFMNRNKHLARSSLDAAMGNFAQMLEYKAESAGVRVVKADPGHTSQVCPRCGQTVKKPLAVRTHRCNCGLTLDRDVNAAINILHRGASLLGDLMCLAAERVSPQAVCFS

SEQ ID NO: 2961 - protein, 419 aa, unidentified
  REGION 1..419: note = Table 20
MMRAYKYRLSPSRLQELAFQHHLDLSRELYNAGLQERRDAYRKSGVSRSFYDQKRCLPEVKEARPEFEEVHAHVLQGTLETLDKAFKGFFSRVKAGSKAGYPRFRGRGWWDSFRYQECSTAMKAEDGTVLGWKWTTCGRPDPDGKRINLPKIGKVKVKMHRPLEGRPKTLVIKREGSEWYAVYTCEVEARLLPPNDSVIGIDVGTRYLYTDSDGRHETNPKLLAASQRKLTRHSQSLARKKRGSGRRTRVKALLGKAHRKVARQRLDHSHKVANHLLAAHGTIVHEDLKPSKMVHEGAGLSRSIHDAAWTQLFQVLSLKAASAGRTVIRVDPSFTSQRCFKCGFICKENRLNEAFACLSCRHGDHADVNAASNIRELGIDPEGYNARSTKGRIGPAAPDHRALRNMSGDVRLPVLPTPV

SEQ ID NO: 2962 - protein, 402 aa, unidentified
  REGION 1..402: note = Table 20
MLKAFAYRIYPTKPQLKGLEEHLNRTRELYNAALQERRDAYKKTGRSVTAFEQMGSLVEVKEGRPEYRRIHAHVLQGVITQLDRAFQGFFRRVKAGEKAGYPRFKSKDRWDSFHFKQVWDNSRDNWFGPGKPVGSNRIRLPNIGDVRIKWHRPLAGRPKTLTIKRDGEHWYAVYVCEVEPQPLPATGGEVGIDLGVNPNFLVTSDGEFVPAPHYYRKAEAKLRRQQRVVSRRKRGGGGRKKAVAALKRLHRKVRNQRKDFHHKTARKLLEANDVVYHENLSAKAMSRSRLSKSILDMGWGQFLNILYGKAAEAGRRVVGVNPAYTSQICSGCGHVQKVPIGKPYECGACGLVIHRDVNAALNILRMGRGVYPSADGQGLPLGESGEVAHARRPQKPPALAVG

SEQ ID NO: 2963 - protein, 388 aa, unidentified
  REGION 1..388: note = Table 20
MPLKTLKYRLLPTRKQAEALEWTLRRCKELYNAALQERREIYTYTGKGTNYNAQANQLPEIKEIREEYKEIHSQVLQDVLRRVDKAFKDFFRRVKNGETPGYPRFQGNHYDSFCYPQSGFSLEQGKLALSKIGHVKINLHRPIQGWVKTCTIKREGECWYVCFACEVETFKRTPYTDEAVGIDLGVSKLATLSTGDVIENPRPYRKAEKKLAKAQQALSRKKRGSNRRKKAVQRVARLHRKVRSQRNDYLHQWSRRLVNTYETIVFEDIAPSNLSRRAKPKQDEDGKYLPNGANAKSGLNKSIVDAGWSMLITFCQYKAEEAGTVQVVKVDPKYTSQVCSGCGTVRKKTLSERWHSCECGCELDRDHNAAINIKNLWLGRSLQEVKAS

SEQ ID NO: 2964 - protein, 368 aa, unidentified
  REGION 1..368: note = Table 20
MRRAFKYRVYPTKAQAAKLGAWLNLCRELHNAAIQERRDHWNNAGISVGFNDQSKRLPSIKQNRPEFAEVYSQVLQQALHRVDSAFQYFFRRVKNGGTPGYPRFKSADRYNSLVWPQDIGFRLVGMKRIRLSGIGEVKIKLHRPVGGTPKTLTVKREAGRWYAVFSCDAVPPRAYPDAVSEVGIDMGIESFATLSTGEKIENARWYRKAEKRMAEAQRALSRKKRGSKRRAKAKRRLARLRAKEKNQRTDFQHKLAHRIVSENAVVVVEDLKPKEMIEKSSTGLSKSIQDAAWSRFLSILEAKAEEAARRFVKVSPRGTSSTCSRCGAFRKKTLSERLHACPCGLVLDRDINASINILRLGRSLQVAS

SEQ ID NO: 2965 - protein, 413 aa, unidentified
  REGION 1..413: note = Table 20
MNTTTVRRAYQYRLYPNKGQTATLDWTLNRCRELYNAALEERHEAYRMCGVSVSYYDQKRQLPAIKEVRPEYTRIGSQVLQDVTRRLDKAFAAFFARIKEGAQGKATGYPRFKGKYRYNSFTLSQCGWKLPALDRGRLYVAGIGHLKLKWSRPIEGMIKTVTIKRDADQWYVTFSCEVEIERPPTPDRPAVGIDMGLEYYVTLSTGEHIENPRYYRKAQATIARRQRAFERTKKRVKLKDGTYRYGKNRARVGIALKKAHRHVANQRRDMQHKATRKIVAEYGAVAVEALSIDNMTKRPAPVKNDNGAYAPNGASAKAGLNKSIQDAAWGQFLSILRVKAEEAGLVYVAVNPSGTSQHCSGCGAKCPKTLSERWHACAACGLSIQRDHNAACNILTRAGLAHSVVGTGESHSL

SEQ ID NO: 2966 - protein, 388 aa, unidentified
  REGION 1..388: note = Table 20
MYKIGSVKAYRYKLRPSKRITQVFEETLNVCRELYNGALQERRDAWRINRVSLNYHDQRAQLPEIKLIRPDLNALYSQVPQDVLRRLSKTFDAFFRRVKQGQIPGFPRFKGKSRYNSFTYPQSGFSLSGDKLTLSKIGSVRLRLSRPIEGKIKICTIRREADGWFVIFTVEENQCRYFPKTNDTCGNDTCGIDVGIENFATFSTGAIIENPQYLRRALTQMKIQHRKASKKKRGGSNRGKAARILAKTHLHVAQQRKDFFHKRSLDLIREFDEIAVEELNIRGMVKNHHLAKSISDAAWGSFVLILTSKAENAGRRVWRVPPQFTSQDCSKCGERVKKSLSMREHRCPGCGYLAHRDVNAAQNIKARIAPFARVKVTSPDDQRIPVHL

SEQ ID NO: 2967 - protein, 399 aa, unidentified
  REGION 1..399: note = Table 20
MKRAFKYKIKPSKAVERKLDATLDTCRELYNAAIEERRSAFNTSHTCITYKNQQNQLPDIKKIRPDLVYIHSQVLQDVLKRVQLAFEAFFRRVREGDNPGYPRFKSKDRYHSFTYPQSGFKLEGNKLWLSKLGTMQLAMTREVCGTVKTVTIKREGKDWFVIFTCETEAQPQAATGRVKAIDVGLEYFFVDQDGQVEENPRFYRKSEKKLAHAQKRLSRKKKYSKHWKQAKEKVARIHRKIANQRKDFLHKLSTRIIKENDIIFFEDLNISGMMRNHCLAKSIADASWGMFLWMLVYKAEGAGKRALNVNPNGTSQICSGCGNRVPKGLSERWHRCPYCGLELQRDHNSAKVIYARGIELLPAVGQTEVARGGLGVPESEKRESVKGCEDDKSSLPSHS

SEQ ID NO: 2968 - protein, 373 aa, unidentified
  REGION 1..373: note = Table 20
MFNTLAVCRHFYNMCLEDKKLAYQREGRSVSKSEQEKMAICYRQTFPQAKSVFSQTLQTVVDDLDKAFKAFFRRVKAGETPGYPRFKGRNRFHSFAFKQFGVGAKLDGRRLKLFGIGRVAVRWHRPVEGRIKAVRIVYKAGQWFACFACEVPDKPELPKTGRAIGIDMGISALLTTSDGEKVDHPHFYREGQKKLRILQRSLARKKKGGKNRRKALLQVQRQHEHVKNQRSDFAHKLSYTLVQSYDRIACEDLNIRNMVRNHSLSKSILDAGWGVFKQLLTNKAVDAGRQVVFVDPAYTSQCCSNCGKRFQDFDLSTRWVECACGLSLDRDHNAALNILNRAGWDTSVLPNVAPLPTPQGNGKRKRAVEAARL

SEQ ID NO: 2969 - protein, 540 aa, unidentified
  REGION 1..540: note = Table 20
MRRVPRLRVSTRPFSSGALVPRVECPDPLDRESRRDERRIHLVVDHLIGCPTRRKPVLVGDGARDCRALSEAGCHDHGWTIEDSAIQPDHVHLFIRAWPKDSAADVLEAVQGVPAHELRAKSPHLRETPSLWTRPSFASTAGNVSQGTIRRSVEAQEGMEMFQAFVSRLDPGASHRRRPEAVRETCRRFYNTPLRRRKDASELRGVSITKTEQPRPVEVEKDTSPYASGIHSHILRAVVADLDDAPRASFRRVEAGEEPGYPRFKGRDRFAGFGFKEYGDGFTIDGRRPKLSGIGRIAVRWHRALEGTIETARISCRAGKWSVSLACAVEGPGPLPETGKEIGVDVGLLRLATLSDGAPVEGPRWYRTIPRELRVPRRKISRAVLGGRDRRELVRRLRRSPAEVANARKDFLNKFADELIKRLDRIALEDLRVAAPACGRFALSILDAGRSYLVSRLAHKAESAGREVVLVDPASTSKTCSGCGRVFEHLSPSDRWISCACGVSLDRDHNAAINILQRGRNRPMGAKLSAGRVCPEAAPL

SEQ ID NO: 2970 - protein, 234 aa, unidentified
  REGION 1..234: note = Table 20
EVKTLTLKNENGKWYACFSSILDSEPLPENNDAIGIDVGLESFAVTSDAEIVDNPRWFRAAQKELRRKQRHVSRCTKRSSGWKRACRRVAKLDRHVFQQRNDFQHKLSRELVNNYGIIAVEDLNIQGLAGGRLAKSIHDAAWSGFIRKLSYKAESAGRWLVKVNARGTSQQCPCGRAVPKRLWDRKHHCSACGFKTIRDHASALEILRRGLRLRTETPALAGVALEAPSFSYGE

SEQ ID NO: 2971 - protein, 366 aa, unidentified
  REGION 1..366: note = Table 20
MLKTFRYRLVPNKTQRDKLQRTLDSCRFLYNCALEQRRSQRLGIYEQKRQLTEVRHSFNEYKDIHVHVLQNTLFKLDRAFQAFFRRCRNGEKPGFPRFKNENGFDSFAFNNTGFKLQGKILSLCKIGNVKVRLSRPLPKDSTIKALTVKRVCGAWYACLAVEYTPTPLPASDKAVGIDLGLESFAALSNGERIGNPRFLEKNARELRRAQRRVARRQKGSHRRRKAVLRLQKVHERIRNRRLDWLHKRSTELIRKYGLIVAEELHIRGLAQGVLAKQVLDAGWATFLDMVSYKAAEAGRRFEKVEPKYTSQTCPACGAVKKKKLSERMHRCDCGYQIHRDIAAAQVILGRICPLGANVAEVVASVA

SEQ ID NO: 2972 - protein, 401 aa, unidentified
  REGION 1..401: note = Table 20
MFVPRVHMTEIRTMEIRLYPNKTQERTMLDTIGHCCFLYNHLLEHCRNAFAESLRHPTEYDMNKEITAFKKERPELITVYSRVLINVSTRVSLAFKGFFRRLATKTEHAGFPRFRSFSRYDSFTYTQSGFSLENGRLKLSKIGTIRIAGLRKMFGRLKTCTVKREGIGPHYRWKACLTYECEEIKTSFLEDTRESVGIDLGLETVVETSSEYSFVNPRHLRKAEKTIAAIQRRMMAFEKGSPGWLKYKQRLYHAFTRLRNIRKAERYGIVNYLISKFSLIAVEDIDVEKIQEKALGKGMRKSYSDASWAMLTDTLCTKAAEAGCTVVKVRPEYTSQRCSACGRLVPKTLSERRHVCTCGADMGRDKNAAFNVERLGLQALQLTRCRMEILGHSGRSQWGNP

SEQ ID NO: 2973 - protein, 363 aa, unidentified
  REGION 1..363: note = Table 20
MSKDIRALKVRLYPNREQERILLNTLVQCTELYNSLLDHCKECHENGGKHPSAYDMMKLLPPMKRERPIMKTVYAQVYQDVCLRVSRAFDGFFRRVKEKKEDAGYPRYRSLSRYDSFTYPQSGFILSKDHLILSPGKQRIRIRGYRKMDGRIKTCTVIRKGCGPDYRWEAAITYETEKRNVDDIAAAKGGRSIGIGMGLSKLIVTSEGKEYPNGKEFIKAERQLSKILRKMSRYEKGTPERERYRQRLFHAFENIHNKRKGKIYEIVNELIERYDMIFIEDLEIRKMMDNSKGKGMRKSYRDAGWRKFLFVLGYKAEEAGVTVRTVDPAYTSQRCSECGTLVPKDLSIRRHQCPCCGLDVDRD
